United States Patent Application Publication US 2019/0348154 A1 - sequence listing, part 126

SEQ ID NO: 477023 - DNA, 807 bp, Shigella flexneri
atggtctgccagatggaactgaccagccatctgctgacggctgcagccttcggcacgatgaagaacagcgaaaatgagcttgctgagcaacttatagaacaaaccggcgataacactctgacgttaatggataaaggttattactcactgggactgttaaatggctggagcctggcgggagaacaccgccactggatgatacctctcagaaagggagcgcaatatgaagagctcagaaaactgggtaaaggcgatcatctggtgaagctgaaaaccagcccgcaggcacgaaaaaagtggccgggactgggaaatgaagtgacagcccgcctgctgaccgtgacgcgcaaaggaaaagtctgccatctgctgacgtcgatgacggacgccatgcgcttccccggaggagaaatggcggatctgtacagtaatcgctgggaaatcgaactgggatacagggagataaaacagacgatgcaactgagcaggctgacgctgagaagtaaaaagccggagcttgtggagcaagagctgtggggtgtcttactggcttataatctggtgagatatcagatgattaaaatggcggaacatctgaaaggttactggccgaatcaactgagtttctcagaatcatgcggaatggtgatgagaatgctgatgacattgcagggcgcttcaccgggacgtataccggagctgatgcgcgatcttgcaagtatgggacaacttgtgaaattaccgacgagaaggggaagtgaaccgccccgggaatcctggagactaaacttcctgagaaagaggtaa

SEQ ID NO: 477024 - DNA, 138 bp, Shigella flexneri; identical to SEQ ID NO: 474566

SEQ ID NO: 477025 - DNA, 360 bp, Shigella flexneri
atgcgccatgagtttattttaccttatccgccgacggtgaatacttactggcgacgtcgtagcagcacatattttgtatcaaaagccggtgagcgttatcgccgggatgtggcgcttattgtccgtcagcagcgactgaaattaagcctgtccggaagactggcgataaagattattgcagagccaccggataagcggcgtcgtgacctggacaatatcctgaaagcaccactggatgcactgacacatgcggggttgcttatcgacgacgagcagtttgatgaaaccaatattgtgcgcggactgcctgttcctggtggtcggttggggataaaaatcacagagctggagtgtgcatga

SEQ ID NO: 477026 - DNA, 690 bp, Shigella flexneri
atgaataaccagtatttacagtttgttcgtgagcagctcattatcgccaccgctgatttgagtggggcgacaaaaggtcagcttgaagcctggcaggagaatgccatgttcgatacagggcgttacaggcgtaaaaaaatccggtaccgcgatgaagtgactggaaaaatgataacgcgggataatccaccaatcccgggaaagcaatcgctggcgaaggggacgtcaattcctctggtcagtccggttgagttttcgacatcatcgtggcggcgggctgttctgtctcttgaagagcactataaagcctggttgttgtggtgttacagcggaagtatttgctgggagtatcagatcaccataacccactgggcgtgggaagagtttaaggctcattctggcactaggaaaattgcagagaaaacacaggaacgcctgaaaaaattaatctggctggcggcgcaggcggtaaaagcagaactttttggtggggaaggttatgaatatcaggagctggcattactggcgggagtaacaaccaaaaactggtccaaaacatttactggtcactgggttgtaatgaaacacatttttcaccgactggatagtgaggctttattgtttgtgatgagaacacgttcagaacaaaaagcggcattttcaaagcaaagtattgcaaaagtagattaa

SEQ ID NO: 477027 - DNA, 585 bp, Shigella flexneri
gtgagcaaattgatcttacccagcaatacggtcagttaccgcgcacatggcctgcctgtgtcagaaaatctgctggagcaggatttttacgccagtggtccgaaccagaagtgggcgggagacatcacgtacttacgtacagatgaaggctggctgtatctggctgtggtcattgacctgtggtcacgtgccgttattggctggtccatgtcaccacgcctgacggcgcaactggcctgcgatgccctgcagatggcgctgtggcggcgtaagagaccccggaacgttatcgttcactcggaccgaggaagtcagtactgttcagcagattatcaggcgctgctgaagtggcataatctgcgtggcagtatgagcgcaaagggctgctgctacgataatgcctgcgtggaaagcttctttcattcgctgaaagtggaatgtctccacggagaacactttatcagccgggaaataatgagggcaacagtgtttaattatatcgaatgtgattacaatcgctggcgacggcacagttggtgtggcggcctcagtccggaacaatttgaaaaccagaacctcgcttag

SEQ ID NO: 477028 - DNA, 267 bp, Shigella flexneri; identical to SEQ ID NO: 462029

SEQ ID NO: 477029 - DNA, 834 bp, Shigella flexneri
atggtctgccagatggaactgaccagccatctgctgacggctgcagccttcggcacgatgaagaacagcgaaaatgagcttgctgagcaacttatagaacaaaccggcgataacactctgacgttaatggataaaggttattactcactgggactgttaaatggctggagcctggcgggagaacaccgccactggatgatacctctcagaaagggagcgcaatatgaagagctcagaaaactgggtaaaggcgatcatctggtgaagctgaaaaccagcccgcaggcacgaaaaaagtggccgggactgggaaatgaagtgacagcccgcctgctgaccgtgacgcgcaaaggaaaagtctgccatctgctgacgtcgatgacggacgccatgcgcttccccggaggagaaatggcggatctgtacagtcatcgctgggaaatcgaactgggatacagggagataaaacagacgatgcaactgagcaggctgacgctgagaagtaaaaagccggagcttgtgaagcaagagctgtggggtgtcttactggcttataatctggtgagatatcagatgattaaaatggcggaacatctgaaaggttactgcccgaatcaactgagtttctcagaatcatgcggaatggtgatgagaatgctgatgacattgcagggcgcttcaccgggacgtataccggagctgatgcgcgatcttgcaagtatgggacaacttgtgaaattaccgacgagaaggggaagggccttcccgagagtggtaaaggagaggccctggaaataccccacagccccgaaaaagagccagtcagttgcttaa

SEQ ID NO: 477030 - DNA, 285 bp, Shigella flexneri
atggaataccggacctggatcactgaagctttacgccttcatttcgaagaacatttaccacgggttgtagccggacgtcgcctgggcgtaccaaaatcaactgtctgtggtatgttcgtgcgcttccgcaacgctggcctttcatggcctctgcccgcaggtatgtcggagcaggaacttgatgcccttctttacgaaagtgcctccacagtacctgtcgtacttactgaaagcaccgttatgcccaaactcccggtggtaaaaaaacgtccccggcggccttaa

SEQ ID NO: 477031 - DNA, 495 bp, Shigella flexneri
atgcagttcggtaaaagctcagaaaaacttcgcgcaaaaaccgaacggtggatacaggaagcacaggagcgaatcagcgcacttcaggaggaaatggcggaaacactgggtgagcaatatgacccggtactgccatcttccctgcgccagtcttcagcccgtaaaccgttaccagcctcacttccccgtgccccccgggtcatccggccggaagaggaatgctgtccggcctgtggtggtgaactcagtccactgggatgtgatgtgtcagagcagctggagcttatcagcagcgcctttaaggttatcgaaaaacaacgccctaaactggcctgtcgccggtgcgaccatatcgtgcaggcaccggtgccttcaaaacccattgcacgcagttatgccggagcggggcttctggcccatgttgttaccggaaagtatgcagaccatctgccattataccgccaaagtgatctactattccacacagctatttag

SEQ ID NO: 477032 - DNA, 180 bp, Shigella flexneri
atgaataagccgcaactggcggaatcacagaagaccgctttgcttaccgaagcggagtctgtcatccggcagccggggtgtgcggtcaggctgaacagggaaacggatgaatcaggggaggcccgggggcgggcctctgtttttccggagtcagtccggtctgtggtttatgcgatgtga

SEQ ID NO: 477033 - DNA, 222 bp, Shigella flexneri; identical to SEQ ID NO: 476064

SEQ ID NO: 477034 - DNA, 927 bp, Shigella flexneri
atgattaaatcaacgaatatacaggtaatcggttctggtattatgcatcaaataaacaacatacactcgttaactctattttctttgcctgtgagtttgagtccatcttgtaatgaatattatttaaaagtctggagtgaatgggaaaagaacggtaccccaggcgagcaacgcaatatcgccttcaataggctaaaaatatgtttgcaaaatcaaggggcggaattaaatctatctgagttagatttaaaaacattacctgatttaccgcctcagataacaacactggaaataagaaaaaacctattaacatatctccctgatttcccaccaatgcttaaggtaatacatgctcaatttaatcaactggaaagcttacctgccttacccgagacgttagaagagcttaatgtgggtgataacaagataaaagaattaccatatcttcctgaaactctaactcatttacggatccataataaccgattgcatattctgccactattgccaccggagctaaaattactgatagtttctggaaacagattagacagcatccccccctttccagataagcttgaagggctggctctggctaataattttatagaacaactaccggaattaccttttagtatgaacagggctgtgctaatgaataataatctgacaacacttccggaaagtgtcctgagattagctcagaatgccttcgtaaatgttgcaggtaatccattgtctggccataccatgcgtacactacaacaaataaccaccggaccagattattctggtcctcgaatatttttctctatgggaaattctgccacaatttccgctccagaacactccctggctgatgccgtgacagcatggttcccggaaaacaaacaatctgatgtatcacagatatggcatgctttttaa

SEQ ID NO: 477035 - DNA, 675 bp, Shigella flexneri
atgaattcccagacaacaaaagatattccctgcttccgttcttatttgcctgatgccctgcgtttaagatttgaagataaactgaccatccgggccatcgctcagcgtctgggtctcagtcattccacgatacatacgctttttcagcgatttcttgcatccggtatcgcatggccattgcccgattcagtttcattcgctcaacttgacgccatcctttatgccaacagaaagaaggaattaacagagcctcaaatcagagaaggctcatggcgaaaagaacggcgaaccagctatagccgtgaatttaaggtccgtctggctaagcaggcattacagcctggggctgttgttgcccggatcgccagagaacacgatatcaatgataacctgctgtttaaatggaaaagccagtacgaggacggcttactgagcgatgatgacatacaggaatgcatgcctgtcccggtggcactgactgatacgccggagccgaccagaccagttacaaatcccttctggcgtaacaagcatgatgagcgccctgagggggctcccggaaacgtcccacggtgcgagctgcatcttaaatcaggtgtggtaaaactgtttgaccctctcactccggaactgttacgggcgctaatccgcgaaatgaaagggggtatccgatga

SEQ ID NO: 477036 - DNA, 225 bp, Shigella flexneri; identical to SEQ ID NO: 476353

SEQ ID NO: 477037 - DNA, 378 bp, Shigella flexneri
atgcttccatcggaaacgatgatctgtcagcctgagttcacagataaaacactctccaggaaacccggggcggttcagaaagtaaatgaaacagatgctgaatacctggtgcgtaaattcgatgagcttgaagctaaatgtgcagcacaggaaaacaaagtaataccagtgtcaactgaactgccaccagcaaatgaaagtgttttgttattcgatgctaacggagaaggctggctaattggctggcgttctctctggtacacctggggacaaaaagaaaccggagaatggcagtggacatttcaggtcggggaccttgaaaacgtcaatatcactcactgggcagtaatgccaaaagcaccggaggctggagcataa

SEQ ID NO: 477038 - DNA, 429 bp, Shigella flexneri
atgactgccctgatcgctgtggaacatcaccccgccgggcttaccacgggtttcccatgccatttccagcgctttcatggtgagcctgctgtccggcgagaacgacatggcccagcccactggttttcttgcgaacaggtcgagaacaacggcgaggtacgcccagcgcttacccgtccagatataggtcacatcaccgcaccacacctgatttggctcggtcacggcgaactgcctttcaaggtagttagggatagcaacatgttcatgaccaccacgtttataccggtgagtcggctgctgacagctgaccagccccagctctttcatgagcctgccagcaagccagcgtcccatctggtagcctctccgggttgccattgtggcgatgcttcttgctccggccgaaccgtggctgatgccatgtag

SEQ ID NO: 477039 - DNA, 327 bp, Shigella flexneri
atgactaaaaatactcgtttttcccccgaagtccgtcaactggcagtccgtatggttctggaaagtcagggcgaatatgactcacaatgggcgacaatttgttccattgctccaaagattggctgtacgccggagactctgcgtgtctggggtcgccagcatgagcgggataccgggggcggtgatggagggctcaccaccgctgaacgtcagcgtctgaaagagccggaacgtgaaaatcgtgaactgcgccgcagtaacaatatccttcgcctggcttccgcttattttgcaaaggcggagttcgaccgcctctggaaaaaataa

SEQ ID NO: 477040 - DNA, 354 bp, Shigella flexneri; identical to SEQ ID NO: 466835

SEQ ID NO: 477041 - DNA, 195 bp, Shigella flexneri; identical to SEQ ID NO: 475322

SEQ ID NO: 477042 - DNA, 267 bp, Shigella flexneri; identical to SEQ ID NO: 462029

SEQ ID NO: 477043 - DNA, 210 bp, Shigella flexneri
atgacggatggctggccgctgtatgaatcacgcctgaagggaaagctgcacgttatcagcaagcgttacactcagcgcattgagcgacataatctgaatctgagacaacatctggcaaggctggtacggaagtcactgtcgttctcaaaatcggtggagctgcatgacaaggccatcgggcattatctgaacataaaacactatcagtaa

SEQ ID NO: 477044 - DNA, 207 bp, Shigella flexneri; identical to SEQ ID NO: 476087

SEQ ID NO: 477045 - DNA, 354 bp, Shigella flexneri; identical to SEQ ID NO: 476545

SEQ ID NO: 477046 - DNA, 207 bp, Shigella flexneri; identical to SEQ ID NO: 24440

SEQ ID NO: 477047 - DNA, 342 bp, Shigella flexneri; identical to SEQ ID NO: 475405

SEQ ID NO: 477048 - DNA, 258 bp, Shigella flexneri
  misc_feature (223)..(232): n is a, c, g, or t
ttggattttaaacatcttactcaatttaaagatataattgaactggacaagcgccccgttaaacttgatgaacgggaaacgtttaatgtctcatggggtattgatgagaactaccaggttggggctgcgatttcaattgcttcaattcttgaaaagaataaacaaaacaaatttacctttcacataatcgctgattacttagacaaagagtatattgaattannnnnnnnnnatatcatattgattctgagccattga

SEQ ID NO: 477049 - DNA, 327 bp, Shigella flexneri
atgactaaaaatactcgtttttcccccgaagtccgtcaacgggcagtccgtatggttctggaaagtcagggcgaatatgactcacaatgggcgacaatttgttccattgctccaaagattggctgtacgccggagactctgcgtgtctgggttcgccagcatgagcgggataccgggggcggtgatggagggctcaccaccgctgaacgtcagcgtctgaaagagccggaacgtgaaaatcgtgaactgcgccgcagtaacaatatccttcgcctggcttccgcttattttgcaaaggcggagttcgaccgcctctggaaaaaataa

SEQ ID NO: 477050 - DNA, 156 bp, Shigella flexneri; identical to SEQ ID NO: 474739

SEQ ID NO: 477051 - DNA, 588 bp, Shigella flexneri
atggcagccttcccggcggtgaaaacgttcgaagagtatgacttcacattcgccaccggagcaccgcagaagcaactccagtcgttacgctcactcagcttcatagaacgtaatgaaaatatcgtattactggggccatcaggtgtggggaaaacccatctggcaatagcgatgggctatgaagcagtccgtgcaggtatcaaagttcgcttcacaacagcagcagatctgttacttcagttatctacggcacaacgtcagggccgttataaaacgacgcttcagcgtggagtaatggccccccgcctgctcatcattgatgaaataggctatctgccgttcagtcaggaagaagcaaaactgttcttccaggtcatcgctaaacgttacgaaaagagcgcaatgatcctgacatccaatctaccgtttgggcagtgggatcaaacgttcgccggtgatgcagcactgacctcagcgatgctgggccgtatcttacaccactcacatgtcgttcaaatcaaaggagaaagctatcgactcagacagaaacgaaaggccggggttatagcagaagctaatcctgagtaa

SEQ ID NO: 477052 - DNA, 354 bp, Shigella flexneri; identical to SEQ ID NO: 466835

SEQ ID NO: 477053 - DNA, 327 bp, Shigella flexneri; identical to SEQ ID NO: 477049

SEQ ID NO: 477054 - DNA, 369 bp, Shigella flexneri
atgggggaaacaatctcagagcaactggatatcattaataccgcctttaaagttatcgaaaccatacgtcccaaactggcctgtagccggtgtgatgtcatcgttcaggcaccacttcctcctaaaccgatcgaacgcggttatgccagtgcagggttacttgcacggatcctggtcagcaaatatatggaacatatccctttatatcgccagtcagaaatatacgcgcgacagggcgtggagctgagccgtaataccatggtgcgctgggtatcagaaatggcagacaaactccgtcctctgtatatagcgctgaatgactatgttctggaggcaggaaaggtgcacgcagatgacactctgaggtag

SEQ ID NO: 477055 - DNA, 213 bp, Shigella flexneri
atgttgggacttgaaccgaagaacacggcggtgcggagtccggagagtaacggaatagcagagagcttcgtgaaaacgataaagcgtgactacatcagtatcatgcccaaaccagacgggttaacggcagcaaagaaccttgcagaggcgttcgagcattataacgaatggcatccgcatagtgcgctgggttatcgctcgccacgggggtaa

SEQ ID NO: 477056 - DNA, 303 bp, Shigella flexneri; identical to SEQ ID NO: 475957

SEQ ID NO: 477057 - DNA, 219 bp, Shigella flexneri; identical to SEQ ID NO: 474644

SEQ ID NO: 477058 - DNA, 189 bp, Shigella flexneri
atgagcagaaaaacccaacgttactctaaagagttcaaagccgaagctgtcagaacggttcttgaaaatcaactttcgatcagtgaaggcgcttcccgattatcccttcctgaaggcactttaggacaatgggttaccgcacggtggctgaactggaatctgaaattctgcaactgcgtaaggcgttaa

SEQ ID NO: 477059 - DNA, 180 bp, Shigella flexneri; identical to SEQ ID NO: 474761

SEQ ID NO: 477060 - DNA, 252 bp, Shigella flexneri
gtggaaatcgacaacaacatcgctgaaaatgccctgcgggcggtcagtctgggtcgtaaaaacttcctgttcttcggctctgaccatggtggtgagcggggcgcgctactgtacagcctgatcgggacgtgcaaactgaatgacgtggatccagaaagctaccttcgccatgtgcttggcgtcatagcagactggccggtcaaccgggtcagcgaactgcttccgtggcgcatagcactgccagctgaataa

SEQ ID NO: 477061 - DNA, 855 bp, Shigella flexneri; identical to SEQ ID NO: 471756

SEQ ID NO: 477062 - DNA, 789 bp, Shigella flexneri
atgcgtcagagagagcttgcagccaccgctaaggccttcatgttggataggcctgaagtctcactacaggagcttacagagcatctccggtctatggctgagcagttcctgacagacgctagtgacgattactggaatggacttgaggtcgctactctggtcgacgagaagtccaacctgaaggagctagccgctacgcaagccttgagtctggaccagcagaagggcataaggttagcgctggaagtcctgaccgcagcacagcagagagtcgacactggtgatacctctggtctgattaagctgattgatgataataaccttactgatgactcaactataggcgactctacgtcaattctgaataatgagcagggggatagaccggcagttttcacacaggagcgccagtcatctgtagttttttcaagcctagtgtcctcgctgctggctgagaaggtccagaccctgaagacatccagctacaaggacctctcgtcctcactcaatactgtctcccggttcctgcctgaagacatggacctgatgtcccgctctgggtggctggctgtcagggactctatgctggcttctgaggtgagaccatcgacaatcaacaagctgctgaccaaagcgaagatgtgtctcgattatggcctgatgaatgggcaacctgagggccgcaaccctattgaacggatgaagctgaccaaggatatcgactccaagcgcagagcgttcacagacgaggagctggagagacttctggtccgtgttgagtctgagtga

SEQ ID NO: 477063 - DNA, 303 bp, Shigella flexneri; identical to SEQ ID NO: 473532

SEQ ID NO: 477064 - DNA, 834 bp, Shigella flexneri; identical to SEQ ID NO: 476228

SEQ ID NO: 477065 - DNA, 834 bp, Shigella flexneri
atggtctgccagatggaactgaccagccatctgctgacggctgcagccttcggcacgatgaagaacagcgaaaatgagcttgctgagcaacttataggacaaaccggcgataacactctgacgttaatggataaaggttattactcactgggactgttaaatggctggagcctggcgggagaacaccgccactggatgatacctctcagaaagggagcgcaatatgaagagctcagaaaactgagtaaaggcgatcatctggtgaagctgaaaaccagcccgcaggcacgaaaaaagtggccgggactgggaaatgaagtgacagcccgcctgctgaccgtgacgcgcaaaggaaaagtctgccatctgctgacgtcgatgacggacgccatgcgcttccccggaggagaaatggcggatctgtacagtaatcgctgggaaatcgaactgggatacagggagataaaacagacgatgcaactgagcaggctgacgctgagaagtaaaaagccggagcttgtggagcaagagctgtggggtgtcttactggcttataatctggtgagatatcagatgattaaaatggcggaacatctgaaaggttactggccgaatcaactgagtttctcagaatcatgcggaatggtgatgagaatgctgatgacattgcagggcgcttcaccgggacgtataccggagctgatgcgcgatcttgcaagtatgggacaacttgtgaaattaccgacgagaaggggaagggccttcccgagagtggtaaaggagaggccctggaaataccccacagccccgaaaaagagccagtcagttgcttaa

SEQ ID NO: 477066 - DNA, 261 bp, Shigella flexneri; identical to SEQ ID NO: 475838

SEQ ID NO: 477067 - DNA, 1149 bp, Shigella flexneri
atgaacaaaatatttaaagttatctggaaccctgcgacagggaattatactgttaccagcgaaacggcaaaaagccgtggcaagaaatctgggcgcagtaagctgttaatttctgcgctggttgcgggtggaatgttgtcgtcgtttggggcattggcgaatgccgggaatgacaacggtcagggtgttgattacggtagtggatcagctggcgacggctgggttgctataggcaaaggggcgaaagcaaatacttttatgaacaccagtggttccagtactgctgtgggttatgacgctatagctgaaggccaatatagctctgccatcgggtcaaaaacccatgcgattggtggtgcatcaatggcctttggggttagtgcaatatcagaaggcgatagaagtatagcactgggtgcctcttcgtattcattgggccaatactcaatggccctcggccgttattcaaaagcattgggtaaattgtctattgctatgggggactcttccaaagcggaaggagcaaacgccattgccctggggcgtagcagtgtagctagcggtactgacagcctcgcatttggcagacaatcacttgccagcgcagcgaacgctattgcgataggtgctgagaccgaagccgctgaaaatgcaactgctattggcaataatgcgaaggcaaaagggactaatagcatggcaatggggttcggaagccttgccgataaagtcaatactatcgcattaggaaatggcagccaggctctggcagataatgcaatcgccataggccagggcaacaaagctgatggcgtggatgccatcgctctgggtaatggtagccagtcgagaggcttaaacaccattgccttaggcacagccagtaatgcaactggtgataagagtcttgcgcttggtagtaatagcagtgccaacggtattaactctgtcgcgctgggcgcagattccattgcggatttagacaataccgtctctgtcggcaatagttcattaaaacgcaagatcgttaatgtgaaaaatggcgcgatcaagtctgacagttacgatgccattaatggttcacagctttatgccattagcgactcggtagcaaaaaaggcttggaggaggggctgcagtagatgttga

SEQ ID NO: 477068 - DNA, 915 bp, Shigella flexneri
gtggagctgagccgtgccacactgggtcgctggaccggtgccgttgctgaactgctggagccgctgtatgacgtcctgcgccagtatgtactgatgcccggtaaagttcatgcggatgatatccccgttccggtccaggagccgggcagtggtaaaacaagaactgcccggctgtgggtctatgtccgtgatgaccgtaacgccggttcacagatgcccccggcggtctggttcgcgtacagcccggaccggaaaggtatccatccacagaatcacctagccggttacagcggtgtgcttcaggcagatgcttacggtggttaccgggcgttatacgaatccggcagaataacggaagctgcgtgtatggcccatgcccggagaaaaatccacgatgtgcatgcaagagtgccaaccgacatcaccacggaagccctgcagcgtatcggtgaactgtataccatcgaggcagaagtccggggatgttcagcagaacagcgtctggcggcaagaaaagcaagagccgcgccactgatgcagtcactgtatgaccggatacagcaacagatgaaaacactgtcgcgtcactcggatacggcaaaagcgttcgcatacctactgaaacagtggaaggccctgaacgtgtactgcagtaatggctgggtggaaatcgacaacaacatcgctgaaaatgccctgcgggcggtcagtctgggtcgtaaaaacttcctgttcttcggctctgaccatggtggtgagcggggcgcgctactgtacagcctgatcgggacgtgcaaactgaatgacgtggatccagaaagctaccttcgccatgtgcttggcgtcatagcagactggccggtcaaccgggtcagcgaactgcttccgtggcgcatagcactgccagctgaataa

SEQ ID NO: 477069 - DNA, 387 bp, Shigella flexneri; identical to SEQ ID NO: 476458

SEQ ID NO: 477070 - DNA, 153 bp, Shigella flexneri; identical to SEQ ID NO: 473234

SEQ ID NO: 477071 - DNA, 483 bp, Shigella flexneri; identical to SEQ ID NO: 473783

SEQ ID NO: 477072 - DNA, 261 bp, Shigella flexneri; identical to SEQ ID NO: 475838

SEQ ID NO: 477073 - DNA, 867 bp, Shigella flexneri; identical to SEQ ID NO: 461376

SEQ ID NO: 477074 - DNA, 267 bp, Shigella flexneri; identical to SEQ ID NO: 462029

SEQ ID NO: 477075 - DNA, 345 bp, Shigella flexneri
atggcgatgctggcgattgttgcctggtcgctttcggtcgtggatgtggcgattattcttgggccaggtaatccaccgacgctggcagtaattagctggcagtggttaactcagggcgacgcggatcaacaaacgaaaggcgcactcgccagtctgctgctgatgctgttactcgccgcctacgttttggcgcagctggcggcgcactattccccgcgtagatggcattcgcaagcctgccacacctttattaccaggcactacgctggcgagttttttacccttaaccggtgtgctgtgtgtggttctgctggcgatcctcgcggatcagtcgacgatcaatag

SEQ ID NO: 477076 - DNA, 303 bp, Shigella flexneri; identical to SEQ ID NO: 476494

SEQ ID NO: 477077 - DNA, 267 bp, Shigella flexneri; identical to SEQ ID NO: 462029

SEQ ID NO: 477078 - DNA, 1365 bp, Shigella flexneri
gtgcactggcaaactcacaccatttttaatcaacctataccattaaataacagcaacttatacctgtctgatggcgcgctttgcgaagcggtaacgcgtgaaggtgctggctgggatagcgattttctagccagtattggtcagcagttaggaacggctgaatcccttgaactggggcggctggcgaatgtaaacccgcctgaactgttgcgctacgatgcccaggggcggcgtctggacgatgttcgtttccatcccgcatggcacctgctgatgcaggcgttatgtaccaatcgggtgcacaatcttgcctgggaagaagacgctcgctccggcgcatttgtggcgcgcgcggcgcgttttatgttacatgcgcaggttgaggctgggtcgttatgtccagtaacgatgacctttgccgccacgccattgttgttacagatgttacccacgccgtttcaggactggaccacgccgctgctgagcgatcgctacgattctcacttattgccaggtgggcaaaaacgcggtttgttgattggcatgggaatgacggaaaagcagggcggttccgatgtcatgagcaacaccacccgtgcagagcgtttggaagatggctcttatcggctggtggggcataaatggtttttctcggtgccgcaaagcgatgcgcatctggtgctggcgcagaccgcgggcggtctgtcctgcttttttgtgccgcgctttttgcctgacgggcaacgcaacgcgattcgcctcgagcggctgaaagataagctgggtaatcgctctaacgccagttgcgaagtggagtttcaggatgccattggctggttattggggcaggaaggggaaggaattcgtctgatcctgaaaatgggggggatgacgcgttttgattgcgccctgggtagccatgccatgatgcgccgtgcattttcgctggcgatttatcatgcacatcaacgccatgtttttggtaatccattgatccaacagccccttatgcgtcatgtcttaagtcgcatggcacttcagcttgaagggcaaacggcgttgctgtttcgtcttgcgcgagcgtgggaccggcgtgccgatgccaaagaagccctgtgggcgcgtttatttacgcctgcggcaaaatttgtgatctgcaaacgaggtatgccgtttgtggccgaagcgatggaggtgctgggcggcattggttattgcgaggagagcgagctgccgcggctttaccgggagatgccggtaaacagtatttgggaaggttccggcggtaatgactccaacttactgatagtgttttatgttcagataatgcccgatgaccttgtcatgcagctccaccgattttga

SEQ ID NO: 477079 - DNA, 267 bp, Shigella flexneri
atgttgggacttgaaccgaagaacacggcggtgcgtagtccggagagtaacggaatagcagagagcttcgtgaaaacgataaagcgtgactacatcagtatcatgcccaaaccagacgggttaacggcagcaaagaaccttgcagaggcgttcgagcattataacgaatggcatccgcatagtgcgctgggttatcgctcgccacgggaatatctgcggcagcgggcttgtaataggttaagtgataacagatgtctggaaatatag

SEQ ID NO: 477080 - DNA, 267 bp, Shigella flexneri; identical to SEQ ID NO: 476582

SEQ ID NO: 477081 - DNA, 2523 bp, Shigella flexneri
atgatgacgaccagaatagtggttggcctcacggcagggacgtgtctgattttctcgcaaaacctgatggccgaggtcagtgtattcaatccggcgcttctggaaatcaaccatcaatccggagtcgatattcgccagtttaatcgggcaaacctgatgcccccaggtgtttatagcgttgatatttttatcaacggtaaaatgtttgaacgtcaggatgtgacatttgttcaggataatccagatgctgatctgcacgcttgctttattgccattaaaaaaacactgtcctcctttggcataaaagttgatgcgctcaaatcgttcaatgatgtggatgagacggtttgcctcgatcctgctccacgtattgaaggctcatcctggcagtttgacagtgataaattgcagctgaatatatccattcaccaaatctacatggacgcgatggcttatgattacatcagccccacgcgttgggatgaggggattaatgcgctcaccatcaactacgatttttctggttcacatacactacgttcagattatggttcacaagagacagataccagttatctcaatctgcgcaatggactgaatattggaccgtggcggctacgtaattacagtactttaaacaccagcgatggccgtgcggaatacaactccattagtacctggatacagcgcgatattgccgcgttaagaagccagattatgattggtgatacgtggacggcgagcaatattttcgacagtacgcaaattcgcggcgcgcgtttgtatactgataacgatatgctacccgccagccagaatggctttgctcctgtggttcgtgggattgcaaagtccaacgccaccgtcatcattcggcagaatggctacgtgatttatcagtcagccgttccacaaggtgcttttgagatcaccgatctcaacaccgcaagtacaggtggcgatttggacgtaaccatcaaagaagaagacggtagcgaacaacgattcacccaaccttatgcttcattggcgattcttaaacgtgaaggtctgacagatgttgatgtcagcgtgggtgaattgcgcgatgaagacggatttacaccggacgtccttcaggcgcaaatacttcatggtttttcccacgggatcactttatatggaggtatgcaggctgctgaaaattatggttctgcagctctgggtgtcggtaaagatcttggcgctttgggcgcaatttctttcgatgtgacacatgctcgtgcgaattttagccatgatgatacagaaacgggtcagtcatatcgctttctctattcaaaactatttgacgacacagacactagcttgcgcctggttggctatcgttactccaccgagggctactataccctcaatgagtgggcatcgcggcgcaacagccctgaagacttttgggaaacaggtaaccgacgtagtcgcgtggagggaacgctaacgcagtcgttggggagagattatggcaatttatacctgacattaagccggcaacaatactggcataccgatgatgtcgaacgattaatgcaatttggctacagcagtagctggaagcgtctctcgtggaacgtctcctggagttattccaatactgccagacaggggacggggaacaaccataccagtgataacaccagtgagcagatctacatgctctctttatctgttcctttatcgggctggtggggtaatagttacgccacctattctgtttcgcaaaacgataattccggtagctcacatcaactcggactcagcggtacggcgctggaaagaaataacctttcatggaatttaatgcagtcctataacagtcatgatgatgaggttggcggtaatatgtccctgacctatgatggctcttatggcacggtgaacggcagctataactacagccaaaattcccagaggctgaattatggtatcagagggggaattctggcacacagcgaaggggtaacgttaagtcaggagttaggtgaaactattgctcttgttaaagcacctggggccgccaggttagaaatagataatatgcgcggtgctgcgacggactggcgcggctatacggtcaagacacagctaaacccttatgatgaaaatcgggtagcaatcagcgataactatttctcgaagtcgaatatagaacttgataataccgtcgttacgatggttcccacgcgtggtgcagtggttaaagcggagtttgtgactcatgtgggttatcgcgttctcttcagagtgttaaatgcaaatggtaaaccggtaccttttggagccattgctgcgatacaagatgcaagtttggcagattcaggaattgtcggtgaccgtggcgaactttatctttctggtctaccagaaaaaggacaggttacgttatcctggggagaaaacgcctcaacaaaatgcatcttcaattattcattttcgacaccagaaagtgagagcggattaattgaacagggtgtgacatgtcattaa

SEQ ID NO: 477082 - DNA, 480 bp, Shigella flexneri
atgcagcgccgggtggcatggataaacccggaagagagtaaatcaaaccgcgcaattggcgttgcgctgaatgatactgcatgtcgcgtattgaaaaaacaaatcgggaatcatcaccgttgggtatttgtgtacaaggaaagctgtaccaaaccagacggaacgaaagcgccaacggtcaggaagatgcggtatgacgcaaacacagcctggaaagcggcgctgagacgagcaggtattgatgatttcagatttcacgacttgagacacacctgggcaagttggctggttcaagccggagtcccgttgtcagtgttacaggaaatgggaggctgggagtctatcgaaatggttcgtcgatatgctcaccttgcacctaatcaccttaccgaacacgcacggcaaatagactcgatcctgaacccatcggtcccaaattcgtcccagtcaaaaaataaggaaggtactaatgatgtgtaa

SEQ ID NO: 477083 - DNA, 267 bp, Shigella flexneri; identical to SEQ ID NO: 476582

SEQ ID NO: 477084 - DNA, 2520 bp, Shigella flexneri
ttgcaggaagaagacaatgagcgcggcgtggctcattttgtagaacatatgatgtttaacggcacaaaaacatggccgggtaataaagtcatcgaaacatttgagtcaatgggcctgcgttttggtcgcgatgttaatgcctataccagctatgacgaaacggtgtatcaggtgagtttgccgactacgcagaaacaaaatctgcaacaagtgatggcaatcttcagtgaatggagtaatgccgcaacctttgaaaaactcgaagtagacgctgaacgtggcgtaattactgaggaatggcgtgcccatcaggatgcgaaatggcgcacctctcaggcgcgccgccctttcctgctggctaatacccgtaatttagaccgtgaacctatcggcctgatggatactgtcgccacggtcacgccggcacaattgcgccaattttatcaacgctggtatcaaccaaataatatgacctttatcgtggtcggcgatatcgacagtaaagaagcgctggcgctgataaaggataatttaagtaagcttccggctaacaaagcagctgaaaatcgcgtctggccgacaaaagccgaaaaccacctgcgctttaatatcattaatgataaagaaaaccgggtgaacggcatcgcactctattatcgcctgccaatggtacaagtgaacgatgagcaaagctttgtcgaacaagctgaatggagcatgttagttcagctgttcaatcaacgtctgcaggaacgcatacagtcgggcgagttgaagactatttctggcggcactgcgcgcagcgttaaaattgcacccgattatcagtcgctgtttttccgtgtaaatgcacgagacgataatatgcaggatgctgcgaatgcattaatggcagagttggcaaccattgatcagcatggtttttctgctgaagaactcgatgatgtcaaatctacccgcctcacctggctgaaaaatgcggttgatcagcaagctgaacgtgatttacgtatgctgaccagtcgcctggcatccagctcattaaataatacgccgttcttgtcgccggaagagacatatcaactttcgaaacgtctgtggcagcaaattaccgtgcaaagtctggcggaaaaatggcagcagttaagaaagaaccaggacgcattttgggagcaaatggtaaacaatgagcttgccgccaaaaaagcattgtctcctgcggctatcctggcgctggaaaaagagtacgccaacaaaaagctggcggcttacatcttcccaggcagaaatttatcgttaacagtagacgctgacccacaggcggaaattagcagcaaagaaacgctggctgagaatctgacatcattaacactttccaatggtgccaaggttattctggcaaaatccgcgggtgaagagcaaaagctacaaattattgccgtatcgaataaaggcgatttaagtttccctgcgcagcaaaaatcacttatcgcgctggcaaataaagcagttagcggaagcggcgttggcgaactctcctcttccagcctgaaacgctggagtgcggaaaactcggtaaccatgagcagtaaagtcagtggcatgaatacgttgctctccgttagcgcgcggactaataaccctgaacctggtttccagttgattaaccagcgaatcacccacagcacgattaacgacaatatttgggcatcgctacaaaatgctcaaattcaggcgttgaaaacgctcgaccagcgtccagcggagaaattcgcccagctgatgtatgagacgcgctatgctgatgaccgcacgaaattactgcaagaaaatcagattgcacagtttactgccgcagatgcgctggctgccgatcgccagttgttttcatctccagcggatatcacgtttgtcattgtcggtaatgtcgcagaagacaaactcgtggcgttaattacgcgttacttaggctcaatcaaacactctgattcgccattagccgcaggtaaaccattaactcgcgcgacggacaacgcatcggttactgtaaaagaacaaaatgaacctgtggcacaggtttcacagtggaagcgttatgattcccggacacctgttaatctggcgacgcgtatggcgctcgatgcttttaacgtcgcactggcaaaagatctacgcgttaatattcgtgaacaggcatctggggcatacagcgtttcttctcgcctctcggttgatcctcaggctaaagatatcagtcatttgctggcttttacttgtcaaccagaacgacatgatgaacagttaacgttagcgaatgaagtgatggttaagcgtttgactaaggggatcagtgagcaagaactgaacgaataccagcaaaacgttcagcgcagcctcgatatccaacagcgtagcgttcaacaattagcgaacactattataaatagtcttattcaatatgacgatcctgcagcatggactgagcaggagcaattgttggtaatgctgccaacttactga

SEQ ID NO: 477085 - DNA, 849 bp, Shigella flexneri
atgttgaatgtagctattgaaaaccagaacgggtggaattatagtgcacctgcacctcataaaacgggtgccgggattgctaccccgacgatgactactgcgcataaccgcgctcaggcggtttttttatgcgtcaagcacagccacattcagattatggtggggcgtgcagggcagccgcaaggctggccggtttcggtagtcaccggttgtagcaaccctgtgcgtctcaccacccatgagattgctacctctggtggtgagtcatttaaactgactatcgaggctgccatcatggctactatccttaccctttctcaccctgacgcaaccatcgaaaatggtcgcgctgtcactacgtctgttgcggttgcggagttcttccggaaaatgcacaaaaacgttattcagaagatcgaaactctcgaatgctcgccggagtttaaccggcttaattttaagcccgtcacctataccgacgccaaaggcgaaaaacgcccaatgtaccaaatcaccaaaaacggcttcgttttcctggtgatgggcttcactggcaaaaaagccgccgcattcaaggaagcctacattgctgagttcgaccgcatggaggccgaactgcgccagaataacaccccacctgcagacaagatgattccgggtgatggtcgcactctggttgttcacttcgacaaattcggcaatgtcgaattcaccgaaaccgttcctgatggcgcactggtctgtaccctggagactttccggttttatctggaaaaacagggatggactcttgttaaccggggcgcaattaaaaatatgactgtggaacaattactttctttaaaataa

SEQ ID NO: 477086 - DNA, 321 bp, Shigella flexneri; identical to SEQ ID NO: 477003

SEQ ID NO: 477087 - DNA, 834 bp, Shigella flexneri; identical to SEQ ID NO: 476228

SEQ ID NO: 477088 - DNA, 741 bp, Shigella flexneri
atgcaagggctctggcactcaaaatttatagcatgtcaggctggaacctgtagagtcggtcttcactttttaggccagtgcgtaagtgttagtgtcagctcctgccatttcagcagaggaaattattctgctgatgaaagctttggcatcaggattcagcctcaaacgtatgcgtggtcgtcagaggcagttaggtcagaagcaataattttagacagtgagaccatgtgcattggttttaaaaatgccgtctatgttcatgattgccttgatttgcatatggaacaactggatttagattattgcggctcaacaggcgtggttatagagaatgtaaacggaggattttctttctcaaactcatggatagcagcagatgccgatggcactgaacaatttacggggatatattttagaacgccggcctcaacgcagtcacataaaattgtcagtggtgttcatatcaacactgcaaacaaaaacacggctgcaaacaatcaaagtatagcgatagaacagtcggcgatcttcgtctttgtaagtggttgtacgttaactggtgatggatttgcccctatatttccagacatctgttatcacttaacccattacaagcccgctgccgcagatattcccgtggcgagcgataacccagcgcactatgcggatgccattcgttataatgctcgaacgcctctgcaaggttctttgctgccgttaacccgtctggtttgggcatga

SEQ ID NO: 477089 - DNA, 267 bp, Shigella flexneri; identical to SEQ ID NO: 462029

SEQ ID NO: 477090 - DNA, 441 bp, Shigella flexneri; identical to SEQ ID NO: 476553

SEQ ID NO: 477091 - DNA, 675 bp, Shigella flexneri; identical to SEQ ID NO: 473842

SEQ ID NO: 477092 - DNA, 279 bp, Shigella flexneri; identical to SEQ ID NO: 127146

SEQ ID NO: 477093 - DNA, 834 bp, Shigella flexneri; identical to SEQ ID NO: 477029

SEQ ID NO: 477094 - DNA, 285 bp, Shigella flexneri; identical to SEQ ID NO: 477030

SEQ ID NO: 477095 - DNA, 807 bp, Shigella flexneri; identical to SEQ ID NO: 477023

SEQ ID NO: 477096 - DNA, 207 bp, Shigella flexneri; identical to SEQ ID NO: 476087

SEQ ID NO: 477097 - DNA, 267 bp, Shigella flexneri; identical to SEQ ID NO: 462029

SEQ ID NO: 477098 - DNA, 675 bp, Shigella flexneri; identical to SEQ ID NO: 477035

SEQ ID NO: 477099 - DNA, 267 bp, Shigella flexneri; identical to SEQ ID NO: 462029

SEQ ID NO: 477100 - DNA, 366 bp, Shigella flexneri; identical to SEQ ID NO: 462994

SEQ ID NO: 477101 - DNA, 180 bp, Shigella flexneri; identical to SEQ ID NO: 474761

SEQ ID NO: 477102 - DNA, 366 bp, Shigella flexneri; identical to SEQ ID NO: 474684

SEQ ID NO: 477103 - DNA, 435 bp, Shigella flexneri; identical to SEQ ID NO: 476567

SEQ ID NO: 477104 - DNA, 207 bp, Shigella flexneri; identical to SEQ ID NO: 476087

SEQ ID NO: 477105 - DNA, 249 bp, Shigella flexneri; identical to SEQ ID NO: 474743

SEQ ID NO: 477106 - DNA, 207 bp, Shigella flexneri; identical to SEQ ID NO: 476087

SEQ ID NO: 477107 - DNA, 327 bp, Shigella flexneri; identical to SEQ ID NO: 477049

SEQ ID NO: 477108 - DNA, 591 bp, Shigella flexneri
atggccgcattaccatacatgcaactgtacatagctgattacctggctgacaccatgcatttgtcagcagaggagcacggcgcgtatttgttgctgatgttcaattactggcaaacaggaaagccaatacccaaaaacaggttggcaaaaattgcccgtctgactaacgagcgatgggttgatgttgaaccatccttgcgggagtttttttgtgataacggcgacgaatggatgcatcttcggattgaggaagatctggcatctgtcagagaaaaattaaccaaaaaatcagccgcaggaaaagcatctgttcaggccagaagaagcagaaaggaagcagatgttcaaacaaaacaagagagaaatttaacaggtgttcaaacagatgttggagtggtgttcgaacatgatgctggatttgcccttatatttccagacatctgttatcacttaacccattacaagcccgctgccgcagatattcccgtggcgagcgataacccagcgcactatgcggatgccattcgttataatgctcgaacgcctctgcaaggttctttgctgccgttaacccgtctggtttgggcatga

SEQ ID NO: 477109 - DNA, 663 bp, Shigella flexneri
atggacttcctggagcatctgcttcatgaagaaaaactggcacgtcatcaacgtaaacaggcgatgtatacccgaatggcagccttcccggcggtgaaaacgttcgaagagtatgacttcacattcgccaccggagcaccgcagaagcaactccagtcgttacgctcactcagcttcatagaacgtaatgaaaatatcgtattactggggccatcaggtgtggggaaaacccatctggcaatagcgatgggctatgaagcagtccgtgcaggtatcaaagttcgcttcacaacagcagcagatctgttacttcagttatctacggcacaacgtcagggccgttataaaacgacgcttcagcgtggagtaatggccccccgcctgctcatcattgatgaaataggctatctgccgttcagtcaggaagaagcaaaactgttcttccaggtcatcgctaaacgttacgaaaagagcgcaatgatcctgacatccaatctaccgtttgggcagtgggatcaaacgttcgccggtgatgcagcactgacctcagcgatgctgggccgtatcttacaccactcacatgtcgttcaaatcaaaggagaaagctatcgactcagacagaaacgaaaggccggggttatagcagaagctaatcctgagtaa

SEQ ID NO: 477110 - DNA, 351 bp, Shigella flexneri; identical to SEQ ID NO: 464002

SEQ ID NO: 477111 - DNA, 327 bp, Shigella flexneri; identical to SEQ ID NO: 477049

SEQ ID NO: 477112 - DNA, 156 bp, Shigella flexneri; identical to SEQ ID NO: 474739

SEQ ID NO: 477113 - DNA, 207 bp, Shigella flexneri; identical to SEQ ID NO: 24440

SEQ ID NO: 477114 - DNA, 231 bp, Shigella flexneri; identical to SEQ ID NO: 129443

SEQ ID NO: 477115 - DNA, 189 bp, Shigella flexneri
atgagcagaaaaacccaacgttactctaaagagttcaaagccgaagctgtcagaacggttcttgaaaatcaactttcgatcagtgaaggcgcttcccgattatctcttcctgaaggcactttaggacaatgggttaccgcacgctggctgaactggaatctgaaattctgcaactgcgtaaggcgttaa

SEQ ID NO: 477116 - DNA, 219 bp, Shigella flexneri; identical to SEQ ID NO: 474644

SEQ ID NO: 477117 - DNA, 372 bp, Shigella flexneri
gtgctggatgcactggagcaggcgttatgggcccgtcgaccgtccggcacggtccatcacagtgataaaggttctcagtatgtatcgctggccttcacacagcggcttaaggaagccggattactggcatcaacaggaagtacaggcgactcgtatgacaacgcgatggcggagagcatcaatggtctttacaaagcggaggtaatacaccgtaagagctggaaaaaccgtgcagaagtggaactggccacactaacgtgggtggactggtataacaatcgacgattgcaggaaaggctgggccacatccctccggcagaagcagaaaaagcttattatgcttccatcggaaacgatgatctggcagcctga

SEQ ID NO: 477118 - DNA, 327 bp, Shigella flexneri; identical to SEQ ID NO: 477049

SEQ ID NO: 477119 - DNA, 219 bp, Shigella flexneri; identical to SEQ ID NO: 474644

SEQ ID NO: 477120 - DNA, 372 bp, Shigella flexneri; identical to SEQ ID NO: 475842

SEQ ID NO: 477121 - DNA, 180 bp, Shigella flexneri; identical to SEQ ID NO: 474761

SEQ ID NO: 477122 - DNA, 333 bp, Shigella flexneri; identical to SEQ ID NO: 8518

SEQ ID NO: 477123 - DNA, 2700 bp, Shigella flexneri
gtgaatgcagtcattccgaaaaagagaagggacggcaagtcttcgttcgaagacctggtatcctacgtctctgtccgggatgacatgaccgatgaggaactggatttatcttcttcttcgcaggctgaacaaccgcaccgaagccgtttcagccgccttgttgattatgcgacacgtcttcgaaatgagtcattcgtggcgctggttgatgtcatgaaggacggctgcgaatgggtcaacttttatggtgttacctgctttcataactgtacttctcttgaaactgccgctgcagatatggagtacattgcccggcaggcacactatgcaaaagatgacactgatcctgtttttcactacatcctttcctggcagtcacatgaaagcccgcgtccggaacagatttatgacagtgtacgtcatacgctgaaatcactcggccttgccgaccatcagtatgtctctgccgtgcatactgatacagataatctgcacgtccatgtggctgttaaccgggtacaccctgaaacgggttatctgaaccggttatcctggagtcaggaaaaactcagtcgtgcctgccgtgagcttgaactgaagcatggttttgctccggataacggttgctgggtccatgcaccgggaaatcgtatcgttcgcaaaaccgccgttgaacgtgatcgccagaacgcgtggacacgcgggaaaaaacaaacttttcgcgagtatgtcgcgcagacagcggtcgctggtttacgcagtgaacctgtaaatgactggttatccctgcatcgtcgtcttgcggaagatggtctgtacctgtctcagatggacggaaaatttctggtgatggatggctgggatcgcaacagggaaggtgtacagcttgactcgtttggtccctcctggtgtgcagaaaaactcatgaaaaaaatgggtgactacacgccagtaccaaaagacattttcagccaggtggaagcaccaggacgctataatccggacttcattgccgctgatgttcgcccggaaaaaatcgctgaaacagaaagtctgcagcagtatgcctgtcgtcatcttggagaacgtctgccggaaatggcacgggaaggacggctggaaaactgccaggctattcaccgcacactggctgaagcgggattatggatgcgtgttcagcatggtcacctggttatctgtgacggttatgatcataaccagactcccgttcgtgctgacagcgtatggtcgctgctgacgctcgacaatgtgaatcaactcgatggtggctggcagcctgtaccaacagatattttccgccaggttacgccaacagaacgcttccgtggtcgtcgtatggagagctgtcctgcgaccgataaagaatggcaccgtatgcgtacaggcacggggccgcagggggctatcaaacgcgaactgttttctgacaaagaaagtctgtggggatacagcatcagccattgtagccctcagattgaagaaatgatcacacagggtgagtttacctggcagcgttgtcatgagttgtttgcacaacagggactgatgctacagaaacaacatcacgggcttgttgtcgttgatgcctttaatcatgagcaaacgccggtgaaggccagcagcattcatcctgatctgactctggggcgtgcagagccacaggccggaccttttgtgagtgccccagcagatttgtttgacagggtgcaacctgaaagtcgctataacccggagctggctgtcagtgacaggtacggggtcagcagtaaacgtgacccaatgctgcgccggcagcgacgtgaagccagagctgaggcccgtgctgacctgcgtgcccgctatctggcatggcgtgaacaatggcgtaaaccagatctgcgttatggggaacgttgtcgggaaatccatcaggcatgccgtctgcggaagtcacacattcgtgcgcagtacgatgatccggcattacgtaagctgcattatcacattgcagaagttcagcgaatgcaggcattgatcaggctgaaagaagacatcagggatgagcgacagaaacttattgctgacgggaagtggtatccaccctcttaccgtcagtgggtcgaaattcaggctgctcagggagacagggctgctgtatcgcagttgagaggctgggattatcgcgatcgccgtaaagacaggtcacgcacaacgacgacagaccgctgtgtcgtgctttgtgaaccgggcggaacgccggtatacggtaataccggtgatctcgaggcccgtctgcagaagaacgggagtgttcgtttccgtgaccgtcggacgggagagtttgtctgtacggattatggtgacagggttgttttccgtaatcaccatgaccgcaatgcgctggcagataaactggatttgattgcaccggtattattcgggcgtgatccacgcatgggttttgaaccagaaggaaacgacaaacaatttaaccaggtctttgctgaaatggttgcctggcataatgtgacaggccgtactggtcacgaagactacaggattacgcgaccggacgtggatcatcaccgtgaaggaagtgaacgctactaccgcgattatatcgcggcgaacagcaacgatgacgcatcactgcctccgccggagcaggataaacgctgggaaccgccttctccaggttaa

SEQ ID NO: 477124 - DNA, 2292 bp, Shigella flexneri
atgagtgaacatcgcgttaaccccgagcttttacaccgtacagcctggggaaatcctgtctggaatgcactccagagtctcaatatctatggcttttgcctggtggcaagtcttgtggccagttttatctggccacttgcattaccggcatgtctgttgttcacactgataacaatgctggtatttagtctgcagcgatggcgctgccctcttcgtatgcccatgacgctggaatgtgctgacccgtcacaggacagaatgattaaaagaagtcttttcagcttctggccaaccctgttccagtatgaggtcattctggaatcaccggccagcggcatattctatgttggttatcaacgcgtcagggatattggcagggagttatggctgagtatggacgatctgacccgccatataatgtttttcgccaccaccggtggcggtaaaacggaaaccatctttgcctgggcgattaacccactttgctgggcaagaggattcacccttgtcgatggcaaggcacagaatgatacggcaagaacgatctggtatctggccagacgctttggacgtgaagacgatgtggaagtcattaacttcatgaacggaggaaaatcccgcagtgaaatcattctgagtggtgaaaaaacgcgtcctcagtcaaatacctggaatcccttctgttacagcactgaggcattcacagcggagacaatgcagtcaatgctgccccagaacgtccaggggggcgagtggcagtcccgggccattgccatgaataaggcactggtatttggtactaaattctggtgtgtgcgcgaaggcaaaacaatgtcgctgcagatgctccgtgaacatatgactctcgaagggatggccaaactttactgtcgtggcctcgatgatcagtggccggaagaagctatcgcaccgttacgtaactaccttcaggacgttcccggtttcgacctgtcgctggtcaggacaccatcagcctggacggaagaacccagaaaacaacatgcttatctctccgggcagttttctgaaactttcagcacattcacggaagcattcggggatatttttgctgaagattccggtgatatcgatatccgtgacagcattcacagcgacaggattctgatggtaatgatccccgctctggatacatcagcgcatacaacgtctgctcttggacgaatgtttatcacccagaaaagtatgattctcgcccgtgatttgggctaccgcctcgaaggaactgattccgatgcactggaagtcaaaaaatataaggggcgtttcccttatctgtgtttccttgatgaagtgggggcatactatacagaccgtattgctgtggaagccactcaggtgcgttcactggattttgctctgattttgatggcacaggaccaggaacgtatagaaggacagacaacagccacgaatactgcaacactgatgcagaacacggggacaaaatttgccggcaggattgtcagcgagggcagtacggccaaaacgctgaaaagcgccgccggtgaagaagccagggcgaggatgaacaacctgcagcgtcaggacggcatatttggtgaatcatggattgacagcccacaaatcagcatcctgatggaaagtaagatagatgttcaggagttgattgaacttcatcctggcgagttcttttctattttccggggagaaaccgtaccatcagcatcattcttcatccctgacaatgagaaaagctgcagtagcgatcccgttgttataaacaggtatatcagcgtggatgcacctcgcctggaccgtctccgccgtctggttccccgtacagctcaacgtcgaataccgtcaccggaaaatgtcagtgccatcattggcgtcctgactgcaaaaccctccagaaaaagacgaaaaattcgcacagagccgcacacgatcgtggatacattccagcaacgcattgcaggacgtcaggcggctatggcaatgctggaagagtacgacacagatatcaacgcacgtgaaagtgccttgtgggaaacagcggtgaatacgcttaaaacgaccacacgggaagagcgacgaattcgctatatcacgctgaacagaccagaactacctgaaacaaaagaggaaaatcagatatcagtgagagcagaaagagcaggtataaacttgttaacgcttccacaggacaataaccacctgacagggcgtcctgtaaacgggtttcatcataaaaaaaccaaccgtccggactgggacggaatgtactga

SEQ ID NO: 477125 - DNA, 1071 bp, Shigella flexneri
atgacaatcgagtactttgcaacacgcattgcaaaacatatttccgtgcaggcaatctggccggatggcaggacagaaattattgccgtccttccacgggatgccctgtcagggctggtaacacgaaataatcaactgattcatatagcctttgacgccatgggcacccgtaacagagaaaccgtcctgattgataaacaggagcataacgctaaccagatacttacagctattgattcctgcctgcgccttgaatatctgatggaacgccgcttcagcagaacacctttgttccgtggcataatcgccagcgttgtgctgttcgtaatggcaacgattggcttctctctgttccgctatgttgatcgtgtattctgggatgatacaacgcctgaagcagtacagacagcaggtgagccacgactgcttccccctcacctgaatcacactgtgccattaaatgaaggcattcaactcccggttcccccgaaaaaagacgtccaggtaccggagaaaacaatcacaagcaaaaatccggaagccgcagctgcgcgacataatctggctactgttctgaagcggaacgccgatcggggcatgtttaccatcaacctgtcatccggtcatgaacgaaccctgttcgcatttctcgatcctgcctgtcctaactgcagacttctggagccggccttaaaacgcctggccagcgacttcaatgtcgttatctacccggtttcagttattggtggagaggaatccaccgaccgtgtggcaccactgctgtgtgaaaaagatgctcagaaacgtgctgccggctggcaccgactgtattccgcagataacggaatgatgacgccatcagaagaaacaacgcctgcagatgaaacatgcctgaaagcagccagagctgcgattgatgttaacaatgtcgccttccgtaagttcggatttgccggtaccccatgggtgctgtccgacacgggctggcatctgcctactggaattctgcaggaaactggcacgcttaatttattcctgaaaaccaccgacagcgagtctggccatgagtga

SEQ ID NO: 477126 - DNA, 1209 bp, Shigella flexneri; identical to SEQ ID NO: 242428

SEQ ID NO: 477127 - DNA, 252 bp, Shigella flexneri; identical to SEQ ID NO: 242427

SEQ ID NO: 477128 - DNA, 177 bp, Shigella flexneri
atgaatctggtagacgcctttgtcaaaaaagtaatatccgggccatatgaagaatatggaaaatggtggatagatgtcgaatacatttcatggggtgttcccgggaaaacaagactgatgtttgactcaaaggagcaggcactggaagttaaggaagggtacaaatttttaacgtga

SEQ ID NO: 477129 - DNA, 210 bp, Shigella flexneri; identical to SEQ ID NO: 8510

SEQ ID NO: 477130 - DNA, 651 bp, Shigella flexneri
atgcaaatggtaaaaacaatcaatagatatcctgcttggtggacattatattacgcccttagatttatatatttcataagcataccagtgttatccatttttattcttttcggagtgctctccattacatcttcaagatatgtgacgcaagaagattatatttatacttgcgtctgtctgtttttactaattgcccctgcaatattgatgtattcccgagcaagctcaagaaaagacaaaataaaaaaaattgtcgcggagataaaaaacaccggtttttattcacctgacaaagaatatgagggactgtcttttactcaaggcgtctattttggcgtggataccaaaaaaggcactatgctgtatgctcgtgcttaccctggaaatataatggatattatcggctttgacattgacaacttcacacgcactgtgaccgacgccaagacactagagatttatacaaaatacataaatataccaatggtctcaattccgtcaggatgcatccatcccaaaatgatggcggatacaatgcatgcaatggcagaaagaggatatgattaccctgtcgactttcctcgcctaattcaggagaagcgtaaggagtgggagcagattgcaggcatgcctgtagccgaagtattttaa

SEQ ID NO: 477131 - DNA, 2169 bp, Shigella flexneri
gtgaaaattttacttcgcgcactctgtgcaggccttgctatatcctcactgccggcaatggcttcagtgacctatcaggatattgtgtctgccgcaaccaatcctgacgatctgtctcgccaggcgctggtcacgatattcggtgatgtagtcaccaatccactgtcaaccagcgcccccactctgatcggaagcatgttcggggcgttcaacagtatcatcgccgtacttgccgttgtctggtttatgttcattggtatccgtcatgttgtgcgttcggggcatcagggacaggtattcagcaccggacgcgatatcgtcggcacactgagtgtcgttgcaggttttctgatgatcgttccaaccggaaatggctggagtatcgctcagctcattatgttatggggcgcatcgataatgggggttgggtccgccaatgtgatggtgcaacttgccgctgataatatcgcaaatggttattcaatgactgtacagccagttcaggcatccacacgaacagcagcgcgtggcatttttgaaatggaactgtgtaagtatgcggttaacgcaggactaaatgattttaatcagacggtcaaatcctcgacttcactgatgacagaatcagctaaaaccgccagtggtaattacactgtcacggtatccaatggcagcggtatctgtggttcagccagcctgtcagtagaaggaaacggaacaacagatcaatcgacgattggaaaattctttaatcccttcagtaaaaacgaatacagcggtgttatctcagcacaacgtgcagccatggataatatgattagcgacatggacaacgctgccagtgagtttgtgacaacatttctggaaaaaagaaattctggcaacggaacattgccggatatcgagacacggattcagagagcagccgacgagtatgaacgtgctgtacaaaaatcgctacctattgataacggagaacaatccaggaaagaagctctcaagtcttatctcacaacctatggatgggtgacgcttggcgcgtggtatcagacctttgccactgctaaccagcgtctggcagagctggctgacagagctccagctgtaacttcaatgtcatcacttggggaagttggcgatactgatttatttagtgctgttatgggggcatacaagactcaattacagaactccacatatactccaacgataggaacgataacaactcaagatgaaagtaatgcagctaatagcacagacccacaaagtgtggtcatgaaaagtatagcgccaaccatattaaaatggacaaaccaagctgctactgaatggtcaggaacaggaacaaccagcaaccaagttaacccattaattaagatgaaaaacatcggcgattatacattgggtacaacagaaattctctggacaggatatacaactgtcagagttctcgcgacaatgggtgataactctattttcggaaaggctgttaatttgttctctggattacctaaaggatttgttgctctgctggatgctgcagctcccccaatatatttcttgttgttcctgttgttttgtgcgggtttttccttatcaatttacctaccatttataccattcattttctggatgacaggcattgggaactggatagtgagcgtattaataggatgcaccgccgggcctctgtgggcagcaacacatctaggaacatcagaggacagaggaagtcgagcagcttacggatatatatacttaattgacagcatgataagaccacctctcatggtattcggtttcttttttgcctctgtcgccatcattgccgtcggcacaatattaaactcactgtttggcgcagcactagttaacgtacaggtaaaatcattaacagggatattcagccttgccgggttcctgctaatttacgcccgtatgtgtacaacgtctgtagctgcaatatttgctttacaagcatatcttcctgaccatgttatcaatttcttgggtggtagagatggtgtaaatactcttggcaacctcacctcatcagtaaaagatatttttgcaggttctaatagaaatattagacacagccctggagttagagaggacagactaaaaaatgtcacaaaggatgataataaagatggaataaaaggataa

SEQ ID NO: 477132 - DNA, 585 bp, Shigella flexneri
atgaataagttaccggaaaattcagaccagacgaaaaacgtcaaaaaatcaccatccataacccgcatagccacccgggggattattaacatttttgttcctctgatggagactcgcctgataacgaattctgtacagcatatgctggaacaacaaaaacgcaggctggacagatttcgtcaggtaaataataaaaaggcgcaactccacctcacgtgggaagaagctctgcaggccagccatatgtcagtagacgatctggatcgtcgtttccgccggcgcagaacagtatggcgattctgttgctggagtctgctggccatcgctttgtttctcagtggtatgctctttgccgcctcttcattacctcttacgactctggtacgcgccatcagcactcttgtgctgatactgtcaggcgtcgctctttgtgcttccagagcactgattgttacataccgcctctggcagttgcatgaacgaaaagtcagcgaacccgagcaggggacttttcgtgattttctgaacacccgcaatggctggcgcaatgccacgttaattgccgtaaccagtaaacaatactga

SEQ ID NO: 477133 - DNA, 1203 bp, Shigella flexneri
atgcaaagaaaaacattactcgcagcccttatagctatcctgaatggaacggcataccaggctcatgcttattcagtcaccgtcgtcgccagccgtcccgttgaacagcaggtcgtccccagaatggaggccatcaaaggtgtgctgagtgacatactgagtacccagaccgccacgggtaccgctatcaatcagaactctgaaaagctggcaagtgtcattgcccagaacggacaggcgacacgtcagcagatgattttcagtaatgaaactcagcgcctcgaggaggcacggaaaagcttcaccgtgccagactccatctgcagtgaatccgcatcagggattgcaacagaaagcaaaagtgcctcagcatccgcagcctcaaaactcagtaaaggtggcggtgtgagcaaccgtagcatccgcgaccgtctggccagcgcagcaaactctcccgtgcgggaagcttatgatggcgcggccatacacgccagttactgtacagaagcagaatatgcacgttttggaggaaccgccgtttgtccttctgtgggcgaaataccaggtggagacagtcaggtacgctcgatttaccacggcgcaggtacagcggacacacctgcagcactgacatgggatcagaagcaaatagatgcagcgacggcttacatgaaaaacacttcccgcccctctgccggtcgtgctctgggtaaaggagaagtgaatacccagagtgggcgaacctacgtcggactccagaacgaatacaacggcatcattgattctgcgtcgaatccccaactgacgttgattgctgacagcacgcctaatgaaagcacacgtaaagcactggctgaaacactgcagtcagactcagcggccgcttacttcgaccaggtggcttcaccagaagcaaaagcacggggatatatgagtacccgtgagtttgaagcttttgaggctggccggcgctacgccaacacagcatacctggtggatttacaggaaatgcagggggataacctgctccgtgaactggtaagaatcactgcgcaaatgaactggcagctgaacgatctgaaagaacagatccgccagggtaatgttatctctggccagcaactggctctgactgcccgccagtattatgaaaaacaactcggtagccttgagaaaacaatcaatcaggcaaacgcacgttga

SEQ ID NO: 477134 - DNA, 615 bp, Shigella flexneri; identical to SEQ ID NO: 467925

SEQ ID NO: 477135 - DNA, 3045 bp, Shigella flexneri
atgaacataaaccgtttaatcttcactatcgaagactgtctgaacacgctatcccgtttctctgtcgcaagcagttttgttgagtattgcgatttacgtactgtaattggtctggacagacaggatcgtgaacgtcgcccatggctgaattcgccctatattgcagccacaaagcgtggagaatatctctctgtctttgaagtcagcggtgctttcagggaaatggatgaagcatccgaccagactggcccaggttcactggaatcgctgatcaccagcatgagtgacagcctgaatacggcatataaaaacagcggtcataaaatcagcttcgtttttgagcgtgatcctgacatggggaaagaagaaatcgaagacatggtcgccccacaaaagcgctcactggctaatacaggtatccagttacaggatgtggtcgatgagaaagtcacaacactgtccccatggctggtccgggagcgttgctggctggcgatctggagtggacccgaccttatcagcaacagcgatcgcaccgcccatgatgagcttgtcagaagactggctgaacgggtaccgaaagcacgctttgcccagtccccctggcagtggaccttatctgcactgaaaatccgccacgaagcttttcttgataatgtggaacaggcactgagacattcatctgatggcctgattctccggctactggatatacacgaggtcgggcgtgaaatacgtcgtcagacagaacggcacagcacaccgcgtaactggcaaccccacctgcctgaagatgcccagccagcgggatatcgctggactgacgatgaatccgtactacatgctccttcattgcatttgcagttattcaacactcaggtgaccacacagggcaacctggttcaggcgggcggactctggcacggaatggtatcgattactttacctccgcaaaatctgcagacgtttaacgaactggtccgtgccgtcccccgcgcagtcccctggcgcatcagaatggatctgatgcccggcgggatgaaggctcttaatctgaagaaaacgcttctgacttacagcagcttcatttctgccgttcgtccaatgtatgaatccgttatgaccctggcggcaacggatgaaaaagaacctgtctgcataatgaccatcatggcctccacgtggggaaaaacacgtgaaatatgcacacgaaaccaggccattctgaaatcggccattgaaggctggggcgtatgtggcaccacgacaacatttggcgatccccgacgcgcctgggtgaataccattctcgcggcatccggaggttccggcccggttcccctgtatcccccgttgtcacatgccatctcgcttttcccgcttaacagggcaggctctgtctggcgaggtaaagggaatcttatgttacatacagaagacggttccgcatttgaggttggtctggcgtcatcccaacaaaataaacatacagaactggcaccaggcgatccgggactgggtaaatcagttctgattaatacgttgtcggaaatacagatatcatctgctcagaaaaacctgcccttcattgcctatatcgataagggatacagtgctcagggactggttcagcttattcgcgacagtcttcctccggaaagaaaagacgaagctgtcggtattattctgagcaatgatccggaatacacccgtaacctttttgacgtgatgtacggcgctaaaaagcctattacgccggaaaagaatttcatgtcatctgtgctgtgtgctctctgtgtcgataccggtaccggtcaaccctgtaaccccggagacacccgacaaattatcaaccagcttatcgagctggcttttaaagagtacggtgaaaataatccgcgactttatcgcgcctcaacggaagaactggtggattcagcactgcaggactcgggactgtatgaaaaacatgatgcaacctggtgggccagatcaacctggttcgaagtccgggatatgctccacaatgccgggtatatcatggcggctcagcgggcacattatcaggcaatgccccagcttcccgaagtgtcctcgatgctgggccataccagtctcagggatgttttcggtactgttcagcgtgatggttcaaacgaacttctgctggactacatccgccgcgctctcgagcagggacataacgactaccccatgatatccgggtatacccggtttatgatcaacccggaaacccgggtcatcgctgtcgatctgaataatgttgccggtgacaaaacgcctgcaggcaggcttaaaaccggcatcatgtacctgcttgcaggtcagatcgccggtggtgatttcaccctgccacaatacagggatgaagtgttaaagcagcttccacgggaataccatgaaatcgctcttaaacgtattaaccaacttgatcaggaggttaagacaaaagtttatgatgaactgcataacgcccggggcattgacttcatctgggaaaatctggatacccaggagcgtgagcaacgcaagtttgctatccgcacggttctgagtacgcagtatctgagggactacccggaaagcgttcttaagtcagcaaatactctctggttactgcgctacaaacccgaagatatccccgtactgagggataacttcaacgttcctgaatttatgctgaaacgcttcctgaaaatgccggaaggcccggcaccagatggtagtggtgttcctgttctgggagtattcagggtaaaaagtggcacgcttgcgagaatactcaaatttaccgtcggtccactggagctatgggcgctgaactcatcgccaaaagacagtgccctgcgtaaaacactgacaaataagttaggttcagttcgggcacgtaagattctggccgaaaacttccccagaggttctgcaacgtcattaattgagcaccgggcgggccaacataacagtgacaatgttattgaagaactggcctcggagctcatccgaaaacagggatacaatctctga

SEQ ID NO: 477136 - DNA, 801 bp, Shigella flexneri; identical to SEQ ID NO: 8503

SEQ ID NO: 477137 - DNA, 189 bp, Shigella flexneri; identical to SEQ ID NO: 8502

SEQ ID NO: 477138 - DNA, 405 bp, Shigella flexneri
atgtcacgtattcgtgtcgtagcggcccgtctgtacgccgcatttatccacgcacaactgtttgtaatgtcatgccggagcaaactgactaagttcctgctgctcattcccatgatgttgctgcccaaagccgttcttgccgatggagatcttgccgatatggttcgcaatgtcgaacaaggtgccaaaacagcacagtcatcatcactgactattgcgcagttcatcggcgtaattctgtttctcgggggcctgattgggctgaaaaaagttgggaaacaaggggggatgggactggctggttgcattctatctatcgtcattggggcgctacttgtcgccggacctgaaatgatgagtcgcagccagaaacagctggggatttccacaatttccattggctaa

SEQ ID NO: 477139 - DNA, 528 bp, Shigella flexneri; identical to SEQ ID NO: 8500

SEQ ID NO: 477140 - DNA, 705 bp, Shigella flexneri
atgaaacctgaaacagaaatagatgaaaccggcagcttcggtgaacccgaagagaaacccgcccccttctggaaacgttccgtctgggggatatctgtagcaacatgggggctatgtgcagtcgtgttgctcgcagccatatggtatctgttcctgagagcgccatcggaaacaggcatgcctccgtttaatgatgcggatgctggcgtacagacctggcaaaccacacaagaatcatcaccttccgttcagtccactgagactatgactgtccggacaggagaagatatgagccagcttgcccgggatgtaaaaacagagctggataaccgcgatgaaaaaattcaggcaacactgaatatgcttcacgacagcattaacaagctgggcgaagctataaaaaaggatgaagaatacgcacaggaaacacgccgtcagctggatgatatccggagccgcctgaacggaataatgacacagaaaagcgtcactgaatcctcttccacaccgcatccagcaaagaaaaaaacgtcgtctgtacttaacggaatgaaaatcatgtcgatggaaactggtatggcctggattcgctggcagggtagtacctgggctgtcagagaaggtcagacgctgggcaatgtggtgatccagcggattgatccgactacccggaccatcatcaccagtgcagggacgttacgctga

SEQ ID NO: 477141 - DNA, 1290 bp, Shigella flexneri; identical to SEQ ID NO: 191945

SEQ ID NO: 477142 - DNA, 984 bp, Shigella flexneri; identical to SEQ ID NO: 79107

SEQ ID NO: 477143 - DNA, 693 bp, Shigella flexneri; identical to SEQ ID NO: 79108

SEQ ID NO: 477144 - DNA, 348 bp, Shigella flexneri; identical to SEQ ID NO: 8495

SEQ ID NO: 477145 - DNA, 3768 bp, Shigella flexneri
atgccgtctgtatcccgctaccgcacctggcttgccgtgcctgcagatgaaatagaagatctcaaaaaagcacatcccccgatgaacgggcacacgcccgtcatctgggacaaggagcacaaactctggttcgcccgcccgggggcggacctgtccaggctggaccgctggctgccccggccacaggacgtctccatgaacggcagtgatccggtcaccgagtttgcccaggttctggagaatgccggactggttctgaaagaactgccggtcatggacgggaaaatccaccgtgtcccgaccgccgatgacaaaaaaggacaaaaaagtggcgcatatcgcggattcctggacggcagacctgccggctggtacagggattatcgcagcgcggataattcgccgatcacctggaccttctccggcggagaacagacagatccccgcgcaagactccacctgaaagcgcattcaatgcaacgcagggaggacgcggagcgggaactgaaagcacagtacaaccgacaggccgcgtatgcccgccgctatatcaacaaatggccgcaggccacagcacatgaatacctgacccggaaaggcattcaggctgcaccgggggtgcgggtaaacaacaaaaatgaactggttattcccttcagtaaccgtaacggcgcgatacgctcttaccagcgtattccggtcaccggggggaaagatgcccgcatcctgatagattcggagaaaaccggtaactggtttgcgctgggcacaccgcgcaacggtcagccggtactgtttgccgagggctatgccactgcggcctccctgcacgaagccacgggccttccggtactgatgacggtggatggaggcaacatgattgccgttgccgaaaatgcccggcaaaagtggacgcaaagcccctttatcttctgtgccgacaacgatcatgcaatccgggttaacaaaggtatcgtcagtgcaacaaaagccgcagaactgacaggaggatcggtcatctttcctgcgttcaccgatgccgaaaaagcgcaggggctgaccgatttcaatgacctggacgcaagccggggacgggccgcttttcagcatgtcatcaacgcccagttagaacacatcggggtttccacccccaacagtaacaccccggaaatgcgcgaggcactggtgataggcaacctcgtttttacaccggtccacactgaggaaaaaaccatgactccgacagaatatcctgaaacatcacccgatacagggcacagccatgaccagggaccttctctgccgtccgccacgcagcaggaacaaccagctgcttccagcagtaacattgctgatgaaacacagtcatttaccagtcacgccactgaaaataacggcaaagatgagcggcacgctgataacgttcaggcgcaaacggaaagctctgtagttcaggactcccctgcagaatcaccggcgtccccggaaagtacaacggcgtctgcccctgatgaacccactcatccggcggaacctccggaaaaagttgtctcggtggccacagataaagactggcgtgaatttgaagccgaactgtcacaaccggaaaaaaacgagtcacaacaggaatccggcacttcacctgaaataccggcccctgctgccacccccgcatcccctgaagacagtccctcatctgaaaccatgaatgaatcagccgagccatcaccttcccctgatgcagtcaaagaggaaatgaccgtgatgacggagcctgatgacaaacaaagcaccggaatatccccggatactccccgggaagaggcggtcaaccatgtaactgaagacattccccttcagccagagccgttccttcctgagtcagatggccccgaagaatacgaaaactacagcgcatatcaggagctgatgaacaatgaaaatcctgagcatctgcaggaaaacagtgatatgccgtcgcaaccggacacaggccacgttcaggctgatgagtcagaacttcaggccacaacagatacagtagaaccggctgtccgggatgaccccactccacagcaacctgttcagagcacatcatcttctgataatacttcatcgtttctcgacaaagcgcgtggcttttttacacgtaaaaaaacggattcacaggcgcatgagaacagtgatcccacaccctcaccggaaaccacgacgaccacaccggcacctgacagtattgtctacgccccggaacgccctgatgcaccgatatcgctcaatctggacgaaatcattaaatcgctggaaggtgaagaacgagcagacagaaccgtcctgtacaaactggatggcaaacctgccttcattgaccgggtaaaccggctggaaatggtcaacggtgccagcaatgacgatcgcagtgttctggctgcacttgctgtggccactgatttctatggtggtgtcattgagctgacgggcagtgatgcctttaagcaaaaagcgatgcagttgatcatcgagcacaacatcaaagtgcgcatgaaattcccggatcagcgagcggcgctcgaaaaattacgtaaggaaatggctgtcggtaaggatactgttgtcacccataagccaacaccggaacttaaccggaatacccctgaacaaccagcagtcccagaccctgttcaggaaaaagaagccacacaatccccggcgtccccagtagcccctgaagcatcaaccgtcagcaccgtccctgcatcatcaccggctgaaccaggcaaaacggcagatgcagcaccaggtgaagaaccaccaggaaaacttcgcccgggagagagcgtgactgccgtactgcacaattttggtcgtgctgaatatgcacccggcaaaggagagagtttctttgttgagcttaaaaaccgcagtggcagcaaactctactggggggaacaactggaaagtctggtcaaaaaccatcagaaaggtgacgtggtgacactgacacttcagaaccgcgaacaattcatcctcccgggagagcaaaaagcacgtttccggaataagtggtccatggagtcagttaccaacgggatctcggtatcacatgataatccggataaaggtcagcgtattcaggcgattccggtcgaaacctttatgaaagtggctgcgcaaatcagccaggggtggcccgaagagatgaaagcgttacgtatgccagaaaacgtcggctcacatctgtttatcggtgaagaccgacatccggtctccgcgccacagaacgcaaatcaggtaacagaaataaccagcgcagcccctgacaagctgacacctgttctgggatcagtggataaggatacgcgtgaactcaacctgctacttgtccagagtgccgatgaacatctgcagggtgtggtccggctgaacggcacattgtatccggcactggccaccccatcagccgacaacagtcagctggttatcaatgcgctgaccgacaaaggtttacgctttgcaggttatggtgaagcggtaaaccacgatgctgacagcacgaatcgccccgcaccggagcttatgcagtttcatctgaaaacccgggaagaaccgctttttgctgctgtctacacgccggaaaaacaacctgatgcgttgtaccggaacctgggcttcgagcagtcatggcagcagtggtccaacagccaaaagccggaggacaggcaggaaaaaactctgcatcaggatctctcccacagccccggccgatga

SEQ ID NO: 477146 - DNA, 552 bp, Shigella flexneri
atgtcaggtaaaaaaactatcgttactctgctccgggtatcgctactggcatgcccgttactgttcacgacaccatcgtttgcaatgaccgacacgccatccgtgaaggtcggcttttctcctgaaggaagcgcatccgctctggtgcttgacacaatcaacagtgcggaaagctccatcaggatgatggcatattccttcaccgacccggatgtaatgcatgcgctggcaaaagcgaaaaaacgcggagtggacgtccgtattgttgttgatgacaaggggaatacgaaccgggcaagtcaggaagcgatgaaatatatcaacctgctggacattcctctccggactgtagatgccttccccatccatcacgacaaagtcatcattgttgacggaaacacggttgaaactggctcctataacttctctcgtgctgctgcacgcaagaattcagagaatgtcgttgtgctcaagaatatgccggatgtagccgcacaatatcttgaacactggcaggatcgctggaataagggtacagactggagaccctga

SEQ ID NO: 477147 - DNA, 291 bp, Shigella flexneri
atgaaaagagaagggttctggcgatatgcaacaccgccagtcaacatccagggcgtacctctgccgttcaccatgatttatctgtttatatgcccctttccctccaaaacaaccttctggatttgcaccggcatcattttatttttcgttattctcgaccgttcaggctggactgtcaggacgatctgtactcgcattttcagcattctgagaggggccatcgcctccggtcgtccatggtggtatcgccaccatacggaatcaccacgagactggactggcctcgattaa

SEQ ID NO: 477148 - DNA, 1149 bp, Shigella flexneri
atgaatattcctgatgagtttggtctttttccgtttcagcgtttcactgcagatgaactacggcatttctttgtctggtgcgccgcacataaagtcagtgatgtggatctgaccggcgggtcacctgtatctgtcagtcgctttggccgacgggtgcgttgttccagtgcaacgttaccaaccacacttatgtcctccctgattgatgaactgttcggtcgggaagtcattccccgcgttctggcaggcaatccggttgacaggacgatacagattaacggggatgcatccggtcgctatggtcttaaacgcggagaacgcatccggttacgctctcacctcattcagggcacatctggtgcggaggagaaagcaatatcaataaccatgcgtgtcatcccgacagaaataccggacatcctctccatgaacattgaaccagacctgcttgaagcaatggtctgcaaaagcggtctgggatttgtatgtggtgaaaccgggtcaggaaaatcaacgctgtgttcagcactgtaccgttacattatggacaatttccccgacgccaaaatcgtgacatatgaagacccggtggaatatatcctgggaaatgaaaacgatctgctcccaccgcatcaggcagaaatcgggcgtgatgtggtcagttttgctgccggactgcgttctgctgtacgacgtaatcccgaaattatcggtgttggtgagatcagggataacgaaaccgccgacgcagcggtacaggcaggcaacaccggacattactgcctgagcaccatgcatacgaaatctcctggtgaaacgctggcacgtcttcttgggctgtttccccctgtcatcagggattcgatggcctgggctgtcctgtcactgttgcagttcattctggttcaggttctggtcagaacaaatgacggtggccgtaaagccgtccgggaatatatcgtcattaacgatgagcttcgcgacaatctttccggaatgccacatgcagagtgggggcatcacattgatgccataatccggcaggaaaaacgtcgtatccgggatcagattctggaaatgtatatccggaatgaagttgaccgaagagaagcgattctttttatcccgccaggggagttacggtcatga

SEQ ID NO: 477149 - DNA, 819 bp, Shigella flexneri; identical to SEQ ID NO: 8490

SEQ ID NO: 477150 - DNA, 459 bp, Shigella flexneri; identical to SEQ ID NO: 244267

SEQ ID NO: 477151 - DNA, 585 bp, Shigella flexneri
atgatgaaaccacgttcttcttattcaaaaacagcattcattcttttattttctgttttcctggtagcggcagtgacaaaagcaaaaagctcgcttcccgatatcaccctggaacaggcaaaagaaattaatgctgataacaccgttattttccttttccgccatggagaacgttgcgaccgttcagatatgccatgctattcggataaaagcggaatcactattaccggtacagagaaagcacagcaggaaggtattaagttcgcaacaatcttcagtgaatatgatatttactccagcaatgcggtaagaaccatacaaactgcaaaattcttctccggtaaagaacccgtcgttatggacagtttatcagactgcaataatgatctttataagacgcttgaatcaatcgcaagagaatctcataaaaggaacatagtaataatgacacataatcattgtttatcatttctggccagagataggctcggcaagaaattcaaaccggcgtaccttgatgccctgatcatgcattacgatggtacccggctcatacttgacggaaaatacaacaaagaggcatag

SEQ ID NO: 477152 - DNA, 1200 bp, Shigella flexneri
atgaagaaaaatcatattacccgcaccatcattgcatctgctgtattattttcctttaacgctgcagcagcgacgtcatattttgaagcgcgtaacgatgcaatgggtggtaccggggtagcatcttcccattatggtgtggcacctctggcaaacccggctttactgacaaagcacaacagcaatgatgatttcagccttcttctgccgtctgttggggcacaagttgctgatcctgatgatgtatcaaataaagctgatgatgttaaagatgactgggatttgtttgacagtgctgtagataaccagcatggcgtacaacaggcagcggcaaatcttaaacatcgtctgcaggaattccgcaatatcaatgcagatgctcaggtaggtgtatcagctgtagcagccatggcaaatgacactctgccgtttgcccttatggtcaagtcttacggaactgtcagcgtaaacggaaaagtaaacgatgcagacctggattatctggacaaagttgccaatggaacaattaccgacgtcgataagaatgccctgacctcacgcgcattcgggcgtgcagctgtaattaccgacgtcggaatttcatttgccaaagaactggaaacggccggacaaaaatggtctcttggcgttacaccaaaatatcagcgtgtggacctgtttaactacaacgtaacggttcgtgattacgacaaagacgattttgacggtgacaagtaccacaacacgaaaaacggattcaacgccgatattggtgcttatacagacctgaatgacaactggactgtcggtcttgttgcccagaacatcattccacgcagtattgatactaaagtcgtcaatggctttaaagaaaccttcaaagttcgtccgcaggcaaccgccggtgtatcctggcataatgacctgtttaccactgctcttgacattgatctgactcctgccagtggcttcacttctgacagcaaacgtcagtttgcaagtgttggtgctgaatttaacgcatggaaatgggcgcaattgcgtgccggttatcgtcagaacatggcatcaaactccggaagcgccttcaccgctggcgttggtatctctccatttgacgtcgtacatatcgatgtttccggactggtaggaactgaccacgattacggtgcaatggcacaacttcagttcactttctga

SEQ ID NO: 477153 - DNA, 825 bp, Shigella flexneri
atgagactgaatacgaccggtattgcggcccgaatgatgctctcgctggacaaaaaagcaatcggcgaaaaactcatcaacggtcgtcagataaacccgacacctctgcaggtccgttacccacaaggggtaagagaagttctggggataatgagcgaacaattagccatatccaccgctgatttaacccgaatcctgcttgaggatgctcttcataatatgtttatgcctgcggataacaccacaggaaacataataagcagaattgaatacatcatgctgtcgcatgatataaatgcgccattactggcaacattgctgtcgccatggaatatccgctccacggttatacaggacccggccagacttgcagactatctttcagctgacgctctcgaacatcttgctgaatgttttaatctcaatccggactggctgaatggccatgaaaactatccgatagcgttgtccggtgaatggccagatactgctgataatttcagaatgcttattagtgatagcagcaacactgaagttattttctggcatagtttccccttcgcaggaaacacgaaaagagaatattgcggggtaatattgagacagaaaaaagaaataaatggctctgtaatatatccggcactatcattatcaccaacacttctgaacgatgaaaaaagaaaatggttaactgaatatacaaccaggcagaatacaacaatgtctttgcgacgcgtcacgttgagacctggccttgccgggaaccttattacagggcaaatactacctgttagcttatttaatacgtctttattaccctggtaa

SEQ ID NO: 477154 - DNA, 1155 bp, Shigella flexneri; identical to SEQ ID NO: 8485

SEQ ID NO: 477155 - DNA, 135 bp, Shigella flexneri; identical to SEQ ID NO: 10665

SEQ ID NO: 477156 - DNA, 1293 bp, Shigella flexneri; identical to SEQ ID NO: 79121

SEQ ID NO: 477157 - DNA, 657 bp, Shigella flexneri; identical to SEQ ID NO: 8483

SEQ ID NO: 477158 - DNA, 561 bp, Shigella flexneri; identical to SEQ ID NO: 8482

SEQ ID NO: 477159 - DNA, 615 bp, Shigella flexneri
atgttagtagaaaatattaatgccactttaactggaaataataagaagaatgagcctcatgataaaggatggggaattttggagcagggaacaatagcgctcgttgttctttttgttatagtcgttgttctgggtagtttgtatgcgttacgtacaagaaccaatgtggcaactgaaaccgcaaatatacaaacaattatcacaagtgcccagagcctgctaaaaggtagcgatggatatacatttaccagcagtgccaaaatgacaggtgccctcattcagatgggggccgttccctctgggatgacagtacagggcgacaaaacatctggtacagcaacgctctataacgcatggggcggtgctgtaactgttgccccggcttcaacatcagggttcaacaacggttttaccgttacctatgataaagtcccacaggatgcctgtatccagattgccacacggatcagtaaaactggtttaactaacggcattaccctgaacagtactgctcacagtgatggaaaagtcactactgaagaagccagtacgcaatgcaaggcagataatggcagcactggtacaaacaatcttatcttcaccatcaatggttaa

SEQ ID NO: 477160 - DNA, 1098 bp, Shigella flexneri; identical to SEQ ID NO: 109537

SEQ ID NO: 477161 - DNA, 1554 bp, Shigella flexneri; identical to SEQ ID NO: 109538

SEQ ID NO: 477162 - DNA, 453 bp, Shigella flexneri
atgcgtccaagtaaattactcattattccttccatatttttcttctctggtttttcatttgccacaacacaacctcttgtcacaataggagaacttgaagcacaacaaaaccggaatattcttttacaggcaaaagttcagggtgcacagttacagaaacaacttgaagaatcagatgttacttcatcatctgaaactgtttcaggtttctctggtgtgaccgctcccttgccatcagtttcagagcaaacggcaccgaaaaacagaaaagaattgcccatcattatggaaataaacggcaaagataaacgtcttcatgccgttcttcgcatggctgatggacgtcagacaagcgtcaccactggcagccagcttccaggtacatccgtcacggtgaagtcgatctcattgtctggcgtcacgttaagtgatggcactacccttactttctga

SEQ ID NO: 477163 - DNA, 1296 bp, Shigella flexneri
atggctgatgaagatatcaacccggtagtgcttctcgaagatcctaaagtaaatcatcgcgtgtgggctgcctgtcttaaatggactcctgtcgtaaaaaaacagcgcgtcccctcacatcataaacacaagtctcatgtaaaacccagacggcttacctccctgaaagtgactgtaggcagcagaaattcccgtggaaagatcagccgccttaccggcacaggaatactgaccaggccagaacgcaatcattatttttccctggcactggctttctgctcatgggtcagaaatggatacggtgtcttccggtacagcgataaggagctcttattccttgcttccattaatggccagcctgccgttatggctgacttatcaggaaatgatgccgacgttgcccaaaaggtcagcctttttctggcgatgaacgaagagccccccgaaaaatggcaggttgtatcgtctctggaacatcctgataactgggaaagtattattacccggttatcatcagcagacctccgccgttgcaaacttactgtcggcaatcgcagcaaattcacactgcctgccgtactgtttttagtagcagccggcgcaggcactgtattctggatgactcagccagagccggatgtcgtaccgacgcccgaggagatagctgctcgggcaagattgcagtttaaaaagcccgatccaccgccagaactcccgcatccatgggcatcacaacctgtaatcagtgattttctgaaagcctgcgcggaccttcgaaaaccgtcaccggtcgcactggaaggctggaaacttaccggcggaacatgtactcctgagacattcacactgatttacgaacgacagcctggaggaaccattgagggttttctggcaagaagtaaagaaatctttggtgttattcctgactttaaccttaaagatggtgcacgccaggtttctgtaacccgtccactgccgtccctgcccggcagggatgaggctgtcccggccccctcagaacaactgatgcgggtgttcacgtggtttcagaaaaaacagttaacaccggccattaatgaaatagccataccggagccattaccaggcaacgatggtgaaccagcccctgttcagaaatggaaagaatatcagttcagtttatcaactcctgtaaatcctgatgagtttttccctttacttcaggataccggcgtccgtctgagcaatatccattttgaattaaacggcggtactttcagttattcctcagaaggtcatatatatgcgtccaagtaa

SEQ ID NO: 477164 - DNA, 1683 bp, Shigella flexneri
atgaaaaaatcacaccagcgttcaatgaagctggcggtgctcccctgcatgatcgccgtcgctctttccatctccggatgtactttcagcgaaatcaacaaaatgcagaaaaaagcacaggaagactcagcacatgcacgggaaaaggtatcagccctttcggcccgtaaatcgcaggctcttacctggctcgataatcaatggataaaccctgttccggtcgctcaggtatcaagagagaaaaaacaaacagctccggcctgctacatcacgcaggcaagaaaaggagagatcactctgcaggaactggggcaacgtattactgccgtatgcggcatccctgtgatcatcacgcctgacgcagccaattcaactcttgaaggaggcgctacccgccagatgacaggaacactaccagcaccagatgaaaatggacgtctaccgttaagcagcctgggcagcacaacaatgactacctccactcagccattaacgctgaataacctcatgtggcagggagatatcaatggacttctggatctgatggccagccggagtggtctgtactggcgcatggataatggtcggattgtattctatctgactgaaaccagaacgtatccacttcatatgctgaacaccaaaaccagcagcagttccagtgtcagctctggctcaacaagcacaatgggggcaacaggaggccaggataactcagcatccggtgatgcaacgtcctctcagagcacaaccgttggtcaggaatacgatctgtatgaagacatccggaaaactattgaagcaatgctgacaccagaaaaaggccgttactggttatctgcatcgagctcaacgctgactgtcactgatactccagctgtccaggaagccgtcgcacgatatgtggacgaacaaaacagtattatgaaccgccaggtagccctgaacgtacaggttctgagcgtcagcaataccagaaacgaacagttcggtctggactggaaccttgtttataaatcgctacattccgccggagcaacgttgaacaatgcaagcggagattttacaggcgctacatctgcaggcgtatcaattctggatacggcaacagggaatgccgccaaattcagcggttccagtcttctgattaaagcgctgagtgaacagggcgatgtcagtgttgtgacttcacaagaaagcactgtcacaaacctgacgccggtacctatccagatggcagatcagacggtttacgtcgcccagtcagcaacaacaacgactacggatgtaggagcaacaacaacattaacgccgggcatgatcaccaccggattcaatatgaccctgctgcctttaattcagaaaacgggcaatctccagttgcagatgaattttaatctgtcagatcccccaacaatccgtagctttacgtcaaaagacggaaacagttacatcgaaatgccgtataccaaactgcgttcactgagccagaaggtcaatctgaaagaagggcaatcacttgtcgttactggtttcgatcagaacaatacgacgacaagtaaagccggtacgtttacgccagcaaatccattatttggtggttcacaaaccgggaaaaatgaacgcagcacgcttgtgatcatcattaccccgactttcccgtcaggaggcaataatggctga

SEQ ID NO: 477165 - DNA, 438 bp, Shigella flexneri; identical to SEQ ID NO: 8475

SEQ ID NO: 477166 - DNA, 1068 bp, Shigella flexneri
atgaaaaaaaactgtctgacacttatactgccgtcattattgtccggctgtgccggaatttccggcagcaataacgtggcaccatcagatacgcctgctctggtttttgttgacggacaaatcagtgaaagtgctggcgttctggcacttacgcaacaacgtctttctccacctaaaataactccccccccgagagtcagcgtgccagagacagtaaaaacagcacagcctgttagcgaatcccgaccgttaccttcaccaacaataagtcagaatttctcccggttaatcattacaggcaagcctggtagcgcccctgtaacactatcgccgacggcccgtaaccggaccgtcagtcagtggataaaaacattactaccggaaggatggaaattcagacaagagaatgcagccacgcccaagctgaataccaaactggtttcatggtctgccaatgatcagtggacccgttctctgaatcggttgctggaagaacaacacctatggggccatctggactgggataataaaacgttgaccgtcacaacatcagctgctgcaccggcacaggacacggcaaccactatctcgccagcagccatggtaaccacatctacttcccctgaatctccaacaacagcaaatagccagaacaaaccacgaaatccattcagaggaaacagcgtatcttcgtcaacccccgccgccaccccgactccaaccggctccacagtcaagtctatcccgctcatgaccgggacgcctgtcaaaccggtatctcagggtaaagagtggcgtgcgccggcaggcaccacattaagagagaacattattaagtgggcagaagaaacaaaatgcgaaagcatggcatcaacgcactggatggtcatatggccactttctgtaaccgattaccgtctggatgcgcctttaatgttccggggatcatttgaatcagccatggagcaggtatttgagttatatcggactgcgcaaaaacctttatacgcacaggcttctcgcatgcagtgcatcattacagtttctgatacaagggatggtcgctaa

SEQ ID NO: 477167 - DNA, 594 bp, Shigella flexneri
atgaaaaataataacgtaccattatatctatggttgctttggtgtacgctttgtctgtacatcactaccccatggcaatacttacgttatccatacactgacaacttatcattgccttatatgttatatttctgtgtggtggttgtgatttgcatttttccactacttttcagatgtgtacttcttattgtaaggtctgcatctaaatacgacttcacattctttgtgaagaagaaaaagggaagcaagaaatcaactatacatcttagcccctatgctgacacacgttgcccgaagtcaatgaggaaacactgggatgtattgctttctctgatatcaaaagcaattaataatgatgaaatcattgtcatgcattcacatctctttactccagcaagaataaataaacttataaagagactggaatcttatgatttgagtttttcagttattacatacccacggaaaacaagtctgtacgaaaaattatcaattccttttatatatctcttatttcagtggtctttcccgcatttgcattcggacggaatgacagtcgtcattcgtcctctccagccgcctcacaccaattaa

SEQ ID NO: 477168 - DNA, 297 bp, Shigella flexneri; identical to SEQ ID NO: 109544

SEQ ID NO: 477169 - DNA, 255 bp, Shigella flexneri; identical to SEQ ID NO: 8471

SEQ ID NO: 477170 - DNA, 684 bp, Shigella flexneri
atgaccacgacagaacatcccgtgcgccagttgctctggtgtgcactgaatgccctgaaaacggcacaggaaaaccacaatataaccagtgaaaccggattaaggcattacctgcttgaatggctttctggtgccagcagacatcctgagttccgtagtctccctggcgaaatcatggcgttaaaagcattgaccgaaaaagatcgcaatattcccatcatcggaacgctgaatacgctctttctcagctctgccactgtcggggaatgtccgttgtttcgttttcgggctgcgctgggtaaattacagaaagcaggctggcgcacttatgtctgcccatggcctgagagggtgttcaatgaatccattgaacgggcctgttccgggaaacgccatctgctacaactaagtcgcaccgaagagtgttttctaccgacaggcgatatgagggcaccagttacgttgcagctgatcactccactacaccgcaaaactatgcagcttctggaaacggcagagttaatattctccgacgaaggatttcaggtggtgagaggatacgaacatcaattcgggatcgaacgcagagaaaccctctttcacaccctatttatcgggctgcccagcctgccagaagatgtctggggtgcaacacaggaacagacgactatcacattacactga

SEQ ID NO: 477171 - DNA, 534 bp, Shigella flexneri
gtgaatatagaacacctgaataaccggaactggtatcttgcgcaatataatacagccggcaaaaacagagaatctttattctcatggctgaatgagcaaaacgtcgtaccatggactccattaataacaagaaagataagacgggcagactccaggtgctgttaccgtgaaagaatattcgctatttttcctgggtacttttttattctggctaattttgacattcaaccagtatcggcattacgtcgacatagcgccttcattgatttcgtgaagtttggcggtgaaataaaacccgtcaataaagatattgttgatggattaatgaagatttacccggaccctgtgctaaatccgggagccagggaagagctgaatgcggcttccagcatatggctgacaaaagcacaatatcagtatctcctcagaatggaaaatactctccagcctgagtcgaggatatccctgctcctggaactggtatcaaatgccgaacatcacggctttatggagcgccttgtaaacatcccatag

SEQ ID NO: 477172 - DNA, 288 bp, Shigella flexneri; identical to SEQ ID NO: 109549

SEQ ID NO: 477173 - DNA, 495 bp, Shigella flexneri
atgagtgaattttattcaagggcagcaattgtggcagacatgccatttatcatgggggagttcgaagacggcgcacgcaaaggtcacttctacgaagaggtcctcacatcaaatgttggtgaaacctttgaacagcagctcaggctggcaatcaaggcaaacgagcagggccaatacaccgggcattttatctacatcctgctgcgacgttctgatgacaaaaaaataggactaatctggttctgtgacgtacgcgatccaactggtgtgccacgacttgagatccgtgccgtcagtattgtcaaagagcttcgcgggaaaggctatgggtcaatgcttgtgtccgaaatgctcgaatcaaaccctagccggccaatgatggcgaggtgctacgtcaaatcctcgcaaatggccgacatgctaaaacgcagaggtttttaccttttcggcacgtcacccaaaggcacgcagatgctgtttcgcgacccaaagtaa

SEQ ID NO: 477174 - DNA, 234 bp, Shigella flexneri; identical to SEQ ID NO: 14010

SEQ ID NO: 477175 - DNA, 447 bp, Shigella flexneri
atgcagaggcagagaggttttcttctgtggtggcgcctggctaatgaaatgtatatatcggggaataaaaaacaacgaaaatgtgcgatcaagataaaaaatgcgcttatggcaaagtatggatgtgatattggcctgggggcgcagattggtaaaggtctcgtgctgccccaccattcaggtgtcgtcattcacggaaacgtaaagatcggtgagaatgtgattatacggcagaatacgaccattggcgaaaaggaatctgacagcagaaagaattatatcgttattggtgataatgtcgatgtaggtgcccatacgtgtattatcgggcttaacgtaaaaataggcagtaatgtaaaaattggagccatgtcttttattatggaggaggttccggataactgtacttacgttaccaggaaagaatcacggataattatgcgttaa

SEQ ID NO: 477176 - DNA, 741 bp, Shigella flexneri; identical to SEQ ID NO: 473001

SEQ ID NO: 477177 - DNA, 330 bp, Shigella flexneri; identical to SEQ ID NO: 476431

SEQ ID NO: 477178 - DNA, 303 bp, Shigella flexneri
atgctggcctgcgcccgcattggcgcgatgcattcggtgattttcggcggcttctcgccggaagccgttgccgggcgcattattgattccaactcacgactggtgatcacttccgacgaaggcgtgcgcgccgggcgtagtattccgctgaagaaaaacgttgatgacgcactaaaaaacccgaacgtcaccagcgtagagcatgtggtggtactgaagcgtactggcggaaacatcgactggcaggaagggcgcgacctgtggtggcacgacctggttgagcaagccagcgatcagcactag

SEQ ID NO: 477179 - DNA, 294 bp, Shigella flexneri; identical to SEQ ID NO: 25632

SEQ ID NO: 477180 - DNA, 429 bp, Shigella flexneri; identical to SEQ ID NO: 475968

SEQ ID NO: 477181 - DNA, 294 bp, Shigella flexneri; identical to SEQ ID NO: 25632

SEQ ID NO: 477182 - DNA, 522 bp, Shigella flexneri; identical to SEQ ID NO: 476593

SEQ ID NO: 477183 - DNA, 1596 bp, Shigella flexneri; identical to SEQ ID NO: 473547

SEQ ID NO: 477184 - DNA, 522 bp, Shigella flexneri
gtgaccgagccaaatcaggtgtggtgcggtgatgtgacctatatctggacgggtaagcgctgggcgtacctcgccgttgttctcgacctgttcgcaagaaaaccagtgggctgggccatgtcgttctcgccggacagcaggctcaccatgaaagcgctggaaatggcatgggaaacccgtggtaagcccggcggggtgatgttccacagcgatcagggcagtcattatacgagcaggcagttccggcagttattgtggcgataccagatcagacagagtatgagccggcgcggaaactgctgggataacagcccaatggaacgcttcttcaggagtctgaagaacgaatggatgccggtggtgggttacgtaagcttcagcgaggcagctcacgccataacggactatatcgttggatattacagtgcactaagaccgcacgaatataacggtgggttacccccaaacgaatcggaaaatcgatactggaaaaactctaactcggtggccagtttttgttga

SEQ ID NO: 477185 - DNA, 303 bp, Shigella flexneri; identical to SEQ ID NO: 473532

SEQ ID NO: 477186 - DNA, 375 bp, Shigella flexneri; identical to SEQ ID NO: 13405

SEQ ID NO: 477187 - DNA, 432 bp, Shigella flexneri
gtgggtgaagtcttcaacagcatctgggactgcaaacaactgattgaagagcaactcatcgattatatccgcaccacgctgacccatgcaggcggaattaccggtatgcgccggattgccgattttgcttcgctgtatcaggtacgtactggctcacacggtccttccgatttgtcaccagtctgcatggctgcggcgctgcactttgatctgtgggtccccaatttcggtgtccaggaatacatgggttattccgaacaaatgctcgaagtcttcccgcacaactggactttcgataacggctatatgcatccgggagacaaaccgggtcttggtatcgaattcgatgaaaagctggcggcgaaatatccctatgaacctgcttatctaccagtcgcacgtctggaagatggcacgctgtggaacaggtaa

SEQ ID NO: 477188 - DNA, 210 bp, Shigella flexneri; identical to SEQ ID NO: 475253

SEQ ID NO: 477189 - DNA, 885 bp, Shigella flexneri
atgaatcaggatggaaccatcaacgtgcaaagcggcgcgacggaaatcggtcagggtgccgacaccgtcttctcgcaaatggtggcagaaaccgtgggggttccggtcagcgacgttcgcgttatttcaacacaagataccgacgttacgccgttcgatcccggcgcatttgcctcacgccagagctatgttgccgcgcctgcgctgcgcagtgcggcactattattaaaagagaaaatcatcgctcacgccgcagtcatgctacatcagtcagcgatgaatttgaccctgataaaaggccatatcgtgctggttgaacgaccggaagagccgttaatgtcgttaaaagatttggcgatggacgctttctaccaccctgaacgcggcgggcagctctctgctgaaagctccatcaaaaccaccactaacccaccggcgtttggctgtacctttgttgatctgacggtcgatattgcgctgtgcaaagtcaccatcaaccgcatcctcaacgttcatgattcagggcatattcttaatccactgctggcagaaggtcaggtacacggcggaatgggaatgggcattggctgggcgctatttgaagagatgatcatcgatgctaaaagcggcgtggtccgtaaccccaatctgctggattacaaaatgccgaccatgccggatctgccacaactggaaagcgcgttcgtcgaaatcaatgagccgcaatccgcatacggacataagtcactgggtgagccacccataattcctgttgccgctgctattcgtaacgcggtgaagatggctaccggtgttgcaatcaatacactgccgctgacgccaaaacggttatatgaagagttccatctggcaggattgatttga

SEQ ID NO: 477190 - DNA, 234 bp, Shigella flexneri
atgaacaaatccgatgaaatgattcaggaactacccgatggggcattcacccgcgagtgtgctgaaaccgttgttgcacagtaccggaatgtctttatcgaggatgatcagggaacgcattttcgcctggttgtccgtcaggatggcacgttgatctggcgctcctggaattttgaggactgtgccgggtactggatgaaccggtacatcagggatttcggcattcgtaagtaa

SEQ ID NO: 477191 - DNA, 522 bp, Shigella flexneri; identical to SEQ ID NO: 476593

SEQ ID NO: 477192 - DNA, 522 bp, Shigella flexneri; identical to SEQ ID NO: 476593

SEQ ID NO: 477193 - DNA, 1191 bp, Shigella flexneri; identical to SEQ ID NO: 476562

SEQ ID NO: 477194 - DNA, 990 bp, Shigella flexneri; identical to SEQ ID NO: 293225

SEQ ID NO: 477195 - DNA, 237 bp, Shigella flexneri; identical to SEQ ID NO: 390721

SEQ ID NO: 477196 - DNA, 522 bp, Shigella flexneri; identical to SEQ ID NO: 476593

SEQ ID NO: 477197 - DNA, 363 bp, Shigella flexneri; identical to SEQ ID NO: 476531

SEQ ID NO: 477198 - DNA, 216 bp, Shigella flexneri; identical to SEQ ID NO: 474400

SEQ ID NO: 477199 - DNA, 1860 bp, Shigella flexneri
atgaggccaagtgaacttagcgacctgctttgggcgcaggttgacagggtggctccgcacctgttgccaaacggcaagatagaggggcatgagtgggttgccggtaacgtcaacggtgacaagggaaacagccttaaggtcaaccttatcggcaagaaaaaatgggctgatttcgctgagggagacggcggtgacatgcttgatttgtggatggcatgtcgtggaattaacctgcatcaggctatgcaggaagcgaaagcatttctcggtatcaaggatgacgatcaccatttcgatgccagacgtgagaagaaattctccagacctgatcgtaagaaaatcgcccgctacgttaccagaacagaatcccatcttgagtacctgcaatcgcgtggcatatcgccagaagtcgtaaagcgctacgaggttgtcagcggcaaggtgtggaatggagaacgagaactggatgctctggtgcttccgtacaaacgcgatggtgagttgttgcaggtcaagcgaatcagcactgagcgcccggacgggaagaaagtcattatggcagaaggtgattgcgaaccttgcctgttcggatggcaggctctggacgctggcgtgagggtggttgtgctttgcgaaggcgaaattgattgtatgagctatgcgcaatacggcatctcggcgttatccgtgccgtttggtggcgggaaaggcgctaagcaacagtggattgagtttgagtatcacaacctcgacaggtttgaggaaatattcatctcgatggacgttgatgatgttggtcgtgaagccgcaagggaaatcgtaagccgactcggtgaacatcgttgccgtcttgttactctgccgtacaaagacatcaacgaatgcctgatgaacggtgttaccgaggatgaaatctggcagtacatcggcacggcatcctacttcgatcctgaagaactctacagtgcgcgagagttttaccaggacactatcaacgctttctacggcaagcagcagtatctgtttaatccaccgtgggaatctctggcagataaattccagttccgtgaggcagagttgacgctggtcaatggtgtgcacggtcacggaaaggcatgcccactgaatgagcctattcttttagctgatgggacatggactactcacgggaatgtaaaaattggcgatcaggtggcgtcagtagacggcaatccgtcaactgtcactgggatattcccgcagggtgttagagatgtttaccgagtcacatttgaagatggtcgttatgttgattgcgcaggcgatcacctatgggaggtcactagtcgtggattcacgaaaggcgagaaacgccgcgtgatagataccttcgggttgaagcggttgagtgaaacgaagaggcacaaaaatggcgttaggattcctgaaataactggtgactttggcgaccactcagagccattagcatgggttatcggctcccttctcggggatggtagtcttagcaatgggagcgtgaagttttcaaacgtcgagccatacatgatcgagcgtatgaaggctgaactgcctgattacaacttctctggagatggtaaggactggctgatatcaacggcgcgtggtcaggtaaatccactcatggagaccctgcgaggttatggactaatggggtgcacagcaaaaaacaaattcatccctcgtgtgtttttttccgcaaataaatcaacgcgtataggcatgctgtgtggtctgcttgaaacggatgggtatgtcgagaaggatggaacgcttgttttttcctcagcaagtgaagaactgcgcaatgaagtggtcaacaaaaactggccaccgagttag

SEQ ID NO: 477200 - DNA, 2520 bp, Shigella flexneri; identical to SEQ ID NO: 477084

SEQ ID NO: 477201 - DNA, 1425 bp, Shigella flexneri; identical to SEQ ID NO: 474554

SEQ ID NO: 477202 - DNA, 600 bp, Shigella flexneri; identical to SEQ ID NO: 19015

SEQ ID NO: 477203 - DNA, 1419 bp, Shigella flexneri
atgcacataactaatttgggattgcatcaggtttcatttcaaagcggagattcctataaaggcgcagaagaaaccggaaagcacaaaggtgtaagcgtgatttcatatcaaagagttaaaaatggagaaagaaataaggggatcgaagcgcttaatcgattatatttacagaaccaaacaagcttaacaggaaaaagccttttgtttgcgcgtgacagagctgacgttttttgcgaggcaataaagttggcaggtggtgatacgtcaaaaattaaagccatgatggaacgattagatacctataaacttggtgaagttaataaaagacatattaatgagcttaataaagtaataagtgaagagataagagcacagctaggcattaaaaataaaaaggaattgcaaacgaaaataaaacaaatatttactgattatttaaataataagaattggggaccggtcgacaagaatattagtcatcatgggaaaaattatggttttcaattaactcctgcctctcatatgaagatagggaataaaaatatatttgtcaaagagtataatggaaaaggaatttgttgtgcttctacgagagagagtgatcatatcgcgaatatgtggctttcaaaagtggtggatgatgaggggaaggaaattttttcgggtatcagacatggagttatatcagcctatggattgaaaaaaaactcatctgaaagagctgttgctgctcgtaataaagctgaggagttagtaagcgcagcattatatagcagaccagagttattatcacaggctttgtctggtaaaacagtagatttaaagattgtttcgacttctcttctgacgccgaccagtttaaccgggggagaggagagtatgttaaaagatcaggtgaacgcattaaaagggttaaactctaaaagggggaagccaacgaaattattaattcggaatagtgatggtcttctgaaagaagtaagcgttaatctaaaagtggtgacatttaactttggtgtaaatgaattagcgctaaaaatgggcttaggctggaggaatgttgacaagcttaatgatgaatcaatatgttctttgttgggggataatttcctcaaaaatggtgtgattggaggttgggctgcagaagcaatagaaaaaaatccaccatgtaagaatgatgtgatatatctggctaaccagataaaagagattgtaaccaaaaagttacaaaaaaatgataatggagagccgtataaattgtcacaaagaatgactctattggcttatactataggtgctgtaccttgctggaattgtaagagtgggaaggacagaacaggtatgcaggatgctgaaattaaaagagaaataataagaaaacatgaaacaggtcagttttcttactattctaatgaatag

SEQ ID NO: 477204 - DNA, 279 bp, Shigella flexneri; identical to SEQ ID NO: 127146

SEQ ID NO: 477205 - DNA, 525 bp, Shigella flexneri
atgtatcaggcaggcgttcctctgcgtcatatgcgaatttgcgaaccttttggcccggagcaacgacaaggattatggctctgtcacgttatcgaaccggatcgctgggctgctatgtgcgcacgagtcagcggggtaaaaagtggcggcatttacgccggacatgacaatcatttctatgggcatcggaaaatcctcaaaccagaacatttagactggcaagaatatgcattattgctgctcaatagcatgccggaaaaaacagctgagcattaccgcaataaaatcgccatttatttgcactggtatcagaaaaaaggcatcgaggttccacaaacccagcaaggggacattggcgcgaaagatatcccctcctggcggcggatatgcaaagttttactcaataacgattactggtgtcgggcattatcatttagtcctacgaaagcgaagaactatcagcgttataacgaacggataaaaggaaaacgtcaggaatgggggatactatgcaacaacgattaa

SEQ ID NO: 477206 - DNA, 303 bp, Shigella flexneri
atgaaaaaaagaaattttagcgcagagtttaaacgcgaatccgctcaactggttgttgaccagaaatacacggtggcagatgccgccaaagctatggatgttggcctttccacaatgacaagatggggcaaacaactgcgtgatgagcgtcagggcaaaacaccaaaagcctcccccattaccccggaacaaattgaaatccgtgagctcaggaaaaagctacaacgcattgaaatggagaatgaaatattaaaaaaggctaccgcgctcttgatgtcagactccctgaacagttctcgataa

SEQ ID NO: 477207 - DNA, 921 bp, Shigella flexneri
atgatgaataataaagtcagcttcactaacagcaataatccaaccatctctttgtctgcagtgatctatttccctccaaaatttgatgaaacccgtcagtatccggcaattgtggtatctcacccaggtgggggcgttaaagagcaaacggccggaacctatgccgaaaagctggcggaaaagggatttgtcactattgcttatgacgcatcttatcaaggtgaaagtggcggcgagccgcgtcagttagaaaacccatacattcgtactgaagacgtcagtgccgtgattgattacctgacaacgctttcttatgtcgacaatacccgaattggtgcgatgggaatttgtgccggtgcaggatatacagccaatgctgcaattcaggatcgccgcatcaaggccatcggtaccgttagtgcggtcaatattggttcgatgttccgcaatggttgggaaaacaatgtgaaatctattgatgctctgccacacattgaagctggctcaaacgcccgaaccagcgatattagcagcgaagaatacgccattatgccactggctccaatgaaggaggccgatgcgccgaacgaagaactgcgtcaggcctgggagtattaccacacacctcgtgcgcagtatccaacagcaccgggttacgctactttgcgcagccttaaccagattattacctatgatgcttaccatatggcggaagtgtacctgactcagccgatgcagattgtggcgggcagccaggcagggagcaaatggatgagtgacgacctgtacgatcgggcatcaagccaggataaacgctatcacattgttgaaggcgcaaaccatatggatctttatgacggcaaagcctatgtggctgaagcaatttcagtattagctccgttctttgaggaaactctgtaa

SEQ ID NO: 477208 - DNA, 243 bp, Shigella flexneri; identical to SEQ ID NO: 462679

SEQ ID NO: 477209 - DNA, 324 bp, Shigella flexneri
gtggccagatgcactgtggcacgtctcatggcggttatggggcttgccggtgttctccggggtaaaaaggtccacactaccgtcagccggaaagccgttgccgcaggcgaccgcgtaaaccgtcatcaaggcaatgtgccgcgtactccgggtggcccgcagcggctggtatacgtggtgtcagcggcggacaaggataaacacacgtccgcagttccgtcagcactgcgacagcgttgtccgcaaggcttttacccagtccagcgttacggtgccccacgcctgacggatgaactgtgtgctctggttaccactttaacgtaa

SEQ ID NO: 477210 - DNA, 675 bp, Shigella flexneri; identical to SEQ ID NO: 473842

SEQ ID NO: 477211 - DNA, 639 bp, Shigella flexneri; identical to SEQ ID NO: 476552

SEQ ID NO: 477212 - DNA, 441 bp, Shigella flexneri; identical to SEQ ID NO: 476553

SEQ ID NO: 477213 - DNA, 351 bp, Shigella flexneri
atggtagtgtccgctattgccagtacacctcacctggtgtatatccgcactcgcgaaacatatggaacccggcggctccagacggagctggcagataacggaattatcgtcggtcgtgacagactggcaggtcttcgtaaggagctgaggctgcactgtaagcagaaacgcaagttcagggcgaccacaaactctgaccacaatctgccggttacgccgaatctgctgaatcagaactttacgcccacagcacctaatcaggtctgggtcgcagattcagttgtccaggccttccgaaatcaaccgactgaaggcgctggtcgcgaaactgcagcgtatgcagttcggtaa

SEQ ID NO: 477214 - DNA, 522 bp, Shigella flexneri; identical to SEQ ID NO: 477184

SEQ ID NO: 477215 - DNA, 327 bp, Shigella flexneri; identical to SEQ ID NO: 475432

SEQ ID NO: 477216 - DNA, 522 bp, Shigella flexneri; identical to SEQ ID NO: 476460

SEQ ID NO: 477217 - DNA, 522 bp, Shigella flexneri; identical to SEQ ID NO: 476460

SEQ ID NO: 477218 - DNA, 180 bp, Shigella flexneri
atgaataagccgcaactggcggaatcacagaagaccgctttgcttaccgaagcggagtctgtcatccggcagccggggcgtgctgtcaggctgaacagggaaacggatgaatcaggggaggcccgggggcgggcctctgtttttccggagtcagtccggtctgtggtttatgcgatgtga

SEQ ID NO: 477219 - DNA, 522 bp, Shigella flexneri; identical to SEQ ID NO: 477184

SEQ ID NO: 477220 - DNA, 303 bp, Shigella flexneri; identical to SEQ ID NO: 473532

SEQ ID NO: 477221 - DNA, 423 bp, Shigella flexneri; identical to SEQ ID NO: 474638

SEQ ID NO: 477222 - DNA, 303 bp, Shigella flexneri; identical to SEQ ID NO: 473532

SEQ ID NO: 477223 - DNA, 210 bp, Shigella flexneri
atgctaagaattaaacattttgacgctaacgaaaaactacagattttatatgcaaagcaactctgcgagcgtttttcgattcagacattcaaaaataaatttacaggcagtgaaagtttagtcactcttacttccgtgtgtggggattgggtaattcgtattgatacattatcttttttgaaaaacatttttatcattttcaactattga

SEQ ID NO: 477224 - DNA, 303 bp, Shigella flexneri; identical to SEQ ID NO: 477206

SEQ ID NO: 477225 - DNA, 351 bp, Shigella flexneri
gtggttcagcgcctgatgggaatcctctcacttaaggcagcgattaaggtcaagcgataccgctcttacagaggagaggtagggcaaaccgccccctatgttctccaacgagatttcaaggctacgcggccaaacgagaagtgggttaccgattttactgaatttgcagtcaatgggcgcaagctgtatttgtctccagtaatagatctcttcaacaacgaagttatttcttacagcctttcggaaagaccagtgatgaacatggtcgagaatatgctcgatcaggcattcaaaaagcttaatgaaccgccccgggaatcctggagactaaacttcctgagaaagaggtaa

SEQ ID NO: 477226 - DNA, 474 bp, Shigella flexneri; identical to SEQ ID NO: 474721

SEQ ID NO: 477227 - DNA, 303 bp, Shigella flexneri; identical to SEQ ID NO: 473532

SEQ ID NO: 477228 - DNA, 327 bp, Shigella flexneri; identical to SEQ ID NO: 477049

SEQ ID NO: 477229 - DNA, 435 bp, Shigella flexneri
atgtacggaacatgcgaaacgctctgccgtgagctggcagcaaagtatccgggaaacacgccgctgatgctgcttatctggtccccggaagagattcaggcactggccgacggtatggaaatttctctgaccgatcatgaaatcaggactgtcctggcgcacctggaggacatcccggaagaccagcggatggagtccggtatttcttccgccgctgcgatggagattatcagcaacgtgagcgaaaaccgcctggtgaccgtcccggctgaactgctggcgtccctgattcagaccgctgaacaggcactgtggaaacgtgaatgggccgcccgtgataacggccttgccgtcccggaatgtgttacccgccgtcaggcagtgattaatcaggcccgcaccctgctgaaaaacaacacacacgaaaacaactga

SEQ ID NO: 477230 - DNA, 213 bp, Shigella flexneri; identical to SEQ ID NO: 474663

SEQ ID NO: 477231 - DNA, 225 bp, Shigella flexneri; identical to SEQ ID NO: 133446

SEQ ID NO: 477232 - DNA, 474 bp, Shigella flexneri
gtgtctttcccgtatgccggagaatggctgaccgaagacgaaatcagggctgttcttgatgcggtgcacgatgcggtacgaagcatctgttaccaggtggcagaagatgcgcggtgtatccgggcggcgctgaccaccaccggtcagacgttgctgacccgccagacccgccgctttcgcctggtggtgaaggaaagcgatcacccctgctggctcgatgaagacgacgaaaacctgcccgtggtgctcgatgccatcctgaaccggggcgctcgtttttcgtcggtggaaatgtacctggtcagcgattgtattgagcatatcctgtccagtgggctggcctgcgatgtgctgcgtataccggatgaaccgccccgccgctggtttgaccgtggtgttctgcgggaggtggtccgggaagcccggaccgaaatccgcagcatggcggatgccctggcaaaaatccggaaatga

SEQ ID NO: 477233 - DNA, 327 bp, Shigella flexneri; identical to SEQ ID NO: 474643

SEQ ID NO: 477234 - DNA, 354 bp, Shigella flexneri; identical to SEQ ID NO: 466835

SEQ ID NO: 477235 - DNA, 315 bp, Shigella flexneri
atgccactgctggataagctgcgtgagcagtacggggtcggaccggtatgcagtgaactgcatattgccccatcaacgtattaccactgtcagcaacagcgacatcatcatgataaacgcagtgcccgtgcgcagcgcgatgactggctgaagaaagagatacagcgcgtatacgatgaaaatcacaaggtatacggtgtaaagtctggcgtcagttgttacgggaaggtatcagagtggccagatgcactgtggcacgtctcatggcggttatggggcttgccggtgttctccggggtaaaaaggtccgtatga

SEQ ID NO: 477236 - DNA, 243 bp, Shigella flexneri
atgaacaaacgagctgaagctgagcgtatcgctaaagagcaacgacttcaggctgagcgtatgcgtgaagagaacatgaccgatgcagaatggcaaaaagagctacagcgccgcgaacaggtcaaagctgaacgccggacctatggtgaaaacctccgcagcgctactcattccgctggtcgctcacgtgccgctatcgtcgctgaccttgagtcaggcggtaactggatggacagcttgtaa

SEQ ID NO: 477237 - DNA, 336 bp, Shigella flexneri
atgtcgcgtaaaggtaactgttacgacaacgctccgatggaaagcttctggggaatatctccccggcagccttcagggaaaaatatcatcagatggctgcttaaaaaaagaacaaatggtagtgtccgctattgtcagtacacctcatatggagatgggcacaaattaccattcaataaagttcgttgggtggcgctggttggaggagacaaagaatcatttgtccagatgggctgggaaaaaaatataagcgattatttaaaaaatatgtgtagttatcttggtattgaagatgccgatgtcactttcttgtgtaatacagtggtattcgggtaa

SEQ ID NO: 477238 - DNA, 303 bp, Shigella flexneri; identical to SEQ ID NO: 473532

SEQ ID NO: 477239 - DNA, 219 bp, Shigella flexneri; identical to SEQ ID NO: 474644

SEQ ID NO: 477240 - DNA, 252 bp, Shigella flexneri
gtggaaatcgacaacaacatcgctgaaaatgccctgcgggcggtcagtctgggtcgtaaaaacttcctgttcttcggctctgaccatggtggtgagcggggagcgctactgtacagcctgatcgggacgtgcaaactgaatgacgtggatccagaaagctaccttcgccatgtgcttggcgtcatagcagactggccggtcaaccgggtcagcgaactgcttccgtggcgcatagcactgccagctgaataa

SEQ ID NO: 477241 - DNA, 255 bp, Shigella flexneri
gtgacgatgtcgctgaagccgcagaatatcctctgtcaccgcatcagtgagtcagaggttatcccggtcgtctgcgacaacattggtgaaagcacattgattccactggcgacctggtcgaagtggtgttgtctgcgtaagcaagagcggttatggaaacgatttatcgcccaaccggcgctggctattgccctgcagaaagatctgcaacctcgtgagagcaaaacgctggccctcacttcgcgcgaagcttaa

SEQ ID NO: 477242 - DNA, 465 bp, Shigella flexneri
atgaagtttttaccctatttttttcttctctgttgtggtctttggtcgaccataagtttcgcagacgaagattacatcgaatatcgtggcatcagtagtaacaaccgtgtcacacttgatccagtacgtctgagcaacaaggaattacgttggttagcgagcaaaaaaaatcttgtgattgcagtacacaagtcccaaacggctaccttgttgcataccgattcgcagcaacaggttcgtggtattaatgctgattatttaaatcttttaaaaagagcgttaaatatcaaattaacactccgggaatacgcagatcatcaaaaagcaatggacgcgcttgcagaaggtgaagtcgatatagtgttatcacatttagttacttcgccgcctcttaataatgacattgctgcaaccaaaccattgataattacctttccggcgctggtaaccacccttcacgagtaa

SEQ ID NO: 477243 - DNA, 888 bp, Shigella flexneri
atgtcatcatcccgtccggtgttccgctcgcgctggctgccttatctgctggtcgcgccgcagctcatcatcaccgttatcttttttatctggcctgcgggcgaagcgttgtggtactcgctacaaagcgtcgatccgtttggtttctccagccagtttgtcggtctggataacttcgtcacgctgtttcatgacagctattatctcgactccttctggacgacgataaaattcagcacctttgtcaccgtcagcggtttgctggtatcgctgttctttgcggcgctggtggagtacatcgtgcgcggcagtcgtttctaccaaaccttaatgttgctgccgtatgccgtggctcccgccgttgccgccgtattgtggatcttcctgtttaaccccggtcgcgggctgatcacccattttctcgctgagttcggctacgactggaaccacgcgcaaaatagcggtcaggcgatgtttctggtggtgtttgcctcggtgtggaagcaaatcagctacaactttctgttcttctatgccgcgctgcaatccattccccgttcgttgatcgaagccgcagccatcgacggtgcagggccgattcgccgcttctttaagattgcgctgccgcttatcgccccggtgagtttcttcctgctggtagtgaacctggtgtatgccttcttcgacaccttcccggtgatcgacgccgccacgtccggcgggccggttcaggccaccacgacgctgatttataagatctaccgcgaaggttttaccggactggatctggcttcgtctgccgcacagtcgatggtgctgatgttcctcgtcatcgtgctgacggtggtgcagttccgctatgttgaaagcaaggtgcgttaccaatga

SEQ ID NO: 477244 - DNA, 348 bp, Shigella flexneri
gtggcggatggcgaatttatcgtgatggtcgggccgtctggctgcgggaaatcgacgctgctgcgtatggttgccgggctggagagggtgaccgaaggcgatatctggatcaacgaccagcgcgtgaccgaaatggagccgaaagatcgcgggattgcgatggtgttccagaattacgcgctttatccgcatatgagcgtcgaagaaaacatggcgtgggggctgaaaattcgcggcatgggcaagcagcaaatagccgagcgcgttaaagaagcggcgcgcattctggagctggacggtctgctcaaacgtcgcccgcgcgagctttccggcggtgttcttgtttga

SEQ ID NO: 477245 - DNA, 390 bp, Shigella flexneri
gtgatacaggggcaggcggtggaggccgcctgtcagtccgcgcgaaaacccctggcaggctggcgcctgccggaaatgcggggtgcagcgcctgcggcgctgccggcccggctttccggtcagaaggtagtgtatggctgtatgcagggaacaggtgtgatattccgtgacactgtcaccgtttctggctgtcttttattgcgcccacttcggctcccggctgcctggcggcatccggtcgtcaggcccgactccgacgggcagctgctggcgcacccgccagtctccgccgaacccgctggcgcggtttcgggctgccgctacggtccgatgcgtgaaaacccggcttgcagcgaccgttccggtcgcgccgcccctgtcgcgccgtga

SEQ ID NO: 477246 - DNA, 207 bp, Shigella flexneri; identical to SEQ ID NO: 10660

SEQ ID NO: 477247 - DNA, 1086 bp, Shigella flexneri
atgtcgcagttaaaacaacctattttcctgaaaaagataaaaaaagtcatcaacacaatccctgggcttgaagagcaaatctttgcatgccgaaataaaaaacgcagcgacaatccattattatttatcgacagaaaagatgaagaacgcatactaatgagtcgtctccagagccaacaaaaaaatgaagaactggcttctaaactagaatctttatttcatggaaacgaattatcgtcaccacacagtattttgtgttttatatactggcgctatacaaagaaaatttatcgcctaagcgaggacatcatcagtgatgtggctaacacctatgttgataacattcctgcacagatcctcaaggaactcccttcatggagtatctatgtttcagccgaaaatctgcatactatacttcctacgtcctacccgatacatggatttttcttttatccatttttggacaataatggaaatattatccggcttttcattattgatgatctgaaacaaagtcaaggaactacagggctaaaagaaaaggatgttgacgtcgtcaataatatcatcagaataaaggactctcgtgaaggacttcttgactccagaaagatggagtgtatcgatggtgaagtcgtcgtaacagttaacgaaaagctcaaagatttcagagacagggagtttaatcttcttaacgcacagatatcaatggtgctttatatctgttcacagatcaatgatataaaagaaaaaaatcaatttaaacggtcagaaaagcacaaaaagcatgttcacactcaccatgaactaccagcacaaaacattcgggagtgggacgttggtattcgaatggggcaagccatacggcaatatcgccaagcagaacccacagggaaagagcggacaacaataggtagcaaacgtcctcatatacgccggggacactggcatacatactggacaggaagtaagaaaccagaactagcccatgagcgtaaacctagattaatatggttacctccggtaccagttaatttagaagacgtaaacaaactaccggtggtaataacacccattgataaatga

SEQ ID NO: 477248 - DNA, 297 bp, Shigella flexneri; identical to SEQ ID NO: 10662

SEQ ID NO: 477249 - DNA, 210 bp, Shigella flexneri; identical to SEQ ID NO: 468500

SEQ ID NO: 477250 - DNA, 615 bp, Shigella flexneri
atgattggagcatatgcaaaccgtggcggcacccattctaaaaaagaaacatgcgtgatcgcattcgcacttttctacattattttcgccgtcccattactaatcatttggaatacacctaccagttggggactagcagtaatcccaactggattcctactatactccggatataaaaatggaagaaagaaaagagcaatcgtaaataatatcctagaacagataaagactgaatatcatgatgtattcgatccagacccatcttacgaacacaaatcaataccatcattatatttcggaattgatatcaaaaaaggtactgcgttatatattcggctttaccccaataaaacattagatgtcattggcattgatattgataattttacacggacagtagtaagagaaaactgtatggaaatacacacaaagtatgtcaatatgccaatgttagaattgcctattggtgttaactctgctcgttctattgcaaacacattgcacgcaatggcaagtcgaggatatgattaccctgtcgactttcctcgcctgattcaggaaaagcgtaaggagtgggagcagattgcaggtatgcctgtagctgaagtattttaa

SEQ ID NO: 477251 - DNA, 2169 bp, Shigella flexneri; identical to SEQ ID NO: 10664

SEQ ID NO: 477252 - DNA, 444 bp, Shigella flexneri
atgattaatgaagccacgctggcagaaagtattcgccgcttacgtcagggtgagcgtgccacgctcgcccaagccatgacgctggtggaaagccgtcacccacgtcatcaggcgctaagtacacagctgcttgacgctattatgccgttctgtggtaacgccctgcgactgggcgttaccggcacacccggcgcggggaaaagtacctttcttgaagcctttggcatgttgttgattcgtgagggattaaaggttgctgttattgcggtcgatcccagcagcccggtcactggcggtagcattctcggggataaaacccgcatgaatgacctggcgcgtgccgaggcggcgtttattcgcccggtacccctcctccggtcatctgggcggtgccagtcagcgagcacgggaattaatgctgttatgcgaagcggcgggttatga

SEQ ID NO: 477253 - DNA, 450 bp, Shigella flexneri; identical to SEQ ID NO: 476363

SEQ ID NO: 477254 - DNA, 942 bp, Shigella flexneri
atggaaaagagaaaaattattctggattgtgagccgggtcatgatgatgctattgcaatgatgatggcagcgaaacatccggcaatagatttattaggcatcactattgtagcgggtaatcagacgcttgataaaacattaattaatggcctgaatgtttgccagaaactggagattaatgttccggtttatgcggggatgccgcaacccattatgcgtaaacaaatcgttgccgataatattcacggtgaaaccggactggatggcccggtattcgagccgctgacccgccaggcagaaagtacccatgcggtgaaatatatcatcgataccctgatggcaagcgatggcgatatcactctggtgccggttggtccgctttcaaatatcgcggtggcaatgcgtatgcaacccgcaatcctgcccaaaatccgtgaaattgtgctaatgggcggcgcttacggtacaggcaacttcaccccatctgccgagttcaatatctttgccgacccggaagccgcccgcgtggtgttcacctccggcgttccattagtgatgatgggcctcgatcttaccaaccagaccgtttgcaccccggatgtaattgctcggatggaaagggtaggcggccctgccggagagctgttcagcgacatcatgaacttcactctcaaaacgcagttcgaatactacggcctggctggcggcccggtgcatgacgccacctgcattggttatctgatcaaccctgatggcattaaaacccaggatatgtacgtcgaagtggacgtcaacagcggcccttgctacgggcgtacggtctgcgacgaactgggcgttcttggcaagcccgctaataccaaagtcggcatcactattgataccgactggttctggggcttagtcgaagagtgcgtgcgcggctacatcaaaacccattaa

SEQ ID NO: 477255 - DNA, 210 bp, Shigella flexneri; identical to SEQ ID NO: 475253

SEQ ID NO: 477256 - DNA, 774 bp, Shigella flexneri
atgaacctgacgactctgacccaccgcgatgcgttgtgtctgaatgcgcgctttaccagccgtgaagaggccattcacgcgttgactcaacgtcttgctgctctggggaaaatttccagtactgagcaatttctgaaagaagtgtatcgccgtgaaagccttggcccgaccgccttaagtgaagggttggctgtgccgcatggcaaaactgctgcggtaaaagaagcggcgtttgcggtcgccacactcagcgagccgcttcagtgggaaggcgtggatggcccggaagcggttgatttagtggtgttgctggcgattcccctcaatgaagcgggtactacgcacatgcaactgctgacagcgctgaccacgcgcctggcggatgatgagattcgggcgcgtatacagtcggcgacgacgcctgatgaattgctctcggcgctggatgacaagggaggcacgcaaccttctgcctctttttccaacgcgccaactatcgtttgcgtaacggcctgcccggcgggtattgctcacacctacatggctgcggagtatctggaaaaagccggacgcaaactcggcgtgaatgtctacgttgaaaagcaaggtgctaacggtattgaagggcgtttaacggcggatcaactcaatagtgcaactgcctgtatttttgcggctgaagtcgccatcaaggagagtgagcgttttaacggcattcctgcgctttctgtgcctgttgccgagccgattcgccatgcagaagcgttgatctaa

SEQ ID NO: 477257 - DNA, 2634 bp, Shigella flexneri
atgaaagcggtatctcgcgttcacatcaccccgcatatgcactgggatcgggagtggtatttcaccaccgaagagtcacgcattctgctggtcaataatatggaagagatcctgtgccgactggaacaggacaacgaatacaaatattacgtactcgacgggcaaacggcgatcctcgaagattatttcgcggtgaaaccggaaaacaaagaccgcttgaagaaactggtagaagccggcaagttgattatcggcccctggtatacccagaccgataccacgattgtttctgcggaatccatcgtccgtaatctgatgtacggaatgcgtgactgcctcgcgtttggcgagccgatgaaaataggttatttacccgattcctttggcatgtccgggcaactgccgcatatctacaatggatttggcattacctgcaccatgttctggcgtggatgttctgagcgccacggtacggataaaaccgagtttttgtggcaaagcagtgacggtagcgaagtgacggcgcaggtgatgccgttgggttatgccatcggtaagtacttacctgcggacgaaaacggattacgcaaacgcctcgacagttattttgacgtgctggaaaaagcgtctgtaaccaaagagattttgctgccgaatgggcatgatcagatgccattgcagcaaaatatcttcgaagtgatggagaaactgcgcgaaatttatcctcaacgaaagtttgtgatgagccgctttgaagaggtatttgagaagatcgaagcgcagcgagataatctggcaaccctgaaaggggaatttattgatggcaaatatatgcgcgtgcatcgcaccatcggttccacgcgcatggatatcaaagttgcccacgcacgtattgaaaataagattgttaatctgctggaaccgctggcaacgctggccaggacgttgggttttggataccaccacggcttgctggagaaaatgtggaaagagatcttaaaaaatcatgcccacgacagcatcggctgctgctgtcgtgacaaagttcatcgcgaaatcgtcgcccgcttcgaactggctgaagacatggcggataatctgctgcgtttctatatgcgtaaaatcgccgacaacatgccgcagagcgacgccgacaaactcgtcctgtttaacctgatgccctggccgcgggaagaagtgatcaacaccactgtgcggctgcgcgccagccagtttaatctacgagacgatcgcggtcagcctgtaccgtattttattcgccatgcccgtgagatcgatccaggcctaatcgatcggcaaatagttcattacggtaattacgatccctttatggagtttgatatacagatcaaccagattgtcccttctatgggctatcgcacgctttatatcgaagcgaatcagcctggcaacgtgattgcggcaaaaagtgacgctgaagggatactggaaaatgctttctggcaaattgcgctcaatgaggatggaacgctacaactggtagataaagatagcggtgtgcgctatgaccgggtgttgcaaattgaagaaagctctgatgatggtgatgaatatgactattcacccgcaaaagaagagtgggtaattacttcggcgaatgcgaaaccgcaatgcgagattattcatgaggcctggcagagcagggctgttatccgctatgaaatggcggtgccgcgtaatctgcaacaacgcagcgcaagacaatccactggcagagtagatgtcgagttggttgtcactcttagtcataacaacaggcgcattgatgtggatatcaaccttgataaccaggctgacgatcatcgccttcgcgtcctgatccctacatcttttaacaccgatagtgttctggcagatacccagtttggttcgctaacgcgccccgtgaacgacagtgcaatgaacaactggcagcaagaaagctggaaagaagcgccggttccggtatggaatatgctcaactatgcagccttacaggaagggcgtaacggcatggctgtctttagcgaagggctacgtgaatttgaagtcatcggtgaagagaagaaaacctttgccattacgttgctgcgcggcgtgggcttactggggaaagaagatctgcttttaaggcctaggcggccttcgggaattaaaatgccagtcccggactcacaactacgtggtctgctttcttgtcgcctaagtttattgagttataccggtacgccaaccgccgctggtgtagctcagcaggcgcgagcatggctgactccagtacagtgttacaacaaaatcccatgggatgcgatgaagctcaacaaagccggattcaacgtgccggaaagttatagtttgttgaaaatgcccccagtgggatgcctgataagcgcacttaagaaagctgaagaccgacaagaagtgattttacggctgtttaatccggctgaatcagcaacctgtgatgcgactgttgctttcagtcgcgaggtgatttcttgctcagaaacgatgatggatgaacacattaccaccgaggaaaatcaaggttcaaatctatcggggccttttttacccggccagtcacggacgttcagttaccggcttgcctga

SEQ ID NO: 477258 - DNA, 189 bp, Shigella flexneri
atgagcagaaaaacccaacgttactctaaagagttcaaagccgaagctgtcagaacggttcttgaaaatcaactttcgatcagtgaaggcgcttcccgattatctcttcctgaaggcactttaggacaatgggttcccgcacggtggctgaactggaatctgaaattctgcaactgcgtaaggcgttaa

SEQ ID NO: 477259 - DNA, 1203 bp, Shigella flexneri; identical to SEQ ID NO: 52387

SEQ ID NO: 477260 - DNA, 222 bp, Shigella flexneri; identical to SEQ ID NO: 13641

SEQ ID NO: 477261 - DNA, 828 bp, Shigella flexneri; identical to SEQ ID NO: 13642

SEQ ID NO: 477262 - DNA, 882 bp, Shigella flexneri; identical to SEQ ID NO: 13643

SEQ ID NO: 477263 - DNA, 189 bp, Shigella flexneri; identical to SEQ ID NO: 13644

SEQ ID NO: 477264 - DNA, 780 bp, Shigella flexneri; identical to SEQ ID NO: 52392

SEQ ID NO: 477265 - DNA, 237 bp, Shigella flexneri; identical to SEQ ID NO: 13646

SEQ ID NO: 477266 - DNA, 1428 bp, Shigella flexneri; identical to SEQ ID NO: 13647

SEQ ID NO: 477267 - DNA, 249 bp, Shigella flexneri; identical to SEQ ID NO: 13648

SEQ ID NO: 477268 - DNA, 225 bp, Shigella flexneri; identical to SEQ ID NO: 19405

SEQ ID NO: 477269 - DNA, 204 bp, Shigella flexneri; identical to SEQ ID NO: 13698

SEQ ID NO: 477270 - DNA, 1068 bp, Shigella flexneri; identical to SEQ ID NO: 13699

SEQ ID NO: 477271 - DNA, 507 bp, Shigella flexneri; identical to SEQ ID NO: 13700

SEQ ID NO: 477272 - DNA, 768 bp, Shigella flexneri; identical to SEQ ID NO: 13701

SEQ ID NO: 477273 - DNA, 333 bp, Shigella flexneri; identical to SEQ ID NO: 13702

SEQ ID NO: 477274 - DNA, 738 bp, Shigella flexneri; identical to SEQ ID NO: 13703

SEQ ID NO: 477275 - DNA, 225 bp, Shigella flexneri; identical to SEQ ID NO: 13704

SEQ ID NO: 477276 - DNA, 303 bp, Shigella flexneri; identical to SEQ ID NO: 24284

SEQ ID NO: 477277 - DNA, 792 bp, Shigella flexneri
atgccaatgatacttgtaaagaagaatccccggggcaaagtgattcgggagcttagcagtgaggaagagactgcagtaaagacggtctgtggactgaaaaagccagcaaccatggcactacataacctggccaatgatattctccgggaaatgcgtgagtatgatgcatggttacagtgtgactgtattccgggagattcgccggccatgaattttgctgctcttaaaaacaatacgggtactctttatctgtccagttttaatcatgagcatgcacctgaatgccccatgtatcgtcagttatccggaaatgaagaggaaacatcttccggagcaagccggcatcccgttagcacccgtataaattacagaaactttttaccacctgatgacagtaattctgttatcagactgcaggcccgctctgcttaccataatggtgagagctcctccgttcgcaagaaacgtccgcgccttgcccgtttactcctgtctcttattgacgatgctgggctgaataaactggattccctggctaatccccgtatccggactaattatcgtgagtgtcttgatgccatacggcaggttacactgcagcaggagtatattcggggaagatccttatctgaaattatccatttccggcctggaatgtctgaaaggtctcaggagcggttaaggggtctgacgctcagtggaacgaaaactcacgttaagcaacgttttctgcctctgacgcctcttttaatggtctcagatgtcctttggtcaccagttctgccagcgtga

SEQ ID NO: 477278 - DNA, 510 bp, Shigella flexneri
atgagtaaatcaggtgcagaaaaaattcaattcatcctgaataatcatgaacaggcatacagacgcctgaagcctgtatatacttttttagaactggcatcttggatttcggttgttctgctgattatatacctatcaggcaagaatcacgtgcttacagcagcttttctctgctttgcatggacagcattctgggttcttttccttttacattatttcccaaaagttttctttattctcgatcgtcagagtctgctcaacctcatggaggccaccaaagactcaccagatgtaaagcaggagctgcttaaccgccttttttccggaaaaagaatgaccgggcgggatgaaatggatatctgccgtcttctgagaaaaaatgaagaagaaaaaatccgtcagagtgaactgaatatcatcaggaattttattgatgaacagcagttaacgaatagtgatattccgaagaaaagtacggtctcaaatgaagataaaaaaggcataagatga

SEQ ID NO: 477279 - DNA, 261 bp, Shigella flexneri; identical to SEQ ID NO: 10669

SEQ ID NO: 477280 - DNA, 267 bp, Shigella flexneri; identical to SEQ ID NO: 10668

SEQ ID NO: 477281 - DNA, 615 bp, Shigella flexneri; identical to SEQ ID NO: 10667

SEQ ID NO: 477282 - DNA, 375 bp, Shigella flexneri
atgacaaaagagctgacaggtaaagccctgtttatggcgctcaggagccagcgcccacctgccgggctaatccaccactctgatcgaggttcacagtactgcgcatacgattaccgggtcatacaggagcagtttggtctgaaaacatcaatgtcgcgtaaaggtaactgttacgacaatgctccgatggaaagcttctggggaacgctgaaaaatgagagcctgagccactatcgttttaataaccgggatgaagccatctcagtaatacgggaatacattgagattttctacaatcgtcagcgtcgtcactctcgtctggggaatatctccccggcagccttcagggaaaaatatcatcagatggctgcttaa

SEQ ID NO: 477283 - DNA, 261 bp, Shigella flexneri
atgagtagtgatatcagcgcaaatgacgtcctgtggctcctttgcggtgaccacattcacgtctccggcgctgccagaggatatttatttcaaggaaacgtagcattatggctagctttaaagacatctgcccattcgcccccgccattcccccatcttccgttaacccaggcgtacgacgcccgccagggcggctcttctcaagaatcaaattttgcagaacatgaagtatctcagcccgcaaaaattcagctggggtga

SEQ ID NO: 477284 - DNA, 1533 bp, Shigella flexneri
atggcgacgatcgattctatgaataaggacaccacacgtttgagcgatggacccgactggacgttcgacctgctggatgtttatctggcagagatagaccgggtggcgaaactctaccggctggatacctacccgcaccagattgaagtgataacctcagaacagatgatggatgcctattccagcgtcggcatgccaattaactatccgcactggtcattcggtaaaaagtttatcgagactgaacggctgtataagcacggtcagcaagggctggcctatgaaatcgtcattaactctaacccgtgtatcgcttacttgatggaagagaacaccattactatgcaggcgctggtgatggcacacgcctgctatggacataactctttctttaaaaacaattgcttattccgcagttggaccgacgccagttcgattgtcgattatctgatttttgcccgtaaatatattaccgagtgcgaagaacgttatggcgttgatgaagtagaacggcttctagactcgtgccacgcgctgatgaactacggcgtggaccggtacaaacgcccgcaaaaaatctcgctgcaagaagagaaagcccggcagaaaagtcgcgaagagtatctacaaagtcaggtcaatatgctctggcgtaccctgccgaagcgcgaggaagagaaaacggttgctgaagcgcgccgctatccgtccgaaccacaagaaaacctgctctattttatggagaaaaatgcgccactgctggaatcatggcagcgtgaaatcctgcgtattgtgcgtaaggtgagccagtatttttatccgcaaaaacagactcaggtgatgaacgaaggctgtgcgaccttctggcactataccatccttaaccatctgtatgatgaagggaaagtaacggaacgttttatgctggagtttttgcacagccacaccaatgtggtcttccagcccccctataacagcccgtggtacagcggcatcaacccgtatgccctcgggttcgccatgttccaggatattaaacggatttgtcagtcgccaacggaagaagacaaatactggttcccggatatcgccggttccgactggctggaaacgctgcatttcgcgatgcgtgatttcaaagatgagagttttatcagccagtttctgtcaccgaaagtgatgcgtgatttccgcttcttcaccgtgctggatgatgatcggcataattatctggagatttccgctattcataatgaagaaggttatcgggagatccgtaaccggttatcgtcgcaatataacttaagtaatctggagccgaatattcagatctggaacgtggatttgcgcggcgaccgttcgctgacgctgcgttatattccacataatcgcgcaccgctggatcgggggcgcaaagaagtcctgaagcatgtgcatcgcctgtggggatttgatgtgatgctcgaacagcaaaacgaagacggcagcatcgagttgctggaacgttgcccgccaagaatgggaaatctgtaa

SEQ ID NO: 477285 - DNA, 399 bp, Shigella flexneri
atgcaacaaaaaatgattcaatttagtggcgatgtctcactgccagccatagggcagggaacatggtatatgggcgaagatgccagtcagcgcaaaacagaagttgctgcactacgcgcaggcattgaactcggtttaaccctcattgataccgccgaaatgtatgccgatggcggtgccgaaaaggtggttggggaagcattaaccggtctgcgagagaaggtctttctcgtctctaaagtctatccgtggaatgctggcgggcaaaaagcgataaatgcatgcgaagccagtttacgccgtctcaatactgactatctcgatctctacttattacactggtctggcagtttcgcttttgaagagactgttgctgcgatggaaaaattgatcgcctag

SEQ ID NO: 477286 - DNA, 297 bp, Shigella flexneri
atgagaaaagcaccccaaggttcttttcctgccgatggaaaagaaccgattatcgaaagaatctttaggttagtagaacgatacccttcaagaaatgcggctgctcgggcatgggggatcaatgaaggcactttaaaaaattattacaacaggcgggattacgcaccgataccacgcccgtatcagttaaaaaagatagcagaaagcgaaaatgttaccttggaatggctcatgacgggagagggtgatgttgaactaaaagattccaaagaacccaaaaaaagagaatgcggataa

SEQ ID NO: 477287 - DNA, 993 bp, Shigella flexneri; identical to SEQ ID NO: 472215

SEQ ID NO: 477288 - DNA, 483 bp, Shigella flexneri; identical to SEQ ID NO: 477014

SEQ ID NO: 477289 - DNA, 366 bp, Shigella flexneri
atgaacatggttgagaatatgctcgatcaggcattcaaaaagcttaatcctcacgagcatcctgttctgcactctgaccagggatggcagtatcgtatgagaagatatcaaaatatccttaaagaacatggtattaaacaaagcatgtccagaaaaggcaattgtctggataatgctgtggtggagtgtttctttggaaccttaaagtcggagtgtttttatcttgatgagttcagtaatataagcgaactgaaggatgctgttacggaatatattgaatactataacagcagaagaattagcctgaaattaaaaggtctgactccaattgaatatcggaatcagacctatatgcctcgtgtataa

SEQ ID NO: 477290 - DNA, 375 bp, Shigella flexneri
atgacaaaagagctgacaggtaaagccctgtttatggcgctcaggagccagcgcccacctgccgggctaatccaccactctgatcgaggttcacagtactgcgcatacgattaccgggtcatacaggagcagtctggtctgaaaacatcaatgtcgcgtaaaggtaactgttacgacaatgctccgatggaaagcttctggggaacgctgaaaaatgagagcctgagccactatcgttttaataaccgggatgaagccatctcagtaatacgggaatacattgagattttctacaatcgtcagcgtcgtcactctcgtctggggaatatctccccggcagccttcagggaaaaatatcatcagatggctgcttaa

SEQ ID NO: 477291 - DNA, 1149 bp, Shigella flexneri; identical to SEQ ID NO: 477067

SEQ ID NO: 477292 - DNA, 375 bp, Shigella flexneri; identical to SEQ ID NO: 13405

SEQ ID NO: 477293 - DNA, 210 bp, Shigella flexneri; identical to SEQ ID NO: 475253

SEQ ID NO: 477294 - DNA, 1845 bp, Shigella flexneri
atgttacattttggactcaaaggtttacctggtttagttaactcaattacacgctatccacaggaagccttgcccatcacgaattacttcgcagcgagtgagctggctcctgccgtcgcccgtgccttcaacaaactcaaaacgctacgcgaaaacgcccgcacctggctgttgaaatacccggaacatgcccttaccggcctgctgcctgcggcgctcggcaaagccggtgaagcacaggataacgcccgcgctgccttgcgtatgcttaccgaaaacggtcatcagccattactgcaagaaatcgcccggcgttataaccagtcggaagtaacagacgcggtgaacgctctgcttgcgctcgatcccttagataatcacccgacaaaaatccccactcttccgaccttttatcagccatcgatctggacgcgcccggtattaaaagcaaacgcccaatcactgccagataacgccctcctccacctcggcgaaatgctccgcttccctcaggaagaggctctgtatccgggattattgcaggtgaaagacgcctgtaccgctgactctctggctgaatttgcctgggatctgtttaccgcctggcagaccgctggcgcgccgtcgaaagagagttgggcgttcactgcgttaggcgttctcggtaacgatgacaccgcccgcaaactgacgccattaatacgcgcctggcctggtgaatcccagcataaacgcgccaccgttgggttggatattctcgccgctatcggtagtgatatcgccctgatgcagcttaacggcattgctcagaaactgaaattcaaagcattacaggagcgggcaaaagaaaagattgccgacattgccgagagccgcgaactcacggtagcggagcttgaagatcggttagcaccggatctcggtctggatgataacggttcgttgctgctggattttggcccacgccagttcaccgtcagctttgatgaaaccttaaaaccgtttgtgcgtgatgtttccggcagccgcctgaaagacctgccaaaaccaaacaaaagcgattatgagtcacaggcgaacgatgctgttaaccgctacaaattgctgaaaaaagatgcgcgtaccgtcgcggcccagcaggtagcaaggcttgaatccgccatgtgcctgcgtcgccgctggtcgccggaaaacttccaactcttcctggttgtgcatccgctggttcgccacttaacccgccgtctgatttggggcgtttatagcgccgacaaccagctactggcctgtttccgggtagcggaagataacagctacagcaccgctgacgatgatcttttcaccctgccggaaggcgatatctctatcggcattcctcacgttctggaaatatcaccgacggatgctgtcgcctttggtcagctttttgccgactacgaactgctaccaccgttccgtcagcttgaccgtaacagttacgccctgacagaagccgagcgcaacgccagcgaactgacccgctgggcaggcagaaaatgcccgagcggccgggtcatggggctggcaaataaaggctggataaagggcgaaccacaggatggaggctggatgatcaaacctctcggtcgctggtcgttaatcatggaaatcgacgaaggttttgcggtgggtatatcaccagccgaacttagcgctgagcagctcttaagcaagctgtggctatgggaaggcaaagcggaaagctatggctgggggagtaattcaacacaggaagcgcagttctccgtactcgatgccatcaccgccagcgagctaattaacgatattgaagccctgtttgaataa

SEQ ID NO: 477295 - DNA, 210 bp, Shigella flexneri; identical to SEQ ID NO: 9340

SEQ ID NO: 477296 - DNA, 192 bp, Shigella flexneri
atggttgataaaataatatttacggttactcctattttttcaattcctcctcgcggagcggctgctgttgaaacgtggatgtatcaggttgctcagcgtaccaattttccaaatcgtattgtttgtatcaaaaatccaggatactcaaattacacctttgttacggttatttcaaaaatggacaagacttga

SEQ ID NO: 477297 - DNA, 336 bp, Shigella flexneri
atggtggcggcaaatgttatcaagggcgatacggtcatctgtcatgtccgcgatgtgttacaacgggaaccgggcagttattgtttacttgatattcgttctcctgcggaactgaaacaatttggtgaatatcctgacgcgctatccatccctcttgattccctgcgggagaatcttgataagttgcctgaagataaagagattattatcgggtgtcagagtggtctgcgggggcatgtggcataccgtatgcttcagtctcacggcttccggacatataatctgagtggtggctttataacttggcaggcggttacggaatcaatgagtcaataa

SEQ ID NO: 477298 - DNA, 936 bp, Shigella flexneri
atgagcgccgcgcttcaatacttcgacgaaaatttaccccaccgtccctatcacacggatgatctcgcttttggtcttcgcatctccggcaaagggcgtgcgcttcttgctcggtacatccagcagaaccagcctcatgcgcagttctggctggtttttgacgttgaccgcgtgggggcagcgatcgactggagcgaccggaactcacccgcaccgaacgtcaccgttaaaaatcctgtgaacgggcacgcccacctgctttacgcactcaatatcgccgtgagaaccgcaccggacagttcggttaaggcactgaaatacgctgccgcaattgaacgctcgttgtgtgagaaacttgacgcagacgcgaactacagcgggctgatttgcaaaaatccgttccacctggaatggcaggtgaaggagtggcgcgaggaaccctactccctcgatgaactggctgattatctcgatttgagcgcctcagcgcgccgtagcatcgataaacattacggaatggggagaaactgccatctgttcgaaatgacgcgcaaatgggcttacagggcgattcggcagggctggccagcattctcacagtggcttgatgccgtgattcagcgtgttgaaatgtacaacgcatcgcttcccgttccgctttcaccgcctgaatgtcgggctattggcaagagtattgcgaaatacacgcacaggaacttcacgccggaaactttcgcacagtatgtggctgatacgcacacgccagaaatacaggccaagagaggcaggaaaggtggcatcgctaaaggcgaagcctacgatgacaagcgtttcatggcgctatgtatgctggagaatggatattctcagaaagctattgcggcgatgttggaggtttctactcgaaccattcgaaactggaaaagcggaaaatag

SEQ ID NO: 477299 - DNA, 399 bp, Shigella flexneri
atgcgcatcagcaacatcgaatggctgaagaaacggctcggattcatcaggaagctcggagaacagaccgcgcgacagagacagattattgacctgctcgacaacgaagccggactcacagaacaggaacgcaaacttctccacgtgctggcaacagcggaaaaaaacgacttacaggcacaggagaacgagcgaaaacagacgatccagaaacgaatcgagggaaaaaaacaacgacgggaacgcaatcaccggctctttctcgcggctgggctactgatcgaagcaggactggtagacacaaaaacaggcgagctatgctataaaaaagacaggatattacaggcacttaaggaaattaagtacgatctggagacatccccaaacccagacgcgtaa

SEQ ID NO: 477300 - DNA, 927 bp, Shigella flexneri
gtggcaacctatcacctcagcgttaaatttggtggcaaggggcaggctgcaaaccacgccgattacatcgagcgcaaagagaaataccgcgaccgtcaggatttggaatattccgcacacggaaacatgccggaatgggccagggataatccttcccatttctggcaggcggctgaccagtttgaacgtgcgaacggttcgacctatagggaacttgaaattgcattaccccgtgaactgacaccggaacagcgccttgaactggtgcaggattttgtacgtcaggaagctggcgaacggcacgcctggagttttgccattcacaatccgaaagcgagcattgacggcggcgaacagcctcatgcgcatatcatgatgagtcagcgtgtgaatgatggcattgaacgtacaccggaacagtatttccggcgctataacgccaggtatcccgaccggggaggtgcgaaaaaggattccggaaacctgacccccactcagcaaaaagagcagttgcgggaattgcgaaaacgctgggaggtgaagcacaacgaacatatgagaaagcatggctttgaaaggggcttcattgactgccggacgctgaaagaacagggcattgaacgacgtcccgaagtgcatctgggttttgaagctgccggacggcttgatgatgcccagcgtcatgacatcatgcaaaaacggtctgaaccggactattcccgccatcttgaacaggcgcgaacggtcgggcatgacatcagggaatggctggacactccggttaagcaacatgaactggtcagaaggcttcaacatgatgttgcgcgggagcatggctttgacatgagagacagagtgagcagacaggaccgaactgaacctgaacgggttaaatcaccgtcacgtggattttctatgggattctga

SEQ ID NO: 477301 - DNA, 534 bp, Shigella flexneri; identical to SEQ ID NO: 7129

SEQ ID NO: 477302 - DNA, 342 bp, Shigella flexneri
atgaatgaagacacaaaacgtcagactgatatgaaaaatgcagccctgggggcagcagatgtcctacggggactggccaacagcgaccggctattgttgatgtgtcagttaagccagggggaagcgaatgtgaccgagctggaagcggcggtcggtatcactcagccgaccctgtctcagcagttgggtgtcatgcgtcgcctgaagctggtcgagacccgacgggcaggtaaaatggtatattaccgtatcggggataaccgcatcatgacgttgttgaataccttatatgatctctactgcccgcaggcggaccccgacaaggtcaaaaaacaaccttaa

SEQ ID NO: 477303 - DNA, 726 bp, Shigella flexneri
atgatcagcggcatggacgtaaaccttctcgtatcgggtaccatgggctttcagctgcttttcattcgccccgacactgccaatactcagcgaaaataccttacaaatggatgtcccctgactgccatggtaaaggctgtgacgatcgagcatattatcagcagcaatgcgtccctggcggttggctggccctgccagaggaacattagcgggttcctgaaagacaaggtcaggtgtttcaactgcatcccccacggcatagatgtcagggatacttgtctgcatacaggcattgacacttatgcctccccgtttacccacggcgagcccggctcctgtggcaaggctgctctcaggttttaccccgatggcgagaataaccatgtcggtctgcagaaacccaccgtcagacagtgcaacgcggaatcccgtctctgtccgcagtacctcggtgagcgccgttctgagacgcagatccacgccatgactcctgatttcctgatgcagggccgatgccatttcaggatcaaccggagccataacctgttcccccatctccagcagggtcacactgatccccctttcgctcagtgcctccatcacttcgagcccgataaatccccccccgacaagcgtggtgtgagcgatattatgttgctcaatccacgcctggatagcatccatgtcagtaagatttcgcagtgtaaagacacccgcttcctgtag

SEQ ID NO: 477304 - DNA, 345 bp, Shigella flexneri; identical to SEQ ID NO: 477075

SEQ ID NO: 477305 - DNA, 189 bp, Shigella flexneri; identical to SEQ ID NO: 469030

SEQ ID NO: 477306 - DNA, 1566 bp, Shigella flexneri
atggaaacagctgtagcgtactataaagatggtgttccttatgatgataaggggcaggtaatcattactcttttgaatggtaatccagacgggagtggctctggcggtggtggtggaactggaggtagcaaaagtgaaagttctgcagccattcatgccacagctaaatggtctactgctcaattgaagaaaacgcaggcagaacaggctgcccgagcaaaagctgccgcagaagcacaggctaaagcaaaagcaaaccgggatgcgctgactcaacatctgaaggatattgtgaatgaggcgcttcgccataattccactcatccggaggttattgacctggctcatgccaataatgcagcgatgcaggcagaagcagagcggttgcgccttgcaaaagcagaagaaaaagcccgtaaagaagcggaagctgcggaaaaggcttttcaggaagcagaacaacgacgtaaagagatagagaaggagcaggctgaaacagaacgccaattgaaactggctgaggatgaagagaaacgcctggcagcattgagtgaagaggcccgggctgtggaggtggcacaaaaaaatcttgctgctgcacaatctgagctggcgaaagtggatgaagagattaatacgctcaatacccgtttaagctccagtattcatgcccgtgatgcagaaacgaatacgctgtccggaaaacgaaatgagttggatcaggcatctgctaaatataaagaactggatgaaagggttaaacttttatctcctagggcgaatgatccgcttcagagtcgtcctttttttgaggccaccagactacgggcgagagctggtgatgagatggaggaaaaacaaaagcaggtaacagcatcagaaacgcgtcttaaccagattagctctgagataaatggaatccaagaggctatttctcaggctaataataagcgaagtacagcagtttcacgtattcatgatgctgaagataatttgaaaacagcacagactaatctcctgaactcgcagattaaggatgctgtggatgcaacagttagcttttatcaaacgctatctgaaaaatatggtgaaaaatattcaaaaatggcacaggaacttgctgataaatctaaaggtaagaaaatcagcaatgtgaatgaagctctagctgcttttgagaaatacaaggatgtattaaataagaaattcagcaaagcagaccgtgatgcaattttcaatgcactggaggcggttaagtatgaagactgggctaagcatttagatcagtttgccaagtacttgaagattacgggacatgtttcttttggatatgatgtggtatctgatatcctaaaaattaaggatacaggtgactggaagccgctatttcttacattagagaagaaagctgtagatgctggagttagttatgttgttgttttactttttagtgtgcttgctggaactacattaggtatctgggggattgctattgttacaggcattctatgtgcctttattgataagaataaacttaatactataaatgaggtgttgggtatttaa

SEQ ID NO: 477307 - DNA, 324 bp, Shigella flexneri; identical to SEQ ID NO: 5250

SEQ ID NO: 477308 - DNA, 195 bp, Shigella flexneri; identical to SEQ ID NO: 5251

SEQ ID NO: 477309 - DNA, 375 bp, Shigella flexneri
atgacaaaagagctgacaggtaaagccctgtttatggcgctcaggagccagcgcccacctgccgggctaatccaccactctgatcgaggttcacagtactgcgcatacgattaccgggtcatacaggagcagtttggtctgaaaacatcaatgtcgcgtaaaggtaactgttacgacaacgctccgatggaaagcttctggggaacgctgaaaaatgagagcctgagccactatcgttttaataaccgggatgaagccatctcagtaatacgggaatacattgagattttctacaatcgtcagcgtcgtcactctcgtctggggaatatctccccggcagccttcagggaaaaatatcatcagatggctgcctaa

SEQ ID NO: 477310 - DNA, 390 bp, Shigella flexneri; identical to SEQ ID NO: 7199

SEQ ID NO: 477311 - DNA, 285 bp, Shigella flexneri; identical to SEQ ID NO: 7200

SEQ ID NO: 477312 - DNA, 198 bp, Shigella flexneri; identical to SEQ ID NO: 7201

SEQ ID NO: 477313 - DNA, 297 bp, Shigella flexneri; identical to SEQ ID NO: 7202

SEQ ID NO: 477314 - DNA, 522 bp, Shigella flexneri; identical to SEQ ID NO: 475306

SEQ ID NO: 477315 - DNA, 378 bp, Shigella flexneri
atgcagtcgttgtacgactggatacagttgcagaggaaaacgctgtcgaaacatgcggagatggcgaaggcgttcgactatatcctgaatcactggaatgcgctgaacgagttctgtcgtgacggccgggtggaaatagacaacaacatcggtgaaaacgcgttacgatcggtggcggttggaagaaaaaattatctctttttcggctcagacaagggaggagaaagtgcggcgatcatctacagtctgctggtcacctgcaaacagaacgaagtggagccggaggactggttgcgcgaagtgatcgagaagctcaatgactggccgtcgaaccaagtgcatgaactgctgccctggaacttctcgtctgtaaaataa

SEQ ID NO: 477316 - DNA, 633 bp, Shigella flexneri; identical to SEQ ID NO: 474478

SEQ ID NO: 477317 - DNA, 378 bp, Shigella flexneri; identical to SEQ ID NO: 474621

SEQ ID NO: 477318 - DNA, 435 bp, Shigella flexneri
atgaccgggtgcaccgtcgctgatacttatagtatattctcacgcattgttgaagaaaatataatgaaaacgatgacacctatcgtcatcattactgggcatcactcagaagatctttgttctctggcatcgaaactgggaggagttaaaataatatcaccgacagaaaagattgcaaaaatagaaaacgctatcaatgatgcttttaacagcaagcctaaaaaaataagatttttaacagatatactctctcctcaacaaattgagaccatgaaaatggttgcgcagggtagatccgttaatgagatttcagccgcaatgaatattagcatcaagaccgtgtatgcacataaagttcgtgctatcaataagctgggaattaagaaaaaagtttatgaagcgcttttttataaagcgctaattcagttcaactga

SEQ ID NO: 477319 - DNA, 1179 bp, Shigella flexneri
atgtgcgtcgcaacaagggagccccccggatgcgacgggcagactttgaaaatgttcgaccagcaacgtgatggcaatctatacaagatctggaaccggctatgttcgggaacatggtttccgccaccagtgctggaaaaacggatcccgaagtcgaatggcaaggaacgcattctggggatcccaacagtatccgatcgaattgctcagggagcgataaaacttttcatggaagaaaagcttgacccgattttccatgctgattcatatggttaccgaccaggcaaatcagctcatgacgctctgaaacaatgtgccatccggtgctggcgttatagctggatactggaagtggacatcagtgcgtttttcgaccatgtgagacatgatctggtgctcaaagctctggaacaccacgggatgcctaaatgggtcatcctgtactgtcgacgctggatggaagcgccaatgcagagttgtgaaaatggagaattaataacccgaacacgaggcactccgcagggcggggtcattagtccgctacttgctaacttgttccttcactatgcatttgatttgtggatggaaagagaatatcggggggtaccgtttgagaggtacgctgacgatattgtagtacattgttcacgaatgagtgatgcaacaaggctaaagaacaggttatcggagcgcttctcggaagtcgggctggtcctgaatgcagggaaaacgaatatcgcctacattgacacgtttaaaaggagaaacgtcgcaacgagtttcacctttctcggatatgacttcaaagtgcgtacgctgaagaatttcaaaggcgaacggtaccgaaaatgcatgccgggtgcgtcaaatgcagcaatgcgcaaaataacagaaacaatcaagaagtggcgtatacatcgctcaacagctgagagtttgctggattttgcgaggcgctacaatgcgatagtgagaggctggatcgagtactacggaaagttctggtccagaaatttcaactatcgactgtggagtgcaatgcagtcacgtctgctcaagtggatgcagtctaaatacagactttcgaaccggaaggctcagcgaaagctgacgctggtaaggaaggagtatccgaagctatttgttcactggtatttactacgtgcatcaaatgagtga

SEQ ID NO: 477320 - DNA, 273 bp, Shigella flexneri; identical to SEQ ID NO: 476543

SEQ ID NO: 477321 - DNA, 1455 bp, Shigella flexneri; identical to SEQ ID NO: 476547

SEQ ID NO: 477322 - DNA, 321 bp, Shigella flexneri; identical to SEQ ID NO: 477003

SEQ ID NO: 477323 - DNA, 375 bp, Shigella flexneri; identical to SEQ ID NO: 13405

SEQ ID NO: 477324 - DNA, 378 bp, Shigella flexneri; identical to SEQ ID NO: 474621

SEQ ID NO: 477325 - DNA, 1188 bp, Shigella flexneri
atgctcccccgttttgccgatatttttcagcagggaaaccgctggcttaactggctggagaaacaaccggaaggggcagtccgtccggtggtaattgaatcagtgacaaaaatcatggcctgcgggaccacactgatgggctacacgcagtggtgttgttcatcaccggactgttgccatacaaaaaaggtctgcttccggtgtaaaagccgctcctgcccgcactgcggggtgaaggctggcgcacagtggatacagtatctgctgagcctggtcccctactgcccgtggcagcatattgtgttcacacttccctgccagtactggtccctggtgttccacaaccggtggttactggcagagatgagccgcattgcagcggatgtgatactggaaatctgccatcaggcagatgtggagccggggatattcacggtgatccacacatgggggcgtgaccagcagtggcatccgcatatccatttatcgacaactgccggtggtgtgacgtcgggccacacctggaaaaatcttcatttttacgcccgtaaggtgatgagcatgtggcgctaccggataacacggttgctgtcacggaaatacccttacctggtgatgccggatgcgctggcagcagaaggaagcagtaaacgggaatggaatcgcttcctggacacgcattaccgccgtggctggaatgtcaacgtatcccgggtaatggataatgccacccatgtggcggtgtactttggctcttacctgaaaaagccaccggtgccgatgagtcgtctggagcattatgccggtcaggatgaaatcggtctgcgttacaacagtcaccgaacaaaacgggaagaatacctgttgatgagtggagatgagtccatggaaaggttctcctggcatgtggcggataaggggttccgtatggtgaggtactacgtttttttaagtccggcgaaacggcggttactggaagaagtggtgtacatcataacggagacagtgagaaaaacggcgatgcaaatcacctggagagggatgtatcagaggttactgaaggttgacccgctgaagtgcgtgctgtgcgggagtcagatgcgttttacggggctgaagcggggctaccgtctggcagagcaggtcctgatgcatgagccgctggcccggatgcggtggtgcggctga

SEQ ID NO: 477326 - DNA, 366 bp, Shigella flexneri; identical to SEQ ID NO: 476838

SEQ ID NO: 477327 - DNA, 243 bp, Shigella flexneri; identical to SEQ ID NO: 462679

SEQ ID NO: 477328 - DNA, 327 bp, Shigella flexneri; identical to SEQ ID NO: 477013

SEQ ID NO: 477329 - DNA, 288 bp, Shigella flexneri; identical to SEQ ID NO: 474636

SEQ ID NO: 477330 - DNA, 279 bp, Shigella flexneri; identical to SEQ ID NO: 127146

SEQ ID NO: 477331 - DNA, 378 bp, Shigella flexneri; identical to SEQ ID NO: 477315

SEQ ID NO: 477332 - DNA, 522 bp, Shigella flexneri; identical to SEQ ID NO: 477184

SEQ ID NO: 477333 - DNA, 279 bp, Shigella flexneri; identical to SEQ ID NO: 127146

SEQ ID NO: 477334 - DNA, 300 bp, Shigella flexneri; identical to SEQ ID NO: 84330

SEQ ID NO: 477335 - DNA, 189 bp, Shigella flexneri; identical to SEQ ID NO: 469030

SEQ ID NO: 477336 - DNA, 189 bp, Shigella flexneri; identical to SEQ ID NO: 469030

SEQ ID NO: 477337 - DNA, 168 bp, Shigella flexneri; identical to SEQ ID NO: 461648

SEQ ID NO: 477338 - DNA, 522 bp, Shigella flexneri; identical to SEQ ID NO: 476460

SEQ ID NO: 477339 - DNA, 327 bp, Shigella flexneri; identical to SEQ ID NO: 475432

SEQ ID NO: 477340 - DNA, 375 bp, Shigella flexneri
atgacaaaagagctgacaggtaaagccctgtttatggcgctcaggagccagcgcccacctgccgggctaatccaccactctgatcgaggttcacagtactgcgcatacgattaccgggtcatacaggagcagtctggtctgaaaacatcaatgtcgcgtaaaggtaactgttacgacaacgctccgatggaaagcttctggggaacgctgaaaaatgagagcctgagccactatcgttttaataaccgggatgaagccatctcagtaatacgggaatacattgagattttctacaatcgtcagcgtcgtcactctcgtctggggaatatctccccggcagccttcagggaaaaatatcatcagatgactgcttaa

SEQ ID NO: 477341 - DNA, 222 bp, Shigella flexneri; identical to SEQ ID NO: 474768

SEQ ID NO: 477342 - DNA, 327 bp, Shigella flexneri
atgactaaaaatactcgtttttcccccgaagtccgtcaacgggcagtccgtatggttctggaaagtcagggcgaatatgactcacaatgggcgacaatttgttccattgctccaaagattggctgtacgccggagactctgcgtgtctggggtcgccagcatgagcgggataccgggggcggtgatggagggctcaccaccgctgaacgtcagcgtctgaaagagccggaacgtgaaaatcgtgaactgcgccgcagtaacgatatccttcgccaggcttccgcttattttgcaaaggcggagttcgaccgcctctggaaaaaataa

SEQ ID NO: 477343 - DNA, 252 bp, Shigella flexneri
atgagtgttacagtaccgaatgatgattggacattgagttcattatctgaaacttttgatgatggaactcaaacattacaaggtgaactaacattggcactagataaattagctaaaaatccttcgaatccacagttgctggctgaataccaaagtaaattatctgaatatacattatataggaacgcgcaatccaatacagtgaaagtgattaaggatgttgatgctgcaattattcaaaacttcagataa

SEQ ID NO: 477344 - DNA, 195 bp, Shigella flexneri; identical to SEQ ID NO: 474694

SEQ ID NO: 477345 - DNA, 156 bp, Shigella flexneri; identical to SEQ ID NO: 474739

SEQ ID NO: 477346 - DNA, 264 bp, Shigella flexneri
atgatgttactggggatggtcattttcctgtttaccgtgagtggcgggacgctctggtatcttggcgggatgatacaggcgaacctggaagaaatcaggaagcagaacgagagtctggagaagctgaacgcgaagacatggggcgtgcgttatcacgaggggagcaacggacgttttctggtgttgcccgaggggatgaaagccgaaacgaactggacgatggaaaacgggaaacagaatgccgtaaggctggcacaggagtga

SEQ ID NO: 477347 - DNA, 138 bp, Shigella flexneri; identical to SEQ ID NO: 35620

SEQ ID NO: 477348 - DNA, 201 bp, Shigella flexneri
atgctgaacgatttaggcgtggatcctcacgtcgtggagcagcttacaggccaccagatgccaggaatgcagcgagtttataatcattcccgttatctggatgctaaacgcaatgcgctggatatgtggacggagcggttagggatactggcgggaacacatgaaaacgtaaccacgctaccagtagccagaagaaaataa

SEQ ID NO: 477349 - DNA, 222 bp, Shigella flexneri
atgcgtgatgatcgttttaattccctgaaacaggaattttccggcgttcctgatgatgcggctgatgcgctttcgtcaatgccagaacttattagagcggcttttttcttactttccacgagagaatataaatcaacggggcttgatgtactgaatatcgccgccgattatgctgatttcgtgacagaggttattttaagaaaaacgacggacggggattaa

SEQ ID NO: 477350 - DNA, 756 bp, Shigella flexneri
atggttacagttgtcagcaattattgtcaattatctcaaacccaactcagtcagacatttgcagaaaaatttactgtgaccgaggaattactgcagtctttaaaaaaaacagcgttatccggagatgaagaaagtattgagttactgcataatattgcgttaggttatgatgaatttggaaaaaaagctgaagatattctttaccatattgttagaaacccaacaaatgagaccctatcgattatccgacttattaaaaatgcctgtttaaaattatataatttggcacataccgcaaccaactcccaccttaaaccaactggtccggataattcagatgttctcctgttcaaaaagctattctccccttcgaaattaatgacaattatcggtaatgaaattcctcttatatctgaaaaacagtcgctttcaaaggtgcttttaaatgatgagaataatgaactgagtgatggtacaaacttctgggataaaaatcgtcaattaaccacagatgaaatagcttgctatcttcagaagatcgccgctaatgcaaaaaatactcaagtcaattatcctactggtctctacgtcccctactccaccagaactcacctggaagacgctctcaatgaaaatattaagagcgatccatcatggccgaatgaagtccagttattccccataaatactggcggacactggatattagtttcgctacagaaaatagtaaataaaaaaataataaactacaaataa

SEQ ID NO: 477351 - DNA, 372 bp, Shigella flexneri
atgggagaaatgtcgaataataatataaaagttcatttaaatgaaccagagataatatttttacatgccgatcttcagcaatacttaagccaaagttgcggtgcgtttgtgtgcatggcagcccaggaagtgattgaacaaagggaaagcaattctgacagcgccccctatacgttattaaaaaactatgctgacagatttaaaaaatattcagcagaagagcagtacgaaattgattttcaacatcgactggtaaacagaaattgttatttagataaatatggcgatgcacgaatcaatgcttcttatacacaattagaaataaaacactcacaacccaaaaatagagcatccggcaaaagagtgagttaa

SEQ ID NO: 477352 - DNA, 1536 bp, Shigella flexneri
gtgacgccaccgagcgcaaaagccgcccttgacctttacttccaaaatcgcccgcaaaaacagattgttgcggttatttatacccacagccataccgaccactatggcggcgtgaaaggcattatctctgaagccgatgttaaatcaggcaaagttcaggtgattgccccagcaggctttatggacgaagccatcagcgaaaacgtgctggcggggaacatcatgagccgccgtgcgctctactcttacggtctgttactgccgcacaacgcgcaaggcaacgtgggtaatggccttggcgtgacgctggcaacgggcgacccgagcattattgcaccgactaaaactatcgtcagaactggcgagaagatgattatcgacggcctggagtttgacttcctgatgaccccaggtagcgaagcaccagccgaaatgcacttctatattccggccctgaaagcgctgtgtaccgccgagaacgccacgcataccctgcacaacttctacactctgcgcggcgcgaaaacccgcgacaccagcaagtggaccgagtatctgaacgaaacgctggatatgtggggtaacgacgcggaagtcctgtttatgccgcacacctggccggtctggggcaataagcatatcaatgattatattggtaaatatcgcgatactatcaagtacattcacgaccagaccctgcacctggcgaaccagggctacaccatgaatgaaatcggcgacatgattaaactgccgcctgcacttgccaataactgggccagccgtggctattacggttctgtcagccacaacgcccgcgcggtgtataacttctatcttggctattacgacggtaacccggctaacctgcatccgtatggtcaggtggagatgggtaaacgttacgtgcaggtgctgggcggttccgcacgcgttattaacctggcgcaagaagcgaacaagcaaggtgattaccgctggtcggcagaactgctgaaacaggtgattgccgccaacccgggtgaccaggtcgcgaagaatctgcaagcgaataactttgaacagctgggctatcaggccgagtccgccacatggcgcggtttctacctgaccggcgcgaaagagctgcgcgaaggggtgcataagttcagccacggcaccaccggttccccggacaccattcgcgggatgtcggtcgaaatgctgttcgactttatggccgttcgcctcgataatagcgcgaaagctgcgggtaaaaatatcagcctgaacttcaatatgagcaacggcgataacctcaacctgacgctgaacgatagcgtgcttaactaccgtaaaacactgcaaccgcaagtcgacgcctctttctacatcagccgtgaagatctgcacgccgtgctgaccggacaggcaaaaatggcggatctggtgaaagcgaagagagccaaaattattggcaatggcgcgaaactggaagaaattatcgcctgtctggataatttcgatttgtgggtgaatatcgtaaccccaaattaa

SEQ ID NO: 477353 - DNA, 708 bp, Shigella flexneri
atgaaacccgtcgtgctggtggtggatgatgacacggctatctgcgcactgttgcaggacgtgttaagtgaacatgtctttacggtttcagtcagccataccggacaggaggccatatcgcgtattgagggcgagcctgacattgcgctggtggtgctggatatgatgctgcccgataccaacggcctgagggtattgcagcaaatccagaaactgcgtccggcattgcctgtggtgatgttgaccggaatggggagtgagtctgatgtggtggtcgggctggaaatgggcgcggatgattacatctgcaagccgttcaccccacgggtggtggtcgcacgactgaaagcggtgttgcgacgggttggcgcgctggcggttaatgaggagaaaaacgccgggctgtcattcaatggctggtatctcgataccattcgctgccaactgcatagtccgctacaacaacatgtcgagctgactcagggcgaatatggcttgttactggccctggctcaaaatgcccgtcgggtattaagccgcgaacagctgctggcgttcactcatagcgacagcgtggaggtgtttgatcgcaccatcgacgtattaatcatgcgcttacgacgcaaaatcgaactcaacccgcatcagccgatgttgattaaaactctgcgcggtctggggtatgtcttcgctgccgacgtgcattaa

SEQ ID NO: 477354 - DNA, 360 bp, Shigella flexneri
gtgcctcatgcccaggtacgcgcgggcgggctttccggcggcaatcagcaaaaactgttgatctcccgctgggtggcgattggcccgcgcattttactgctcgatgaacccacccgcggcgtggacgttggcgcaaaaagtgagatctaccggatcatgaacgagatggcgcgcaagggcgtggcgatcctgatgatctccagcgaactgccggagatagtgggaatgagcgatcgcgtccatgtgatgcgcgaaggcagcattgccggtgagctaaatggcaaaaacatcacccaggaaaacattatgaccttagcgactggcgtcaacgacgcccattcccaggcggtgacctcatga

SEQ ID NO: 477355 - DNA, 2040 bp, Shigella flexneri
atggcgcaccccggacgtcacttttttgccagcgcgcgcgggcgattgctgcttttgaatttgctggtggtggcggtgacgttgatggtcagcggcgtggcggtaatgggctttcgtcatgccagccagatgcaagagctggtgcagcagcaaactgtagatgatatgaccggcagcctgaatctggcgcgcgacacggcaaacgtggcaacggcggcagtgcgattgtcgcaggtggtgggagcactggaatataaaggcgaagccgagcggttgcaggagacacagcgggcattaaaaagctcgcttgcacaactggcgaacgcgcctttagcgcagcaggaagccgggctggtgacgcgcatcatcacgcgtagcaacgaactgcaaaccagcgtcggcggaatgctggaacgcgggcaaaggcggcatctggagcgtaacgcgctgttaagttcgctgtatcaaaacttaagttatctgcggcatctgcaaaaagtcactcacgcgcaagataatattttgcttaacgagatgaaccgactgattgttgccgccattgccacccccgcgccgcaggcgattattcatcaactggtcggagtgatgtctgccttgccaactcacagcgatacgccattggttaatacgctactcgctgattttaatcgtgaactgcgtaaactcgcgccactttcggcggctctggagcaaagcgatctggcaatcagctggtatatgtttcacatcaaagcgctggtggcgatccttaatggcgacatcaaccgttacgccgaacaggtggcgacgctctctggtcagcgggtggagcaaagttaccaggatttgcgctccggcgagaggctgatcatgattttcgccctgttagcggtggtgatcaccgcgtttgcaggttggtatatctatcgcaatctcggctctaacctgacggcgatttcccgcgcgatgagccgcctggcgcacggcgaagcggacgtcacttttccggcgttacagcggcgcgatgagttgggtgaactggcgcgcgcctttaacgtttttgcccgcaataccgcatcacttgaacgaacgtcacggctgttgaaagagaaaaccacgcagatggagattgcccaaaccgagcggcaggggctggaagaggcgctattgcacagccagaagttaaaagcggtcgggcaactgacgggcgggctggcccatgattttaataatctgctggcggtaattattggtagcctggaactggtgaacacgaactcacccgacgcgccgcgaatacagcgggcgcagcaagccgccgaacgtggcgcgctactgacccagcgattgttggcattttcccgcaagcagtccttacatccgcaagccgttgaactaaaaacactgctggaagagttaagcgaattaatgcgccactccttaccggcgacgctgacgattgagattgaagcgcagtctccggcgtggtccgcgtggattgacgtcagccaactggaaaacgccatcatcaacctggtgatgaacgcccgcgacgcgatggaagggcagacgggaattatcaaaattcgtacctggaatcagcgtgttacccgcagcagtgggcagcgtcaggacatggtggcactggaggtcatcgatcatggcagcggtatgtcgcaggcggtgaaaagccaggtgttcgagccgttctttaccaccaaacagacggggagcggcagcgggctgggcttgtcgatggtctatggtttcgtgcgccagtccggcgggcgcgtggaaattgaaagcgcgccggggcaggggacaacggtcagattacagcttccccgcgcgctgacggcggcgaaaaacctatcgccagcggcggtagaacagacagctgttaatggcgataaactggtgttagtgctggaagatgaagccgcggtgcgccagaccatctgcgagcagttgcacctgctgggctatttgacactggaagcgagcagcggcgaacaggcgctggacctgctggcggcatga

SEQ ID NO: 477356 - DNA, 141 bp, Shigella flexneri; identical to SEQ ID NO: 468902

SEQ ID NO: 477357 - DNA, 1689 bp, Shigella flexneri
atgaaaccaattcgtgatctctgcattaacggcaggcgttatcctgtcgtggaagaaaacatcatgttgcgtctcaacggcgcgggaaccggctttatcaccattaacgccgccgacaatactcccccgctacgcggcaaacccgtagagctgtccatcggttacaacgatcagcctgtaaagtggttttcgggatatgtggaaagtgacagttgtacaggcagagggctgcacaagctgatggtgcgcgaagctgctgctattctgcaatacccgctcaacatctccatgcagcatccgacgctgaaacaggtcgcaggacacattgaaggcaatacaggtttacgcatacaactcccgaaggcaggctacaccaccactccggtccctcatctgacccacaatggcaacggttatcagctgatggccatgcttggccgcatattcagtatcccggattacgtctggtatccgtcggttgacggcatcatctacgccggaagctttgctgactgccgttttgcaaaacgccctgccagattgccggtcgatatcaccagaggtgatcacggagcaaatggctggacaatacagacgattcccatgatgcgccccggcgtggtcatgaacgatcaccgtataaatcaggtacagctacagggcgacagcatgatcattagctggagtgatggccgtcagtcgcccgtacaacgccagatcgaaaccctttaccccgagataggcaacaaaacccaccttccacgcatgggacgcgtgatctcaccaactgaaaacacaacccagggggatttgcatgatgaatttcgcccacgctacgccgtcaatgtgcagttgctcgacgagaacggcacccccgataagaacacaccggtatataacgccgtccccgttcctgtgccaatggccggcaatgaatccgggatattccagtacccgcccccaggaaccatagttacactggcccacgttgacggcaggccggataaacccatcatcaccggcactcacgccagcggccagagtctgccgggaataaagcccggcgaacaactacaacagcaacgcgcagaggtattccagcgtgtgcatacagatggcacatggcagcgtgaaaccgatcaggttattcgtgagaaatccaccgaccgcatcatccagaacacaacggaaacgcgcaccagtaccactcgtaatattaccgtaaaggccaacaacaccataacggtgctcggcactcataagctgatgagcggccacatacagcacatcgcagacggtgactatgccgtagccgccacgaagaaactgatacagcacgccgacagcgctgaactcgacgttactcaccagtggcaaaccagcacagaaagcaccacccacaatgtggcgaaaacgctggaagaaaagattggccggattaaaaaatccgtcgctggccagatgcaacagatcatcgccccgcaggtctggtttggcagcaataccatcaacacacttaacctcatgctggatctttgcgacaccgttcagcaactggcgcagctcaccgcacaacacactcataccaacaacgggtcgtcacagcccaccaacagcggcagcatagacacggtggcatcaatggcaggcaacctgaaagcgaagtacagtaccgtgattaagcagtaa

SEQ ID NO: 477358 - DNA, 567 bp, Shigella flexneri
atgagccagaacacgacaacgccactgctggcccttaatggtcagataatcccgctaaaacgcttaagtgtcagcgtgaagctgaccatcaaagacaaagacgcttccggaaaatcctcatcaacagcgacttcagaacagggtgtaaaagccaaggagctgcagatttccggactgattccgttcacccagccggaagcactcacacgcttatttcgtctggctgaagccagagccgctaacggtgcacaacaggtttaccgcatcgccaacatggatgccaaagcggtcaatatgaagcaagggattttttccggtgccgtgggcgcaactcctgaaacaggcctgatggcatggaaagttgacttcactctgaaagaaaaactcagcagtgccgaaaaggcgacaggacgcggcccggctggcagccagagtgctgaacagcacgcacaggccgtcaaatcaggtggcaaaggcgaaaaaaacgaagagcatggctggttctggaaaatgtcagacaaactcaataactggataggcccggcaggcaatgaaaccaattcgtga

SEQ ID NO: 477359 - DNA, 744 bp, Shigella flexneri
atgtggtttccggcaaaactgatgcttccgacaggtaatatcacccccataacatgttcagctatggccgtacatccgtgggatgttgaagcggggcacattacgccagacggtgcgtatttaagccccgtcaacgcaataaaccaccttaacagcaaactcccgggcctgaccgaaaacagcgatatcgccatcataatggtaacaggcagcaataataacgattttattcgtcaactgtcagcactggcagacacactccctttacccactctgacgcagacgctaagacgcgcaagaacacagctcacccaggcaatcaccagaatgcaaatcccggcgacaccacagaacggactacccgctccgcaaccacttattgccagcacactacagaacagcatcagtaaccacaccgcgcttaacgctatgaaggccgaagggctgaactctgtcgactcactgaaaaacgcgttatccggttttcaggcacaacgtcaacggttgcagcaacagataatcgctgaactggcaggagcaggcgataaagtggcaaaagcatttgcgttcgtgcacaccggcgacgccgttttagcccgccgggaaatgatgaaaaatattccgcaccccacagcttcactgacatatgcacacctgttcgcaggcgatctttccgggatgctgaactggataacgaaggcagaaaatgagccagaacacgacaacgccactgctggcccttaa

SEQ ID NO: 477360 - DNA, 528 bp, Shigella flexneri; identical to SEQ ID NO: 468907

SEQ ID NO: 477361 - DNA, 1812 bp, Shigella flexneri
atggtaaatgagaacaccgtcgcctactccgttaccctgccggagtccacgggtgattttacttttaactggctgggtctggtaagcagcaccacaaatacactttgtatggtggtatatcttcaccctcagaaaaaaataaaaaccgcagacggcaaacagggtaataccctgatttattctgaaattatggaatacgccggagccagcgccgcaaccggcatcaccacgccagtaagcacctggcagattgattttacggcacggcttcacggcatggacgaggccacccgcaaagcggcgctggatatctacgggcctggcctgttctttaataacgcctttaaactcaccgctcaggctaccgggcaggcgaccttcgcgccgggtattgcctatctgcgcggattacgtgtggagctgaatgaacaaggcacactgacatacgccaccggaatttcacaaactgtttatgttgacgcggcattaaccggtaccctgaccggggaaaataaagccatattcagcctgacgagtcagaaaacagccgactataccgacagttcaggatttgcccattatgtcgaacccatcgccacaatatcagacagtggcgagatcaccgatatacgaaaaacccgcaaaccattaaatgaccgccttgatggcgaatacctgacccgtaacgggaacctgaaagaaattgctgacaaaggtgaacaggcccagtctgatgccagaaagcatatgggcctcggcgacagcgccacccttaatgttggcaccgcgcaggacactgtagccgcaggtgacgacatccgcatcacaggagcgctgcaaaaaaatcagaacggagcagatattcccgataaaccgctgtttatccagaacgttggtttacaggaaacggtaaacaaggctgataacgctgtccaaaagacaggcgataccttgtccggtggactgacttttgaaaacgactcaatcctcgcctggattcggaatactgactgggcgaagattggatttaaaaatgattcggatgcagacaccgattcctacatgtggtttgaaacggcggataacggtaatgaatatttcaaatggagacaccgcctcgctggcggccgggttaaagacctgatgaatctcaaatgggatacactaaatattctggttaatgccgtcattaatggttgtcttggaattggtacgacgaatgcgttaggtggaagttcaatcgttttaggagataacgataccgggtttaaacaaaatggcgatggtctgcttgatgtttatgcgaatggacagcatgtatttcgttttcagaatggcgtggctattgcttttaagaatattcaggccggaactgccagaaaattcacgttatccagcgccaacaactccacgaaaaatgcagcgttttgtttgtggggtaatccatccaggcctgttgttgcagagcttggtgatgattcaggctggcattttttcagccagaggaatacagataacagcatcacgttcgccgtaaacggacaggtaattccgttaaattacggaaacttcgatgcccgctataaacatcgaactgagggggtacaggatgtgcggtatggccatgaaatgtattacaaccctggcagcaacaccgcttcatggacgtttcgctcaccttcgggacacgggctgtcagggatatcgatatcggataccggccgtaactcagcggataacgtcaacggtgtgtattaccgaccgctgcaaaaactgattaatggcacctggtataacgtagcgagtatttaa

SEQ ID NO: 477362 - DNA, 573 bp, Shigella flexneri
atgcctgataaatcaccggacattaagttgccgtcatggctgaatcgcggcgatgtgctccgcctgaaaaacacctttatccgtttctggggaaaggtgcacgactgggtaacatggccactgagccagaccgacccactgacatgtgcggaatccattctgaacctgacagcctggcaatatgatatagcccgttttgacggcgaaccgctcacgctgtacagaaagcgtgtcaaatatgcctttatcaacgcacaggacgcgggcagcgtggcgggattcagggcaatttttgaacgactggggatcggttatgtggagattcaggagcgccagccaggcacagactgggatgttgttcttttgcgcctgacagacaaccagatctcagaaaatacaacattactcaatcagataattcgccagtacggtcgcacctgccgccgttaccatcttcagataatcacatccacggattgtgttatcggacacggatactggcatggcagctatcactatttttatgcaccggagatgaaaaatgacccagagcgctatcacttcagcatttga

SEQ ID NO: 477363 - DNA, 1179 bp, Shigella flexneri
atgcagaataatatcgacttcaaaaacatactgcgcgaaagcggaatgccggttgatgaacagaccgtacgtgacaccctgcaacaggtggcagatgatgaaaaactcatcaccaatacgtcgcgcatgtcgccattctggcggctgattcagttgctggttatcacgccgtatgtgtggattgttgacacactggctgacaatgtactgcataatctgtttctgatgactgccagagggccgttcgttgacctgttcgctgccgccctcaggcttacccgcaaggaagccacgcgtgcgatcggtaaaatcatttttaccaaaaacaaccagaatgacagtgtgaccgtaccggctggcacactgattcagacggagcgtattaacggtgtgatttattccatggcgacccgcgagcaggtaattatccccgcaggcacgcaaagcacccttattgatgtgatcgccaccgacagcggtacggcattcaatctggcaccaggctattaccagatactccccaaagcgattaacggaattgcgtctgtacgtaacggtgataactggctgaccataccgggcgcaaaccgcgaaagtgacgacgaactaaaagatcgttgccgtaaccagtttaaccttgccggcagttatcacactgacgcagtttaccgcagcctgatagctgcacaggccggactgaccatcgatcgcatcttctttttacatgacgccccgcgaggacttggtacagctaatgcctacctgctgctggataccggggttatttcgcaaccctgggttgacagcgtgaatgattacatcatggcacagggacatcacggccacggcgatgatatgcgttgttttgccatgccggaaacccgccacgatctggcggttacggtgtatgttgaaaacctttccaatatcagcaaaaacgatatcgacgccctgaaatcaggcactgaaaacctgattcgttgtgcattccgtgaaaacagtaactacgacgtaacccgcacatggccatacagtcgcttttcattctcgcaactgggacgcgaactgcatgacacctttcctctggtgggatccgtgacgttttcccttgaggatatcatcagcgatctgaacgtaccccgcctgaacacactgacagttgaggtgaagaatgcctga

SEQ ID NO: 477364 - DNA, 339 bp, Shigella flexneri; identical to SEQ ID NO: 468911

SEQ ID NO: 477365 - DNA, 2082 bp, Shigella flexneri
atggctgctgaacttgattttacgctaagtctggttgataagctgacgagacccttaaaacaggcgcaatcggctgtgaccggatttgctgacaaggcaacagccgactttaaacgtctcggttttggtgtggccgggttatggggggctgctcagggaataaaaggactggtcaaccccgcccgcgacatggaagccgcgctggccgaagtcagctcgctggatgtggcaaataaaacactcgatcagttgcgtaaaacttcacagacgtttgccattaactacggcgaaagcgccagcaatttcgtccgcagcgcctacgatatccagtccgccatcgcaggacttcagggtgacgaactgccaaaatttactgaagcatccgccattctcgccaaagccaccaaatcagacacggccaccattactaactatatgggcaccatgtacggtgtttttaaaaataccgcagagaagatggggcgcacgcagtgggttgaacaaattgccgggcagaccgcaaccgccgttcaggtgttcaaaactaccggtaatgaaatgtctgctgcctttactgcgctgggtgccaacgcgcaggcaatgaaggtatctgccgctgaacagttcgccgtactgggacagctccagtccaccatgtcaggcagcgaggcgggaaccaaatataaatcattcctggcggggattgggaatgcgcaaaaagtgctggggctgaactttaccaaccgggacggcagtgccagaagcattaccggtatcatcgacctgattaaaggaaagtttggcgatctgtcaaaagtggcagatgcagacctgctgaaaaaagcctttggcagcgatgaagcggtgtccatgattaaactactggccggagatgttgacgggctgaaacggaacatcaatacattaggtaacatcaaaggcatggataaagccatcgaaatggcgaaaaagatggttgacccgtgggatcaggttaattctttactggagcaggttcgcgtcagcattggtctgcggctcgatcccgtctttgccccgttcctgcaaaaaatcatcaccggcgggaaagccttcatgaaatggctggatacgttccccaatattgcccgctggctgggatatatcactgcaatgaccctcgcctttgccgcagcaggggcgcttgccagtatcacgatgggggccttcggctttatcatgaccgggctcagcggaattgctggcgtgctgaaaggcgcatggaaaggactaatcttcaccctggatttattacgcccctccctgctttcaacccgtcttggcctgatggggctatggattcaggaaaaagccgtctgggtgtggtcaaaactggtcgctctttgggcagggatctgtaaagcggcgatcgtagcctggaacgtagtgttacgtgcgggcgcggttgcaatgcgcctgtggggtgtggcgacggcattcgcaggcggtgcgctgcaactcctgataagccccataaccctgattattctcgccattgccgcacttgccgtagggatctgtctggctatcaaatactgggacaatattaaagccgccatcatggacacggaagctttctgtgccctgctaaaagtcattaacgctgtggtgggctggtttgatgatgcatggaacagcattaaagccggatgggacaatctgacgaactggtttaaaaatttttcgctggccgacacgttcggcaatatcacggctggaattggcaagctctttgacggcatatgggattccattaagagctcctttaccgggacatggaactggatagcagagaagctcaacaaaatccccggtgtcaatatcagcaccgcacaacagaccgtcgcaccgacacccgccccggagcttatcactggcaaccgtagcgccgccatccagggtgggccggtaagtcaccagataagcaacaaccggggcgacaaagtcaccaataacaacgttaagcaggatatcacactgcacgttgacaccctggcgacaccgggacaactggcggaatacagcgaactggcagcggggtga

SEQ ID NO: 477366 - DNA, 273 bp, Shigella flexneri
atgaaagacgaaaataccaccatcatcaccctgaccgtcgcaggcgaggacattcgcttcgccccgaccgaagctgtctacaacaagttcgtgaatgaaataacgatggataacaaggtggcgccagccaaaaactacctgatgcgctgtgtacacccggaagacaaagagaaactggagaagctcattcaccgcccgggagcagcccttcagatggcagcaaaactcaatgaagattttgccgtcaatctggatatcaccgtaaaaaaataa

SEQ ID NO: 477367 - DNA, 465 bp, Shigella flexneri
atgaaacgcgcaacactcgcctttatcgtcttcatggtcgtcgccgtggccgtgctcggcttcacagctgactactggcacaaccgcttcaccagggcagaaaaagcccgccagaaagccgtaaatcttgccgacacccgacagcagaccattgacgacatgacactgcgtcagcgccagaacgccgcgcttgatgcgaaatacacaaaggagctcgccaatgcaaaagctgaatccgaaaagttacgcgccgatcttgcttctggccgtcgccggttgcagctccacgccgtctgtatgcccgccgccacgcgtgataccaccgccaccggctcaactgatgcaaccgccgcccgacttactccggacgctgaacgggattatcagcatctcagagccgaagcgaaagccgtcgttgcacaagtgaacggcctgcaacagtacattactgaacaatgtcattaa

SEQ ID NO: 477368 - DNA, 444 bp, Shigella flexneri
atgaaaatttcagacaacgggctggccgcacttaaacgcgaagaaaactgcaaactgaccgcttaccccgatccgcgcggcgtatggaccattggtacaggtcacacaggaaaggttgatggtgtcgcagttcacaaaggcatgaccatcacccaggacaccgccgacagactgctacgcgacgatctgtcatgggtggagcactgcatcgctgaacgggtaacagttccgctgaaccagagtcagtatgacgcgttgtgtagcctgattttcaatatcggcgctgacgcttttatcggttccaccgttcgccgtcagttaaacgccggcaactacaccgccgccgctgatgctttcctgaaatggagccgcgcaggcagtaacccgacaattctggccccgcgtcgcggacgtgagcgggcaatgtttctgggacagaggtaa

SEQ ID NO: 477369 - DNA, 339 bp, Shigella flexneri
atgcaaagcaccccccacaactggagcgactggctggcgataatcaaagactggttacgtggtgatatccctcttgacagtctgctgatgactgccgtcattgcagcactcagagtgttttacacaggccgcagctggcgtcgtcttttgcttgaggtgccgttgtgttgcctgctggccgtggcggcattcaccctcattaagccggtccccgtcgcatggctgaccgaagactggcgcgtcggtatcggtgccgcaattggccttattggtgttgaacatatccgggcactgggtgtgttcatcacaaagaaatttgcagggaaaagtgacgaatga

SEQ ID NO: 477370 - DNA, 462 bp, Shigella flexneri
atgaacaccgaacgcatcagtggtatgagctttgacacgtcatttaatggccgcatcgttcacgtaaaaaccgccacccttgatattaccgacaacaccaaagccattcaggagcgcggtgtacctgatggctgggtacgcggcgacgtggaagccggcggtgaaattgaactggataccgttaacttccagcttcttggtgaagccgcgcgtgaagcagggagctggcgcgacatcgaagaagccgactttctcttctttgcccgtgcagcaaagacagaactcagggtggaagcctttggttgcaaactgctgatcagtaacctgctgaatatcgacagcaagggcggtgacaacataagccataaaatcaaatttatggtgacttcgccggagttcgtcaaaattgacggtgttccggttctcagcgccaccgatgttcgggacatcatgaaccaatag

SEQ ID NO: 477371 - DNA, 1125 bp, Shigella flexneri
atgacgtttccacaggtcacaattaatcagctcaacacccacagcggaagcaagcgtgggatcgcctgcaccctgctgatggtgggcgagcatacaaaagccattctcccgacaccggttacagcacaaaccgatcttgactcgctgttaggaacaaaggattcattgttacgcagtaacgtgcaggcgtttctggataatgccggacaaaatgccatgatctggctggcaaccgtgcagacaccccagccttctggtcagacccgaacgtgggctgatgtggttatggatgcacaggccaccctctcggtggaaggcgttgtcgttgttcgcgctaacgcctcaggtaacgatatcgacaaagcgcagcaactgcgcagcgaactcaataacaccttccagcgctggacatggtttatcctggctgttcgcggctgcggaacaggcgagaagtggtcagaatacgtcaccgccatgaccggactacagaaaggcattgccgcttacgcggtgcagcttaccccgatgctgttcggcaatgaaccggggatactggccggtcgcctttgcaatccatcagtgacgattgctgattcccccgcccgtgttgcaaccggcgcactggtcaatatgggccgcaacgataaaccgcaggacagcgacaagcgcgaactggacattgccaccatcagggccctgaacagggcgcgtttcagcgtaccaacgtggtatcccgactacgaaggttactactgggccgacggcgtcacgctcgatgtggacggtggcgattatcaggctatcgaatatctgcgcgttgccgatgaaatggcccgtcaggtgcgtttgctggctatcccaaaaatcgccaatcgctcactgaactccaccccggcaagtgtggccgcgcaccaacagcttttcgcgaagcccatgcgcgacagcgcaaagagcctgaaaatcaacggcacggtattccctggcctttgcatgtcaccgcgcgacggcgacgtaaaaatctcatggccggaaaaagacaaagtgcagattgcgatcgtggttcgcccgtataactgcccgaaagaaatcaccatcagcatcatgctggacgaaagcggagagtaa

SEQ ID NO: 477372 - DNA, 729 bp, Shigella flexneri
atggacatctccctgcacggcgaacttaaccggacacagcttaagcagttgcagacaatgctggccaacggtgagctccccccggcaaaacaacagcgtctgctgcagcgtatcgcaaaacgcggcgttattccggccgcaaagcgccatgttcgcgaacaaaagaatgttgatggcagcagttttgcagaacgccgctatggcaacagaccgctgctgaaggggctccctaaatttctgaaagtgcacgacatgccatcagcgaaatcggtgcgtatatacgcagcaggcaggagctatcgccagccccacaaccacagggaaatcagcgtgggtgcagtgggatatatccagagccatggcgttacgttcacagtgaacgcatcgcagctgaaaaccgacgcgatggaaaaagccagcaaggaaccctgctcccgccgtcaggcgataaagctgcgcaagctgggctatacggtgagcgacaaaaaaagggggacgcgccgcaaaccatcaacggcagatatccggacgtcgctcacgaaagggcaggcaggcgtgattatccgcagcatggaaggcataccatccaaaagctgctggacgataaccatcccaccccgtcagttccttggtgtcagtaacgaggaatttgcacggatactgtcccgccagttgcagggcatcaattatggctggcagacaaagccgcaggacattaagaggaaataa

SEQ ID NO: 477373 - DNA, 480 bp, Shigella flexneri
atgagccagttcgacagcctttatgcatatctgcggcaggtgtttgacatttccgtgtttgacaataccggctttgattcgtggatgagtgatattcgtcttttgcccgcagagaaagacatggggcttggacagataagaatgggtattcgccagtacaacgccgtgttcgactggcagcgctggccatggcgtcaggttgaccctgatttgctgttatgcgccctgcttgtctggcgggacgaacaggctaatgactactacagccagcttgagcttgatgcgccggatgtcaacatcgaacccacggacgacaacattgcagaagtgactgtcagtatgccgctcgctgaccccatcattctgatcccggacgaggccggttttatcatgatgggcggcatccgttaccggctggataagccagagatctgggtggcagaaaatatcactgtatccaccatcagggcagggaaataa

SEQ ID NO: 477374 - DNA, 471 bp, Shigella flexneri
atgaacctgaaaccaggctacagcacagaccagaacacagacactgctacaggcatgcttaaaaatgatggcttctggccggatctgtccatggctgattttcgcaaaagccgaactatcccactggatatccctgcatcactggcagaacaggcgttattgtctgccgtctttgaggtgaacaccgcactgaccggtgtgaaatcccgctacgtagtgcagggaacagcgcaggcggcggacgtggaaggcccgcaacttaacggagaaagcgccctttgcgcacaatacaaaaaagcggtctttgcccgcgccaaagccgatcttctcggtgagtttacggcggtgaacacccgccacgccgacagcaatatcgacagtaatgacacccgcgaaaccctgcttgctgaagcggcctttgtgctgcgtgctatccagggcgcaggccgtgtgggagtgtacatcttatga

SEQ ID NO: 477375 - DNA, 702 bp, Shigella flexneri
atgcagactccggcgcaaaagttcagagccagactggccgcgcagcaggcaatggaacaccgcgaggcactgaccgtacgcgacagtcttcatctgcaactggcgcaactggaaatcgactgcagggctgtgagcagttgcgccaccaacgccgatcgtgtggcattcaagcgtgaatccctgctgccgcgctggatgccgacgattgaggcgtggctgcaaagcggcgaggagtacaaatacatcccgtttacctggtgcatcgtctggctgtttgataccggcgaaatggacaaagctctggaatgggccgatatcgccatcggacagaatcaacccatgccaccacgctttgaccgtgatttgccaacgttcgtcgccgatgaggtcatgcagtgggcacagattcagtttgataaaggcctttccgtcgagccctatttcagccgcgtgatgagccatatcgaaaaagactggacactgcacgaagagatagttgccagatggtacaaattcgccggtcttaacctgttacgggacagcgatggcaaaccgacaaccccggccgccatttacgacgtggcgaaactacgtagcgccgatgagtggatggcccgtgcgcacagcaccactcccaaagcaggtgttcgcgccatacgaaacaaaatagccgcccgtctgcgcgcattacgggcggtataa

SEQ ID NO: 477376 - DNA, 1050 bp, Shigella flexneri
atggccgcacagatgttatcaccacaggcgcaaaagtttttgcgtaattacgccatttcgatggcaaaagccaatggcgtatttacagcacaacagttttttaccatcagcccaccgcgtgaaaccctgctacgcgatgccctgattgagaatgccgacccgttcatgggcaagatcaccgtcatgctggtcgaacagcttgtcggccaggtagtcagtaccggaattccggggttgtataccgggcgcaagaaagacggacgcttcaataaagcgctggggagtgaaggcaacgagtacaagctttacgaagtggattccggttcattcctggactacaccaccctgaccaactgggcaaacgcaggcaccgaaaacgagttctataaccgtcttcaggcgttcttttacaagtcagtcaccaacgacctgttacgcgtggcactgaacggtacacatgccgcagatgaaaccaatcctgatacctgcccgaacggggaagatattcacccgggatggcatcagattgttaaagcgcgcacaccaaaacagatcattactgacaaggtcgtattgaaccgtacaggaaccggggctgattttacgtctgttgatgctattgccgccgatgtaatcaatacctgcattccacccgaattccgtcaacacccggatctggttgtactggtatcacagaacattatcgcagcagatacggtcagtatgctgaaccgcatcgaccgcccgacagaaaaagtcgccgcccagcttatcaaccgtgagatcgccggacgcaagtcattcagtccgccatttatgccggataaccgcctggttgtcaccacgctctggaatctgcatatgtacttccagcgcggaacacagcaacgccgtgccgaatggattgatgaccgcaaacgcttcgaaaacaactggctgcgtatgcagggttgcgccgtggaatatgacgcactctacggttcgtttgacaacattgaactggcaggactgccatcacctgaacatgcgaaaccaaaccaggcagcgtaa

SEQ ID NO: 477377 - DNA, 1173 bp, Shigella flexneri
atgaaacccgcgaaaacagccgcaataataccgccagatacatcaaaaagcggtaatgaaatggcaaagcagaaatacaccactgactggatatgcatagcaaccgaaggctacgccatcgacggtcgccccattacccgcgaaatgatccagcaggccgctgacaactacagcaccgccagatacacagcgatgatctggcctaatcaccccgtatacagtcttcaggagcgagaatttacccccaatctggggcttgtttccgagctggcggctaaagaagacgccggaagactgcgccttatggcgaagctggagcctaaccaggcgctggttaaccttaacgatcgcggccagaagctctttacctcgtgcgagttctgggagaactatgccaacaccgggcaaacctatctgtacgggctggcagcaaccgacagtccggcaagtctgggaacccagcgcatggaaatcaaatcagtggaaaacaacacacagggctcacgtccgcagtatgccgccgctggaaatattgaaatgttcagtcttgggcgtctgacgctggtcgctgacaccccaacaaatcatcatgaggataaatccatgactaaagaacaggcgaaccagttgctagcccagattgtcactctgacggcaaaaattgacgcgcaggcgaacacgcaaccacaggcacagcaacccgcaccggcgcagcccacggcatccgcaacagcagacacacagccagtaaccggggatttcagcgctcacgctaatcacgttgcggagctgagtgaaaagctttccgttgccactgacacactggccatcaacccgaaagacgacacggcacgccagaactacaccaccgccgtgacggagctacagaccgcacttaacacctttacggtgcagccacaggatgctgaaaccgcaaaactccaggcacgtatcgccgcccgtaatggcggacaacagccagcgccagccgcagcgcagaatttcagtacccgaaagacggaaaaagatgatgaggccgacgccgccacactgacaacgcttaccagtgcaatcgaaaatctgagccagcgtttttcggccattgaagcccggcgcacaccgatgccgggcgtagcacccggcggacaacccgcacagtttgagccgctgtaa

SEQ ID NO: 477378 - DNA, 1824 bp, Shigella flexneri
atgaaatataccgaagaagtcagggacgctgcccgcgccctgtatctgaaattcagtacaccaaaagagatagcggccacgctggggcttcctgtgcgtaccgtttataactgggctgtccgggggcaatggaatgaaatgttaccagccgagtcggtggaagtggctgtcgcccggcgagtggaacgactgacctgcaaggatggtaaaagcgagcttgagcttgaagagctgcgcttcctgatatcccagcacgtcaggctgatggcgcagaagaacaaacatgctgaacggatggaagagatccgggcgatggtcaataccggcgtggtggtcaatgatggccgacagggtagcagtgaagaagggaatgacgaaggtggtaaaaaaaggaagcgactacgtaaaaatgatgtcggcggactgacaaaagaaatatttgatgaaaaagcgaatggtcatctgtttgaatatcagcaatatgtgcgtgagcacggcgacgaactgttccgcttcattctgaaagggcgacaggaaggatttacctactattttgcatgggaagggtttgaaaaggccgttctcacgggcaagaatcagatattcttttccgccagtaaaccccaggcggaagttttccgtttctatattctcagtattgcgcagcaattctttggtgtcgagcttaaaggcaacccgattcgcctcagcaatggtgcgatactgcgttttctggcgaccaatcccaatacggcgcagtcctacagtggcgacctgtacggggatgaggtcttctggataccgaaatttgcccgcctgcatgaagtggcgtcagcgatggcgacgcatgacgaattccgtattacctatttttcaacccccagcgctaaaacgcaccaggcttacaggctgtggacaggggatgaatggaagggcgacgatccgaaacgtaaggcggcggagttcccgaccagcaaggaattgcgtaaaggtggacaggtctgccctgacgggatctggcgctatgtcatcacaatggaggatgcgtgcgctaagggactcagtgccagagttaacattgagaagctgcgtaaccgctacagcgccacggcgtttgccatgctgtacatgtgtgagttcactgactcccgcgacacagtatttaaattctcagaccttgaaaaatgtgaggttgagttcggcatctggcaggacttcgacccctccgcattacggccttttggtaatcgtgaggtgtggggcggttttgatccgtcacgaacgggtgataactcaacatttgttattgtggccccgcctgttgagcctaaagaaaaatttcgcgtgctggctgtctaccagtgggtggggcttaacttcacctggcaggttaagcagattgaagaattaatgaaacgctaccggtttacgcatatcggggtggatatcacgggtattggccggggtgtttatgatcaactggtacgctccgcaccgcgtgaggtgatggggattaactacagtgttgataataaaaataaactggtgcttaagatgattgacctcattgagcggcgacgtatccagtgggtgaaagatgcggttgatgaggtgacaaaagaacgtgccgatatcccgctggcatttatggccatccgccgtgtaatgactgccagtcagaacgcaatgacgttcgccgccgaacgcagcgaaacgaccggtcacgcggacgtattttttgccatatcgcacgcggtctgtaatgaaccgctcgactatgaatatgaccgcccctcggtgtgggcattcgggaaggctgcatga

SEQ ID NO: 477379 - DNA, 1056 bp, Shigella flexneri
atgagtaaacgtaaaagcgcacgcctgcgtaaacgggcacagacagaaaattttactcccggacgcggcaatattatcactttcggggagccggaaccgatactgactaccggcacggaatacatcaacgtctggtataacggtagctacaactactggacactaccaatagacagacttgcgctcgcgcagttgccgaatcttaacgcccagcatggcggcgtactgtatgcacgcaaaaatatggtgtgtgccagctaccaggggggtggactgacgaccgatcagatggaaatggctgtctttgactacctgctgtttggtgatgtggccattctgaaggtccgtaacgggtggggacgggtggtggcgctggcaccattaccgtctttgtatctgcgtcgtagcaagcaacttgattttatcgtgttacaggagggcgagccgctggtctattcgccgtctgatgttgtgtttttacgtatgcatgatccgcgacagcagatttatggactgcctgattatatcggtggtattcattcagcgttactgaacagtgaggcgaccattttcagacgtcgctactatcacaacggtgcgcatatggggttcatcatgtacgcgtccgacccgaatatgtctgttgaggctgaagaagctatacgtaaaaaaatagagagcggtaacgggcttgggaatttccgtaacatgtttatcagtatcccaaaagggcaaccggacgggattaaaattattccggttggggatattcagcaaaaagatgagttttcaaatgtgaagaatatcagcgctcaggatgttcttacggcgcaccgctttccggctggtcttgccggtattatcccgcaaaatgcgagcggacttggcgatcccgataaggcaaggacaacctatggacgggatgaagtgacacctgtctgccgtaaattcatgcaggctgtgaacagcgagcccgaaatccccccgtcgttacaccttaattttacgctggaagatgtggaaaatgtggtgtctgcgctggctgatgaaaaataa

SEQ ID NO: 477380 - DNA, 276 bp, Shigella flexneri
atggcgggtgtgatgaaaattgaatgtccggcgtgtcactgccgggcggctatacgcaaaactgcatggcaggatgacgcaaaaacgctggcggtagtttattgcacctgcactaattctgactgtaatatgcgtttttcgctcaatctttccgatcttcgcgtgatttcacccagtgacctgcaaactgatggtgtcgttaaagcattgctccagcgccttaaaccagacgaaaggcaaatggcactggatattctgctcagtgatggcgcgtaa

SEQ ID NO: 477381 - DNA, 249 bp, Shigella flexneri
atgagagagcaattaccagacaccgtgccagtacaggaaatcaaagaaaatatcaggcaacaacttcacggattttatattacttatgatttgtggctgaaaaacggagcaaatccagacggaatattttcgcgaaactgtggtttatgcgccagcctctgggattatctcgaattaacgggtgctgataaagaagccgcactggggctattgcacattgatttcagaaatgccgggcgaaccgcatag

SEQ ID NO: 477382 - DNA, 432 bp, Shigella flexneri
atgacgcgatttcactgcaccatgcagcgtcagcagttcgacgccgttatgcgccagcgcacgccagccatgacactgagaggcgtagccacaagaccacagcccggggacgaactggaaatcacggtggccagccccgatcgcaccaccacaaccaccatcaccgacatacttaacaggcgaccgggcagtgaatatcagagctggaccattgccgttcgcccacgccgttcgccggaagaaccggagccgctcaccccggccggaaaaatcatgcagaagtaccacgaagagcaggcccgcaaacacaatgtcgcgctggccagaacactgactgccgtcaatcgcaaggccgcactggcgcgaagggtcttttcatcgcagcacccttcattcgccagaccggcacaacacaggagagatccacaatga

SEQ ID NO: 477383 - DNA, 2517 bp, Shigella flexneri
atgagccatcacaacacacacctggcgtacccgtggaatgccccgctgccagttattgatcctgagacgttcggcagagcgttaccgcagaagccaaccgcattacaacgggcaatccgggactacctcaccgaagacattcgcactgaggcccggctggatgaagaaaccgtggtcttcctgacaaccacggacaaaggcaaacaaattaattcacaccttcaccgggacgaagagcggcagacaaggctggataagctggcacgacacagacgcgaaaatccgccaacggaggtatcggaagcgatagccgaacttcgcgccctgccaccgtttcttgccagcgtgctgatccgcgatctggcacgcctgaaccggaaacagcaaagcgcccgcagcaaaggtgtaaaaaacaatagcgcatacgtggccgataacttcgttcgccgtggactgcgcgcgcgcctgaaacgtatcgaacgggttaacgaccgctttgcaacgccggcattcaaatccagtgtcatacgccatcgccttgaagagctgctcatgctgccgcaactcagccgcgacaagatccagcacatcgccacactgactgcgcagttctttaccgcagaatttgaacgcatatgtgatgaagttcctgaacagaccggaaagaataatgacagcccggttatctggctgctggcctaccagaagatggcacgcatagccttaacgctgggcgtgatcccgccatactggccggaactcgaaatcaggcacaaccgacgcacaccgccggaccctgaactgataccgggtgcggtactgcgcatcacctgcgcgacctggtggaacaaccagttacgccacatcgccgatctctggcgggaggagttactgcgtgccgccggcagagtgtcacgtaaacaatccccttatatcagccatgaatcactactggagtttcgcgagaagcgccagcgcacccgtgattttctcaaaagctgggatattgaaaacgaagacggcgagcgcctgagtctggaggaagtgtactgggcgggcccggggaatccacgcaaccgccgcaatgaaatgatggtctgcatcagagggatggagatggtagccgaattgcggggtgacgtcgcattcttcatcacggtaacagccccttcccgctttcacagcgtgaacgaatacggcagcctgaacccgaaatacaacggtgccactgtacgcgataccagtgattatctggtttacgacttcttcgcagccgtaagaaaaaaaatcaaaaaagaggggctgggctggtacggcgtgcgaaccgctgagccacaccatgacggcacgccacactggcatatgctggtattcacgtcccctgagaacgcagagcgcatcatcgaaattatgcgcgacgcagcgattaaatcagatcgccacgaactgggggacgatatttcgccgcgctttgaatgcgagaagatagatccggaaaaagggtcgccggcaagctatatcgcaacctatatcggtaagaacctggacgccagcgccttccacaacaatgatccgaaaaccggaaaaccttacgtcgataaggaatccgggaaaaccatggcggaaaccgtggagaacgccattgcatgggcgagccttcaccgcatacgtcagttccagtttttcggcattccgccccgccaggtgtggcgtgaactccgccgccttgcaagccagatggggcgcaacccggcatcaccgaagcgactcgatcatggcgatattgacgccattatggccgccgcagacgtagggtgttttgccacctacatcatgaaacagggtggcgtgcttattccacgcaaccagtatctggtccgcaccgcatacaaaaccgcagacgaagctaatgactacggcgaattcccgcagcgcatctacggaatttgcgccccgtcactcggggaacggtacaccatctgcacccatccggatgagtggaaactggtcagaaaagaatctgacgccgacaacagcacggacgagggttttgaccttcggggcggcttcgccgcaccttggactcgtggcaataactgtcccggtgacgaaaaaacagccggaaccggcacagaaaacaggcagcgtgggtcgcggctgacgcttccggaaagcggcctggcgcactggttgcagacgttaacccgtcacgagcggaaacagctcatcagacagcttaaaaatcagccgcccaccacggataccggacaaaataacaccagaccagcatcagacacccctgtcagggtggaggttgtcgtgcctgtcgacaccacgaccatcgcacaaatcacccgcgaactcgacgcgctgggtgtgcagctgcctgacgcagccattatttccgtgagtaacggtgcccgcgttcgcccgggcgacgggcgtatcgcgtactggagcgccacaacccgccgtatcgtcatcacacaggagtcgtcagcggaggtaagatcatga

SEQ ID NO: 477384 - DNA, 414 bp, Shigella flexneri
atgaagagcgttaagggactttcagatattcaggatttttttaactggatgtgggcggtggatccacgcctcgcttcccgtctcaatgacctgcacgactattaccgccgcgcctgtaaacaggccgccagcagcgccaccacatacggtgagttttccttcaccgttgacgaccgttaccgcgtggacgtcagagaccagaacaacagcctggagctgggcctgttccacatcaacggactcgacagcagtgttatcagctggtcatcgtcagaaatggtgctcgttctggaaatgaccacccacagcgtggtcgtgaaagggattaaaacggcagaagactttatcgctgaataccagcgtcttcttgtgctgtaccgggctgcatttcagaaggcaacagcaggggagtaa

SEQ ID NO: 477385 - DNA, 228 bp, Shigella flexneri
atggcaaaccgcaaacaacagcgcgcatacgctgcgcgtcgtcacatccagactgaaatcaaccgcagacttttccgcgccttccgcgtcgcgcatatcatgcacatcaatatgctgcatgagcgcagtcacgcactgtcaaacacctattccgccgctgttttcagctatctggcggatgatctgcgcgggctgcgggacctcattaaccagcactaccaccactaa

SEQ ID NO: 477386 - DNA, 555 bp, Shigella flexneri
atgtttctgaaaccaatggggggaccaggtaaagcaccgaagcacgtcagtgcctggacacaacaggaagacgaactgcttatctcgctttatcaggatcacagcacatggcaaatggctgaacgacttcagcgaacccgcagcgcagtgatgcaccggattctttttttacgtaatcgcgggttgattggtcgcaagagaaaagcaccgctgagtgcagaagccatcgcctttctcaccaaaaaccgtcacgcaaaaaccgcacgggaactggcccggaaggtgggacgcagcgagtgcaccgtgaggtacacactgcataaacggggttacagccttaagaaatgcggcgagagccaccattgtgccagatacagcgatcgtctgactgagctggttacggagctacgcgacagatgcaacatgacgttctgcatgatcgcgaaacacatcaacatcacgatgcaaatgcacatcagcgatgatacggcgtttcacctctacaaccgccggaccgccgccgacgccctgttgtacgaactgctgccgaactga

SEQ ID NO: 477387 - DNA, 312 bp, Shigella flexneri; identical to SEQ ID NO: 469009

SEQ ID NO: 477388 - DNA, 960 bp, Shigella flexneri
atgaaaggtattctgaaccagcgctcaccgctcaaatgggcgggcggcaaattcagtatcatgccgcagctgcgcgaatatttacccaaagccgcctgcctgatcgaacccttcgtgggcggcggctcggtcttcatgaacacggattatgactattacgtattgtgtgacagcaaccccgcgctgattaatttctaccagcaactgacgaccaacaccacggaattaatggatcgtgcatggtcgctctttaaggatggcggcacaccggaagcctacaaacgccatcgcggggcatttaacaccatcgcgctggccaccgacagattacgcggcgaatccctggaatgggcagcgctgtttctgtacctgaaccgccattgctttaacggcctgtaccgcaccaaccaaaaaggcgaattcaatgtgccattcggcaaacaccgcatgccttatttcccctgccaggaaatgcgcctgtttgctgataaagccaacgagacccggacccgctttattcacgcggatttccgtacagccttcacaatgccggctgagatccgccgtttttcttcggtgcacggcgatatcgccatttactgcgatccgccctacctgccaccggacggtaaagaggcgttcactcactacaacggccgggcatttacccgcaaagaccaccgtgaccttgcggcgctcatgatgaacgcctggcagcgttacggtatccacccggtggtctccaacagtgacacctccgaaacccggcagatctattcctcgtttgagctgcacaccctgagcgttcgccgcgctgtgactgccagcagcagtgcacgccagcaggcaaaagaggtgattggtgtttatccgccagcccgtgaggtccggatccgggatgtcaatgcgggctggctgtctcacattcccgctccacaccccaccacggagatcatgtaa

SEQ ID NO: 477389 - DNA, 240 bp, Shigella flexneri; identical to SEQ ID NO: 469011

SEQ ID NO: 477390 - DNA, 531 bp, Shigella flexneri; identical to SEQ ID NO: 469012

SEQ ID NO: 477391 - DNA, 423 bp, Shigella flexneri
atgattaatccgacactcaccctcaaagataaagcccttgcgggcgcaatgtttttacgcaactacgccgcaatgatggctgacactgacaaccctatgatggtgctgtcagtggagcctcaccttatcgccgcagacgcaattgaacaggtggtacaggaaaacacctgtctgagaaatcagcttgccacccttcagacagcagctgacccggcaaaggaaagtgctgaacacacctgccacaccacattcatcaaagggacccgcgtatgtctgaaaaacagtccgcagcaacgcggaacggtcgttgacacccgcaccagtagccccgccattgaccgggttttcgtccgtttcgatccccccttcgaggaagatcgctgggtaaagaccagaaacctggaaataacccccgacaaatga

SEQ ID NO: 477392 - DNA, 186 bp, Shigella flexneri; identical to SEQ ID NO: 469014

SEQ ID NO: 477393 - DNA, 243 bp, Shigella flexneri
atgagaaaacacacagcagaacaggtaaacgaatttctgcagggatattacttcgataacgaaattaatccccgcgccagaaaaacacacttcaaagtaatgaagtgcggaatattcagcgtccgcaacaccctgttttgttcaaaagatacgggagccagcgaggaccttaaagaacttaaccggatggcgaaacaattaatggatggcatggttcccgaacccgcaataattacggagtaa

SEQ ID NO: 477394 - DNA, 351 bp, Shigella flexneri
atgaaacaacaactcaattcttcacagcagcgcttccgcaacggcgcagaacgctatgccaaccgtttcgctaccagcgcatcacgcagcaacatccgctacagcctgagcgagacacacgcaacaccggatggccacgcagtaaaacaaatcggcgagcatacctggatgattgagaaagctggaatagtggtccacaaatacccgcgcaatccgtttaccggaaaccgcatttttgctctgagctgcggcgacaatcagttcgggcaggatttcacgttgtacgaagcgctacgcacagttgatcgccttctttacggagaaaattttattaaacaggctgagttataa

SEQ ID NO: 477395 - DNA, 195 bp, Shigella flexneri
atgactggcttcactcaaacaaaagacttatacagcaatttacgcatcatcatcatgcaacaacaatcaggccggctggctcctacacgggcaagccatgcctggaaaatggcactgaccaatcaggacgtcaatgtaattagcgaagttctggctgaaatgatttttaagctggcaataaacgagtcactgtaa

SEQ ID NO: 477396 - DNA, 204 bp, Shigella flexneri
atgagtaacataactatcaacattaatatacctacagcctacgtccgcttggagaaatacgcggaaatgacaggtacaccaatcggcacatgtaggggaatggttcgcgatggacggattattatccgtccaaaagaaaaagctaaagacgctattgaggtaaatctcgtagccatgctgaaagatgccattgcgaatagctga

SEQ ID NO: 477397 - DNA, 207 bp, Shigella flexneri
atgaatcaagaacaacacgctcataagtcacgattgcctaaaggtgccttcaaaggcaggccgatcgccctgcgtctgacaccagaagttcgtaagactgtagaggacctggcaaagaaagagcttcgcactgactgcaatatggcccacgtcattttcatgcgcggacttgagatcatcactcaggagggagaagaaaaagaatga

SEQ ID NO: 477398 - DNA, 378 bp, Shigella flexneri
atgcatttaagtataggtgaacgccttagagaggaacgtctccgcttagaattaagccaagctgctcttggtgagatcggcggggttagaaagcaagcgcagctcctctatgaaaaaggtgagcgcaatccagatactgcttacctttctgcgatatcaaagttcggggtggatattcaatatgttgtggttggtgagcgctctgtgtcggcattgagtaatgatgaaagtgagcttttgtcgctttatcgttctgctccattggccgttaaagcggcagcattggcagctcttacagccggtagttctgcttctgtttctgtcaatgtatcaggcaacagtaaccgtgtagcgggcggggattatcacgaaaagtaa

SEQ ID NO: 477399 - DNA, 675 bp, Shigella flexneri
atggatttaaactcaaacggggataagaataaaattgcaggacgtgattataaagaaaataacgtccagattgagagtttggatagtagccagacaatcaatatcaatgttccagctaaggctggcgaagagcgcccgttagtaaagtcccaacgtatcagcattcgaaaacttgtaaatgctgtagctgagtctgaaaacacagaaacagtgccagtttgggtaaagttgcacgctgaacttggcgtgaacggtgtgagtgagatatcaggtagtcagtacaaggttgcgttaaaattcctcaacgatttactggcagaaagtaaggagaagaaaacaaaaaaagttcttgtcgctaagatcttgaataaaacagaggcgcaggatttgcgccataaactgaatgaacattgtagtatttattacaaaaacacacggctggatgaattaagccacaatcaactcgttgaaatttatgagtggatagaaaaaacagctcccattgtttcacctgaatgtaaagaggatatgtctgtttcctttaatgacaacatcataactagtaattctgttaatagaacaccatttattaaattgctgacaacgcattatttagtgttcattatcgtatttgttgttggttttgttgtgggcgaaatcgtttcaaaaatatga

SEQ ID NO: 477400 - DNA, 1056 bp, Shigella flexneri
atgacagttcggcgactcgcatcaggaaagtggctttgtgaatgttatccatatggggcaagcggaaggcgtattcgtagacagtttgctacaaaaggtgaggcgctttctcatgagcgccgattgatggtgcatgccgatgtttcagtggttaatagttcaaaacgattgtctgagcttgttgatatttggtacgagatgcacggtaaaacattgactacgggtgaagaacggcaggctaagttgaaggctgtttgcgaaaggatgggagatccgctcgtttcagaatttgaccgcaatatgtttgctgtttaccggaagcgtcggttatcaggtgaatggagtgctaataagaaaaagccaactaaggaagctaccgtaaatcgtgagcagtcatatttgcacgctgttttttctgagttaaagcgtcttggcgcgtgggctggtgaaaatcctttagaaggtgtgcgccattttaaagttagtgaaagcgaactctcatttctgtatgaagatgagattgagaggcttctttcggtttgcgatgaatcaggcaacgccgatcttggttctgttgttcgtgtatgtctggcgactggggccagatggagtgaggctgaaaaattaacacagtctcaggttttaccgggacggatcacatttacgaataccaagagcaagaaaaacagaaccgtcccgatttcggataacatccagaagctgttacccaaacgtcgaggccgtctcttttcaaattgctatgaagcttttacttgggcgctaaagaaagcaaaaattgagttgccggaaggtcagcgaactcacgttctcaggcatacctttgcaagccactttatgatgaatggggggaatatcttggtgctacagcagatactaggtcatagtacgattcttatgacgatgcgatatgcacactttgccccagaccaccttgaggctgcggtaacgctcaatccattagatcgtatttacaccaaaaatagtggcgataaaaacgcactacagacaataaaactcaataatcagcatttgtaa

SEQ ID NO: 477401 - DNA, 696 bp, Shigella flexneri
gtgggaaaagagaagaaatcacgcattctgacaaaaccctgcgttattgagtatgaaggccggattgtcggctatggttcaagggagctgcgcgttgaaaccatatcctgctggctggcccgcacaatcattcagacaaagcattattcccgccgttttgtgaataactcctggttgcatctgggcgtattcagtggacgtgatctggttggtgttcttcagtggggatatgcccttaaccccaactcagggcgtcgcgttgtgcttgaaacggataaccggggctatatggaactgaaccgcatgtggctacacgacgacatgccccgcaactctgaatcacgggccatcagctacgcgctgaaaaccatcaggttactgtatccgtcagtggagtgggttcagtcctttgcagacgaacgttgcgggtgtgcaggtgttgtgtatcaggcgtcaaattttgattttattggcagccatgaaagcatattctacgaactggacggtgagtggtatcacgagataacgatgaatgcgattaatcgtggagggaagcgcggcgaatatttacgagcgaataaggagcgggccgtggtacacaaatttaatcaatatcgttacatcaggttcctgaacaagcgcgcaagaaagcgactaaatactaagctattcaggattcagccttacccgaagtga

SEQ ID NO: 477402 - DNA, 480 bp, Shigella flexneri
atggggccagccacctgcgtaccgctgtatcaacaactgaaagccgagttcccggaagtgcaggcggtaaatgccatgtacacccacggcctgctggcgattatctccaccaaaaaacgctacggcggctttgcccgcgcggtgggcctgcgtgcgatgaccacgccgcacggtctgggctacgtaaagatggtgattatggtcgatgaagacgttgacccgttcaacctgccgcaggtgatgtgggcgctctcctcgaaagtaaacccggcaggggatttggtgcagttgccgaatatgtccgtgctggaactcgaccctggctcaagcccggcggggatcaccgacaagctgattatcgacgctaccacgcctgtcgccccggacaaccgtggtcactacagccagccggtggtggatttgccggaaaccaaagcctgggctgaaaaactgaccactatgctggctgcacgtaaataa

SEQ ID NO: 477403 - DNA, 237 bp, Shigella flexneri
atgatttgtccacgttgtgccgatgaacagattgaagtgatggtgaaatcgccggtgaaagatgtctggacggtatatcagtgccagcattgcctttatacctggcgcgataccgaaccgctacgccgcaccagtcgcgaacattacccggaagcgttccgcatgacgcagaaagatattgatgatgcgccaatggtgccgagcatcccgccgctgctggcggaaggtaagcgctaa

SEQ ID NO: 477404 - DNA, 1365 bp, Shigella flexneri
atgtccacaattacattgttatgcattgcgttagctggcgtaatcatgctgttgctgctggtcatcaaggcaaaggtacaaccattcgttgctctgctcctcgtcagcctgttagtcgcacttgcggcgggtataccggcgggcgaagtgggtaaagtgatgatcgccgggatgggcggtgtgcttggttccgtcactattattattggtctgggcgctatgctggggcgtatgatcgaacactcttgtggtgcagagtcactggctaattatttcagtcgcaagttaggtgacaaacgaactatcgctgcgctgactctggcagcgttcttcctcggtattcccgtcttctttgatgtcggctttattattcttgcgccaatcatttacggttttgccaaggtagccaaaatatcgccactcaaatttggcctgcctgtcgctgggatcatgctcactgttcacgtggcggtaccgccgcatccaggccctgtcgccgcagcggggttactccacgcagacatcggctggctaaccatcatcggtattgcgatttctattcccgtaggggttgttggctactttgcagcgaaaataatcaataaacgccaatatgcgatgtcagtagaagtactggaacagatgcaactggctccggccagtgaggaaggcgcgacaaaattaagcgataaaataaatccaccgggcgtcgcgctggtcacctcgctaattgttattcctatcgcgattatcatggcgggtacggtttccgcaacactgatgccgccttcgcatcccctgcttggtacgctacagctgatcggctcaccaatggtagctctaatgattgcgctggtgctggcattctggttattggctttacgtcgcggctggagcttacaacacaccagcgacattatgggctcagcgcttcctactgcggcggtagtgattttggttactggtgctggaggggtatttggcaaagtgctggtggaatcgggcgtcggcaaagcccttgccaacatgttacaaatgattgacctgcctctgttaccagccgcatttattatttcactggcgctgcgtgcatcgcaggggtcagcaaccgtagcaatactgacaaccggcgggttactctcagaagcggtgatgggattgaatccgattcagtgcgtattggtgacgctggcagcctgctttggtgggcttggggcgtcacatattaatgactcagggttctggattgtgaccaaatatctggggttgtcggtagcagacggtctgaaaacctggacagtgttaacgaccattctcggttttaccggattcttaattacctggtgcgtatgggcggtaatttga

SEQ ID NO: 477405 - DNA, 771 bp, Shigella flexneri
atgcctcgttttgcagctaatttatccatgatgttcaccgaagtgccttttattgaacgcttcgccgcagcgcgaaaagccgggttcgatgctgtgcaatttctgtttccctataactactccaccctgcaaatccaaaagcaactggagcaaaaccatctgacactggcgctgttcaataccgctcccggagatattaatgcgggggaatggggattatccgcccttcccggacgtgagcacgaagcacacgcagacatcgacctggcactggaatatgcattggcgctcaattgtgaacaagtccatgtgatggcaggcgtcgtgcccgctggcgaagatgctgaacggtaccgggcagtatttatcgataatctccgctacgctgccgaccgctttgcgccacacggcaagcgaatattagttgaagcactcagccccggcgttaagcctcattatctcttctccagccagtatcaggcactggctattgttgaagaggttgcgcgagataacgtgtttattcaactagatacttttcatgcgcaaaaagtagatggcaacctgacgcatttaatccgcgactacgccgggaaatatgcgcacgtacaaattgccggactacctgatcgacatgaaccggacgatggagaaatcaactatccgtggctgttccgcctgttcgatgaggtgggatatcagggctggatcggttgtgaatataaacctcgtggcctcaccgaagaagggcttggctggtttgacgcctag

SEQ ID NO: 477406 - DNA, 603 bp, Shigella flexneri
atggccaaaaattatgcggcgctggcacgctcggtgatagcggcactgggcggcgttgataacatctcggcagtcacgcactgtatgacgcgtttgcgctttgttatcaaagatgaccagcttatcgacagcccgacgttaaaaaccatccccggcgtgctcggcgtggtacgtagtgacaaccagtgtcaggtaattatcggcaatacggtttcgcaggcctttcaggaagtcgtcagcctgctgccgggagatatgcagcccgcacagcccgtgggtaaacccaaactcacgctgcgtcgcattggtgcggggatcctcgatgcgctgatcggcaccatgtcaccgctgatcccggcgattatcggcggatcgatggtcaaactgctggcgatgatcctcgagatgagcggcgtgctgacaaaaggatcgccgaccttaaccattctgaatgtgattggtgacggtgctttcttcttcctgccgctaatggtcgcggcatctgccgccatcaaatttaaaaccaatatgtcgctggcgattgccatcgcgggtgtgctggtacatccgagttttattgaattaatggcgaaagcggcctag

SEQ ID NO: 477407 - DNA, 555 bp, Shigella flexneri
gtgctgaacactacccgactggtgaataatctactggatatggcgcgaattcagtccggcggctttaatttgaagaaagagtggttaacgctggaagaagtagtcggcagcgcgctgcaaatgctggaaccgggtttatcgtcgcccatcaatctttctctgccagaaccgctgaccttaatccacgttgacgggccactctttgaacgggtgctgattaatctgctggagaacgcggtgaaatatgcgggtgcgcaggccgaaattggtatcgatgcccacgttgagggcgaaaatctacaactggatgtctgggataacggccccggtcttccgccaggccaggagcagacgatatttgataagtttgctcgcgggaataaagagtcggcggtgccgggtgtcgggcttgggttggcaatttgtcgggcgattgtggatgtacacggcagcaccattaccgcgttcaaccgaccggaaggtggtgcctgttttcgtgttacacttccccagcaaaccgctcctgaacttgaagactttcatgaggatatgtga

SEQ ID NO: 477408 - DNA, 1044 bp, Shigella flexneri
atgaaaacatgttggcaaatcctcgaaattgaaagcacgacgcaaatagacattatccgccaggcttatcttgctcgcttaccgttgtgtcatcccgaaaccgatccgcaggggtttaaagcattacgccaggcctatgaagaggcgctgcgactggcggtaaatcctgtcgaggaagcagatgatgaagaaaaagatgccaccgctgaacatgaaatactacgtgcattcaggacattactggattcagaaagtgatcgttttcagccctccgcctggcagaaatttattcagcaattaaatacctggaacatggaggatgtcgatcaattacgctggccgctgtgtgcaatcgctatagaagcgcgatatctgtcattaaattgtgcttctttgttggcagagcgtttgaactggcattcgtttaatgacagcgaaggaatggatgaggaagaaagggaggcttttcttgaggccattcaggctggtgattgtttcgatttccttagccttctggaatatcccgtcgcgttacagaaccagactgttgaatattacttcgcgctggaacgttgctgccgttaccatcctgactatgtcactgcgtttttggcgatggaaggaccgtggttcattcctgatgatgcaaagttacatcgcaaactgttgcgctggtacagctcggtgcaaacaggtatggtggaactcattcctgtagccaaacagtggcaagcggaagaaccagaaagcgaagatgcccggtattaccagtgtgcacaacgtttgtactgcggcgagggggaaagcctgcttgccgatctcggcgcgtactgggaaagttacccatctacacaagctgataatttgttgttgcagtggagcaagcgtcattgcccggattatttcgcgttattagtgatggttatcgaagcgcggagcatggtagatgcgcaaggtcaaccgctgaaatatgttcctggtgagagcgcccggacgcggctgttatgggcggaaattttacatagcggaaaattatcgcgttag

SEQ ID NO: 477409 - DNA, 147 bp, Shigella flexneri
atgctggttgctgcaggacagtttgctgttacatctgtgtgggaaaagaacgctgagatttgtgcctcgttgatggcgcaggcggcggaaaacgacgtatcgctgtttgtcctgccggaagcattgctggcgcgcgatgcatcatga

SEQ ID NO: 477410 - DNA, 906 bp, Shigella flexneri
atgcaggggcgtgtcctgctggagcctgagccggaacgttattcatctttcgccagcggtgccgttccggcagcatcacaaccgctggcggatgatcctgccgttcgggccgtgttccgccatgaggcggtgatccgtcgtgctggtggcgtggaatgccttgagagctggttacttcgtgaaaagggctgtcagtggcctcattccgactggcacagcgagaacatgaccacaatgcggcacgcgccaggcgcaatccgtctgtgctggcactgtgacaatcttctccgtgaccagttcacggaacggctggaagcaatggcaacggataactgtgcccgctgggtgttgtctgttgtgcgccgtgatcttggttttgatgacagtcacgttgtgacaatgccggaactgtgctggtggctgattcgtaatgacctggcggatgccttaccggaaagtgcagcccgtaaggcactgagattaccgaagcctgttgtgccgtctgtcacccgggaaagtgaccttgtgccttcggttcctgccaccagcatcatccaggataaggcgaaaaaggtgctggcgctgaaagtggatccggagtcgccggagtcttttatgttacgcccaaaacgtcgccgctgggttaatgaaaagtacacgcgctgggttaagacgcagccgtgtgcatgttgtggtaagccagccgacgatcctcatcacctgattggtcatggtcagggtggaatgggtacaaaagcgcatgacctttttgtgttgcctttgtgcagaaaacaccatgacgaactgcatgcggataccgtggcatttgaagagaagtatggttcccaactggagctgatatttcgttttatcgatcgcgcgctggcgattggtgtgctgtcctga

SEQ ID NO: 477411 - DNA, 381 bp, Shigella flexneri; identical to SEQ ID NO: 4987

SEQ ID NO: 477412 - DNA, 198 bp, Shigella flexneri; identical to SEQ ID NO: 464433

SEQ ID NO: 477413 - DNA, 1050 bp, Shigella flexneri
atggctaatactgtaaaaatatccagttgtgagttaatcaacgccgactgcctggaatttatccggtcgttacccgaaaattctgttgacctgatagtcacggacccgccgtactttaaagtgaagcctgagggctgggataaccagtggaagggcgacgatgattacctgaagtggctggaccagtgtctggcgcagttctggcgggtgctgaaacctgccggaagtctttacctgttctgtggtcatcgcctggcatctgatatcgaaatcatgatgcgtgaacgcttcagtgtgctgaaccatattatctgggcgaagccgtccggacgctggaacggatgcaacaaggaaagcctgcgggcgtatttccccgccacagagcgcattctgttcgcggaacattatcaggggccgtatcgtccgaaagatgccgggtatgaggcgaagggcagggcactgaaacagcatgtgatggccccgctgattgcttactttcgtgatgcgcgcgctgccctggggataacggcaaaacagattgcagatgccacaggaaagaaaaacatggtgccgcactggttcagtgccagtcagtggcagctaccgaacgaaagcgattatctgaaattacagtcgctgtttgcccgggtggcagaagagaaacatcagcgcggggaactggaaaagccacaccaccagctggtcagcacatacagtgagctgaaccggcagtatatggaactgctgagtgaatataaaaatttgcggcggtatttcggtgtgacggtgcaggtgccgtacaccgatgtgtggacgtataaaccggtgcagtactatccagggaaacatccgtgcgaaaaaccggcagaaatgctgcagcagataatcagcgcaagtagtcgtcctggtgatctggttgcggattttttcatggggtcgggttcaacggtaaaagcggcgatggcactggggcgtcgtgcgattggtgttgagctggagaccggacgttttgagcagacagtcagggaagttcaggatttaatcgtttga

SEQ ID NO: 477414 - DNA, 1854 bp, Shigella flexneri
atggcatttaaacactatgatgttgtcagggcggcgtcgccgtcagaccttgcggaaaagctgacacacaaactgaaagagggctggcagccatatggcggaccggttgccattacgccgtacacactgatgcaggcggtggctattgaaggagatccacaggtcggcccttcatctgagccggactggttctacgtggttgtgcttgccggacagtccaacggcatggcctacggtgaagggcttccgttaccggattcttacgatgctccggatccgcgcattaaacagctggcgcgccgcagcacggtaactccgggtggagagagttgtacgtataacgacatcatcccggctgaccactgtctgcatgatgtgcaggatatgagtacgctgaatcatccgaaggcagacctgagcaaagggcagtacggctgtgtcggccagggcttacatattgccaaaaaactgctcccgtatatcccgaataacgcggggatcctgctggtaccatgctgtcgtggtggttcggcattcacccagggcgcggaggggacattcagtgcggacgcgggggccagccaggattcggcgcgctggggtgtgggtaaaccgttatatcaggacctgattgcgcgcactaaagctgcattacagaagaacccgaaaaatgtgttgctggcggtgtgctggatgcagggagagtttgacatgagcgccgccacctacgcacagcaacctgcgctgtttacagccatgctgaagcagtttcgtgctgacctcactgtgtttaacgcgcagtgtcatggtggcagtgctgtaaatgtgccgtggatttgtggtgacacgacgtattactggaaaaacacctacggcacgcagtacaacaccatttacggggcgtacaaaaacagggagagtgagggcgtttattttgtgcccttcatgacagacggtaacggcgtcaataccgccactaacgcgccggcagaagatccggatattccggcatcaggatattacggtgcggcatcgagaacgaatggaaaccaggtatcatcaaaccgcccgacacatttcagttcatgggcgcgcaggagcattattccggatcgtatggcaaccgctattctgaacgcagccgggcgcacctcagccttcatcagtggtaaggcaccggaaatcaaaccctcgcccggcggcgacacgccatcggggccgcctgaagatgcatccgtacgcacaatctccctgctgccgacagccggagaggctgctgcgcagggctggaccattaaggacggcggaattcagttgtcgggtggtgtatttaagatcgccaagcagagcaataaaacctggtccctgatgcatccggtggatgacgcagtctccctgctgacacggggtggcagactgagctgtaagtttcgactgtcaggcgcactgaccaacaaccagttcggtctgggaatttatctgtataccgatgtagcgttacctgacgtcgtggcgatgaccgggactggtaacccgttcctgatgtcgttcttcacccagaccacagacggcaaactgaatctgatgcatcacaagaaagccggaaacacaaagttgggcgagttcgggaattacagtaacgactggcagacgctggagctggtgttcaccgccggcagtgccacggttactccgaaactgaatggagtggctggcccggcattccaggtcataaaagacagtctgacactgggactgaatgcgttgacgctgacggatgttacaaaaaatgcagcgtatggcgttgagatagaaagtctggtgctggagataaatgcaccggcatcatcataa

SEQ ID NO: 477415 - DNA, 216 bp, Shigella flexneri; identical to SEQ ID NO: 17654

SEQ ID NO: 477416 - DNA, 345 bp, Shigella flexneri
atgaagaaaaaatacgaactggttgttaaagggataaataattacccgaataagattactgttactgtggcactggaaattggtgggtatccgtcactgttgttgccagatgtggcgattagtcttgaccgtactgaagatgccacgctggagttttacgaagctgaggcgaaaaagcaggcgaagcagtttttcatggatgttgctgccgggttatgtgaaggggatggtccgttgccggaaaagcgccccgtaattttagaggcgcaggatgtgttgataacctacagaggaaaactaccgggaataattactggttctctgaagactccaccgctggcctga

SEQ ID NO: 477417 - DNA, 534 bp, Shigella flexneri
atgaacaccaaaatcaaatacggcctgtcggctgccgttctggcgctgattgccgcaggtgcgcctgcgcctgaaatcctcgaccagtttctggatgaaaaggaaggtaaccacaccacggcataccgtgatggcgcgggtatctggaccatctgccgcggtgccatcctggtggatagtaaacctgtcgtcccgggcatgaagttgtcgaaggaaaaatgcgaccaggtcaacgccattgagcgtgataaggcgctggcatgggtggagcgcaatattaaagtgccgctgaccgaaccccagaaagcgggtatcgcgtcattttgtccctataacattggccccggtaagtgtttcccgtcgacgttttacagacggattaatgctggtgaccgcaggggagcatgcgaagcgattcgctggtggattaaggacggtggcagagactgccgtatccgctcaaataattgctacggtcaggtatcccggcgagaccaggaaagtgcgctggcgtgctggggtatcgacagataa

SEQ ID NO: 477418 - DNA, 138 bp, Shigella flexneri; identical to SEQ ID NO: 16164

SEQ ID NO: 477419 - DNA, 468 bp, Shigella flexneri; identical to SEQ ID NO: 464389

SEQ ID NO: 477420 - DNA, 549 bp, Shigella flexneri; identical to SEQ ID NO: 7953

SEQ ID NO: 477421 - DNA, 1929 bp, Shigella flexneri
atgatttcagacgaactgagggcggctaattctgcaggagcgatagcaaccggcctccttgcgctaaaaattcctgtccctctgacgacagttcagtgggcagatcgacattattaccttccgaaagagtcatcttacaccccggggcggtgggaaacactgccgtttcaggttgccatcatgaacagcatggggaatgaccggatccgcactgttaatctgattaaatctgcccgtgttggttatacaaagatgttgctgggagtggaggcttattttattgagcataaatcacgcaacagccttcttttccagcccacggattctgctgctgaagattttatgaaatctcatgtggaacccacgatcagggatgtgccggttttactcgatcttgcaccgtggtttgggcgtaaacatcgtgataataccctcaccctgaagcgtttttcctccggtgtgggtttctggtgtctggggggagcggcagcaaaaaactaccgtgaaaaatccgtggatgtggtctgttatgacgagctttcctcgttcgaaccggatgttgaaaaagagggttcgccaaccctgctgggggataaacgtattgagggctctgtatggcccaaatccattcgcggctcgacgcctaaaatcaaaggctcctgccagatcgaaaaagccgctaacgagtcggcacacttcatgcgtttttatgtgccctgtccgcactgtggggaggagcagtatctgaaatttggcgatgagtccacgccttttgggcttaaatgggagaaggacagccccgaaagcgttttctacctctgtgagcatcatggctgcgtgatccatcagtctgaactggaccagagtaacgggcggtggatctgtgaaaacacgggcatgtggacccgtgacggtctgacgtttttcagcgctgcgggtaatgaaattccgccgccgcgctccatcactttccatatctggacggcgtacagtccgttcaccacctgggtacagattgtctatgactggctggatgcactgaaagatcccaacggcctgaaaacctttgtgaacaccacgctgggcgagacctgggaagaggctgtgggcgaaaaactcgatcaccaggtactgatggataaggttgtgcgttacacggcggcggtgcctgcccgggtggtttatctgacggcgggcattgactcgcagcgaaaccgttttgagatgtatgtctggggatgggctccgggagaggaagcctttctggtggataaaatcatcattatggggcgtcccgatgaggaagagacgctgttacgtgtggatgcggcgatcaacaaaaaataccgccatgcagacggaaccgaaatgactatttcccgtgtctgctgggacaccggggggatcgatggcgaaatcgtttatcagaggtcaaaaaaacacggtgttttccgggtgctgccggtaaaaggcgcatctgtctatggcaagccggtgatcaccatgccaaaaacccgcaatcagcggggcgtgtatctgtgtgaagtggggacggacaccgcaaaagaaattctctatgcccgtatgaaagccgatcccacgcctgtggatgaagccacgtcgtatgccatccgttttcctgatgatccggagattttttcgcagacagaggcgcagcaactggtcgcggaagagcttgtggagaagtgggaaaaaggaaagatgcgtctgctgtgggataacaaaaagcggcgtaacgaagcgctggactgcctggtgtatgcctacgcggcactacgtgtgtccgtgcaacgctggcagcttgatctggctgtactggcaaaatcccgggaagaagagacgacccggccaacccttaaagaactggcagcgaagctgtccggaggagtgaatggttacagtcgctga

SEQ ID NO: 477422 - DNA, 393 bp, Shigella flexneri
atggcgtgtgaagaagcgaacggtcgtgaacaactggcggcaacgctggcggcgatgccggagatgacggtggaaaaagcccgcccgatcctggcggctgcaccactggcggatgccgggccctcacttcgtgatcagatcatggccctggatgaggcaaaaggggcagaagcgcaggctgaaaaactggcggcctgcccgggaatgaccgtggagaacgcccgggctgtgctggctgcgggatcaggtaaggccgaaccggtctctgcatccacaaccgccctgtttgaacatttcatggcgaatcattcaccggcagcggtgcggggtggcgtgtcacagacgtcagcagacggtgatgcggacgtgaaaatgctcatggccatgccatga

SEQ ID NO: 477423 - DNA, 369 bp, Shigella flexneri
atggcaacaaaagaagaaaatcagaaacgtcttcgtgaactggctggtctgctggggcgcgaggcggatatgtcggggagtgctgcggatatcgcacagcgtgtggcagagtgggaagaggaggtttgcgcctcggaaaatgaaatcgcagatgttgatgataccgttcatgagcaggcatgcaggcacaccggtgaggatgacgttggtattctggaacgtatcaggcttctgaagtgtttttacctgtgcggtgttgacgatgaaacaggtgagcctgttgagcatgttgatgctggcagagtaattctgatgcccccctcagtggcaaaagacatggttaggagcggaatggccgtttatgcgtga

SEQ ID NO: 477424 - DNA, 354 bp, Shigella flexneri
atgcgtgattttgagaattcctttgatgctgcccttgccggggtggacagaacgattgttgaagtgatggggctctgtgcgcagttcacctcgggggcacagtgtggcagcgaagttcagggggtttttgacgatccggagtcgctggggtttgccggtagcggggtccgtattgaaggaagcagcccgtcattatttgtgcggacggatacggttcgtgccgtgcggcgtggtgacacgctgaccattaatggtgagacattctgggtggatcgtgtttctccggatgacgggggtagctgttatctctggctcaaccgtgggcaaccacccgcagttaaccggcgacgataa

SEQ ID NO: 477425 - DNA, 576 bp, Shigella flexneri
atggcgataaaagggcttgatcaggcgattgacaatctgagccgggttcgtaaaaacgccattccggctgcttctgcaatgaccattaaccgcgtggccacaacggcgattaatcagtcttcgtcacaggttgcccgggaaaccagggtgagacggaaactggtaaaggaacggtccagactgaaacgggcgacggtcagaaatccgaatgccagaattatcgttaaccgcggtgatctccctgtgattaagctggggatcagaatgctggggcgtcgtccgaacagcatactcaaagccggtcagcatcgttatcagcgggcatttatccagcgattaaataatgggcgctggcatgttatgcaacgtcttccccaggccagatataaggagggcaatgacgacaagggaaggaaaaagcgtaatcgccttcccattcaggtggtgaaaatcccgatggcggccccactgaaacaggcatttgatgagaatgttgaccgtatccggcgtgaacgcctgcctaaagaactggcatacgcgctgaaacaacaactgaggattgcgataaaacgatga

SEQ ID NO: 477426 - DNA, 396 bp, Shigella flexneri
atgaaacacactgacattcgtgccgcagtgctggatgcactcgagcagcatgaacacggggcgacgctgtttgatggtcgccccgttgtttttgacgaagaggattttcctgcgatcgcggtttatctgacggatgcagagtataccggtgaagagctggatgcagatacctggcgggccacactgcatattgaggtgtttttaccggcacaggtaccggattcagagctcgatcagtggatggaaagccggatttacccggcgatgaccgcgatcccggcactggcaggactgattaccacgatggttacgcagggctatgagtatcgtcgtgatgacgatatggcgttatggagttctgcagatctgacttattccattacatacgagatgtga

SEQ ID NO: 477427 - DNA, 756 bp, Shigella flexneri
atggcaacaccaaatccccttgagccggtaaaaggtgccggtaccactctgtgggtttacaacggcaagggtgatgcttatgcaaacccgttgtcagacgatgactggcagcgactggctaaggtgaaggatctgacgccgggcgagatgacggcagaatcctacgatgataactacctggatgatgaagacgcggactggaccgcgaccgggcaggggcagaaatctgcaggtgataccagttttacgctggcctggaaaccgggagaggaaggccagaaagggcttataggctggtttgaaagcggcgatgtccgggcctataaaatccgttttccgaatggcacggtggatgtgtttcgtggctgggtcagcagtatcggtaaggccgtgacggcgaaaaaagaagtgatcacccgcacggtgaaagtcactaacgtgggtaaaccttctgtagcggaagaacgcagcaaaattacgccggtcagtgcgattaaggtgacgccgacatccggtacggtggcaaaagggaaaacaaccaccctgacggtttcttttgagccggaaagtgcaaccgacaagacgttcagagcggtttccgccgatccgtcgaaagccaccattagtgtgaaagatatgacaattacggtaaacggcgtggcgacaggtaaggtgcagatccctgtggtgagcggaaatggtcagttcgccgcagtggctgaagtcaccgttactgaagcgggcgctgcagggtaa

SEQ ID NO: 477428 - DNA, 432 bp, Shigella flexneri
atgtttctgaaaacagaacaatttgaatataacggtgtgtctgtcacgctttccgaattgtctgcgctgcagcgtatcgagcatcttgcccttctgaaacggcgtgcagaacaggcagaatcctgcggcaacctgcaggtaagcgtggaagatctcgtcagaaccggcgcgtttctggtggcgatgtccctgtggcataaccatccacagaaaacgcagtcaccgtcaatgaatgaggccgtgatgaagatagagcaggaagtgctcaccacctggcctgccgatgccattgcccgggcggaagacgtggtgttgtgcctgtccgggatgatcgaagctgttcgtccggatactgatattactgaagtggcgaaaaataacacgctgactgatgatgatttttctgcgggaaagtcttcgacggcgagctga

SEQ ID NO: 477429 - DNA, 414 bp, Shigella flexneri
atggggagacccgactggcgcgccatgcttgccgggatgacatccaccgaatatgccgactggcaccgtttttaccgcacgcattattttcaggatacccagctggatatgcatttttccgggctgacgtacgctgtactcagcctgtttttttgcgatccggatatgcatccctctgatttcaatctgcttgtcccccggcatgaggaagagcaggtggagaggccggatgaggacaaaatgctgatgcagaaagcggcaggacttgccggaggcgtccggttcggtggggacggagggcgcgatattttatcgtctgcggatgtggcggatgtcatggtggatgatgccgcattaatgatggcttcagcggggattccgggaggtgtgagatatgtcccagccggttggtga

SEQ ID NO: 477430 - DNA, 2574 bp, Shigella flexneri
atgtcccagccggttggtgatcttgttattgacctgagtctggatgctgtccgtttcgatgagcagatgagccgggtaaggcgtcatttttcaggtctggataccgacgccagaaaaaccgccagtgctgttgaacagggcctgagccgccaggcgctggctgcacaaaaagccgggatttccgtcgggcagtataaagcggccatgcgaaccctgcccgcacagtttacggatatcgccacgcagcttgccggtggtcagaatccctggctgatcctgctgcaacagggcggtcaggtgaaggactccttcggcgggatgatccccatgttcagggggctcgccggtgcgatcaccctgccgatggtcggggtcacctcgctggcggtggcgacaggtgcgctggtgtacgcctggtaccagggagattccacgctttcagcgtttaataaaaccctggttctttccggtaatcagtccggactgactgccgatcgtatgctgactctctcaagagccgggcaggcagcagggctgacgtttaaccaggcgagagagtcactggcagccctggtgaatgccggtgtgcgtggtggtgaacagtttgatgccatcaaccagagtgtcgcgcgttttgcgtctgcatccggtgtggaggtggataaagtcgctgaagccttcgggaagctgaccactgacccgacgtcgggactgatggcgatggcgcgccagttccgtaacgtgacggcagagcagattgcgtatgttgcacagctgcagcgttccggagacgaggccggggcattgcaggcggcgaacgatatcgccacgaaaggctttgatgagcagacccgtcgcctgaaagaaaacatgggaacactggagacctgggcggataaaacagggaaggcattcaaatcgatgtgggatgccattctggatatcggtcgtcctgaatcctcagcggatatgctcgccagtgcgcagaaggcatttgatgaggcggataaaaaatggcagtggtaccagagccggagccagcgccggggaaaaaccgcctcttttcgtgcgaaccttcagggggcatgggatgaccgggaaaatgcccgtctgggtctggcagcggccacgctgcagtcggatatggaaaaagccggtgaactggcggcaagggaccgggctgagcgtgaggcgtcacagctgaagtataccggagaggcgcagaaggcgtatgagcgcctgcagacgccgctggataaatataccgcccgtcagaaagagctgaataaggccctgaaagacggaaaaatcctgcaggcggattacaacacgctgatggcgtcggcaaaaaaggattatgaatcgacgctgaaaaagccgtcaggtgtgaaggtgtctgccggtgagcgccaggaagaccgggcgcatgcagccatgctggcgcttgaaaccgagctcaggacgctggaaaaacacagcggtgtgaatgagaaaatcagccagcagcgccgggatttatgggaagcggaaaatcagtatgtggtcctgaaagaggccgccacgaaacggcagttatctgagcaggaaaaatccctgctggcccatgagaaagaaacgctggagtacaaacgccagctggctgagctgggcgacaagattgaacaccagaaacggctgaatgagctggcacagcaggcggcgcggtttgaacagcagcagagcgcgaagcaggcggcaatcagcgcaaaagcccgcggactcaccgaccgtcaggcgcagcgggagtcggaagagcagcgccttcgtgaggtgtacggtgataatccggctgcgctggcgaaggccacatctgcactgaagaacacctggtctgcggaggagcagcttcgtggaagctggatggccgggatgaagtccggctggggcgagtgggcggaaagtgcgacggacagtttttcgcaggttaaaaacgcggccacgcagacctttgacggtattgcacagaatatggcagcgatgctgaccggcagcgaacagaactggcgtggtttcacccgttctgtgctgtccatgctgacagagatttttctgaagcaggcgatggtggggatagtcgggagtatcggcagcgccattggcggggctgttggtggcggcgcatccgcgtcaggcggtacagccattcaggctgcggcggcggacttccatttcgcgaccgggggatttacggggacggggggtaaatatgaacctgcggggattgttcatcgcggggagtttgtcttcacgaaggaggcgaccagccggattggtgtcggcaatctgtaccgcctgatgcggggctatgcggaaggtggttatgtcggcggtgccggaagtccggcgcagatgcggcgggcggaaggcattaattttaatcagaacaatcacgtggtgattcagaacgacggccccaacgggcgggcagggccgcagctgatgaaagcggtgtatgagatggcccgcaagggggcacaggatgaactccggctgcagttgcgtgatggcggtatgttatcagggagcggtggatga

SEQ ID NO: 477431 - DNA, 330 bp, Shigella flexneri; identical to SEQ ID NO: 8147

SEQ ID NO: 477432 - DNA, 699 bp, Shigella flexneri
atgcaggatattcacgaagaaagtctgagcgagtcggttaaatcagagcagtcaccgcgggtggtactctgggaaatcgacctgacggtacagggcggtgagcggtattttttctgtaatgagctgaatgaaaaaggggagccggtcacctggcaggggcggcaatatcaggcatacccgattgacggcagcggttttgagatgagcgggaagggcagcagtgccagaccgtcgctgacggtgtccaatctgttcggtctggtcaccgggatggcggaagacctgcagagtctggtgggggccacggtggtccgccgccgggtgtatgcccgttttctggatgcggtgaatttcggtgcgggcaatccggcggcggacccggagcaggagctgagtgaccgctgggtggtggagcagatgtcgcagctgacagccatgacggcctcgtttgtgctggccacaccgaccgagacggacggggcgctgtttcccggtcgtatcatgctggcgaacacctgtatgtggacctaccgctctgatgagtgtggttacacgggcggggctgtggcggatgagttcgataaacccaccaccgatatccgtaaggacagatgcagcaagtgcatgcgcgggtgtgagatgcgcggcatggtggctaattttggcggtttcctttccattaataaactttcgcagtaa

SEQ ID NO: 477433 - DNA, 744 bp, Shigella flexneri
atgacacagacagaatcagcgattctggcacacacccggcggtgtgtgcctgcggagtcgtgcggcttcgtggtgagaacgccggagggggagcggtatatcccttgtgtgaatatctctgcagagccggaggcgtattttcgtattgcaccggaagactggctgtgggcagagatgcagggggagattgtggcactggtccacagtcatcccggtggtctgccctggctgagcgaggccgaccggcggctgcagataaaaagtgcactgtcctggtggctggtctgccggggggaaattcataaattccgctgtgtgccacatctgacaggacggcgctttgagcacggggtgacggactgttacacgctgttccgggatgcctaccatctggcgggaattgatatgccggattttgagcgtgaggatgactggtggcgcaacggtcagaacctttacctggacaatatggcggtcaccggcttttaccgggtgcccctgtcctctgcacaggcgggcgatatcctgctgtgctgctttggcgcatcggtggccaatcatgccgccatttactgcggcaacggtgaactgcttcaccatctgcctgaacaactgagtaaacgggagaggtattccgaaaaatggcaacgacgaacgcattctgtctggcgtcaccgccactggcacgcatctgccttcacggggatttacaacgatttggccgccgcctcagcctgtacgtga

SEQ ID NO: 477434 - DNA, 582 bp, Shigella flexneri
gtgaacacggcagcggaagccatccgggcgctgtcgttacaggtgccgggattccgccgtcagatgaacgaaggctggtaccagatacgtattcgcggtgaggacacggcaccggaggcggtgtacgcccgtcttcacgaacctctgggtgagggggcggtcatccacattgtgccgcgactggccggagccggaaagggcggactgcagattgtgctgggggcggcagccatcgtgggctctttcttcactgccggaggctcgatggcgttatggggtacagccctgagtgccggtggtttttctgccaccacgatgctgttttcactgggtgccagtatgattctgggcggtgtggcccagatgctggcaccgaaggcaaaaacaccggattaccgcgcaacggataacggtaaacagaacacgtatttttcgtcactggacaatatgattgcccagggtaacccgatgccggtgccttacggggaaatgctggttggttcacgacggatatcccaggacatcagcacccgtgatgaaggcgggggcggaaaggtcgtggttatcgggcggcaggggtaa

SEQ ID NO: 477435 - DNA, 3477 bp, Shigella flexneri
atgggcaaaggtggcggcaaggcgcacacaccgcgcgaggcgaaggacaatctcaaatccacgcagatgatgagtgtgattgatgcgattggtgagggaccgatagaaggcccggtgaagggactgcagagtatcctggtgaacaaaaccccgctgacggacacggacggtaatcccgtgatacacggtgtgaccgcggtctggcgtgccggggagcaggagcagacaccaccggaaggctttgagtcctccggagctgaaaccggactgggcgtggaagtgacgaaggcaaagccggtaacgcgcaccattacatccgcgaacattgaccgcctgcgggtcaccttcggggtgcagtcactgttggagaccacctcaaagggcgaccgtaatccctcttctgtccggctgctgattcagttgcagcgtaacggtaactgggtgacggaaaaggatgtcaccattaacggcaagaccacctcacagtacctggcgtcggtgattctggataatctgcctccccgtccttttaacatccggatggtccgggagacggcggacagcaccacggaccagctgcagaacagaacgctgtggtcgtcatacaccgaaatcatcgatgtgaaacagtgctacccgaacaaggcgattgtggggctgcaggtggatgcggagcagtttggcggtcagcagatgacggtgaactaccatatccgaggtcgcatcattcaggtaccgtcaaactatgacccggaaaaacgcacttacagcggtatctgggacggcagcctgaagccggcatacagcaacaacccggcctggtgcctgtgggacatgctgactcacccgcgctacggcatgggaaaacgtctgggggcggcggatgttgacaagtgggcgctgtatgccatcgggcagtactgcgaccagacggtcccggatggtttcgggggcacagagccgcggatgacctttaatgcgtacctgtcacaacagcgtaaggcgtgggacgttctcagtgatttctgctctgcgatgcgctgtatgccggtatggaacggtcagacgctgacgtttgttcaggaccgcccgtcggatgtggtgtggccgtacaccagcagcgatgtggtggtggatgataacggcgtggggttccgctacagcttcagtgccctgaaggaccggcacacggcggtggaggtgaattacaccgacccgcagaacggctggcagacctccacggaactggtggaagacccggaagccatactgcgctacgggcgcaacctgctgaagatggatgcgttcggctgcaccagtcgcggtcaggcccaccgtgccgggctgtgggtgataaagaccggactgctggaaacgcagacggtggatttcacgctcgggtcacaggggctgcgtcacacacccggtgacattattgaaatctgtgataatgactatgccgggaccatgaccggcggacgtgtcctgtacatcgatgccgccagccgcaccctgacactggaccgtgaggtgaccctgccggagacaggtgccgccacggtgaacctgattaacggcagcggtaagccggtgagtgtggacatcactgcacaccccgcgccggaccggatacaggtcagcaccctgcctgatggtgtggagacatacggtgtatggggactctccctgccgtcactgcgtcgtcgcctgttccgctgtgtctccatccgggaaaacacggacggcacctttgccatcacggcggtgcagcacgtaccggaaaaagaagccatcgtggataacggggccagctttgagccgcagtcaggcaccctgaacagcgttattccaccggcagtgcagcacctgacggtggaggtgagcgcggctgacggtcagtatctggcacaggcgaaatgggacacgccgagggtggtgaagggcgtgcgcttcagtctgcgcctgaccagtggaagcggtgagaacagccgcctgctgaccaccgccatcactgccgatacggagcaccgtttcagtggcctgcctctcggggaatacaccctgacggtcagggcgattaacagctatggccagcagggcgaacccgccaccaccacgttccggattaacgcaccggcagcgcctgccggtgttgaactgacgccggggtattttcagataacggcagtcccgaaactgaccatttatgacccgacggtgcagtttgagttctggttttcggaggcaaaaattgcagacgccgcacaggtggaaacctctgcccgttatctggggaccggcagtcagtggagtgtatccggcccgcacattaagcccgggaaggatttctggttttacgtgcgcagcgtcaacctggtggggaaatctgcgtttgtggaagtcagcgggcagcccagcaatgatggtgaagggtatctggaatttttccgggaaaaaataggaaaactgcatctggctcaggggctgtgggagctgatagacaacagccagcttgcggatgagatggcggagatgaagaccaccatcaccgaaacccgcaatgaaatcacacagacggtcagtaaaacgctggaggaccagagcgccaccatacagcagatacagcgcgtgcagaaggacacaaatgatgacctgactgcgctgtacatgctgaaggttcaaaaaacgaaagacggcattccctatgtggccgggattggtgcagggattgaggatactgatggccagccactgagcaacatactgctgctggctgaccgtatcgcgatgataaatccggagagcggcaacagcactccgttatttgtggcgcaggggaatcagctgttcatgaacgacgtgttcctgaagcgtctgtttgcggcgagtatcacgtcatccggcaaccccccgacgttttccctgacgccggaagggaagctgacagccaggaacgcggatatcagcggagcaattaccgcgaataccggcacgctcaataatgtcaccattaacgagaactgtgtcatcagagggaaactgtctgcaaaccagattgaaggcgacctggtgaagacggtggggaaagcctttccccggaataacagttatgccagcggtacggtaaccgtcacagtttacgatgaccagggcttcgaccggcagattatcattcccccggtgctgtttcgcgggacgaaacaccagaatttcaacagcccgaatcagcagtcgtactggtattccacctgtaagctgcaggtgctgaagaacggggttgagattttccatgaaccggcaacggatgtcagccgggtgttctcatcggtgatagatatgccggcagggcggggtcatgtcaccctgacgtttaatgtgtcgtcggccggtgcgaacaactggacgccgacaacgtacatcagtgatttactggttgtggtcatgaaaaaatccacagcagggatcagtatcagctga

SEQ ID NO: 477436 - DNA, 624 bp, Shigella flexneri; identical to SEQ ID NO: 469537

SEQ ID NO: 477437 - DNA, 2793 bp, Shigella flexneri
atggcagtaaagatttcaggtgtgctgaaagacggcacaggaaaaccggtagagaactgcaccattcaactgaaagccagacggaccagcagcacggtggtggtgaacacggtggcctctgaaaatccggatgaagccggacgttacagcatggatgttgagcatggtcagtacagcgtcaccctgctggttgaaggttttccgccttcacatgccgggaccatcaccgtgtatgaagattcccgacccggtacgctgaatgattttctcggtgccatgacggaggatgatgcccgtcctgaggcactgcgccgttttgaactgatggtggaagaggtggcgcgtaacgcgtccgcggtggcacagaacacggcagccgcgaagaagtcagccagcgatgccagcatatctgccagtgaggcggcaacccatgcgactgatgctgcaggctcagcacgtgcagccagcacatcagccgggcaggccgcgacgtcggctcagtcagcgtcttccagcgcaggaacggcatcaacaaaggctactgaagcatcaaaaagtgctgccgctgcagagtcctcaaaaagcgcggcggctaccagtgccggtgcggcgaaaacgtcagaaacgaatgcggcagcgtcacaacaatcagcagccacttctgcatccaccgcgaccacgaaagcgtcagaagcagccacttcagcacgggatgcggcggcctcaaaagaggcagcgaagacatccgaaacgaacgcgaaagcctcggaaaccagcgcagaatcctcaaaaacggctgccgcatcgtccgccagttcggcggcgtcatcggcatcatctgcgtctgcttcaaaagatgaggcgaccagacaggcgtcagcagcaaagggcagcgccacgacggcatccacgaaggcgacagaggcagctggcagtgcgacggcggcagctcagagcaaaagtacggcggaatccgcggcaacgcgcgccgagacagcggcaaaacgggcagaggatattgcatccgccgtggcgcttgaggatgcgagcacgacgaaaaaggggatagtacagctcagcagtgcaaccaacagcacatctgaaacgcttgccgcgacaccgaaggcagttaaagcagcgaatgacaatgcgaatggcagggtaccatctaaccgaaaagttaacgggaaagcactgactgcggatataacattaacaccgaaagatattggcactttaaattcagtaacgatctctttctctggcggggcagggtggttcaaactggcaacggttaccatgccacaagcgagttccatcgtttacatcgcattgattggtggcgctggatttaacgtgggggcacctcaacaggcaggtatatctgaactggttctacgagcaggcaatggaaactccaaagggattaccggagctttgtggaagcgtacagccgtcggattaacgaatttcgcctggatcaacacatccggcgatatatatgatatttacgttgagattggcaattatgcgacgagtgtaaatatccattgggattgtactacaaatgcgtcagtttctatttatacctcgctaacatattcagcgagtaagccttccagcgttaccgatggtgttgtttatacgatgtatagctcacatcagaaacctacaccatcagatattggagcgctgccaacaactggagggactatttcaggtccgttgtctgttactgatgggatcaccggggcactgaaggggaacgccgataccgcgacgaaacttgcggcagacccaaaaattaacggtgttaagtttgatggctcggcggatattaacctcacgccggaaaatattggtgcatttgcccgacgttcgacgggggcttatgcggattcggatggagccgttccctggaatgccgaatcaggcgcttacaatgtcacccgctctggcgacagctatattctggttaacttctataccggagtcggaagttgccggaccttgcagatgaaggcgcattacagaaatggtggtctgttctaccgttcttcaagagacggttatggttttgaggaagactgggcagaagtttatacctcgaaaaatcttccaccagaaagctacccagtcggcgcaccaatcccgtggccatcagataccgttccgtctggttatgccctgatgcaggggcagacttttgacaaatctgcttacccgaaacttgcagctgcttatccgtcaggcgtgatccctgatatgcgtggctggacgattaagggcaaacctgccagtggtcgagccgtattatctcaggaacaggacggcattaaatcgcacacccacagcgccagtgcatccagtacggatttggggacgaaaaccacgtcgtcgtttgattatggtactaagtcttcaaatgccactggtgaccataaccacagccgaggcactatggaaattactggtactctcggttacttcagaagtgatagcggtaatttctatacagcaagtggagcatttacactgggtggctctgcgccagcccatggatttacgggctctcaatttacttatggtgttcctgtaaactttaacgcttccagaacctggtctggtgccacaagcactacaggtaaccatgcgcactctgttccaattggtgctcatgcgcactccgttgcgattggttcacatggacacaccatcaccgttaacgctgctggtaacgcggaaaacaccgtcaaaaacatcgcatttaactatattgtgaggcttgcataa

SEQ ID NO: 477438 - DNA, 585 bp, Shigella flexneri
atggcattcagaatgagtgaacaaccacggaccataaaaatttataatctgctggccggaactaatgaatttattggtgaaggtgacgcatatattccgcctcatacaggtctgcctgcaaacagtaccgatattgcaccgttagatattccggcaggcttcgtggctgttttcaacagtgatgagtcatcgtggcatctctttgaagaccatcggggtaaaacggtttatgacgtggcttccggcgacgcgttatttatttctgaactcggtccgttaccggaaaatgttacctggttatcgccggaaggggagtttcagaagtggaacggcacagcctgggtgaaggatacggaagcagaaaaactgttccggatccgggaggcggaagaaacaaaaaacaacctgatgcaggtagccagtgagcatattgcgccgcttcaggatgctgcagatctggaaattgcaacggaggaagaaacctcattgctggaagcctggaaaaagtatcgggtgttgctgaaccgtgttgatacatcaactgcacctgatattgagtggcctacgaaccctgtcagggagtaa

SEQ ID NO: 477439 - DNA, 249 bp, Shigella flexneri
atgcgtattgagatctgcatagccaaagagaaaatgactaaaatgccaaacggtgctgtggatgcgttaaaggaagaattaactcggcgcatcagtaagcgttatgacgatgtagaggtgatcgtaaaagccaccagcaacgatggcctttctgttacgcgcaccgccgataaagattcagctaaaacttttgttcaggaaactctgaaagatacctgggagtctgctgacgagtggtttgttcactaa

SEQ ID NO: 477440 - DNA, 840 bp, Shigella flexneri
atgtctgccgcaggaaagagcaacccactggcaatcagtggcctggttgtgctcacacttatctggagttatagctggattttcatgaagcaagtcaccagttacatcggtgccttcgactttaccgccttacgctgcattttcggcgctctcgttttattcatcgtccttttattacgtggtcgcggaatgcgcccgacgccgtttaaatacaccttagccattgccctgttacaaacctgcgggatggttggtctggcgcagtgggcgttggtcagcggaggtgcggggaaggtggcgatcctgagctataccatgccgttctgggtggtgattttcgccgcgttgtttctcggtgaacgcctgcgacgtgggcaatatttcgcgattctgattgccgctttcggcttatttttggtgttgcagccgtggcaactcgatttctcttcgatgaaaagtgccatgctggcaatcctctccggtgttagttggggggcgagcgcgattgttgctaaacgcctatacgcccgtcatccgcgcgtggatttattatcgttaacatcctggcagatgctgtatgcggcgctggtgatgagtgtggtcgctttactggtgccgcaacgtgaaattgactggcagcccaccgtgttctgggcgctggcctacagtgcgattctggcgacggcgctagcgtggagcttatggctgtttgtgctgaaaaacttgcctgccagtattgccagcttaagcacactggccgttcccgtttgtggcgtactcttttcctggtggctgctcggtgagaatccgggggcgttgaaggtagcggtattgtgctga

SEQ ID NO: 477441 - DNA, 579 bp, Shigella flexneri
atgtcagccatcgactgtataattaccgctgccggattatcatcaagaatggggcaatggaaaatgatgttaccctggcaacagggaacaattcttgatacaagtatcaaaaatgcgttgcagttttgtagccgaattattttagtcaccggctatcgtggtaatgaactgcacgaacgttatgcgaaccagagcaatatcactattatccacaacccagattatgcgcagggtttactaacatcagtaaaggccgcagtacccgcagtgcaaacagaacattgttttctcacccacggtgacatgccaaccctcaccatcgatatttttagaaaaatctggtcgttacgaaatgatggcgcaatactgccactccataatggcatccccggccatccgattttagtgtcaaaaccatgcttgatgcaggcaatccaacgacccaatgtcaccaatatgcgtcaggcactccttatgggagatcattattccgtcgagatagaaaatgcagaaataattttagatattgatactccggacgactttattacagcgaagaaaaggtatactgaaatttag

SEQ ID NO: 477442 - DNA, 3099 bp, Shigella flexneri
atgggggatattatgcgtcccattccgtttgaggaacttttgacgcgcatatttgatgaataccaacaacaacgctcaatctttggtattcccgagcaacagttttactcacctgtaaaaggtaaaactgttagcgtcttcggtgaaacctgtgccactcccgtcggccctgccgctggcccgcacacgcagctcgcgcaaaatattgtcacttcctggctgactggcggacgtttcatcgaactaaaaaccgtccaaattcttgaccgcctggagctggaaaagccctgtattgatgccgaagacgagtgctttaacaccgaatggtctaccgaatttaccctgcttaaagcctgggatgaatacctcaaagcctggtttgccctgcaccttctcgaagcgatgttccaaccttctgattccggtaaatcgttcatctttaatatgagcgtcggttacaacctcgaaggtattaagcaaccgccaatgcaacagttcatcgacaatatgatggacgcatctgaccatccgaaattcgcgcaatatcgcgatacgctgaataaattactccaggatgacgcatttttagctcgccacggattgcaggaaaaacgcgaaagcttgcaagccttacccgctcgcatccccaccagtatggtgcatggcgtcaccctctccaccatgcacggctgtcctccgcatgaaatcgaagccatttgccgctacatgctggaagaaaaagggctcaacacctttgtgaaacttaacccgaccttactggggtacgcgcgtgttcgtgagatcctcgatgtctgcggtttcggttacataggcttaaaagaagagtcatttgatcacgacctcaagctgacgcaagcactggaaatgctggaacgcctgatggcactggcaaaagaaaaatcactcggctttggcgtaaaactgactaacactctcggcaccatcaacaataaaggcgcactgcctggtgaagagatgtatatgtcaggccgtgcgctgttcccgctctccatcaatgttgcagcagttctctctcgcgcctttgacggcaaactgcccatttcttattccggtggtgccagtcagctgactatccgcgatatttttgatacaggtattcgccctattactatggcaaccgacctgctgaaacctggcggctatttgcgcttaagtgcctgcatgcgcgagctggaaggctccgacgcctggggacttgaccatgttgacgtcgaacgactgaacagactggcagcagatgcgttaaccatggaatacacccagaaacactggaagccagaagagcgtattgaagtggcagaagacctgccgctgaccgactgctacgttgccccctgtattactgcctgcgctatcaagcaagatattccggaatacatccgtctgcttggcgaacaccgctatgccgacgcgctggaactcatataccaacgcaacgctctgcccgccattaccggtcatatttgcgatcaccagtgccaatacaactgtacccgcctggattacgacagtgcgctgaatatccgcgaactgaaaaaagtcgcgctggaaaaaggttgggatgaatataagcaacgctggcacaaacccgccggttctggttcacgccatccggttgccgtgattggtgcaggtccggcgggtctggcagcaggttacttccttgccagagcgggccatccggttacgctgtttgaacgcgaagccaatgctggcggcgtggtgaaaaatatcattcctcagttccgtattcctgcagagttaattcagcacgatatcgattttgttgccgctcacggcgtgaaatttgagtatggctgctcacccgatttgaccgttgaacagttaaaaaatcagggcttccactatgttctgattgccaccggcactgataaaaatagcggtgtgaaactggcgggcgacaaccaaaatgtctggaaatcactcaccttcctgcgtgaatacaacaagggtacagcgctcaagctgggcaaacatgtggtcgttgtcggggcgggtaacaccgcaatggactgcgctcgtgcggcgttacgcgttccaggcgtagaaaaagcaacgatcgtttaccgtcgttcactgcaagagatgcccgcatggcgcgaagagtatgaagaagtgttgcacgacggcgtggagttccgtttcctgaataatccggaatgtttcgatgctgatggcaccttaaccttgcgcgttatgtcgcttggcgaacccgatgagaaaggtcgtcgccgtccggttgaaaccaacgaaacagtaacactgcatgtagacagtctgatcaccgccatcggtgaacagcaggatactgaagccctgaatgcgatgggcgtaccgctggacaaaaacggctggccagacgtcgaccataatggcgaaactcgtctgactgacgtctttatgatcggcgacgtacagcgcggaccatcctccattgtcgctgctgtcggaaccgcgcgtcgggcgaccgatgccatccttagtcgggaaaatatccgttcccaccagaacaataaatactggaacaacgtcaatccggcggaaatctatcaacgtaaaggcgatatctctatcacgctggtgaacagtgacgatcgtgatgcgtttgtcgcgcaggaagctgctcgctgccttgaatgtaactacgtttgcagcaagtgcgtggatgtctgcccgaaccgcgccaacgtctccattgcagtccctggcttccagaatagattccagacgctgcacctcgacgcttactgtaacgaatgcggcaactgcgctcagttctgtccgtggaacggtaaaccatacaaagacaaaatcaccgtcttcagcctggcgcaagactttgataacagcagcaacccaggcttccttgtggaagattgccgggtacgagtacgtctgaataaccaaagctgggtgttaaacatcgacagcgaaggtcagtttaacaacgtaccaccggagctgaacgatatgtgccgcatcatcagccatgtccaccagcatcatcattatctgctgggccgcgtggaggagtaa

SEQ ID NO: 477443 - DNA, 1329 bp, Shigella flexneri
atgttgattctgaagaatgtcaccgcagtgcagttacacccggcgaaagtacaggaaggcgttgatatcgctatcgaaaatgacgtgattgtcgctatcggcgatgccctgacgcaacgctaccccgatgccagctacaaagagatgcatggtcggattgtgatgccgggaattgtctgctcgcacaaccatttttactcggggctttcccgcggaattatggcaaacattgccccctgcccggatttcatctcaacgctgaaaaatctctggtggcggctcgatcgcgcccttgatgaagagtcgctctattacagcggactgatttgttccctggaagcgattaagagcggatgtacatcggttatcgatcaccatgcctctccggcgtatatcggcgggtcgctctccacattgcgcgacgcatttttaaaagttggcctgcgcgcaatgacctgttttgaaactactgaccgtaacaacggcatcaaagagttgcaggaaggtgtagaagaaaacatccgtttcgcccgtttgattgatgaggcgaagaaagcgacaagcgagccgtatctggtggaagcacatatcggtgctcacgcgccgtttaccgtgccggatgccggtctggagatgctgcgtgaagccgtgaaaaccacaggccgtggtttgcatattcacgctgcggaagacctttacgacgtttcctacagtcaccactggtacggcaaagacctgctggcacgactggcgcaattcgatctcatcgacagcaaaacgctggtcgctcatgggctgtacttgtcgaaagatgacatcgccctactcaatcagcgcgatgcgttcctggtgcataacgcccgttcaaacatgaacaaccatgtcggctacaaccatcaccttagcgacatccgcaacctggcattgggaacggacggcattggttcggacatgtttgaagagatgaaatttgccttctttaaacatcgcgatgcgggtggtccgctgtggcctgacagttttgccaaagccctgactaacggtaacgaactgatgagccgcaactttggcgcgaaatttggacttctggaagccggttacaaagctgatttaaccatttgcgattacaactcaccgacgccgctgctggcagacaatatcgccgggcatatcgctttcggtatgggctcaggcagcgttcacagcgtgatggtcaatggtgtgatggtctatgaagaccgtcagtttaacttcgattgcgattccatttatgcacaagccagaaaagccgctgccagtatgtggcgtcggatggatgcgctggcataa

SEQ ID NO: 477444 - DNA, 780 bp, Shigella flexneri
atgattgaacaatttttcaggcccgactctgtcgaacaggcgctggaactgaagcgccgctaccaggatgaagccgtctggttcgccgggggcagcaaactcaatgctacaccaacccgtaccgataaaaagattgccatttccttacaggatctggaactggactgggttgactgggataacggtgcactgcggattggcgcaatgtctcgcttgcagccactgcgtgatgcgcgatttattcctgcagcgctgcgtgaagccctcggttttgtttactcacgccatgttcgtaatcagtcgaccattggtggtgaaatcgccgcccgccaggaagagtcggtgctgcttcccgtcctgttggcactggatgctgaactggtttttggcaacggcgaaacgctgtcaatcgaggactacctggcctgcccatgcgatcgcctgctaaccgaaattatcattaaagatccgtatcgcacctgtgcgacccggaaaattagccgttctcaggcaggtttaaccgtcgtgacggcagccgttgcaatgacagaccacgacggtatgcgaattgcgctggatggcgtcgccagtaaagcactgcgtctgcacgatgtcgaaaaacaaaatctggaaggcaatgcacttgaacaggctgtcgccaacgccattttcccgcaggaagatttgcggggcagcgtggcctataaacgctatatcacgggagttctggtagccgacctgtatgccgactgccaacaggctggggaggaagccgtatga

SEQ ID NO: 477445 - DNA, 2871 bp, Shigella flexneri
atgatcatccactttactttaaatggcgcgcctcaggagctaaccgttaatccaggcgaaaacgtgcaaaagctgttgtttaacatgggaatgcactctgtacgcaacagtgatgatggtttcgggtttgccggttctgacgcaataatctttaacggtaatatcgttaacgcgtccttgcttattgccgcacagttagagaaggcagatattcgtaccgcagaatctctgggcaaatggaacgagttaagtctggttcaacaggcaatggttgatgttggcgtggtgcagtctggttataacgatccagctgcagctctgattatcaccgatcttctcgatcgcatcgccgcacctacccgcgaagagatcgacgacgcgctttctggtttgttcagccgcgatgctggctggcagcaatactatcaggtcattgaactggcggttgcacgtaaaaataatccgcaggccaccattgatatcgctccgactttccgtgacgacctagaagtcattggtaagcattatcctaaaactgatgccgcgaaaatggtgcaggcgaaaccctgctatgttgaagaccgcgtaacggctgacgcctgcgtcattaaaatgttacgtagcccacacgctcacgcactgattactcatctggatgtcagcaaagctgaagccttaccgggcgtcgttcacgttattactcacctgaattgcccggatatctactataccccgggtggtcagagcgcaccggaaccgtcaccgcttgaccgccgtatgttcggcaagaaaatgcgtcacgtcggcgatcgtgttgctgcggtcgtcgcagaaagtgaagaaattgcgctcgaagcactgaagctcatcgacgttgaatatgaagtgcttaagccggtaatgtcgatcgacgaagcaatggcggaagatgcgcctgtcgtgcacgatgaaccggtggtgtatgttgctggtgcgccagatactctggaagacgataacagccatgcagcccagcgcggcgagcatatgatcatcaacttcccgatcggttctcgccctcgcaaaaatatcgccgccagtattcatggtcatattggcgatatggacaaaggctttgccgatgccgatgtgatcattgagcgaacctataactcaacgcaggcacagcagtgcccgactgaaacacatatctgctttacccggatggacggcgatcgtctggttatccacgcctccacccaggtaccatggcacttacgccgccaggtcgcgcgcctcgtgggcatgaaacagcataaagttcatgtcattaaagagcgagttggcggcggttttggttccaaacaggacatcctgctggaagaagtgtgcgcctgggcaacctgcgtgaccgggcgtccggtactgttccgctacacccgtgaagaagagtttattgctaacacctctcgtcacgtcgcgaaagtcaccgtcaaactgggagcgaaaaaagatggtcgcctgacggcagtgaagatggatttccgcgccaacactggcccttacggcaaccactcactcaccgtaccgtgtaacggaccggcgctgtcgctgccgttatatccgtgcgataacgtcgatttccaggtcaccacctactacagcaacatttgcccaaatggtgcttatcagggttatggcgcaccgaaaggtaacttcgctatcaccatggcattagcggaactggctgaacagttacagatcgaccaactggaaattatcgaacgtaaccgggtacacgaagggcaagagctgaaaattctcggtgcaatcggtgaaggtaaagcgccgacctccgttccttccgccgccagctgtgcactggaagagatcctgcgtcagggtcgcgagatgatccaatggtcgtcaccgaaaccgcaaaatggtgactggcacatcggtcgcggcgtcgccattatcatgcagaaatcgggtatcccggatatcgatcaggctaactgcatgatcaaactggaatcggacggcacctttatcgttcattctggcggtgcggatattggtactggtctggatactgtagtgacgaaactggcagcagaagtgctgcactgcccaccgcaggacgtgcatgttatctccggtgataccgatcatgcgttgtttgataaaggcgcatatgcctcgtccggtacttgcttctcgggtaacgcggcgcgtttggcagcggaaaatctacgggagaaaattctgttccacggcgcgcaaatgttgggtgaggcagtggcagatgttcaactggcaacgccgggcgtcgtgcgcggcaagaaaggcgaagttagtttcggggatattgcccataaaggcgaaaccggcaccggctttggttcactggtgggaactggcagttatatcacgcctgatttcgccttcccgtatggcgcaaacttcgctgaagttgccgtcaacacgcgtacgggtgaaatccgcctggataaattctacgccttgctggactgcggtacaccggtcaacccggaattagcattgggacaaatctacggtgctaccctgcgagctatcggccacagtatgagcgaagagatcatttatgacgccgaaggtcacccgttaacgcgtgatttacgcagttacggcgcaccgaaaattggtgacattccgcgtgatttccgcgctgtgctggtgccgagcgacgataaagtcggcccgttcggggcgaaatcgatctcggaaatcggtgtaaatggcgcagctccggcgattgctaccgcaattcacgatgcatgcggcatctggttatgcgaatggcatttcacaccggagaaaatactcactgcgctggaaaaaatataa

SEQ ID NO: 477446 - DNA, 219 bp, Shigella flexneri
atgtctgatataaaccatgcaggttctgaccttatatttgaactggaggatcgccctccctttcatcaggctctcgttggtgccattacccatctgttggcaattttcgttccgatggtaacccccgcgttaatcgtgggggcggccttacagctttccgctgaaacaactgcctatcttgtttctatggcgatgatcgcctctggtattggtacctag

SEQ ID NO: 477447 - DNA, 1104 bp, Shigella flexneri
atgattgcgctgggcagcagcatgaaaagcgacggttttcacgaagagttaatcatgtcgtcgcttctcggcgtctccttcgttggcgcatttctggttgtcggatcttcatttatcttgccctatttacgtcgggttattacgcctaccgtcagcggtattgtggtactgatgatcggcttaagcctgattaaagtcggcattatcgattttggtggaggatttgcagccaaaagcagcggtacgttcggcaattacgaacatctcggcgttggtttattggttttaattgtggtgatcggctttaactgctgtcgcagtccgttgctacgcatgggagggatcgccattgggctatgtgtcggctatatcgcatcgttatgcctaggcatggtggatttcagcagtatgcgcaatttgccgttaatcaccatcccgcatccgttcaaatacggctttagttttagcttccatcagttcctggtggttggcacgatttatctgcttagcgtgctggaagcagtcggcgatatcaccgccacggcaatggtttcccgccgccccattcagggggaagagtatcagtcccgactgaaaggcggcgtgctggcagatggtctggtttctgttatcgcctccgctgtcggttcattaccattaaccacgtttgcgcaaaataatggggttattcagatgactggcgtcgcttcacgttatgtcgggcgaaccatcgcggtaatgctggttatactcggtttgtttccgatgattggcggcttcttcacgaccattccctcggcagttctgggaggcgcaatgacgttgatgttttccatgattgccatcgctgggattcgcatcatcatcaccaacggtttaaagcgccgtgaaacacttattgtcgccacttctttaggtttagggcttggcgtctcctacgatcccgaaatttttaaaatattgccagcctctatttatgtattagttgaaaaccctatttgtgctggcgggttaactgcgattttattaaatattatcctccctggtggctaccgacaggaaaacgttctgcctggtattacctcagcggaagagatggattaa

SEQ ID NO: 477448 - DNA, 1317 bp, Shigella flexneri
atgtcaggagaacacacgttaaaagcggtacgaggcagttttattgatgtcacccgtacggtcgataacccggaagagattgcctctgcgctgcggtttattgaggatggtttattactcattaaacagggaaaagtggaatggtttggcgaatgggaaaacggaaagcatcaaattcctgacaccattcgcgtgcgcgactatcgcggcaaactgatagtaccgggctttgtcgatacacatatccattatccgcaaagtgaaatggtgggggcctatggtgagcaattgctggagtggttgaataaacacaccttccctactgaacgtcgttatgaggatttagagtacgcccgcgaaatgtcggcgttcttcatcaagcagcttttacgtaacggaaccaccacggcgctggtgtttggcactgttcatccgcaatctgttgatgcgctgtttgaagccgccagtcatatcaatatgcgtatgattgccggtaaggtgatgatggaccgcaacgcaccggattatctgctcgacactgccgaaagcagctatcaccaaagcaaagaactgatcgaacgctggcacaaaaatggtcgtctgttgtatgcgattacgccacgcttcgcccctacctcatctcctgaacagatggcgatggcgcaacgcctgaaagaagaatatccggatacgtgggtacatacccatctctgtgaaaacaaagatgaaattgcctgggtgaaatcgctttatcctgaccatgatggttatctggatgtttaccatcagtacggtctgaccggtaaaaactgtgtctttgctcactgcgtccatctcgaagaaaaagagtgggatcgtctcagcgaaaccaaatccagcattgctttctgtccgacctccaacctttacctcggcagcggcttattcaacttgaaaaaagcatggcagaagaaagttaaagtgggcatgggaacggatatcggtgccggaaccactttcaacatgctgcaaacgctgaacgaagcctacaaagtattgcaattacaaggctatcgcctctcggcatatgaagcgttttacctggccacgctcggcggagcgaaatctctgggccttgacgatttgattggcaactttttacctagcaaagaggctgatttcgtggtgatggaacccaccgccactccgctacagcagctgcgctatgacaactctgtttctttagtcgacaaattgttcgtgatgatgacgttgggcgatgaccgttcgatctaccgcacctacgttgatggtcgtctggggtacgaacgcaactaa

SEQ ID NO: 477449 - DNA, 1368 bp, Shigella flexneri
atgtctggagacatcctacaaacaccggacgcaccaaagccacagggcgcgctggataattattttaaaattaccgctcgtggcagtaccgttcgtcaggaagtactggctggcttaacgacctttctggccatggtttattccgttatcgtcgttccgggaatgctgggcaaagcaggttttcctcccgcagctgtgtttgttgccacctgtctggtcgcgggcttcggctcgttgctgatgggattatgggctaatttgccaatggcgattggttgcgcgatttccttgacggcgtttaccgcattcagtctggtactcgggcaacaaattagcgttcctgtcgcactgggcgcggtatttctgatgggcgtcatcttcaccgccatttccgtaaccggtgtgcgtacctggatcttacgtaatttgccgatgggtatcgctcacggtacaggtatcggtatcgggctgtttctgctgctgattgctgctaacggtgtgggtatggttatcaaaaacccgattgaaggcttgccagtggcgctcggtgcgtttacctccttcccggtgatgatgagcttactggggctggcggtcatcttcggtctggagaagtgtcgcgtacccggcgggatcttgttggtgattattgcaatttcgatcatcggcttaatctttgacccagcggtgaaataccacggtctggtggcgatgccaagcctgactggcgaagatggtaagtctctgattttcagcctcgatattatgggcgcactccagccaactgtacttccgagtgtactggcattggtgatgaccgcagtgttcgacgctactggcaccatccgtgctgtcgccggtcaggcgaatttgttggataaagacaaccagatcatcaacggcggcaaagccctgaccagtgactcagtaagttcaatattctccggcctggtgggcgcagcgcccgcagcggtttatatcgaatcagcggcaggaaccgccgccgggggtaaaacagggttgaccgcaaccgtagtgggggcgttattcctgttaattctgtttttatcaccgctgtcatttttgatccctggttacgccactgcccccgctctgatgtacgtgggtttgctgatgttaagtaacgtctcgaagctggatttcaatgattttattgacgctatggctggcctggtgtgtgccgtgttcatcgttctgacttgtaatatcgttaccggtattatgctgggctttgtgacactggtcgtaggccgcgtctttgcacgcgaatggcaaaagctgaatattggtacggtgatcattactgccgcactggtcgcattttacgcgggtggttgggcaatctaa

SEQ ID NO: 477450 - DNA, 489 bp, Shigella flexneri
atgaaatcgttaattatcgttaatccggctgactgtattggctgccgtacttgtgaagtagcctgtgtggtcgctcacccttcagaacaggagttgaatgccgatgtctttttaccccggctgaaggtacagcgactggacatcatcagtgcgccggtgatgtgccatcagtgtgaaaacgctccttgtgttggcgcttgccccgtgcaggcgctgacgatgggcgagcaggtggtgcaggccaattctgcccgttgtattggctgtcagagctgcgtcagtgcgtgtccgtttgggatgatcaccattcagtcgttgccgggggatacccggcaacaaatcgtgaaatgcgatctctgtgaacagcgggaagaggggccagcctgcgttgaatcttgcccgacacaggcgctgcagttgcttactgaaagagaactcaggcgactccgccagcagcgtattgttgccagcggtgagaatcctctctga

SEQ ID NO: 477451 - DNA, 1920 bp, Shigella flexneri
atgaataagtttatcgctgctgaagctgcggaatgtataggctgtcatgcttgtgaaattgcctgtgcggtggcacacaatcaagaaaactggccgctgagtcacagtgactttcgaccgcgtatccacgttgtagggaaaggccaggctgcgaatccggtggcctgccatcactgcaacaatgccccttgtgttacggcttgtccggttaatgctctgactttccagtccgatagcgtacaactggacgagcaaaaatgtattggctgtaaaagatgcgcaatcgcttgcccctttggcgtcgttgagatggtcgatacgattgcgcagaaatgcgacctttgtaaccagcgcagttccggcacgcaagcctgtattgaagtctgcccaacacaggcgttacgactgatggacgataaagggttacagcggataaaggtggcccgccagcgcaaaacggcagcaggaaaagcgtcatcagacgctcagccatctcgcagtgcagcgttgctccccgttaactcgcgtaaaggcgcagataaaatttcagcgagtgaacggaaaacccactttggcgaaatctattgcgggctggatccactgcaagcgacttatgagagtgaccgctgtgtttattgtgccgaaaaagctaactgcaactggcattgcccgctgcataacgctattccggattacatccgtctggtacaggaaggaaagattattgaagcggcagaactttgccaccagaccagttccttaccagaaatctgcggcaaggtatgcccacaggaccgtctttgtgaaggcgcatgtactttgaaagatcactcaggcgcagtctctatcggtaatctggaacgctacatcaccgataccgcgctggcgatgggctggcgtcccgatgtcagcaaagttgttccccgtatcgaaaaagtggcggtgattggcgctgggccagcagggttagggtgtgctgatattctggcgtgcgcgggagttcaggttgatgtctttgagcgccatccagaaattggcggtatgctgacttttggcattcctcctttcaaactcgataaaacggtattaagccagcggcgagagatattcaccgcaatgggaatcgactttcatcttaactgtgaaattggccgcgatattacctttagcgatttaacttctgaatatgatgcagttttcatcggcgtggggacttacgggatgatgcgagcagatctgccgcatgaagatgcgcccggtgtcattcaggctctaccgttcctgactgcccatacccgccagctcatgggattgccggagtctgaagagtatccgctgacggacgtggaaggtaagcgagtcgtggtattgggcggtggcgatacgacaatggattgtttgcggacttccattcgcctcaatgctgccagcgtgacctgcgcgtatcgtcgtgatgaagtcagtatgccgggctcgcgcaaagaggtggtcaatgcgcgcgaggaaggtgtcgagtttcagttcaatgttcagccgcaatatatcgcttgtgacgaagatgggcgtttaactgcagtgggcctgattcgtaccgccatgggggagcaggggccggatggtcgccgtcgtcctcgtccggtagcgggttcagagtttgaattgcccgccgatgttctgattatggcctttggtttccaggcgcatgccatgccgtggttgcagggcagcggaattaaactcgataaatggggcctgattcaaaccggtgacgtcgggtatttacctacccagacgcatctgaaaaaagtctttgctggtggtgatgcagttcatggcgcggatctggttgtcactgccatggccgcaggaaggcaggcggcgcgcgatatgttaactctgtttgatacgaaggcatcgtga

SEQ ID NO: 477452 - DNA, 678 bp, Shigella flexneri
atgttaacgttaaataagatatcttatcgctggcctggcgcggcaacggattgtctttgcgacatttctctgcaactcaaacaaggtgaatggttggcgctgaccggtgacaatggcgcagggaaatcgacgctgttacgagtaatggcaggtcttcttacgcccacagccggtacggttatgctgcaacaacaggcgatgaaaaacctgaaaaaccgccagcgcgcggcaaaggttggcgtactgtttcaggaagcggaaaaccaactttttcacagcaccgtcgctgacgagatcgcatttggtttgaaactgcaaaaatgcccggcggatgaaatcactcaacgtacccatgctgccctgcaatgttgtcagttagcagacactgccaactcgcacccgttggatctgcatagtgcgcagcgacggatggtcgccgtcgcctgcctggaagcactctctccgccactattactgctggacgagccgagtcgggattttgacgaaaattggttgagcgtgtttgaaagctggctggagaagtgccgccagcgaggcacgagcgtggtagcaatcagtcatgacgccgcatttacccggcgtcatttctctcgtgtggtgcgactggaagatggtgtaatcaggaacgttaatccaccagacgatattcacccgtag

SEQ ID NO: 477453 - DNA, 1389 bp, Shigella flexneri
atggaaaacaagtctgctcgtgcaaaggtccaggcttttgggggatttttgacggcaatggtcatccccaatataggtgcttttattgcctggggcttcataactgcgttatttattcccaccggttggctgcctaacgaacatttcgccaaaattgtcggcccgatgattacctatttattgcccgtgatgattggttctacaggtggtcatctggtcggcggtaaacgcggggcggtcatgggcggaataggtactattggtgtgatcgttggcgcagagatcccgatgttccttggctcaatgatcatgggaccgctcggtgggttggtcataaaatatgtcgataaggcactggaaaaacgcatacctgccggttttgagatggttatcaataacttctcattaggtatcgcggggatgctcctttgtctgctgggttttgaagtgatcggcccggcggtgttaattgccaatactttcgtcaaagagtgtattgaggcgctggtacatgcgggttatctgcctctgctgccagtcatcaatgaaccggcgaaagtgcttttccttaataatgcgatcgatcagggcgtctattatccgctgggaatgcaacaggcttcggttaacggtaaatccatcttctttatggtggcctctaacccaggtccgggcctggggctgctgctggcgtttaccttgtttggtaaagggatgagtaaacgttctgcgcccggggcgatgattattcacttcctcggtgggatccacgaactgtatttcccatatgtgctgatgaagccgctgactattattgccatgattgcgggcggtatgtctggtacctggatgtttaacttactggacggtggtctggtggctggcccaagtccggggtctatctttgcgtacctggcactgacgccgaaaggctcgttcctggcgacaattgccggtgttacggtaggtaccctggtgtcctttgctattacttcgctgatactaaagatggaaaaaacggtggaaacggagagcgaagatgagtttgctcagtcagccaatgcggttaaggcgatgaaacaagagggtgcattctcgttaagcagggttaagcgtatcgcctttgtttgcgatgcggggatgggctccagtgcgatgggcgcgaccaccttccgtaaacgcctggaaaaagcggggctggcaatagaagtaaaacattacgcgatagaaaacgtgcctgcggatgccgatatcgtcgtcactcacgccagtctggaagggcgcgtgaaacgtgtgacggataaaccgctgatattgattaataactatattggcgatccaaaactcgacactttatttaatcaattaaccgccgaacataaacactga

SEQ ID NO: 477454 - DNA, 729 bp, Shigella flexneri
atgaataatgtcttactcatgagacccgatgactcagaatttatgatacctgatgactggtcagggctaaacgcaaaaggcattacatacgaacaagataatagagtgacagagtcttttctgccttttaaatctttttattgttcaccggtgtgcacgaccgttgaactcatctcacaaaataattgttttgctatgggtatccgctaccttctggaaaagaaaagagacttaaggctaaatcactttaaagccttctctcataaatgcgagacaaaacctgacgtgttaattatgaccgggtgcaccgtcgctgatacttatagtatattctcacgcattgttgaagaaaatataatgaaaacgatgacacctatcgtcatcattactgggcatcactcagaagatctttgttctctggcatcgaaactgggaggagttaaaataatatcaccgacagaaaagattgcaaaaatagaaaacgctatcaatgatgcttttaacagcaagcctaaaaaaataagatttttaacagatatactctctcctcaacaaattgagaccatgaaaatggttgcgcagggtagatccgttaatgagatttcagccgcaatgaatattagcatcaagaccgtgtatgcacataaagttcgtgctatcaataagctgggaattaagaaaaaagtttatgaagcgcttttttataaagcgctaattcagttcaactga

SEQ ID NO: 477455 - DNA, 252 bp, Shigella flexneri
gtgtttctgcgtattgttgtaggcttgacttgcttcactgtagcggcaaggtacgagccaatcgtggagaaaaaaggagttaatgtaaattatcatgagattgctgacacactcgcttacaggtcaatatgggcacgtttttccctctcgcctttaaagggagagggccggtgtgagggtaattatttacacctcagccggcgtgttccccttcccctcaccctctgcggagcgaaagctaatactcactaa

SEQ ID NO: 477456 - DNA, 1683 bp, Shigella flexneri
atgaaagtatggatggcgatattaataagtatcttgtgctggcaatcatctgtgtgggcggtctgtccggcctggtcgccagccagagcacaggaagaaatttcccgcctgcaacagcaaataaaacagtgggacgatgactactggaaggaaggaaaaagtgaggtggaagacggtgtttacgatcagttaagcgcccgtcttacgcagtggcaacgctgctttgtgagcgagccccgcgacgtgatgatgccgcctttaaatggtgcggttatgcatccggttgcccatacgggtgtacgcaaaatggcggataaaaacgcattaagtctgtggatgcgagaacgtagcgatctttgggtgcagccaaaagttgatggcgttgcggtaaccctggtttatcgggacgggaaactgaacaaagcaatcagtcgcggtaatggcctgaaaggcgaggactggacgcagaaagttagcttaatttccgctgtgccgcaaaccgttagcgggcctttagccaacagtacgcttcagggggaaatatttctccagcgcgaggggcatatccaacaacaaatggggggaataaatgcccgcgcaaaagttgctggcctgatgatgcgccaggggaatagcgacacgctaaactcactggctgtttttgtctgggcatggccggatggaccgcagttaatgaccgatcgtttaaaggagctggctaccgcaggttttactctaacgcagaggtatacccgtgcggttaaaaatgctgatgaggttgcgcgcgtacgcaatgagtggtggaaagcgaaattacccttcgtcaccgatggcgtggttgtgcgaggggctaaggaacccgaatcccgtcattggctaccgggccaggcggagtggctggtggcctggaaatatcaacctgtagctcaggttgccgaagtgaaggcgattcagtttgcggtgggtaagagcggtaaaatatcggtggttgcgtcactcgcacctgtcatgctggatgataaaaaagtccagcgggtgaatattggttccgtcaggcgctggcaggagtgggatattgcgcctggtgatcagatcctcgtcagccttgccggtcagggtattcctcgcattgatgatgtggtctggcgcggtgcagaacgtacaaaaccgacaccaccagaaaaccgctttaactcgttgacctgctactttgcttctgatgtttgtcaggaacagttcatttcacgcttagtctggctggggtcaaaacaggttctggggctggatggcattggtgaggccggttggcgcgcgctgcatcagactcatcgctttgagcatatcttttcctggcttttattaacgccagagcaattacagaacacgccggggatcgcgaaaagtaaaagtgcgcagttatggcatcagtttaatctggctcgtaaccagccttttactcgctgggtgatggcaatgggaataccgctaacccgggcggcgcttaatgccagtgatgaacggtcctggtcgcaacttttatttagcacggagcagttctggcagcagctgccggggactggatctgggcgcgccagacaggttattgaatggaaggaaaatgcgcaaatcaagaagctgggcagttggctggctgcccagcagatcacaggttttgaaccttag

SEQ ID NO: 477457 - DNA, 291 bp, Shigella flexneri
atgcataagttattcagcctgccggatgcattgtgtgagtttatccgggcattacctacaccggatttaccggaagcgcaccagcccgaaacatggccggaagacaacaccaccagcaacggccagacgctggcggatatgtgcgccccgtctgcggcgtggctggctgcccgtgatgcgtatatcagccatatcatggcctgcccgcattgcgttaccagcggcgttaaaaaaccgcgtcattgcgctgagggggagcgactacgccagaactacgaccacaccagataa

SEQ ID NO: 477458 - DNA, 1839 bp, Shigella flexneri
atgacccggacaaccactaaaaccccggtcacatccgggaagagaaaaccaccacgcaagaaacaccccaaagtcagcccggcacgtccgggctacgccacttattcgcagcatgtacaggtggacggcggccagatactgaaacccggcctttactggcacggcgtgcgcgactcaaccaacacagacacgtttatctgttccccgctggaggtcatcgccatgaccagcgacagcaaagacgaaaactacgggcgattactccgttttctcacgccgtcaggccagtggcgggaatgggccgcaccgatggaaatgctcgccggagacggcggagaactcaggcaggaactgctacgcatgggcgttaccattccctacaaacaacggcaggcactgactgaatacatcatggagtcagcaccaaaacgccgggcgctcgcggccacggccaccgggtggcactccccggccctgtttgtcatgccgggcggggttatcggtgatggtgatgtggtgtttcagtcaacagaagcaggctcacaggagtacgccaccgcaggaacgccggagggctggcgcgacaacgtggccgcattatgccggggaaacccggtagccatgctggccgtgtgtgcatcgctcgccgggccgttgctgtggttgcttgatgtggacagcggcggatttcatttcatgggcgacagttccagcgggaaaagcgtgggggcactggtggcctgtagcgtatggggagaaccccgcaactttaaacgcaactggaacgccaccagcaccgggcttgaaggactggcgaccatgcggaacgataccgcgctgatactggatgaaattggcgaagccccggccagagatattggcgggctgatttatcagcttggcaacggaacaggccgccagcgtggcaaggtgtccggcatggcccgcccggtcaacacatggcgcaccatgattatttccaccggggaaatgaccgtgggtaaacacatggaaagcggcggccagcgcatcaaggccgggcaggaaatgcggttactggatattccggcacagcggctttacggggcatttgactgtcttcacggaatggcactaccccacaaccccgacaacgacacagaacgccggggagcaggccggaaatttgccgaaacgctgcgcggtaatgcggccacccattacggccacgccgggccggagtttgtgcgctggctgatttcccgcaatgaaagtgacaccaccagcaccgacagcaacggccagacgctggcggatatgtacgccatactgcgcgaacaattccccgtaagcaccgggcaggaggcgcgcgccgccgcgcgtttcacactgtgcgcactggccggggaaatggcgataactgccgggattctgccgtggaaacagggcgaagcactggaggcagtgaaagcgatgtttgatgcgtgggcgggttatcgtggccgggggcaatcggaggacgtgaaaatactccgggccgtcgcggggtttatcgcccgccatgcttcacgctttgaagggggcagcacatgcagcgaaccagtaagcaaccgcgccggatggtggcgagcggggagcaacggcgaccgggtttactggtttttaccggaagcactatgtgaggcggccagcggctacgacctgaaacgcatagcggccagtcttgacgatgctggcgcgattgttgaccgcgacacggacgggaaacgccgatacacaaaacgcgtttccgttaacggggagaaacaccgcgtttacgccatcggccagaatgcattgttattcgcaattgatgaataa

SEQ ID NO: 477459 - DNA, 1044 bp, Shigella flexneri
atgcgtgacatagccacgattaacgcaatccgcagcgttgccgcagtggcggcacaacatgcggaaatcctcgttcccgaatggctgcccgaaggtaaacggcaggccgctgaatgggtgtgtcgtaaccccacacgtgcagaccgtcacgcgggcagtttttccgtctcgctggtggacggatgctggcacgacttcgccaccggggacagcggcggcgaccttgtggcgctgggggcttatttgtggaatgtgcggcagactgatgccgcccgtattgtggcggacaggctggggctgtgcctgcccgcgctgggtaaacctgatgtaatgacccgcgaacaacgggaggcgcaacgggtgcgggtacaggccgcagaacaggaggcggccagactccgccagcgggaacagcaacagcgccaccagcgccagaaactgaccgcctgccgggcctttgagttgcttggccgggcggaggtggcaaacccttctcatccctatctcatgaaaaaacggctacagcccggcaatctgtatcagtcaggtaatgatttgcttgtcccgctgtacaacgtatgcggcgaagtggtgaacgtgcagattatcagcccggacggtcgaaaaatgtttctccgtgatggtcaggtgcagggggcttttcatgttatggggagctttgacctgatggccccggaagcaccggaacatgacgtttacgtgtgtgaggggtgggccaccggggccgcccttctccagtactggaacgtcatggccgtggtgtgtgccatgaatgcgggaaaccttaaacatgtggctatggcgctgcgtgagcgatacggctcgcgcatatctctcgttatcgccggggatgatgaccgggcatcaaaagataaccccggttccagagcggccaacgaagccgcattgctggccggatgttacgtcacattcccggaatggccgcccggtgcatcaccagacctttccgactttaacgatttgatgctatgggaaatggagcatgacccggacaaccactaa

SEQ ID NO: 477460 - DNA, 315 bp, Shigella flexneri
atgcgtgatatgtataacacccggatacctgaactactggttgcggccatcaaaaacgcagacgcacaggaagcccgcgccctgtttgacgatgcggattactgcgcccgcaaactgcttgaagggctgattagcactggccgcctgctttccggcatgggcgacaatctcgaccccagcatgggcgaactacgcagcctgggcgattccatcgctgttacggctgaacttgtggccggattcagtgaggttgtggaggcgtataactggcgctgccgcaccggggaaatcagggagggcgggcaacatgcgtga

SEQ ID NO: 477461 - DNA, 297 bp, Shigella flexneri
atgcgtgattgtctgcgtgagtcaatgaaagccgccatgagcagtatgccggacgaagaaagccgctggagtctgcgcgttgatgccgactggcacagagtgaatttactggcggggattgcctttgttggtaaggcgctggaggaaagccagttacgcgaaaaccccatcacctattccagagacgagatctgccagttagccggatttctacagacagcccctgccctcattggctgtatggccgaactgatggagtgttacgaccagcaggccggggaggtaagccatgcgtga

SEQ ID NO: 477462 - DNA, 606 bp, Shigella flexneri
atgaaaatgccagaaaggcccgtaacagggccggggcgttctcacgcccaaaacaaccaccacatgccccacaggatgggcggcaaccgcaaatattgcttgcctgccatcgctggtgggcgttatatttcccccgctggtgtaaatccaccagccgggcgtaggaacccgtttaatcagtacaaggcgacacagacgcgcccagcgtctttttttgtgtcatgccatcgcgcaaccatacccagcggcaaggcccgcactgtatctatggtggcgctggtggggcagccgaaaggctggccggtttccttgtacgccggtattcctacccccgccagcgtcaccgccccttatgagtgtaggaactcaggcggtgactccttaaaccagtacaaggaggctgccagaatggctacgaccccaaccccgttacacactgaatttacctttcactttctggccgttcgccgttccgacctgaacgaccgcccacaccgcgaatccatcaacgcacccgatgaaacaaccgcccgccgtatgctggcgcgtgattttgtgttgctgtttgctggccgcgttccgtctcagggggtgcgccatgcgtga

SEQ ID NO: 477463 - DNA, 207 bp, Shigella flexneri
atggataccttacccaaatccggctatatgcgcccggcacaggtgataaaccattttcagattagcgaatcgacgctatggaactgggttaaaaaaggtaaattccccagcccggataagctgggcgatggcgtaagccgctttgatgtttccgctatccgccagtggctcgctgaccgcaaaggcacaaccagcacgcgcaattaa

SEQ ID NO: 477464 - DNA, 954 bp, Shigella flexneri
atgtatgaaaacacataccctattgatacagccgccagcatactggggtgtactcaaaaaaaaatactgactgaatgggctaaagggacaataaaaatcgcacttgatttcggcccggaaagttccataaaccaccaaagctacacggattacgacaagtggggatatccggccaagccgtggaacattgccagtatttcagcgccagcaacaaacgattatttcccacctgaattactacaaccggaagaaggggagaaactcaagcttttccccaatgacaacgaacctgaatcaatattgatttggaaaaatgtttaccatcaatactcacaatccgggttctactttgacagcaaccatagtgacgcgcaggtacatgacgggaaacttatggttgtatcggatgttctcctgtatggcttatggactgtaccttacgccgagttctcgcgcgttcacgcacaggacacattcacattaaagccatacacaaacaacccatcactatctaaagttacagcaacctttacaccacgtggcggctcacgccggataaacgcccctgaaaaaaagaatttgcgcattaccgattcagaaatgatggtcatgcaaaaaatacttgcacaaaggcccggccaccagcgcacagaacaaccgacagatgacaggaatcaggaaaagcaggatatacacggcggtgtggagcgattcgcgctggaacgtgaaaaggttctcgcggctgccctgtacgtagcgtatcacttcccgaaagatgttggcaagacgcttaaatcacatgccgaagccatagaaaaacacggttatctgttctgggatggcaatcccaccccaacacctgacgcgggacgaatagcaaaaatattatctgatgccagacgcttgcctaatgaatggaaaattttgggcggaaacgcaaaagcaaaaagataa

SEQ ID NO: 477465 - DNA, 1269 bp, Shigella flexneri
atggcaaaggcgaagttaacggatattcagataagggcgtggataaaggccggggaacgctttgatgcccgcgccgatggtaacggcctgtatttgtgcttccctgaaaaatataacgccccattctggcgctatcgttaccggatggccggaaaacaacgtgctatgcacatcggctcatattccgacctgtcactaagtaaagcccgtgccaccgtcaaagaactggccgcccgtgttgcgctgggtcatgacgtggccggagaaaagcaggcccgaaaagcggcggcactggcacggattgaggaagaaagaaacgcccttcgcgtgtcagaactggcagccgaatactacgaacggcaaatactaccccgctggaaacatcccgatattctccgccgccgcatagacaaagatatcaaccctcagattggcagcctgaaagtcgaagacgttaaaccgcgccatattgacgcaatgctacagcgcattattgaccgtggagcgccaacagtcgccaatgatgttttgcgatggactaaacggatattcgactacgccatcaaacgccacgcactggaaacaaaccccgccgctgcttttgagttatcagatgctggtggggctgaaaaaagccgcgaccgatggctaacacgtgatgaactcattcgtttttttcaggccatgcgcacagctaaaggattcagccgtgagaatgaactcaccatgaaactgatactttgcctttgctgccgaaaaatggagttgtgcgccgcacagtgggatgaatttgatttagataatgctgtatggcgactccccgccgaacgggctaaaaacggggatgctattgatatcccactaccaccagcggtggcatggttgcgtgaattacacagcatttcaggcggtagccgctgggtgcttccagcccgcaaaatgcaacagcgcatgattccacacatacaggaaagcaccctgcccgttgcgctggctaaggttcgccgggaaatgcctggtgtgccgggttttaccgttcacgatttccgacgcacggccagaactcaccttgccgcgcttggggtagaccctgtagtggcggaacgctgcctgaaccaccgaattaaaggcgttgagggtatctataaccgccatcagtatttcaatgaacgccgccacgctcttgaattatgggccgacctgctggtggctctggaacagggggatgaatacaacgtaacccccatcacaaaagtgattgcaaaataa

SEQ ID NO: 477466 - DNA, 723 bp, Shigella flexneri; identical to SEQ ID NO: 458214

SEQ ID NO: 477467 - DNA, 255 bp, Shigella flexneri
atgcagacaatcatctatcagataacccccagcaaatggtgtacagagagagtcctcattgcatcaacagggctaaagcctggcaccatcgagcgggccagaagaaagtcatggatgcagggaaaagaataccgtcattacgctgtagaaggtgatccagggcattacagtgaatgcctgtacaacatcgaagaaattatgcgatggatcgaaaaccagaaacaaccaggtgccaaaaatgcaagttccggttaa

SEQ ID NO: 477468 - DNA, 564 bp, Shigella flexneri
atggtagtgtccgctattgccagtacacctcatggtcctggcaacccgatggagcagccgaaagatgccaaaggcacgggtacggaatccggcattcagccacagtacggtgtaccgtatggtgtcacgctcaacccgttcctctcaccatttggtctgccatgtaaacagccagcatggggttatatctcggcgctggatctgaaaactaatgaagtggtgtggaagaaacgtattggtacgccgcaggacagtatgccgttcccgatgccggttccggtgccgttcaatatgggtatgccgatgctgggcgggccaatctccacggcgggtaacgtgctgtttatcgccgctacggcagataactacctgcgcgcttacaacatgagcaacggtgaaaaactgtggcagggtcgtttaccggcgggtggtcaggcaacaccgatgacctatgaagtgaatggcaagcagtacgtggtgatctccgcaggcggtcacggttcatttggtacgaagatgggcgactatattgtggcttatgccctgccggatgatgtgaaataa

SEQ ID NO: 477469 - DNA, 375 bp, Shigella flexneri
ttgaccgtccacgcggctgcgcaccgtaacagtattagcggcggtaatggtgccaagcccggtgaggtaacgggcggcctgttggttaatgggacaacctcagcggtcgtggtagatgaaggtggtgaattgttggtgtatccaagtggagaagccagcaattgtgagattaatcagggcggcgtttttatgctggccgggaaagccagtgatacgttgcttgctggtggcaccatgaataatctcggtggtgaagactctgacactattgttgagaatggatccatttatcgtctggggacggatggccttcagctctacagttccggtaagacgcaaaacctgtcggtgaatgtgggggggtgcccctattaa

SEQ ID NO: 477470 - DNA, 261 bp, Shigella flexneri
atggattgtcctggcccgccttttgcgggcaatcataatcctggtcgttacgggcgagtttttccatcttttggatgttttttcagcgttttctgttggctcgattcatcagaaaaaatgttagcgcggtcaagttttcaccgcaaaggtattcaaaaggtattattaggtggtattgtcatcgcgtaccttacattacctgtcatgaaggaattaaaagatgaaaacaacagcaaagctgtcgttcatgatgtttgttga

SEQ ID NO: 477471 - DNA, 354 bp, Shigella flexneri
gtggcaattggttcgttgattgcagcgttaattttcgtgccaattggagcgcttcaggctggtgaagcactctggcactggtcggttattccattgggtctggctgtcgctattctctcgaccgctctgccttattcgctggaaatgattgccctcacccgtttgccaacacggacatttggtacgctgatgagcatggaaccggcgctggctgccgtttccgggatgattttcctcggagaaacactgacacccatacagctgctggcgctcggcgctatcatcgccgcttcaatggggtctacgctgacagtacgcaaagagagcaaaataaaagaattagacattaattaa

SEQ ID NO: 477472 - DNA, 2226 bp, Shigella flexneri
atgcggtggatcctgttcatcctcttctgcctgctgggcgcacctgcccacgcggtatccatacccggcgttacaaccacaacgacaacggactcaacgactgaaccggccccggaaccggatatcgaacaaaaaaaagcggcctatggcgcactggcggatgtgctggataacgacacctcgcgtaaagagttgatcgaccagttgcgtactgtcgccgcgacgccccctgcggaaccggtcccgaagatcgtgccgccgacgctggttgaagagcaaaccgtgctgcaaaaggtcaccgaagtcagccgccattatggtgaagccctttccgcccgcttcgggcaactttatcgcaatatcaccggctccccgcataagccatttaatccacaaaccttcagcaatgcgctgagccatttttcaatgttagcggtattagtgtttggtttttactggctgattcgcctgtgcgcactgccgctgtatcgcaaaatgggtcagtgggcgaggcaaaaaaatcgtgagcgcagcaactggttgcagcttccggcgatgattattggggcgtttattatcgacctgctgttactggccctgacattatttgtcggccaggtattaagcgacaacctgaatgcaggcagtcgcaccatcgctttccaacaaagtttgtttctcaacgcctttgccctgattgaatttttcaaagccgtactacgcctgattttttgcccaaacgtggcggagctgcgcccgttcacgattcaggacgagagcgcccgttactggagtcgtcgcctgagctggttaagcagcctgattggctatggcctgattgtggccgtgccgattatctctaatcaggtgaatgtacagataggtgcgctggcgaacgtcatcattatgctgtgcatgaccgtctgggcgttgtacctgatcttccgaaataaaaaagagattacccagcatttgctcaactttgcggagcattcgctggcttttttcagcctgtttatccgcgcctttgcgctggtgtggcactggctggcaagcgcctattttatcgtgctgtttttcttttcgttgttcgatccgggcaacagtctgaaatttatgatgggtgcaacggtgcgcagcctggcgattattggtatcgcagcgtttgtttccggtatgttttcccgctggctggcgaaaaccatcaccctctcgccacatactcagcgtaactatccggagctacaaaaacggctgaatggctggctttcggcggcgctgaaaacggcgcgtattctgaccgtctgcgtggcagtaatgttgctgttgagcgcatggggattgttcgatttctggaactggctgcaaaacggcgcggggcagaaaaccgtagatatcctgatccgcatcgcactcattcttttcttctcggcggttggctggacggtgctcgccagtttgatcgaaaaccggctggcttcggatattcatggccgcccgctacccagcgcccgtacgcgtaccctgctgacgctgttccgtaacgcgctggcggtgattatcagtaccatcaccatcatgattgtgttgtcggaaatcggcgtcaatatcgcgccattgctggcaggtgccggggcattaggtctggctatctcgtttggttcgcaaacgctggtaaaagatattatcaccggggtatttattcagtttgaaaacggcatgaacactggagatttggtgactatcgggccgttgaccggcacagtggaacggatgtcgattcgctccgtgggcgtgcgccaggataccggggcgtatcacatcattccgtggtcttcgataaccacctttgctaacttcgtccgcggtattggttcggtagtggcaaactacgatgttgatcgccatgaagatgctgataaagccaatcaggcactgaaagatgcggtaacggaattgatggaaaacgaagaaattcgcgggctgattattggtgaaccgaactttgccgggattgtcggcttaagcaataccgcgtttacactgcgtgtttcgttcaccacgctgccactcaaacagtggacggtacgctttgccctcgacagccaggtgaaaaaacatttcgacctggcgggcgttcgcgcgccagtgcagacttatcaggtgctgcctgctccgggcgcgaccccggctgaaccgctgccgccgggggagccaacgctttaa

SEQ ID NO: 477473 - DNA, 477 bp, Shigella flexneri
atgcataaatcagaaaatgaaaaaatagattttattctggatgagcatgagcggatatccagaaaacagggttctttgtgtatggcactgggtaagggctttttagttatagctattctttgtggtgttgccacattctgtgtttctggcctgtatctgaaatccctgtgcctgtccgttgcctgctgttgtggggtattcagccgtatttttaattattacagcgtaccggaggaatcacgcagggtactcagtcgtcaggaattgctctggcttatgagtctgactgaagactgtccggatatgcaccaggaactgcttaactgcctgctgtccggtaaaaaactgaccggtctggacaagagggaaatcaggagtctctggtgggaaaagatggatgcaatgcaggagtctgccactcgtcagcgtgaacaggatactattcggcagttttctgaagagagtaaatccgaatga

SEQ ID NO: 477474 - DNA, 591 bp, Shigella flexneri
atggcaaataatatgtcgtcccgtcaggcgtgccatgccgcccggtatgttgtcgcccgggttctgcgaggactgttctggtgtctgaagtacaccgtcattctgccactggccacaatggccctgatggctctgtttgttttatggaaggacaacaccacgccggggaaattactggttaaggagattaacttcgtaagacaaacagcacctgccggacagttcccggtcagtgaatgctggttttcttcccctgattcttcaggcagatcagaaatacaggatatctgccattaccgcgcggctgatgctgcagattatgtcagggagactgaccggtcactgatgcaactggtcaccgcattatgggtaacactggcactgatgtatgtctcgctggcagcgatcaccgggaaatatccggtgcgaccaggaaaaatgaaatgtatccgggtggtaaccgcagatgaacatctgaaggaagtttatacggaagacgcttccctgccgggaaaaatcaggaaatgccctgtttatcttcctgatgacagaacaaacagaaacaacggagataaaaatgaacatgcgtaa

SEQ ID NO: 477475 - DNA, 306 bp, Shigella flexneri
atgatggatactttcgatagtgaaaaatttctctcagagctggatgttttatcaaaagagatcatgcctggttgtggtcttgtttttgagctataccaacgtcgtttgagtgctgcgattgataaagttgtcgccggattgccggaagaacaacacgcccaggcgtttgaactggctcgccaggaatttgattatctttctgcggaagagattgctgaagaaatacgccgtgactcagaacgtggttattgctgtcacggctttgatcgcgattgctgtcctctcggttgcggtgatttaccatga

SEQ ID NO: 477476 - DNA, 234 bp, Shigella flexneri; identical to SEQ ID NO: 21650

SEQ ID NO: 477477 - DNA, 288 bp, Shigella flexneri; identical to SEQ ID NO: 21651

SEQ ID NO: 477478 - DNA, 294 bp, Shigella flexneri; identical to SEQ ID NO: 21652

SEQ ID NO: 477479 - DNA, 747 bp, Shigella flexneri
atgttgcttagcataatcactgtcgcgtttcgtaacctcgaagggatagtcaaaacacatgcctcgctggtgcatctggcgcaggcggacgatatcagcttcgaatggattgttgtcgatggcggttccaacgacgctacccgtgagtatctggaaaatctcaatggtatctataacctacgctttgtcagcgagccagataacggtatctacgacgccatgaacaagggcattgcgatggcacaaggcaagttcgcgttgtttctcaactcgggcgatatttttcatcaggatgccgcaaattttgtccgtaagttaaaaatgcaaaaagataacgtgatgatcactggcgatgcgctgctggattttggcgacgggcataaaattaaacgtagcgccaaaccgggctggtatatttatcacagcctgcccgccagccatcaggcgatatttttcccggtatccggcttgaaaaaatggcgttatgacctggaatataaagtttcttctgattacgcgctggcagctaaaatgtataaagccggttatgcatttaaaaaactcaatggcctggtgtctgaattttctatgggtggggtatcaaccaccaataatatggaattgtgtgctgacgccaaaaaagtccaacggcagatcttacatgtacctggcttctgggcagaattatcctggcatttacgccaacgtacgacaggtaagactaaagccttatataacaaagtctga

SEQ ID NO: 477480 - DNA, 420 bp, Shigella flexneri
atgtctgataccaaacgtaatacaatcggcaaattcggcttgctctcgctgacttttgccgccgtttacagctttaacaacgttatcaataataatattgagcttggactggcctcggcaccgatgtttttcctcgcgacgattttttattttattcccttctgtctgatcatcgcagaatttgtttcgttaaataaaaactcagaagccggtgtctacgcgtgggtaaaaagttcgctgggcggacgttgggcatttattactgcctacacttactggttcgtaaatctgttctttttcacctcgctgttgccgcgcgttattgcttatgcttcgtatgccttcctcggctacgaatatattatgacgccggttgccaccaccgttatcagtatggtgctgttcgccttctccacctag

SEQ ID NO: 477481 - DNA, 2352 bp, Shigella flexneri
atgaaaatcaaaactattttaacgccagtaacctgcgctctgctgataagtttttccgctcatgccgctaacgccgacaattataaaaacgtgattaaccgtactggtgcgccgcagtacatgaaggattacgattacgacgatcaccagcgttttaatccgtttttcgatctcggagcctggcatggtcatctgttgccagacggcccgaacaccatgggcggctttccgggcgttgcgctgctgacggaagaatacatcaactttatggccagcaatttcgaccgcctgactgtctggcaagacggcaagaaagtcaacttcacgctggaggcatacagtattcccggcgcgctggtgcaaaaactgacagcaaaagatgtgcaggtcgaaatgactctgcgcttcgccacgccgcgcacgtcactactggaaactaaaatcatcagcaataaaccgctggatctggtgtgggatggcgaactgctggaaaaactggaagcgaaagaagggaaaccgctttccgataaaaccattgctggcgaataccctgactatcagcgcaaaatcagcgccacccgtgatggcctgaaagtcacctttggcaaagtgcgcgccacctgggatctgctgacctccggcgaatcggaatatcaggtgcataaatccctgccggtgcagactgaaatcaacggtaatcgctttaccagtaaggcgcatatcaacggttcgaccacgctctacaccacctattcccatctgctgaccgctcaggaagttagcaaagagcaaatgcagatccgcgatattctggcgcgtccggcgttttatctcaccgcctcgcagcaacgctgggaagaatacctgaagaaagggttaaccaatccggatgcgacgccggaacagacgcgcgtcgcggtgaaagcgatcgaaacgctcaacggtaactggcgctcaccgggcggtgcggtgaattataacaccgtcacgccgtcggtgaccggacgctggttctccggcaatcagacctggccgtgggatacctggaagcaggcgtttgcgatggcgcatttcaatccggatatcgccaaagagaatatccgcgcggtcttctcctggcagatccagcctggcgacagcgtgcgtccgcaggatgtgggctttgtccccgacctgatagcgtggaaccttagccccgagcgtggtggcgatggcggcaactggaacgaacgtaataccaaacccagccttgccgcctggtcggtgatggaagtatacaacgtcacccaggataaagcctggttggcagagatgtacccgaaactggtggcctatcacgactggtggttacgtaaccgcgatcataacggcaacggggtgccggaatatggcgcgacccgcgacaaagcccacaacaccgagagcggcgagatgctgtttacggtgaaaaaaggcgataaagaagagacgcagtctgggctgaacaactacgcccgcgtggtggagaaaggccagtacgacagtctggaaattccggcacaggtcgctgcgtcgtgggaatcggggcgtgatgatgccgccgtctttggttttatcgacaaagaacagttggataaatatgtcgctaatggcggcaaacgtagcgactggacggtgaaattcgccgaaaaccgcagtcaggacggaacgttgctgggctactcgctattgcaggagtcggtggatcaggccagctatatgtacagcgataaccattatctggcggagatggcaaccatcctcggtaagccagaagaggccaaacgctatcgccagttggcacagcagctcgcggactacatcaacacctgtatgttcgacccgactacccagttctactatgacgtacgtattgaagataaaccactggcgaacggctgcgcgggcaaaccgattgttgagcgcggtaaagggccggaaggctggtcgccgctgtttaacggtgcggcaacgcaggccaatgccgacgcggtggtgaaggtgatgctcgatcctaaagagttcaacacctttgttccgctgggaacggcggcgttaaccaatccggcttttggcgctgatatctactggcgcgggcgcgtatgggtggatcagttctggtttggtctgaaagggatggagcgttacggttatcgtgatgatgccctgaagctggcggatacgttcttcaggcacgccaaaggattaaccgccgatggcccaattcaggagaattacaacccgctgacaggcgcgcagcaaggcgcaccaaatttctcctggagtgccgctcatttgtatatgttgtataacgattttttccgtaagcagtaa

SEQ ID NO: 477482 - DNA, 141 bp, Shigella flexneri; identical to SEQ ID NO: 29621

SEQ ID NO: 477483 - DNA, 273 bp, Shigella flexneri
atggcactcccccgtattacccaaaaagagatgactgaacgcgagcagcgtgaacttaaaacactgctggatcgggcgcggattgcgcatggtcgcgtactgaccaactccgaaaccaacagcattaagaaagagtacatcgataaattaatggtcgagcgtgaggctgaagcgaaaaaagcccgccaattgaagaaaaagcaggcttataaaccggatcctgaagcgtcatttagctggtcagcaaatacgtcgacgcgcggcaggcgctaa

SEQ ID NO: 477484 - DNA, 309 bp, Shigella flexneri
atgaatgtagaaaaagaaatttatacagggctttatttgtttggaaatatgaaattgaacacatcatgcggaggtgtatctgcagttatcaaagtaccgacatataatagtaatgttttattttttataaatgattcacatgtaagtgaagaagatagcatggaaaatgcgaaatgttataaatttaacttagaagaattagaaagtatacaaaaggtgattgaaagagctttaaatgacatacgaaatctagagtctttatcacgcaggaatttgcttaaggataaagcttatagaaaccccatataa

SEQ ID NO: 477485 - DNA, 3669 bp, Shigella flexneri
gtgattgaggacggctcccccaatgtctttctcggcggcggtacgcagacggtactggaaatcagcccggaaatccctgactggctgcgtcaggtggtggatgtgctgtatgtggtcgccggaatgcttggcgggctggctggcgcctggcgtcaggcggcaaagatggggtcgaaatttggtacaaaatgtgcggcaaaatttattggtggcgaaatggtcgggatggccatctctgacacagtcatgggattgttcagcaatccggtagatgtcaccactgggcaaaaaattttgctgccggagacggattttaccctgccaggacgcctgcctgtcacctgttcgcgcttttacgccagccacctggaaactgaaggattgctgggcagaggatggcggctgaactgggagataaacctgcgtgaggatgaaacatatatcaccttcatcggtgtacagggtcgggaactgagttatccgaaagagatgctgataccgggccaccagatattcgacccggaagagcagttttacctgagccgtctgcatgacggatgctatgtgctgcattacaccgaccgcagctattacgtgtttgatgaatttgatgaccacggcgtcgcgccgttactttttatggagacgccgtaccggcagcgtattgctttcgggcgtgagaacggcaggctggtgcgggtggcctccagcagcggacaccatctgttattgcaccgcacgatgacgcaagcaggggaacgcctgtcgcatattgaacttgtgaagggcgggcgtcccggtaacctggtggaatatcgttacgacgataacgggcaactgactggcgtggtgaaccgggctggtgtgacggtgcgacagtttgcctatgaaaatggcctgatgacagagcatcgcaacgcgacgggctttacctgtacctaccactgggaagagattgaaggtttcccgcgcgtggtggaacacacgaccagcgacggcgaggattaccggttccactatgattttgctggcgggcagacggtggtaaccggcaggccggagcagaagtggcagtggtggtttgatgaagagacgtatgtgactgcgcaccggacgccgggcggcggaatgtaccgcttcacgtacaacgaaaaccattttccggtagcggtggaactccccggcgaacgcagggtaacgctggaatacgacaccctgagccgggtggtgaaagagacggacccggcaggccgggtgacacagacgcagtggaacggcagttttgctgaaatcacgcgccgggcgctggatgacgaccacgtatggaaggcggattacaacgaacacggccaggtgatacgggagacggacccggaagggcgcgtcacgcggtacgggtatgatgaacaggggctggcggtcagccgcacggatgcgcggggcggcgaggttgcgctggcgcacgatgcgcgcggtcaactgaggcgttacaccgactgttcagggtgcgccacgggttatgaatacgatgaagacggcaacctgacggcggtgacggacgcggaggggaaaacggtacgcatcagctataaccgtcaggggctgccggagacggtctgccaccccggtaaacagcaggaccgttacacctggaacgcgctggggttactgagcagccaccgtcgcatcacgggcagtgtgcagtcctggcagtatacgccgcgcgggatgctggcgcgccatacggatgaagagaaacgggagacgcgctggcagtacaccccggaagggctggttgccagtctgagcaacggcaacggggctcagtaccggttcagctacgacggcgacggacggctgacgggagaacagcgcccggacggcctgataaggatgtttgcgctgaatgcggacgggtttccggtcatcatccagacgcagggcacagagggcggggtgcgcaatgaacagcaggagcgtgatgcgctgggccgcctgctgcgcagtgacacgcagcacagtacacggaccttcagctacaaccgtcttgaccagataacggaagtgacgctcacccccacggaagaaggggaacggctgcaccacatgcaggcggacacggtgcgttttgcgtatgaccgcagcgggtggctgacggcagagcacagcgtgcacggcagtatcaaataccggcgcgatgcgctgggcaatcccaccgatatcacgttgccggacgggcagcatctcagtcatctttactacggcagcgggcatctgctccagacggcactggacggtatcacggtcagtgaatatgagcgtgacagcctgcaccgtcaggtgatacgcacgcaggggaaactggcgacgttcagcggctacaacgccgacaaccggttaagctggcagcgcagcctgccaggtggcagccagaatccacagcaggccggtactcccccggcgcagaacgacagcgtgacggcgcgggactatatctggaacgcagacggtgaagtcggcggcatcaatgacaaactgcgcggttgcctggtgttcagctatgaccgcagcggctggctgaccagccgcacggggcagatgtatgaccatgaccattattattacgacaaagcgggcaacctgctgacggatgagtatcagggagcggtgatggataaccgcctgccgggttacgggcgtgaccgctaccgctataacgaatggggcgaactgacagagcgcagggaccagcagctggagtggaacgcgcagggccagttaacgcgggtcatcagcagcaacagcgagacgcggtatcagtacgatgcgctgggcaggcgcatcagcaaggcgaccagcaatctccataccgaccggggagaacgaagccggacaacgtttgtgtgggaagggttccggctgttacaggagacaacgtggcagggaaagcggacatacctgtacgatgcggaacagccgtacacgccggtggctgccatcacggggcgcggagagagccagaaaatctggtattaccacacggacctgacgggcacggtacacgaggtaaccgcgccggacgggacgctggtgtgggcgggctaccaggcgggatttggcgaaaaccggggcgacatcagcaacagcggggcgtactttgagcagccgctgcgactgccggggcagtattatgatgaagagacggggctgcactataatctgttcaggtattatgcgccggagtgcgggagattcgtaagccaggatccgatttcgatccgtggcggtctgaatctttacaggtatgcgccgaatccgctgacgcatattgatccgttaggactaatggatccttttgacttatggtttactcaaaacacaatatcagacgtgtttacacaaggaaaatgggccgggagatcggttgaagaagcgattcatgaggctagtgtcacggggcggcttcctgatgggctgagtattagttatgaaaagataattctgccaagcggggaggaggtttgggcgactctaaataatcgtacgctttatgtggcccaacaggcaaatgttacaattaacccagtagataaaaatggaaaaggattaaatcagttgaataaacttttggatggaagggcacccctccagaacaaccggatgttttaa

SEQ ID NO: 477486 - DNA, 543 bp, Shigella flexneri; identical to SEQ ID NO: 468962

SEQ ID NO: 477487 - DNA, 1083 bp, Shigella flexneri
atggcttattcaccaccgacattatcatcgctgattgcccgtacagaacagaatattgaacagcgcctgccgggtagctggcctcaggcccgtgaaaaaacgctgagtgccattgcttatgctcaggcgggccttgctgccggttgtcacgagcatatttcatgggtcgggcgacagattatcccgtcgacagcagatgaagatgagttgctggagcactgccggttctggggcgtgcgccgcaaacaggcgacagccgccagcggcccgctgactgtcaccacatcggcagcgaccaccattcctgccggtacacgctggcagcgtgctgatggtgtggtttacagcctggctgatgccattgtgattgaccgtgcaggaacgacggaaattaccgttaccgcactggctgccggtgaggcaggaaataccggtgagaatacccttttaacgttgattactccggttgcctgtgttgtttccgatgccatcactgtaaaagggttttccggtggagctgatattgagagtgcagcggagctgctgtcacggctggaatatcgtgtccagtatcctccgttcggcggtaatcagtttgattatgttcgctgggcgcgtgaagtcagcggcgttacccgtgcctggtgttttccgacatggaaaggcggtggcacagtcggggtgacgtttgttatggataaccggagcaatatttttccacaaccggcagatgtggaacgtgtggcggattatatcgccggtcatactgacccgataaccggcctgattgtcgggcagcctgatggtgtaaatgtcacggtatttgcgccagagtcaaagccggtaaatccacggatttatatatcaccgaagactgccgaactgaaacaggccattacccacgccattaataccatgttttttaatgaggtgacgccgggcggtgcacttgccccctcccgtattatccgtgcggtggcaggtgttaccggtctggatgattttgaagtgcgtttcccgacagagatccagcgttcggagaatacggaactgttaacaccggggacaattgaatggctgtaa

SEQ ID NO: 477488 - DNA, 438 bp, Shigella flexneri; identical to SEQ ID NO: 468960

SEQ ID NO: 477489 - DNA, 594 bp, Shigella flexneri; identical to SEQ ID NO: 468959

SEQ ID NO: 477490 - DNA, 1134 bp, Shigella flexneri; identical to SEQ ID NO: 468958

SEQ ID NO: 477491 - DNA, 1488 bp, Shigella flexneri
atgtttgaagatgctttaaatgccgttaatgctgtccgggataaaaccggtggaggcaggaaaacaaccggcaaaggcacgttccgtaacgtgccgtttctcgtcatcgaggagcaaaaacaggctggcggacgtcgcctggttaaacgcgagtacccgttacgtgataccggcggcgtcaatgacctggggaaaaagcttcgctcccgtacattcagcgcctgcattctgaacagtaacgcagaaacagccagagatgaagcggatgcgctgatggatgctcttgatgctccgggcagcggtgagctggtacatcctgatttcggcactgtggacgtcatggtggattcatgggaatgccgcactaaagcggatgaactgaattattacgcgttcaccgttaccgtttatccgtcgttgcaggatactgccccggacgcagaaacagacaccagtgcagccgtaccggcacaggctgttgctgtaaccggttctctgggggatacgctgtcctctgtctggcagaccgtaaaagatggcactgcggcggcaaccgccgtgatggaagctgtaaccggtgtcatcgatgatatcagtgatgcggtggacaatctgggggttacgcagactgtcagcggtctgatgggatcgctttctgcgatgaaaggctctgtgaccagcctgattaaccagcctgccatgctggcctcctcgctgatgggggcgctgtccggcgtttcatcgttatgcgatacccggacagcattttccacatggaaccgtctggcgcagcgattcgaacgtcgccatgccgccaccgcaggcagacagggggcaatcacaacctcgtacaacagtccggttgcagaaaaaaatattgccacactgaactacgtcatgctggcagcggcgcagacataccgggcagaagctgccagccaggcactgactgcggcactggatttcagtcgccggatggataatgccgcccgtacacctgtactggatgccccgtccaccacaaccggcacagccagcggggccagcagcacatctgctaccgtcacacagggacagttacagttaactaccataaccccggacggcggcttttcacaggtatccttttcagacagtggtacagccacgcccccggtatttgaaagtgtgtccgatatcggaaaaacagccgccatgctgggggctgcactggataccgtcattctgacggcatctgagcagggcttttcgacagacagcgttcagcttacgcaactgcgtctgctggttgttgccgatctggaaaaacgcgggctgcaactggcgggcagtgaaacgcaccgcctgccggagacgatgcctgcaatggtggccctgtaccgttacacaggaaacagccggaactggcaacggctggcccgcaggaacggtatcagcaacccgttgtttgttcccggtggcgtcagtattgaggtgattaatgagtaa

SEQ ID NO: 477492 - DNA, 2073 bp, Shigella flexneri
gtgaccgggaaacgcttaaaagcgtctgtcattattgatcttaatggcaatctttcccggcgttcccgccagtattcgaaccagataaacgccctgtcccgtagcggacaaagttccctgcgtgccctgcgtatggaggttgtgcgcgtttctggtgccattgacagaatgggttctctgtcaacccgtacattccgaatgctgtcagccggggcgctgggtatcgctggcgtgggttacaccgccaataaactgtttattggtgcagccgcccagcgtgagcagcagattatcgccatgaactcgctctatcacggcgataaggccagagcacaggccatgatggcgtgggcgaagcagaacgcaaaagaaaccacctgggggctgggtggtgttctgcaggagatccgcacatcaactgcgtttggcatgactgatgcccaggtaaaacagttcatcaccatgctacagaaccagggggcgatgcacggctgggatttacccactgcacagggggcttcgttacagttcaaacagatgtttgcccgtcagcaaatcacagcggcggacgccaacctgctgaccggctacggtatcaacgtctacaaggtgctggcagatgcaacgggtgaggatgagaaaaaaatccgtgatctgggtacaaagggcaagctgggcctgaaatccatcctgacggtgttcagaatcttactggaacagtcaaaaggcgcacaggcggctgccatgaactcctgggacgggatgatggcccagatggagggcaacctgcttgagtttcgcacaaaggtggccaacagcggcccctttgaagaaatcaagaacgagatgcgccgggtgcttgactggcacgacatggcggataaatccggggaacttgacgcactggcgcaaaacattggtcagaagtttctgaccacattcagaacggtgaaaatcgcggcgcaggaattatggcgctggctgaaaccgggtaaagatgcgctggcatgggttgaccagaatattgtcagcctgaaaaaactggctgctgttctggtgtctgtctggcttgccaataaagccctgagagcaggctgggccgtggcaaaaccctcatggcaggttgccagttatccgtttaaaaccgggcgtcgtatgtggcgctggatgcggaaccgcaaacgtgggcgggcaggtctgccggtgccggatgccatgacgtctgagacgctgttgcagggcaccggcattcagcgtgtgtttgtcatcaactggccccgtggatttggtggctacgggagtggcggcggtcgtcgcggacggagcggcggaagaatggccccgctgttaccccgccagccgttattgctgtccgggccacagccgctggcattacctgcaccacgccctgtactggcattacccccacccggcgtaccggtaacagcacggcctgcaccattacctttacccggtaaatccggtcttctgagcagacttgcaggcagtgctgccgggcaactggttacgggaacggtcggaaagctggctgatgccgggcgtgccgctggcgggtggttttccggtatcggaaacaaacttgcaggcagtgcgatcggtcgggttgtgacaaaaggtgccggggcgctgggctggatggggaaaggtgccggtcgtgcgttgtcacgtctgggtggcccggtaatgggggcactccagcttgcccccgtcctgatggatgagcaggcgtcaacccatgaaaaagcaggcgcaattggcagtacagccggtgcatggctcggcggtgccgttggcagccttgccggaccgctgggtacggttgccggtgccacgctgggcagtgtcgccggggagtatctgggcggttttgtaaccgacctgtatcagaaatggacggccccggataaggaaccgcaggaacaaaaagtgaatgcggaagcctcgctgcgcgtcgaacttggcgaggggttacgcctgaccagttcccgtgtcaccgaggatggtatggggctgaatatttacacgggcgataactacattacgggctggtaa

SEQ ID NO: 477493 - DNA, 435 bp, Shigella flexneri
atggacgaaatgaatttaagtgaggaagcacaggaactgcatgacagcattgtggcagagcttcagtccggcgtgctgaaactgaaagacggcctgccgttcggcaccggcgacgagactgaaatgcagtatgacgtgacgctgcgtgaactgaccgcaggcgatctgattgatgcccaggtggctgctgaaaagctggtaatgagcaaggaaggtccggtgctggtcagttccccgtccctgatggggctggaaatgctgcgccgacagattgccagcgtgggctgcatcaaaggcccgttgtcgatggcgctgatgcgtaaactgtccgtcgatgacttccagcgtctgtcgctggccacagaaatgtacgacatggccgtggcagcatcgctgacgcaagaacgggggcgagtggctgcggtgccggaatga

SEQ ID NO: 477494 - DNA, 357 bp, Shigella flexneri
atggctggaaatcagcgtcagggggtggcgttcatccgtgtcaatggcatggagcttgaaacgatggaaggtgcctccttcacaccttccggcatcacccgtgaagaagtgaccggctcgcgggtttatggctggaaaggtaaaccacgtgccgcaaagctggaatgcaaaattccgggcggtggtgatatcggtctggatgaaatcatcggctgggaaaacatcacggcagagtttcaggcagacaccggtgaaacctggatgatggcgaatgcctggcaggcagatgaaccgaaaaacgacggcggcgaaatttcgctggtactgatggcaaaacaaagcaaacgcattgcataa

SEQ ID NO: 477495 - DNA, 1488 bp, Shigella flexneri
atgagcgatatttcatttaacgcgatcccgtcagatgttcgcgttcctctgacgtatatcgaatttgataacagcaatgccgtcagcggaacaccggctccccgccagcgcgtgctgatgttcgggcaaagcggaagtaaagccagtgccgcaccgaacgtgcctgtccgtatccgttccggctcacaggccagtgcggcgtttggtcagggttccatgttggcactgatggcagatgcattcctgaacgctaaccgcgtggcggagctgtggtgtatcccgcagggaaacggcaccggtaatgctgctgtcggtgaaatctcactgtcaggaacggcaggcgaaaacggctcgcttgtgacctatattgccggtcagcgactggcggtatccgtcgcagcaggtacaaaaggggctgcgctggctgacctgctggttgcccgaatcaaaggccagccggatttaccggtgacggcagaagttcgcgcagacagcggagatgatgacacccatgcagatgtggttctgagtgcaaaatttacgggtgcattatctgccgtggatgtgcgctggaactattacgcgggtgaaaccaccccttacgggattatcacggcattcaaagccgcctccggtaaaaatggcaacccggatatcagcgcaagtatcgcgggaatgggcgatctgcaatacaaatatattgtgatgccctataccgatgaaccgaacctgaatctgttacgcactgaattgcaggaacgctggggaccggtcaatcaggctgatggctttgctgtgacagtgctgtccggcacgtatggggatatttccacgtttggtgtcagccgtaatgaccatctgatttcctgtatggggattgccggtgcaccggaaccgtcatatctgtacgccgccacactgtgtgccgttgccagccaggcgctttccatcgacccggcgcgtccactccagacgctgacgttgcccggaagaatgccgcctgcggtgggggatcgtttcacctggtcagaacgtaatgcgctgctgtttgacggcatctccacgtttaacgtgaatgatggtggtgaaatgcagattgaacgcatgatcacgatgtaccgcacaaacaagtacggtgacagtgatccgtcttatctgaacgtgaataccatcgccacgctgagttatctgcgttattcgctgcgaacccgcatcacgcagaaattcccgaactacaagctggcaagtgatggcacccgctttgccaccggccaggccgtggtgacgccatccgtgatcaaaacggagctgctggcactgtttgaagaatgggaaaacgccggactggtcgaggatttcgacacgttcaaagaggagctgtatgtggcacgtaacaaggacgacaaagaccgtcttgatgtgctgtgcggcccgaatctgattaaccagttccgcattttcgcggcacaagttcagttcattctgtaa

SEQ ID NO: 477496 - DNA, 207 bp, Shigella flexneri; identical to SEQ ID NO: 374123

SEQ ID NO: 477497 - DNA, 549 bp, Shigella flexneri
atgctggaagaaaccgaagccgcactgctggcgcgcgttcgtgagttgtttggggcaaccctgcggcaggtggaaccccttaccggcacatggactaacgaggatgtgcaccgtctctttctggcccctccatcggtatttctggcatggatgggctgtggtgaggggcgtacgcgtcgggaagttgaaagtcgctgggcattttttgtcgtggcggagttgctgaacggggaaccggtaaaccggcccggtatttatcagattgtggagcgactgattgccggtgttaacggtcagacgtttggcccgaccaccgggatgagactgacgcaggtcagaaatctttgtgacgacaaccgtatcaatgccggtgtggtgctttacggcgttctgttcagtggcactaccccgctgccgtccgtggtggacatggattcgctggatgattacgagcgtcactggcagacctggaaattcccggacgaaaccccggaatttgccgcacatatcaatgtgaatcaggaaaaggatcatgatgctgaaaattaa

SEQ ID NO: 477498 - DNA, 426 bp, Shigella flexneri; identical to SEQ ID NO: 374125

SEQ ID NO: 477499 - DNA, 411 bp, Shigella flexneri
atgtcaggcacttcgcttaattcacaacggctggacacttctcgcatcacttgcacggcgattattaaatgccttcgtccggtctaccgccgcgccggaatcgcctttacgcgtggcgaaaacaccgtggaagtcaccgaagaacaactggcgatcattcgtgccgacagcgtgctgtctgtggtatctgcatcgtcagcagaaacgctcgctgaggctggggggctggacgttctgggtgtgggcgatctgaatacccgtatctgtgcgaccgttgccggtctggataaggcaaacccggagcactttaccgcagggggggaacccaaagtgaaagccgtcagtgcggcgctgggggaaccggtgagcagtgcgcaaatcaaagcggcgctggctgaggcggatgcatga

SEQ ID NO: 477500 - DNA, 918 bp, Shigella flexneri
atgattgtcaccccggcatccattaaagccctgatgacctcctggcgtaaggattttcagggcggtcttgaagacgccccgtcgcagtacagcaaaattgcaatggtggtgaactcttccacccgcagtaatacctatggctggctgggtaaattcccgaccctgaaagaatgggtgggtaagcgaaccattcagcaaatggaagcgcatggctactccatcgccaataaaacgtttgaaggcaccgtgggtatttcccgtgatgacttcgaggatgacaatctgggtatttatgcgccgatttttcaggagatgggccgttctgcggcagttcagccggatgagctgatttttaaacttctgaaagatggctttacccagccctgctatgacggtcagaacttcttcgacaaggagcatccggtatatccgaatgtggatggcacgggcagcgcggttaatacctccaacatcgttgagcaggacagcttcagcggtctgccattctatctgctggactgctcccgcgcagtcaaaccgctgattttccaggagcgccgcaaaccggaactggtcgcacgaacccgtatcgatgacgaccacgtttttatggataacgagttcctgtttggtgccagcgcccgccgtgctgccggttacggcttctggcagatggctgtcgcggtaaaaggcgatctgacgctggataacctctggaagggctggcaactgatgcgctcttttgaaggtgatggcggtaagaagctgggcctgaagccgacacatatcgttgtaccggtcgggctggaaaaagccgcagagcaactgcttaaccgtgaactgttcgcggatggcaataccaccgtctccaacgagatgaagggcaagctgcaactggttgtcgctgactacctgtaa

SEQ ID NO: 477501 - DNA, 1086 bp, Shigella flexneri
atgaaaaaacacgcgattggcattgccgcactgagtgcgctgtccattgacgatgacggctggtgccagctattgcctgccggtcatttcagtgcccgtgatggtcgtccgtttgatgtgacaggcggtcaggggtggttcatcgacggtgagattgccgggcgtctggttgaaggcgttcgcgcgctcaaccaggacgtgctgattgattacgagcataaccagctacgtaaggacaaaggattacccccggaacaactcgtcgcggctggctggtttaacgccgatgaaatgcagtggcgtgaaggtgaaggattatttatccacccacgctggacggcggcggcccagcagcgcatcgatgacggcgaatttggttatctctctgcggtttttccgtatgacaccgacaccggtgcggtgctgcaaatccgccttgctgcgctgaccaatgaccccggtgccaccggcatgaaaaagctgaccgcactggcggcagaccttcccgacatccttcaacaggagaacaaacccatgaatgaaacgctgcgcaagctgcttgcgcgtcttggggtgacggtccccgaaaatgcagacatcaccgatgaacaggccagcgcggccctgagtgcgcttgatgcgctcgaaacagatgccggaaaagtggcgtcgttatccgccgaactggaaaaggcacagaaagccgccgttgacctgacgaaatacgtcccggtggaaagctacaacgccctgcgtgatgaactggcacaggcgactgcacaaagcgccacagccagcctgagcgccgttctggacaaggcggaacaggaaggccgcattttcaaaagcgaacgcacttacctggaacagcttggcggtcagattggcgtggcggcactgtcggcacagcttgagaaaaaacagcccatcgctgcgttatctgccatgcagaccaccacagcgaaaatcccgtcgcaggaaaaaccggcggtggcggtgctgtctgctgatgaacaggcagcagtgaaggcgctcggcattactgaggctgagtatctgaaaatgaaacaggaacaagaaaaatga

SEQ ID NO: 477502 - DNA, 471 bp, Shigella flexneri; identical to SEQ ID NO: 468946

SEQ ID NO: 477503 - DNA, 1320 bp, Shigella flexneri
atgccgcagcagaccattgatctggcgtatgccgcacgcctcccgccaaaggaggctgtcgcgtatttccgcgccaaaggctacaacatcacctggaactggtacgaacaactggcagacgcgcacgcccgcgcctttaccgttgccaaagccacccggatggatgtcctgaccacaatccgtgaggaagtggagcgggctgtcagtgaaggcatcacccgtgaggaatttacccgcacactggccccccggctgcaaaaactcggatggtggggaaaacaaatcatcgtggatgcagagggaaacgcaaaggtaatcgagctgggcagtccgcgtcgtctggcaaccatttataacgtcaatacccgtacggcgtatggggcaggacgttatgcgcagatgatgaataccgcagatttgtatccgtactggcagtatgttgccgttatggatggcagaacacgcccggaacatgcgcggctgcacaatatggttttcaggtatgacgacattttctggcagacgcattacccgcccaatggctggaactgccgctgtcgcgtccgggcggtgtctgcggcccgcatgaaagaactggggctacaggtcagttatggtgcgtcattcatgaacacccgcgaagtggatgccggtacggatgaaagcaccggagagattttccgcacatcgtcaaccacatttgacaacggtcgggtaaaaatgacgccggatgtaggctggtcatataaccctggttcggcggcatttggtacggatcaggcactgattcgaaaactggtggaaattcacgacgcgcagctgcgtgagcaggttgtgcagacactgaataacagccgggagcgtcagcttgctttttccctctggcttaaacgcctggcaggatcacgtcaggccggtcatgaaatccgggcgctgggttttatgacgggatccgtggctgaagccgtatatcagcgcaccgggaatatgccagcccgtttgcttgtaatgaacgggaaaagtctggcgaccactgctgatgccgccctgaaaccggaagatttacagcgtctgccgtcgctgatggcaaaaccacaggcggtattgtgggacagggagaaccaccagttgctgtatgttgtggcaacccgcgacggcactgcaaaagttgtggtcagaacatcgcaggctgtcagcaaacagaatgaccgggcggatgtgctggtcagtatcagccgcgtatctgcactgtcgcttgaagccgcgattgctgacgggatgattgacatactggaggggcatgtggaggtgaataagtga

SEQ ID NO: 477504 - DNA, 1539 bp, Shigella flexneri; identical to SEQ ID NO: 14320

SEQ ID NO: 477505 - DNA, 1656 bp, Shigella flexneri; identical to SEQ ID NO: 14321

SEQ ID NO: 477506 - DNA, 576 bp, Shigella flexneri; identical to SEQ ID NO: 151125

SEQ ID NO: 477507 - DNA, 291 bp, Shigella flexneri
atgattaacgatattctgaccgaagaccgtcgtctggtcatcctgcgttccctgatggactgcaataacgaagcaaacgaatccatccttcaggactgtctggatgcatacggacacaacgtttcccgcgatgtggttcgcggccagattgactggctggcagagcagcaactggtcaccgtggaaaacctgcgcggcttttatgtcgtaacgctgacctcccgaggtcaggatgtggcggaaggtcgtgcccgcgttgccggtgtcaagcgtcctcgtccccgtgcatga

SEQ ID NO: 477508 - DNA, 300 bp, Shigella flexneri; identical to SEQ ID NO: 14324

SEQ ID NO: 477509 - DNA, 195 bp, Shigella flexneri
atgaacgaagaccagaaccgggcggtggcgctgctgctcgctgaactctggcagggggatacccgtgatattccccgcccggcggcgtatgacccgcctgtattgtgtcccggttgcggtcgtgagctgcggcctgatgtgctgagacagcagccgatggcgaactactgccactggtgccgtggagcagaataa

SEQ ID NO: 477510 - DNA, 387 bp, Shigella flexneri
atgaccttcgccagtaaaagtttactgctggcagctgtgcttgccgccgttctgtccggggtgttgtggcacaggctggacagcacccgcctcgataaccagacgctgcgccgtgaattacagacgcagcaacaggcccgcaacacggctgaatggttgttacacggtcaggaacagacgatgcaggtattttccgctatccgtgccgcaaaccgtgccgcccggctggcagatgaggcagaacatcatgatgcaaaagaaaaaattacagccgccattaccggtgacgattgcagcactcgtcctgtgcctgccgttgctgctgacaggttgcgggaactcgaaaaacgcacccgtgccatcggtggtgatcctgcccgaaactga

SEQ ID NO: 477511 - DNA, 516 bp, Shigella flexneri
atggcggggatccccaaaaaactgaaagccgcactgctggctgtaacaattgccggtggcggtgtgggtggttatcaggaaatgacccgtcagtctctgatccatctggaaaatatcgcttatatgccttaccgcgatattgccggtgtgcttacggtctgtgtgggacataccgggccggatatcgaaatgcgccgttacagccatgcggagtgtatggctctcctcgacagtgatttaaaaccggtttatgcggcaatcgatcgtcttgtcagggtgccgctgacgccctatcagaaaacggcgctggcaacgtttattttcaacaccggtgttaccgcattcagtaaatcaacgctgctgaaaaaactcaatgccggtgattacgccggagcgcgtgaccagatggcccgctgggtgtttgccgcaggccataaatggaaaggactgatgaaccgtcgcgaagtggaaatggcaatctggaatatcaggggggcggatgaccttcgccagtaa

SEQ ID NO: 477512 - DNA, 423 bp, Shigella flexneri
atgcagcatgatttatttgaacacgatccggcaattcgccagttaatcggacatattgataacatcccggccccggaactggaatcacgctggccccgttcggtggttgatctgattgatgttctggaaaacgaactgaaacgccagaacgtcagcaatccccgtgaacttgcccgtaaacaggccgttgccctgtcctgttttctgggcgggcggcagttttatatcccctgcggcgatactatcctgaccgcgttacgcgacgatttgctttactgccagtttaatggtcgtaacatggaagaactgcgtcgccagtatcgcctgtcccagccgcagatctaccagattattgcccgccagagaaagctgcatacacgacgtcatcagcctgatctgttctcacctgaaagcccaaaataa

SEQ ID NO: 477513 - DNA, 231 bp, Shigella flexneri
atgggtaaaggctggaatgcatcctttcatcttggcagacgtgagcggctgcgtcaggaggttttacaccgtgtcgccggtgggccacggccttcgccccgcgactataccggtcatgatggcacccacggcagttattacatgaaaggctggcagtcagttgatatgccggaaattcttcaccactgtcaacgttataaggaaaaatattgtgtacagaaaattcagtga

SEQ ID NO: 477514 - DNA, 390 bp, Shigella flexneri
atgacggaagatttatttggtgatttgcaggatgacaccatcctggcacatcttgacaatcccgcagaggatacgtcacgctttccggcactgctggcggagctgaacgatttactgcgcggggaattgtcccggctgggcgttgatcctgcccattcactggagattgttgtggctatctgtaagcatctgggcggcggtcaggtctacattccacgcggtcaggttctggactcgctgattcgggatttgcgtatctggaatgattttaacggtcgtaacgtcagcgaactgaccacccgttatggtgtcactttcaatacggtttacaaggccattcgccggatgcgacggctgaaataccgccagtaccagccctcacttctgtaa

SEQ ID NO: 477515 - DNA, 552 bp, Shigella flexneri
atgagtcgcacatccctgattaaattaatccatgtcgcccgtcgggagctacaactcgacgacgacacttaccgcgcttttctgatgcagaaaacgggcaaaatcagttgccgcgagcttacggttacgcaactggaacaggtgctcgatgccatgaaagaacacggctttaagaagcagaataaacacccacgccgtcggtttaaggggcatgtcacgccccgcgagaaggtgtacaaagtctggcagcagatggcagaagacggttttattaccgatggcggtgatgtggcgctggacagatatgttcaacgcctgaccgcgaaacgcaacggcggacagggtgtttccacactggcgtggtgtcatggcgacacgctgctgacagtcctcgaaacactcaagcagtggcacatccgctgtattcgtgaagccttttcccgtcacgggcttccattgccggtcagtccgtccgggcgtgaactgcgcggctatgatgccatgacggcggcttatgcccgtgccagaaaaacacggaggatggcacaatga

SEQ ID NO: 477516 - DNA, 360 bp, Shigella flexneri; identical to SEQ ID NO: 30489

SEQ ID NO: 477517 - DNA, 291 bp, Shigella flexneri
atgaataatgaaactaaatttacgcctaaagacctggatgaagaactggtgaaagctaagatgcttgagcgtatgcgcgatgttattgagactgcaatcagtaaaggcttttctgcgagagaggcccttgaaattatgacacgggaaattcatctcatccgcgacgaagttttgttgcataacaaaaaagcccacaacaatattgtttgtcgtgagcttggcgttgatgattcagcggttattccacagcgtcagtatctgtgtgctctgatgagaggttcccggcattaa

SEQ ID NO: 477518 - DNA, 183 bp, Shigella flexneri
atggaaaacaatgaaacatcgtattcgtggctgggggcattcaccacggtgaaacaggaatgccagacctgcggtaatgaatcccctgaatatctgaaagagtgccctcattgtggcgggcagaaatgcaaccactgcgatatgggcgatgacacggcgtgcatgaattgtgaaggtgaataa

SEQ ID NO: 477519 - DNA, 531 bp, Shigella flexneri
atgttttttaaaacgtcaaatcccgcagcactgcaggcatgggaccagtttatggcggactgcctgaaactacgcgaagaagcccgccatcttgataaggttctgggctgtggttgccggtcagtattcagcacaggtattggtgggcgtcattttcatggcgtgaatttttcgggggatgagcgccccttctcgcgggagctgtggaccgtacaacggcccgcatcaggtaacagttgcaggcccagaacttcgcggatacctgctcatctcagggagcaggcaagagagctggcgaaaatatggcaggagaatattccggtcacttacgcccgcacagacgctcttttacccgcactgggactggatttcagcgcaacaatattcgggccgctccagtggttccgtgttggtgatgtggtttacgtcatgacggggatgacacccgcacaaggccgcatgactgaaatcctttctgacgaatttattcgggcgcaaaaacaggcggaggtaaacaatggaaaacaatga

SEQ ID NO: 477520 - DNA, 531 bp, Shigella flexneri; identical to SEQ ID NO: 468927

SEQ ID NO: 477521 - DNA, 549 bp, Shigella flexneri; identical to SEQ ID NO: 469203

SEQ ID NO: 477522 - DNA, 525 bp, Shigella flexneri
atggctaaacccgcaaaacgaatcaggaacgccgcagcggcttatgttccgcaatcccgcgatgctgtggtatgtgatatccgccggattggggacctgcaacgcgaagcggcacgacttgaaacggaaatgaatgatgccatcgcggaaattacggagaaatttgcagcccggattgcaccgcttaaaaccgatattgaaaccctttcaaaaggcgttcagggatggtgtgaagcgaaccgcgacgaactgacgaacggcggcaaagtgaagacggcaaatcttgtcaccggcgatgtatcatggcgtcaacgcccgccgtcagtgagcattcgcggcgtggatgccgtgatggaaacgctggagcgtcttggcctgcaacgctttattcgcacgaagcaggaaatcaacagggaagcgattttactggaaccgaaagcggtcgcaggcgttgccggaattacggttaaatcaggcattgaggatttttctattattccatttgaacaggaagccggtatttaa

SEQ ID NO: 477523 - DNA, 288 bp, Shigella flexneri
atgacgtgtaatcgtaaacgctggtcacgcgaagaccgggaatttatcgaagccagtgtcggaaaaatgaccgtcgaggaaatggcgaaaaaactgaaagttgccccaaccgccctacaggcacatgccagaaggcacggaatatcgttgtgtgcataccgggtcagtgagcacgacaaatatttatgccgtgaactttataaagaagggctggctattcatgtgatagccaaaaagatggaattaagcaatcgtgctgtatccggcattgtatacagtgaatattaa

SEQ ID NO: 477524 - DNA, 420 bp, Shigella flexneri
atgaatgtcaaaatccgaaatgaaattcaggcattaatccgaattcaggaacgcaataacaacggtggtgaattacgcgagtttatttgcgcccggaaagttgatggttgtggtgaaaagacttacctgattgctttcgaccattacagcatctgtgcgcgttattgcggcgaaagcatatcccgcgccattgcatttggcggtgcgttcaacgtggatttatgggagtacgtcatggaccgggaatacatctgcgcatcagaccctgaagcccgtgaaatgtggcagcgtatctggcgcgattaccggttaatggcaaaaggctgggcgcgctgctgttattcctcgcttgccctgaaagcggttcagttatcgctgcggcatattccggcatcactgcgcgagcctctgttgtactga

SEQ ID NO: 477525 - DNA, 264 bp, Shigella flexneri
atggcaaaagtaattattgaaattaaaaatacagtatctggaattaaaggacggaatttgcgcaccagcattgcggttgacggtagtgtggaactggacggtgatgaggggacacttgcaggtctggtggcgttactggtgcttaacaaaagccagaaaataattaatgagtcagctcatgaagccattgagattttgaaaaacgatggtgtcatcacaggtggcagtgtcactgaaatggctgttgaaaaaacatgtcactga

SEQ ID NO: 477526 - DNA, 231 bp, Shigella flexneri; identical to SEQ ID NO: 469131

SEQ ID NO: 477527 - DNA, 228 bp, Shigella flexneri
atgatggcccgaaatataaaaatggcaacggatgcgcagaactggttacaggcgcgcgggagtcacgtgaatgaatcatatctcggcgtggcgcgtccgatccttgaaatcacttaccctccgatggaactggtaaaaagcgcggtcagaattatggagcataagtccggggtagcccgttctgtatggacggcccgtcttaatggttgccagattatctggagataa

SEQ ID NO: 477528 - DNA, 939 bp, Shigella flexneri; identical to SEQ ID NO: 469129

SEQ ID NO: 477529 - DNA, 399 bp, Shigella flexneri
gtggtcagatttgatccacagcagttacacagcacggtttattgctacaccctggacggtcggtttatctgtgaagcggaatgtctggcacctgttgcgtttaatgatgctgcggcaggccgtgaatatcgccgccgccagaaacaactgaaatctgcgacgaaagcagcgattaaggcacagaaacaaatggatgcactggaagtggcagagctgctgccgcagatagccgaatctgaagcaccagaatcacgaattgtcggcattttccggccttccggtaatacggaacgggtgaagaatcaggagcgtgatgatgaatacgaaactgagcgtgatgaatatctgaatcattcgctggatattctggaacagaacagacgtaaaaaagtcatttaa

SEQ ID NO: 477530 - DNA, 402 bp, Shigella flexneri
atgaataatggctgggatgaattcagcattccaaaagaggtcgctcgccagctgattgatatgcatgtacgccgcggtgacgcgatcttctttgtgactggtcgtagcccgacgaaaacagaaacggtttcaaaaacgctggcggataattttcatattcctgccaccaacatgaatccggtaatctttgcgggcgataaaccagggcaaaatacaaaatcgcaatggctgcaggataaaaatatccgaattttttatggcgattccgataacgatattaccgccgcacgcgatgtcggcgctcgtggtatccgcattctgcgcgcctccaactctacctacaaacccttgccacaagcgggtgcgtttggtgaagaggtgatcgtcaattcagaatactga

SEQ ID NO: 477531 - DNA, 1332 bp, Shigella flexneri
gtgtggctgatcctcgcaccgcgcgactatctggcaaccttcctgaaaatcggcgttatcgtcggcctggcgctgggtatcgtggtgctgaacccggaactgaaaatgcctgcgatgacccagtacattgacggtactggcccgctgtggaaaggctctctgttcccgttcctgttcatcaccatcgcctgtggtgcggtatctggcttccacgcgctgatctcttccggtacgacgccgaaactgctggctaacgaaaccgacgcgcgtttcattggctacggcgcaatgctgatggagtccttcgtggcgattatggcgctggttgcagcgtccatcatcgaaccgggtctttacttcgcgatgaacaccccgcctgctggccttggcatcaccatgcctaacctgcatgaaatgggtggcgagaacgcgccgatcatcatggcgcagctgaaagacgttaccgcacacgcggcagcgaccgtcagctcctggggcttcgtgatttcgccagagcagatcctgcaaaccgcgaaagacattggtgagccttctgtcctgaaccgtgcaggtggtgcgccgacgctggcggtaggtatcgctcacgtgttccacaaagtgctgccgatggctgacatgggcttctggtatcacttcggtattctgttcgaagccctgttcatcctgaccgcgctggatgcgggtacccgttctggccgctttatgctgcaagacctgctgggtaacttcatcccgttcctgaaaaaaaccgactctctggttgccggtatcatcggtactgcgggctgtgtgggtctgtggggctacctgctgtatcagggcgtggtcgatccgctgggcggcgttaagagcctgtggccgctgttcggtatctccaaccagatgctggcagccgtagcgctggtactgggcaccgttgtgctgattaagatgaagcgcacccaatacatctgggtaactgttgttccggctgtatggctgcttatctgcaccacctgggcgctgggtctgaaactgttcagcaccaacccgcagatggaaggcttcttctacatggcaagccagtacaaagagaagattgctaacggtactgacctgacggcgcagcagattgccaacatgaaccacatcgttgtgaacaactacaccaacgcaggcctgagtattctgttcctgattgtggtgtacagcatcatcttctacggtttcaaaacctggcttgcggtgcgtaacagcgacaaacgtactgacaaagaaacaccgtacgttccaatcccggaaggcggcgtgaagatctcttcgcaccactaa

SEQ ID NO: 477532 - DNA, 423 bp, Shigella flexneri
atggctcagctttcgttacaacatattcaaaaaatctacgataaccaggtgcatgtggtgaaggacttcaacctggaaattgccgataaagagttcatcgtatttgtcggcccgtcgggctgcggtaaatcgaccaccctgcgcatgattgccgggcttgaggagatcagcggcggcgatctgttgatcgacggcaaacgaatgaatgacgttccagccaaagcacgcaatatcgcgatggtgttccagaactacgcgttgtatccgcatatgacggtttacgacaacatggcgtttggcctgaagatgcaaaaaatcgccaaagaggtgattgatgagcgggtgaactgggcggcgcaaattctcggcctgcgtgagtacctgaaacgcaagccgggcgcgctttccggcgggcaacgctag

SEQ ID NO: 477533 - DNA, 285 bp, Shigella flexneri
atgggcgcattactggaaacagcaaagcctgccgaattacaagaaggtatgcgcttcgctcaaattgaagtcaacatggggcaatggggtgtttttcactttgacgcccagttaatctccaccagcgagcgcaaagtgattgatggcaagaatgaaaccatcaccactccccgtctgagcttccgttttcttaacgtcagcccgacggtggagcggcaattacagcggattattttctctctcgagcgagaagcccgggaaaaagcggacaaagtgcgcgactga

SEQ ID NO: 477534 - DNA, 1299 bp, Shigella flexneri
atgcgagttgtcatactgggaagtggtgtggtaggcgttgccagcgcctggtacttaaatcaggcaggacatgaggtcaccgtcattgatcgggagccgggggccgccctggaaaccagtgccgcgaatgccgggcaaatctcccccggatatgctgcaccgtgggcagcaccaggtgtgcctttaaaagcgattaaatggatgttccagcgccatgcgccgctggcggttcgtctcgacggtacgcagtttcagttgaaatggatgtggcaaatgttacgtaactgcgacaccagccactacatggaaaacaaagggcggatggtgcgtctggcggaatacagccgtgattgcctgaaagcattgcgcgccgaaaccaatattcagtatgaagggcgtcagggtgggacgctgcaactgttccgtaccgaacaacagtatgaaaatgcgacccgcgatatcgccgtgctggaagatgccggcgtaccgtatcagctgctggaatccagccgcctggcggaagtggatcccgcgctggcagaagtagcgcacaaactgacgggcggcctgcagttacccaatgatgaaaccggagactgccagctgtttacccagaatctggcgcggatggcagagcaggcgggggttaaattccgctttaatacgcccgttgaccaactgctttgcgacggcgagcaaatctacggcgtgaagtttggcgatgaagtgattaaggccgatgcgtatgtgatggcgtttggttcttactcgacggcgatgctcaaaggcattgttgatattccggtgtatccgctgaaaggctactcgctgactattccaattgcgcaggaagatggtgcgccagtatccaccattcttgatgaaacctacaaaatcgccattacccgtttcgataaccgcattcgtgttggcggaatggcggaaattgttggttttaacaccgagctgttgcaaccgcgtcgtgaaacgctggaaatggtggttcgcgatctctatccacgcggcggtcatgtcgagcaggcgactttctggacgggtttgcgcccgatgacgccagacggtacgccggttgtcgggcgtacacgctttaaaaatctgtggctgaataccggtcacggcacgctcggctggacgatggcttgcggttccggtcagttgttaagcgatctgctctctggtcgcacgccagcgatcccatatgaggatctaagcgtagcgcgctacagccgtggatttacgccatcacgtccgggccatttacatggcgcacacagctaa

SEQ ID NO: 477535 - DNA, 1029 bp, Shigella flexneri
atggcgacgatcgattctatgaataaggacaccacacgtttgagcgatggacccgactggacgttcgacctgctggatgtttatctggcagagatagaccgggtggcgaaactctaccggctggatacctacccgcaccagattgaagtgataacctcagaacagatgatggatgcctattccagcgtcggcatgccaattaactatccgcactggtcattcggtaaaaagtttatcgagactgaacggctgtataagcacggtcagcaagggctggcctatgaaatcgtcattaactctaacccgtgtatcgcttacttgatggaagagaacaccattaccatgcaggcgctggtgatggcacacgcctgctatgggcataactctttctttaaaaacaattgcttattccgcagttggaccgacgccagttcgattgtcgattatctgatttttgcccgtaaatatattaccgagtgcgaagaacgttatggcgttgatgaagtagaacggcttctggactcgtgccacgcgctgatgaactacggcgtggaccggtacaaacgcccgcaaaaaatctcgctgcaagaagagaaagcccggcagaaaagtcgcgaagagtatctacaaagtcaggtcaatatgctctggcgtaccctgccgaagcgcgaggaagagaaaacggttgctgaagcgcgccgctatccgtccgaaccacaagaaaacctgctctattttatggagaaaaatgcgccactgctggaatcatggcagcgtgaaatcctgcgtattgtgcgtaaggtgagccagtatttttatccgcaaaaacagactcaggtgatgaacgaaggctgtgcgaccttctggcactataccatccttaaccatctgtatgatgaagggaaagtaacggaacgttttatgctggagtttttgcacagccacaccaatgtggtcttccagcccccctataacagcccgtggtacagcggcatcaacccgtatgccctcgggttcgccatgttctag

SEQ ID NO: 477536 - DNA, 858 bp, Shigella flexneri
atgattgaactcggctgcggcggctggatggctgacttcggcgagtatctgcccaccgacacgtacctgcataacggcgtcagtgccgaaattatgcataacgcctggcctgcgctgtgggcgaagtgtaactacgaagcccttgaagaaacgggcaagctcggcgagatcctcttctttatgcgcgccggttctaccggtagccagaaatactccaccatgatgtgggcgggcgaccagaacatggactggagtctcgacgatggcctggcgtccgtagtcccggcggcgctgtcgctggcaatgaccggacatggtctgcatcacagcgacattggcggttacaccaccctgtttgagatgaagcgcagcaaagagctgctgctgcgctggtgcgatttcagcgccttcacgccgatgatgcgcacccacgaaggtaaccgtcctggcgacaactggcagtttgacggcgatgcggaaactatcgcccattttgcccgtatgactaccgttttcaccaccctgaaaccttatctgaaagaggccgtcgcgctgaatgcgaagtccggtctgccggtcatgcgcccgctgttcctgcattacgaagacgatgcacatacctattccctgaaatatcagtacctgttaggccgcgacattctggtcgctccggtacacgaagaaggtcgcagcgactggacgctctatctgccggaggataactgggtacatgcctggacgggtgaagcgttccggggcggggaagttaccgttaatgcgcccatcggcaagccgccggtcttttatcgcgccgatagcgaatgggcggcactgttcgcgtcgttaaacagcatctaa

SEQ ID NO: 477537 - DNA, 564 bp, Shigella flexneri
ttgtcgttacacggcgatctggagcaacgcgatcagaccttggtacgttttgctaacggtagcgcccgtgtactggttgcgactgatgttgctgcgcgtggtctggatattaaatcgcttgagctggtggtgaactttgagctggcgtgggaccctgaagttcatgtacatcgcatcggtcgtacagctcgtgcaggaaatagcggtctggcgatcagtttctgtgctccggaagaagcacagcgggccaatatcatttctgacatgttgcagataaaacttaactggcaaacgccgccagctaatagttccattgtgacgctggaagcagaaatggcaacgttgtgtatcgatggcgggaaaaaagccaaaatgcgcccgggtgatgtattaggtgcactgacaggagatatcgggcttgatggcgcagatattggcaaaatcgccgtgcatccggcgcatgtctatgtcgcggtccgtcaggctgttgctcataaagcatggaaacagttacagggcgggaagattaaaggaaaaacgtgccgggtgcggttattaaaataa

SEQ ID NO: 477538 - DNA, 216 bp, Shigella flexneri
atggcacaagtaatctttaatgaagagtggatggttgaatacggcctgatgcttcgcactggtctgggggccagacaaattgaagcataccgccagaactgttgggtggaaggcttccacttcaaacgagtatctcctttagggaagccagacagtaagcgagggattatctggtataactatccaaagataaatcagtttatcaaagactcatga

SEQ ID NO: 477539 - DNA, 189 bp, Shigella flexneri
atgtataaaattaccgccactattgaaaaggaaggtggcactcctactaactggacaagatattcaaaatctaaactaacgaaatcagaatgcgaaaaaatgctctcaggtaaaaaagaagcaggcgtttccagagagcagaaagtaaaactgataaattttaattgcgagaaacttcagtcctcgtga

SEQ ID NO: 477540 - DNA, 810 bp, Shigella flexneri
atgactaagcaaccaccaatcgcaaaagccgatctgcaaaaaactcagggaaaccgtgcaccagcagcaattaaaaataacgacgtgattagttttattaaccagccatcaatgaaagagcaactggcagcagctcttccacgccatatgacggctgaacgtatgatccgtatcgccaccacagaaattcgtaaagttccggcgttaggaaactgtgacactatgagttttgtcagtgcaatcgtacagtgttcacagctcggacttgagcccggtagcgccctcggtcatgcatatttactgccttttggtaataaaaacgaaaagagcggtaaaaaaaacgttcagctaatcattggctatcgcggcatgattgatctggctcgccgttcaggtcaaatcgccagcctgtcagcccgtgttgtccgtgaaggtgacgagtttaatttcgaatttggccttgatgaaaagttaatacaccgcccaggagaaaacgaagatgcccctgttacccacgtctatgctgtcgcaagactgaaagacggaggtactcagtttgaagttatgacgcgcaaacagattgagctggtgcgcagccagagtaaagctggtaataacgggccgtgggtaactcactgggaagaaatggcaaagaaaacggctattcgtcgcctgttcaaatatctgcccgtatcaattgagatccagcgtgcagtatcaatggatgaaaaggaaccactgacaatcgatcctgcagattcctctgtattaaccggggaatacagtgtaatcgataattcagaggaataa

SEQ ID NO: 477541 - DNA, 171 bp, Shigella flexneri
atgactaagaaaataaaatgtgcttaccacctttgcaaaaaagacgttgaagaaagcaaagctattgaaagaatgcttcacttcatgcacgggattttatcaaaagacgaaccgagaaaatattgcagtgaagcttgtgccgaaaaagaccagatggcacatgaactttaa

SEQ ID NO: 477542 - DNA, 612 bp, Shigella flexneri
atgcgccttcgtgttgtgcccggttttatttcaccacctccgggcttcggtggtctcggctatacccctacagcgagagcttgtgttaacatttcaatacccttacagttgagagttattgatatgttggatgtatttactccattgttgaaactttttgctaacgagccactcgaaatacttatgtatacgattatcatttttggtctcactctctggctgataccgaaagagtttactgtcgcattcaatgcttatactgaaataccttggctctttcagattatcgtttttgccttttctttcgtggtcgccatttccttctcaagattgcgagcacatattcaaaagcattattcattactaccagagcaacgagtattgcttcgtttatctgagaaagaaatcgctgtatttaaagatttccttaaaacaggaaatcttattatcacttctccttgccgtaacccggttatgaaaaaattagaacggaagggcatcattcaacatcagagtgatagcgcaaactgttcttattatctcgtcaccgaaaaatactcccattttatgaagttattctggaacagcaggagtagacgttttaatcgttag

SEQ ID NO: 477543 - DNA, 156 bp, Shigella flexneri; identical to SEQ ID NO: 21060

SEQ ID NO: 477544 - DNA, 135 bp, Shigella flexneri
atggtgcattacgaagtagttcagtatttgatggattgttgcggtatcacttacaaccaagctgtgcaggctttacgcagcaacgactgggatctctggcaggcagaagtcgctatacacagcaacaagatgtga

SEQ ID NO: 477545 - DNA, 420 bp, Shigella flexneri
atggttcatgaagataaagcgcgtaaagagttcgccagtaggcttgcgctagcctgtgaaaacgctggttatgaacaacatggaaggcaggcagaaattgcccgtcgaatgaaattaacaccaaaagcggttagcaaatggtttaatggcgaaacaattcctcgccgagagaaattaagggaattagcaacactcattggaacaacaccaacctatcttttgggagaggatacagaagaaagtggacaggtacgtttctatcaggagttaaatccaagacaaaaaatcatcattgaccttctggacgagctccctgacagtgagacagatgaacttttaaaaactcttgaggagaaaaaacagaagtacaatgcaatttacgaagagctagcacgaaagaaaaaacaaaaagcctcttaa

SEQ ID NO: 477546 - DNA, 255 bp, Shigella flexneri
atgaaccagaaaacacttgaagatgtaatcaaaactgttcgcgtttctgttgtggccgacgtttgtggtgtcagccaaagagcaatctacaaatggatggataacggaaaattgcctcgcacagaatataccggcgaaacaaattacgctgaaaaaatcgctcatgcatcaaacggattattttctgctgatgtaattttaactattggcagaaataaaactactacgaaaaagctgatgggagttgattcatga

SEQ ID NO: 477547 - DNA, 423 bp, Shigella flexneri
atgaaaatcaagcatgagcacatcgagtcagtgttgttagccctggcagccgaaaaagggcaggcatgggtagccaatgccattactgaagaatatctgcgccaggggggcggcgaattgcccctggtaccaggcaaggactggaataatcagcagaatatctatcaccgttggttgaaaggtgaaacgaaaacgcaaagagaaaaaattcagaagctgatcccagcaattctggcaatccttccgcgcgagctgcgtcaccgactctgcatcttcgataccctggaacgccgtgcattactggcggcgcaggaagcgttaagtacggcaattgatgcgcatgatgatgcagtccaagccgtttaccggaaagcgcatttcagcggcggcgggtcttccgacgattctgtcattgttcattaa

SEQ ID NO: 477548 - DNA, 747 bp, Shigella flexneri
atgaaaaatattgcgacaggcgacgttcttgaacgtatccgcagactggccccgtcacatgtaaccgcgccattcaagacggtagcggagtggcgcgagtggcaactttccgaaggccagaaacgttgtgaggagatcaaccgtcagaatcgtcagttgcgggtggaaaaaattctgaatcgctctggcatccagccattgcaccgcaaatgctcgttttcgaattaccaggtgcataacgaagcgcagcgatacgcgttgagtcaggcgaaatccatcgctgatgaactgatgaccgggtgtacaaattttgcgttcagcggaaaacctggtaccgggaagaaccacttagcggcagctatcgggaatcgcctgctgaaagacggtcagacagtgattgtggttaccgtggctgatgttatgagtgccctgcacgccagctatgacgatgggcagtcaggcgaaaaatttttgcgggaactatgcgaagtggatctgctggttcttgatgaaattggcattcagcgcgagacgaaaaacgagcaggtggtgctgcaccagattgttgatcgccggacagcgtcgatgcgcagcgtggggatgctgacaaacctgaactatgaggccatgaaaacattgctcggcgagcggattatggatcgcatgaccatgaacggcgggcgatgggtgaattttaactgggagagctggcgtccgaatgtcgtccagccaggaattgagaagtaa

SEQ ID NO: 477549 - DNA, 762 bp, Shigella flexneri
atggagactgtttttgacgcactgaaagcaatgggaaaagccacatccatagaacttgctgcgcgacttgatatcagtcgtgaagaagtgctgaacgaactatgggaactgaaaaaagctggtttcgttgataaaagcgcgtacacctggcgtgtggctgataacaacgttcagcaggaacagccaatgcaggcagaactgccggaagaaaccaccacggcaactgtagtgaaaatctcagagtgcgatttaaccgcgacgattgaacaacgcggaccacaaacggcggatgaactggctacgctgttcggtacaacatcccgcaaagttgcttcaacgctggcaatggcaatcagcaaaggacgcctgattcgcgtaaaccagaacggtaaatttcgttactgcatgccgggcgataatttaccagcagagccgaaagctgcatcggtagcggaaactgatggtaaagcctttcctcagccagccggtgttgcgttaccagtacaggaagcggcaacacaggaagatattaaaacagaaactgtggcggacattgtgcagtcgctgccatcgtttactgaaacgcaagcggatgacctagttttaccatcgctgcatatggcaaaccgcgaactgcgtcgggcgaaaaatcatgtccagaagtgggagcgagtctgcgccgcgctgcgggagctgaacaagcaccgggatattgtccgacagattgtcgattcctccagtcgtattgtgtcggaaaagtga

SEQ ID NO: 477550 - DNA, 417 bp, Shigella flexneri
atggcaaaagtttttacacaggaagagcgtgaaaaaattaaggagcaggttgttgagttggtacgccagagtgggcgcgagacgttaaggcaactggaggccaagacaggtgcgacaagatatctgatgagcattcttgccagagagttggttgccagtggcgatgtatacaactctggctatgggttattcccgtctgaacaggctcgtaaggattggaaaaacgcccgcaaaaaactatccagggcaaaggtgaaaaaaacggttgtggttgatcctgaccttatctggtcattaccagacggagaaatacgccgctatgacaggcgtcagaacataatctgtcgcgagtgccggaagagtgaagttatgaaacgtgtactggcattttatcaaggaaatcttcggtatttatag

SEQ ID NO: 477551 - DNA, 1092 bp, Shigella flexneri
gtgggcggcgaaactaagaatattgatgagattgcaggtatcatttccagtagaatttttgatgagttaggctggaaaacccaaaatacaacggatataagttgggactgttgtttgagatctcatctaaacgctaaacaacttttatctgaaaacccaaaaaaaactcatcctacggatgtagtcttcaaatataaagatccttattcagatataactcagtatatacaaacagatttaaaatcttattgtgccagcacgcttgacggtacaaaatcaatattgaacactgtacgaagtttatcacaacaggtagcttgcgcgccaagaagtcctgagtggcggcgtctatttgttgacagcacaaatgagaaatatcaagttaacggcctactttttatatataatcatgacaataaatatgactctgatttaattgagaaattaaatggagcagccacagcaagttatgattttccagagaactctgtgattgccgtttttgacccaactatgatcagatttttactagatgttacagaacacatcgagactagaagaggaattactgacaaagtaacacaagaaacaaatatgttatggcaaaaaattcctgagatagagaactgtacatatttttaccctgacaaacataataaaatagcaacgaaagggaaaatccttccagccacaattgaaatgataacatctgggatgattttttactcatatgaacacgaatatattagaaatgatggtggcgatagaataagaaataaaatattgaatatattctggaaggaagaggttgattccagtaaccactttatatttcttttagagtatatatttaactatcaattactcaatcaatttgacaaaatatttgttataactccgttctcatcacactcaagcattcatttgcaatccgccattaatgattacataggaatatattctttcactcaatctcatatagaaacgttaaaggaaaaaatagtatccattccttttgttaatcaaaagctatctatatttgagtaccaggttgccagcaagcaggtgaatagaaaatgtcacttttcataa

SEQ ID NO: 477552 - DNA, 1248 bp, Shigella flexneri
atgaataaatatcaagctacgttgttttcaaacgaaagtgacatttataccgccctccactctaacagtgcaaaaatcacagatgttacattaaggaaaatcgccttcaatagagggataattttcccatctaacttatcaaaagaggtattgatagaaaaattatcagacctgccattttcatataatcacatcagagaagtacaagataaactggcaaccaaacccagccaagacgtcttctcagtaaaacgtatatatgaagaatttgatatagagaaactctatgacgttgtaaacaaagtgaaagaaaatagacccaagttgctagggcatgagaaaattgatcattactcaggcttgcaaacctatcatatatctattgattatactgagtttgattttagaaggggtaagtttcagcagaaaaaattgtacagtgggagtatagtttttatagtaaaaaaaggatatgtttcagtaagatataactatacgccacgcatttcagaaattctcaagcaaataattgatacatattcatcaacagtttgtaacaacatagttgtcaacgaaatagatttatcaagtatcgtcgatacagatcttaggaatatttttgctgttcatctttatgattttgatggaaattataaaaaaacaggacttgaatatgctggtcttgaaaaggttagagtaagcagaataaaaacatctctggatattaatggagataatctcgaaggaaataataacgaagaaacacaagagttattaaacaagatttcaccttctacagataacgaaaatgatgatgacattaataatcaggaaatggcatctgacgatgatgaaaacctaacttttaacattaacaatgccgcgtatgatggcctatcattagtgaacgcacctcaaattaaggaactgtgcagtgatgggttttatcgaagcttaattcgatggaagtcattttcctcagtagttaagaatcatactataacttttgaacttagtttcgatgataaatatcttgggaaaaatataaaattcagagcgttatacaaagaaagcaactctgcatccgcagagagagaaaaactcagtgacgcagactttgatcaagtcatgaaacaattagaagataaaatatttttgattaatgactttattatcgaagagcataccaagcgatacccagtaacgaaagctatgtcttgcgagactttgaatcaggaggctggatga

SEQ ID NO: 477553 - DNA, 654 bp, Shigella flexneri
atgataaaggtaaaaatttataaagcagaaaaggatataactaaaagtgagttattacataaagtaaatgacaacctctatgatgaagataaaggatatggttttcaaatcattaataactctgaagtgcttaaactaagatttaccatgagaagcattagcaagcaaagcttagaatatgctaatggcgagcgttcagaggttgaaatagcaacttacttaaatgtggactttggcgtcagacaagggaaaaaaatcatactatatgccactaatcctccattaagtatgaaagtgccttatactatggtgcaaaaactatttggtgaagatagtggcttgagaccagtagaatttgatctgagaaaaattgtaaatggtctttctgagggctttgacatcaagataaaatccatgtctctatctaatatctctgttgatccttttactttagcaaagacaaaaatagtaagctcaaagaatctccaagaaatttatcagaataaatacatgaatagttcggccgtttttgattccgtacatttcttcgttaacggaattgaaacggaattatctaggacgggtagattccgtgtgagagagagtcagcttccaacacttttatccatcttagaaactttcagaattttgtga

SEQ ID NO: 477554 - DNA, 348 bp, Shigella flexneri
atgataacgctgccgaccggtaccaaaatctggatcatcgctggcatcacagatatgcgttgtggcttcaatggcctggcttcgaaggtgcagaacacgctgaaagatgacccgttctccgggcatatcttcgtcttccggggccgcagtggcaaaatggtgaaaatactgtgggccgatcgtgacgggttatgcctgttcgccaaacgcctggaacggggccgcttcgtctggccggtgacccgggaagggaaagtgcacctgacgccagctcagttatccatgctactggaggggatcgcgtggcaacatcccaaacggacagaacggcctggcatccggatataa

SEQ ID NO: 477555 - DNA, 1101 bp, Shigella flexneri
atgaaaaaaattgctattgtgggtgccgggcctacggggatctacaccttattctcgcttctacagcaacaaactccactttctatttctatcttcgagcaggctgacgaggccggtgtcgggatgccatacagtgatgaggaaaactcaaaaatgatgctggcaaatattgccagtattgaaataccgccgattaattgtacgtatctcgaatggctacaaaagcaagaagccagccatctccagcgttatggcgttaaaaaagaaaccttgcacgatcgtcagtttttaccgcgaattctgctgggcgaatatttccgcgatcaatttttacgattagtagaccaggcacgacagcaaaaatttgcagtggctgtttatgaatcatgccaggttaccgatctgcaaattacaaatgctggcgtcatgctcgctacaaatcaggatttacccagcgagacgtttgatttagcggtgattgccacgggtcacgtctggcctgatgaagaagaagcaaccagaacgtattttcccagcccgtggtcaggcctgatggaagcaaaggtcgatgcatgtaacgtgggtattatgggaacatccttgagcggactggatgcggcaatggcagtggctattcagcatggttcgttcattgaagatgataaacaacacgtcgtttttcaccgcgataacgcaagtgaaaagctaaatattacgttgatgtcgcgcacgggtattttacccgaagccgatttctattgccctattccctacgagcccttacacatcgtcaccgatcaggcattaaatgctgagattcaaaaaggtgaagagggccttttggatcgggtatttagattgatagtagaggaaatcaagtttgctgatccagactggagccaacgcatagccttagagagcctgaatgtcgattcctttgctcaagcctggtttgccgagcgcaaacaacgcgacccatttgactgggcagaaaaaatctccaggaagtcgaacgcaataaacgagaaaaacatactgttccctggcgttatgtcattctgcgcctgcatgaagccgtacaggaaattgttcctcatctga

SEQ ID NO: 477556 - DNA, 192 bp, Shigella flexneri
atgaaaaaaatacttgaagcaatactggcgattaatctcgccgtactttcctgtattgtgtttataaacattattttaagatatggttttcagacaagcattttatctgtagatgaattgtcacgttatttatttgtctggttaacatttattggcgcgattgtgggtaatgctgccaacttactgatttag

SEQ ID NO: 477557 - DNA, 162 bp, Shigella flexneri
atgggtacaaaagcgcatgacctctttgtgttgcctttgtgcagaaagcatcacgacgagctgcatgcggataccgtggcatttgaagagaagtatggctccctgctggagctgatatttcgttttatcgatcgtgcgctggcaataggcgtactggcgtaa

SEQ ID NO: 477558 - DNA, 810 bp, Shigella flexneri
atgaaccttgaagccttaccaaaatattactccccaaaatctccaaaactgagcgatgacgcaccggcgacaggctcgggtggtttaacgattacggatgtgatggctgcgcaggggatggtgcagtcgaaagcaccgcttggatttgccttattcctggcaaaagttggtgttcaggatcctcagtttgcgattgaaggtctgctcaattacgcgatggcactggataatccgacattgaataaattgagtgaagaaacccggttacagctcatcccttaccttgtgaattttgcctttgctgattattccaggtctgcggcaagtaaggctcgctgtgagcattgtgctggtactggatttcataatgtattgcgcgaagtggtgaaacactccagaagcggtgaatctgttatcaaggaggagtgggtgaaggaactatgtcagcattgtcatggtaagggagaagtcagcacagcgtgcagagggtgtaagggtaaaggtattgtcctggatgaaaaaaggacccggcttcatggcacgcctgtttataagatttgtgggcgttgcaatggaaaccggtttagccgtttaccaaccacactggcgcggcatcatgtccagaagctggtaccggacctgacggattatcagtggtacaaaggatatgcagatgtcattgataaactggttacaaagtgctggcaggaagaagcatatgcagagacacaattgagaaaagtgacaagacaaatgattttcgccgaagatggcgacatgatgcttgcatttttcaaaaaatatggttag

SEQ ID NO: 477559 - DNA, 258 bp, Shigella flexneri
atgcagggcgaaaagcagcagccatatttttttaaccctggtatgactgttgaacagcttgaagactggctggagcagcaaaagcttcatctaagccgctataaccgtctggtaaaagaaaaagcagagcttgaagaacggctcagtgatatttctgtggaaattgaacgagtgtctgctggtggttttaacggaaagttgagtttcccctgggagtcaagttcgcttctgagaaatcatcaacagggtagtgtttga

SEQ ID NO: 477560 - DNA, 387 bp, Shigella flexneri
atgtccgatccgatttccggtactgggctggctggtggtgccctgacgggtgccagtgtttatggactgctgaccggaactgattacggcgttgtatttgacgcatttgcaggggctgtattctacatagcaacagcagcagatctgagtgcatcgcgccgactggcatattttatcgtgtcatatattgccgggatcctttgctctgggttggttggctccaagctggcgcacttgaccggatacagtgataaaccgctggatgctattggtgccgtaatcgtctctgctttagccgttaaaatcctgacgttcctgaataatcaggatatcggctcgctggtggcgctcataacgcgccggggaggttcaggtggagctaaatga

SEQ ID NO: 477561 - DNA, 282 bp, Shigella flexneri
gtggagctaaatgacccgacagcaactataaatgcgctgttatgtgcttgtgttgttattactctgatgttttatcgtcgtggtgattcgcggcatcgtccttgggtttcacgtttagcctggctgattactgttacatacagtgctgttccgttggcctatctctgtgggatttatccccattcctcatggcccattatcgtggcgaacactatttttctttccgtgctggtggccgtcagaggcaacgttgcacgtctggttgatcatctgaggcactaa

SEQ ID NO: 477562 - DNA, 618 bp, Shigella flexneri
atgaaccaacaattatttcaaaaggcggctggtattagcgccgggctggctgcgcgctggtttccgcacattgatgctgcaatgaaagagtttggaatcacagcagttaacgatcaggccatgttcattgcacaagttgggcatgaatctgctggttttacctcgctggtggaaagcttcaactactcggtagacgggctgaagaaaacctttagtaaacgcctgacgccttatcagtgtgaaatgctggggcgtgtcgatggtaagcaggtagcccaccagccgcaaatagccaatctggtttatggtgaccgcatggggaataacagccagggtgacggctggaaatatcgcggtcgtggcctgcttcaaatcaccggccgcgagaactacgccaaatgcggtgcggcgctgaagttggatctgatcagcacaccagagttgctgacacaggagaaacatgcagcccgttctgctgcatggtatttcacattacgtggttgtctgatgtattcaggtgatgttgtccgtgtaacgcagatcatcaacggtggccagaatggactggctgacagaaatagtcgttataacaaagcgcgggcggcgttgctggtatga

SEQ ID NO: 477563 - DNA, 537 bp, Shigella flexneri
atgacagcggtctttgcttttgttcaggcgcggtggaaaacaatcattgttttgctgatgttggctggtgcattttttgccgggaacatctggagtgagcggggctggcaaaagaagtgggctgaccacaatagcatggaatcttcacaggaagcgaacgcgcagactgccgcacgctggattgaacaagggcgcataattgcccgtgatgaggctgtaaaagatgcacaagcacaagccgctaaatctgctgccactgctgctggcctgtctgccactgttagccagttgcgtaccgaagcaacaaagcttgccgcacgcctggacgccgcaaagcacaccgctgatcttgccgctgccgtccgaagcaaaacaaccgacgccgacgccggaatgttcgccgacatgctcggagatattgcagcagaagctaaacgttatgctggaatcgctgacgaacgctacaccgccgggatgacgtgtgaacgtatttacgactcgttgagagagtcaaataacgctatcccccacaattga

SEQ ID NO: 477564 - DNA, 255 bp, Shigella flexneri
gtgagtggtcatagtgatggtttagcagatattttgagcattgtaattgtattagcagtggaacattggattatcgcatctctcatagttggtttgattatgtatctagtgggggcgagcataaacgaaaatgctcagacaaatgccggtgccattgcatcgggaatcataggggtatgtggtcaatttatttttggttttggcgttctggctagcattattgggattgttaaattcatttggacccacacctga

SEQ ID NO: 477565 - DNA, 198 bp, Shigella flexneri
atgacagtagttcttacagctaagcagattgaagacctagcagcattcgcgaaagaagatggtcagccccaatacaccatcaccactggtacaatcccggaattcgaagcggatgatggcgagattatccctgaatacacagggctgatcgcttactcagagtcacttgagcacggtgtattgcaactcgacgattag

SEQ ID NO: 477566 - DNA, 351 bp, Shigella flexneri
atgccaccgcgcacaccaaaggcttgccgtgttcgcggctgtcgcaacaccacaacagacccatctggctactgtgaaaatcacaaaggtgaaggctggaagtcctacaagcctggtcaatcacggcagcagcgaggatacggaacaaagtgggaagtcatccgggagcggatacttaagcgcgacaaagggctgtgtcagaaccatctacggcaggcgatagtgaagcaggcgtcctgcgtggaccacatcaaggcgaaggcccacggcggtactgatgaagacagcaaccttgaaagcctgtgctggtcgtgtcacgcagcgaagaccgcgcgtgagcggctcaagtga

SEQ ID NO: 477567 - DNA, 1554 bp, Shigella flexneri
atggatatcattggcggacaacatctacgtcaaatgtgggacgatctggcggacgtttacggtcataaaacggcgctgatttgtgaatccagcggcggagtcgttaaccggtatagttatcttgagttaaatcaggagattaaccgcacggcaaacctgttttatacgctggggattcgcaaaggcaacaaggttgcactacatctcgacaactgcccggaatttatcttttgctggttcgggctggcaaaaattggcgcgattatggtgccgattaacgcccgcctgttacgcgaggaaagcgagtggatcttgcaaaatagccaggcgtgcctgctggtgaccagtgcgcaattttatcctatgtatcaacagattcagcaggaagatgccactcaattgcggcacatttgcctgacagatgtggcacttcccgctgatgatggagtgagttcgtttactcaactgaaaaatcaacaacctgccaccttgtgctatgcaccgccactatcgactgacgatacggcggaaattctcttcacctccggcaccacctcccgaccgaaaggtgtggtgattacccattacaacctgcgcttcgctggatattactccgcctggcagtgtgcactgcgtgacgatgacgtctacatgacggtaatgcctgcgtttcatatcgattgccagtgtactgcggcgatggcggcgttttctgccggggccacctttgtgctggtcgagaaatacagcgcccgcgccttctggggacaggcgcagaagtaccgcgccaccattaccgaatgtattccgatgatgatccgtacgttgatggtgcagccgccttcagcgaacgatcggcaacaccgcctgcgggaagtgatgttttatctcaacttgtcggagcaggaaaaagacgcattttgtgaacgcttcggcgttcgcttgctgacgtcttatgggatgacggaaaccattgtgggcattatcggcgatcgccctagcgataaacgacgctggccgtcgattggtcgggcggggttttgctacgaagcggagatccgcgacgatcacaatcgcccgctcccggcaggtgagatcggtgaaatctgtattaaaggcgtaccagggaaaaccatcttcaaagagtattttctcaacccgaaagccactgcgaaagtgctggaagccgacggctggctacataccggcgataccggataccgcgacgaagaaggctttttttatttcgtcgatcgccgctgcaatatgatcaaacgcggtggcgagaatgtctcctgcgtggagctggaaaatatcatcaccacccatccgaaaattcaggacatcgtggttgtgggtattaaagattcgattcgcgatgaagccatcaaagcatttgtggtactgaatgaaggtgaaacattgagcgaagaggaattttttcgcttctgcaaacaaaatatggcgaaatttaaagtgccctcttatctggagatcagaaaagatctgccacgtaattgctcggggaaaataattagaaagaatctgaaataa

SEQ ID NO: 477568 - DNA, 606 bp, Shigella flexneri
atgaaaaagatcctgacaaccccgatcaaagctgaagatctgcaagatattcgcgtcggcgatgtgatctacctgaccggtacgctggtgacctgccgcgacgtttgtcaccgccgtttgatcgaactgaaacgtccgatcccttacgatctcaacggcaaagcgattttccacgctggccccatcgtgcgcaaaaacggcgacaaatgggagatggtctccgtcggcccgacaaccagtatgcgtatggaaagttttgaacgtgaatttattgagcagaccggcgtaaaactggtggttggcaaaggtggtatggggccgctgaccgaagaaggctgccagaaattcaaggcgttacatgtgattttcccggcaggctgcgcggtgctggcggcaacccaggtagaagagattgaagaagtgcactggacagaactcgggatgccggagtcactgtgggtctgccgggtcaaagagttcggcctgctgattgtctctattgatacccacggcaacaacctgatagccgaaaacaaaaagctgttcgccgaacgccgcgatcccatcgtggaagagatctgcgagcacgtccattacatcaaataa

SEQ ID NO: 477569 - DNA, 291 bp, Shigella flexneri
atgctgaatagctggcctttagccaaagacttgcaggtactggtagaaatcgtccacagcgggagttttagtgctgcagcggcgacgcttgggcaaacgcctgcatttgtcaccaagcggatccaaatccttgaaaatacgctggcaacaacgctgctgaaccgctccgctcgcggcgtggtgctgactgaaagtggccaacgttgttacgaacatgcgctggaaatcctcacccaatatcagcgactggtcgatgacgtcacgcaaatcaaacgcgcccggaggggatga

SEQ ID NO: 477570 - DNA, 1359 bp, Shigella flexneri
atggaacaatatgatcaaattggcgcaagactggaccgcttgcctttggcccggtttcattatcgtatatttggtataataagctttagtctgttattaacggggtttttgagttactcaggtaatgtcgtcttagcaaagctggtaagcaatggatggtcaaataatttcctcaatgccgcctttacctcggcattaatgtttggttatttcatcggctcacttactggtgggtttattggtgactactttgggcggcgcagggcgtttcgcataaatcttctcatcgtcggtattgctgcaacaggggccgcttttgtccctgatatgtactggctcattttctttcgcttcctgatgggaacaggaatgggggcgctgattatggttggctatgcctcatttacggagtttatccccgcgacggtgcgtggaaaatggtccgcgcggctctcatttgttggtaactggtcgcccatgctgtctgcggcgataggcgtggtggttatcgctttttttagttggcgaataatgtttcttctgggtggtattggcatactgttagcctggtttctctcaggtaaatactttatcgagtcgccacgatggctggcagggaaagggcaaatcgccggtgcagaaagccaacttcgtgaagtagagcagcaaattgaaagggagaagagtattcgtttaccccagcttactttgaaccagagcaacagcaaggttaaggtaatcaagggtaccttctggctcctgtttaaaggggaaatgttacgacgtacattagttgcgataactgttttaattgcaatgaacatttcgctttataccattaccgtatggataccgaccatatttgttaactccggcattgatgtcgataaatcaatattaatgaccgctgttattatgattggtgctccggtaggaatatttattgcggcattaattattgatcattttcctcgtcgattatttggctccgccttacttattattattgccgtgttaggctatatctattcaagtcagactacagagtgggcgattttaatctatggtctggtgatgatcttctttttatacatgtatgtttgcttcgcgtcggcggtttatatcccggagctttggccaacgcatttacgcctgcgcggttcgggtttcgttaatgccgtcggacggatcgtcgcagttttcacgccctatggcgttgcggcattattaacacattatgggtcgatcacggtgtttatggtgcttggtgtcatgttagtgctctgtgcgctggttctctccatttttggcatcgaaacgcggaaggtgtcgctggaagagatttctgaggtgaattaa

SEQ ID NO: 477571 - DNA, 1158 bp, Shigella flexneri
atgcccttacaacaattttcccgattagcgctcactctggcgatcggcctttcgattgctgcgggtggggccgcgctgacctggtatcaggtcgctgaaacagacctgagcagaacagccgctgctgcccatgaggcggtctcggttactgaacgactgctggacgaagcccagggcgcaatcgatctggtttatcccctgagtgtgcaaccatgtaccccacagctcagaaccgaacttggccggttgaccattagtcacgaacatatccgggtgattaacatttttaatcagaatcttttgtcctgctcgtcctgggagggcgcagatcctgtgcgggagttcatctccgctggcgacaaccagacgctgattctggcgacagacgattatatatcacctggtgtgccggtcatgattctacgcaaaacggataatgacaacgccataactgcgagtatcgccactaaatgggtggctgacaatatgacacttctgaatcttcgtaggccgctgtcgctgcgcgtagggaatactgttcttaccagcgataacacgctggtgaaagcgatacctggagggaatagacacgcagtttattctggcctgtatcccttttccatagaatatcctggcgatctttccgttcctctaacgctttattttcatgatggtgcgttatctttactgctttctgtgcttctgggggccgctgtggcaaccggcctgtggaaaataaaatttcgccgtaagagccgctatgatgaaatctacgaggcaatgaggaaagatgagattgtgccgtggtatcagccaattatgggtgcctcaacaggtgaaatagctggcgttgaagtacttgctcggtgggtaaaagcagatggggaagtcatttatcccggcagttttatcactgaagtagaacgttcagatttagttattccattgactcgtagcctgatggcgcgggcatcccgggatttaccgcctctgacaggcgacggaaagcgttggcatattagtttcaatattacgcagtcacacattatggaaacgggatttattgccgagtggatttgcccctatatttccagacatctgttatcacttaacccattacaagcccgctgccgcagatattcccgtggcgagcgataa

SEQ ID NO: 477572 - DNA, 384 bp, Shigella flexneri
atgctgatgaaagaagatattttattactgattgaacctattaaccattttgatattcctggtttccatctcaccggaactcggcaggcgctgaaattgattgatgatgttagttgctgcaatttgaaaattcagtatgacatttatcacatgcagcggatggaaggtgaattaaccaacaccatgactcagtgggccgataaaattggtcacctgcaaattgctgataatccgcatcgcggcgaaccgggaaccggagaaattaattacgaatatctctttacggtaattgaaaactctgactacaacggttgggttgggtgtgaatataaaccccaaaccaccacggaagctggtttacgctggatggatccgtaccgttaa

SEQ ID NO: 477573 - DNA, 879 bp, Shigella flexneri
atgaaactgggatttattggcttaggcattatgggtacaccgatggccattaatctggcgcgtgccggtcatcaattacatgtcacgaccattggaccggttgctgatgaattactgtcactgggtgccgtcagtgttgaaactgctcgccaggtaacggaagcatcggacatcatttttattatggtgctggacacacctcaggttgaagaagttctgttcggtgaaaatggttgtaccaaagcctcgctgaagggcaaaaccattgttgatatgagctccatttccccgattgaaactaagcgtttcgctcgtcaggtgaatgaactgggcggcgattatctcgatgcgccagtctccggcggtgaaatcggtgcgcgtgaagggacgttgtcgattatggttggcggtgatgaagcggtatttgaacgtgttaaaccgctgtttgaactgctcggtaaaaatatcaccctcgtgggcggtaacggcgatggtcaaacctgcaaagtggcaaatcagattattgtggcgctcaatattgaagcggtttctgaagccctgctatttgcttcaaaagccggtgcggacccggtacgtgtgcgccaggcgctgatgggcggctttgcttcctcacgtattctggaagttcacggtgagcgcatgattaaacgcacctttaatccgggcttcaaaatcgctctgcaccagaaagatctcaacctggcactgcaaagtgcgaaagcacttgcgctgaacctgccaaacactgcgacctgccaggagttatttaatacctgtgcggcaaacggtggcagccagttggattactctgcgttagtgcaggcgctggaattaatggctaaccataaactggcctga

SEQ ID NO: 477574 - DNA, 1455 bp, Shigella flexneri
atggaacatcagagaaaactattccagcaacgcggctatagcgaagatctattgccgaaaacgcaaagccagcagacctggaaaacatttaactattttaccttatggatgggttcggttcataacgttcccaattatgtgatggtcggcggcttttttattctcggcttgtctacctttagtattatgctggcaattatcctcagcgcctttttcattgccgcggtaatggtattaaacggcgctgcgggcagtaaatacggcgtaccgtttgccatgatcctgtgtgcttcttacggcgtacgtggcgcactgtttcccggattattaagaggcggtattgctgccattatgtggtttggcctgcaatgttacgcggggtcactggcctgcttgattctgattggcaaaatctggccgggatttttaactctcggtggtgatttcacgctgttagggctttctctaccgggcttaattactttcttactcttctggctggtcaacgttggtataggttttggcggtggcaaagttttaaataaattcactgccattcttaacccgtgcatctatatcgttttcggcggtatggcgatttgggcgatttcgctggtcgggctcggtccaatctttgactacattccgagcggtattcagaaagcagaaaacagtggcttcctgttcctggtggtgataaacgcggtagttgcggtctgggcggcaccggcggtgagcgcatccgactttacgcaaaacgcccactcgtttcgtgagcaagcgctggggcaaacgctgggtttagttgtggcctatattctgtttgcggtcgcgggggtatgtattattgccggagccagtattcattacggcgctgatacctggaacgtgctggatattgttcagcgttgggacagcttgttcgcctcgttctttgcggtactggttattctgatgacgactatctccactaacgccaccggtaatattattcctgccggttatcagattgccgctattgcaccgacgaaactgacctataaaaacggcgtactgattgccagtattatcagcctgctgatctgcccgtggaaattaatggaaaatcaggacagtatttatctgttcctcgatattatcgacggaatgcttggtccggtaattggtgtcatgatggcgcattattttgtggtgatgcgtgggaaaattaatcttgatgaactgtataccgcacctggcgattataaatattacgataacggttttaacctcactgcgttttcagtaactctggtggccgttattttatctcttggcggtaagtttattccctttatggaaccgttatcgcgtgtttcatggtttgtcggcgtcatcgtcgcctttgcggcctacgccttattaaagaaacgtacaacagcagaaaaaacaggagagcaaaaaaccataggttaa

SEQ ID NO: 477575 - DNA, 1362 bp, Shigella flexneri
atgtcttttgatttaatcattaaaaacggcaccgttattttagaaaacgaagctcgcgttgtagatatcgccgttaaaggcggaaaaattgctgctatcggtcaggatctgggcgatgcaaaagaagttatggatgcgtctggtctggtggtttcgccgggcatggttgatgcgcacacccatatttctgaaccgggtcgtagccactgggaaggttatgaaaccggtactcgcgcagcggcaaaaggtggtatcaccaccatgatcgaaatgccgctcaaccagctgcctgcaacggttgaccgtgcttcaattgaactgaagttcgatgccgctaaaggcaagctgactatcgatgcggcacaactcggtggcctggtgtcttacaacattgatcgtctgcatgagttggatgaagtgggcgttgtcggcttcaaatgcttcgttgcgacctgtggcgatcgcggtatcgacaacgacttccgtgatgtaaacgactggcagttcttcaaaggtgcgcagaagctgggcgaactggggcagccggtgctggtgcactgcgaaaacgcgctgatctgtgatgcactgggcgaagaagcgaaacgtgaaggtcgcgtaactgcccatgactatgtggcttcgcgtccggtatttaccgaagtggaagcgattcgccgcgtactgtacctggcgaaagttgccggttgccgtctgcacatttgccatatcagcagcccggaaggtgttgaagaagtgactcgtgcacgtcaggaaggtcaggatgttacctgtgaatcctgcccgcattactttgtactggataccgatcagttcgaagaaatcggtactctggcgaagtgttcaccgccgatccgcgatctggaaaaccagaaaggcatgtgggaaaaactgtttaacggtgaaatcgactgcctggtttccgaccactcaccatgccctccggaaatgaaagccggcaacatcatggaagcatggggcggtattgccggtctgcaaaactgtatggacgtgatgttcgatgaagcggtacagaaacgcggaatgtctctgccaatgttcggcaaattaatggcgactaacgcagcagatattttcggtctgcagcaaaaaggccgtatcgccccaggaaaagatgccgacttcgtcttcattcagccgaatagcagctatgttcttaccaatgacgatctggaatatcgccacaaagtcagcccgtatgttggccgtaccattggcgcgcgtatcacgaaaaccatcttacgtggtgatgtgatttacgacattgaacagggcttccctgttgcgccgaaaggtcaatttatccttaaacatcagcagtaa

SEQ ID NO: 477576 - DNA, 1302 bp, Shigella flexneri
atgttcaattttgcagtcagccgcgaaagcctgttatcaggatttcagtggtttttctttattttttgcaacacggttgtggttcctcctacgctactttctgcttttcagttgccgcaaagtagcctgcttacgctcacgcaatatgcttttcttgctaccgcactggcctgcttcgctcaggcgttttgcggtcatcgtcgcgctattatggaagggccaggtggcctgtggtggggaaccatccttactatcacccttggcgaagcatcgcgcgggacaccgatcaacgatatcgctaccagtctggcggtggggattgcactctccggtgtgctgacgatgttgattggttttagcggattaggccatcgcctggcacggttatttacgccgtcggtgatggtcttgtttatgttgatgctgggcgcgcagctgaccactatctttttcaaaggtatgctcggactgccgtttggcatagccgacccaaattttaaaattcagttaccaccgttcgcgctctcggtggcggtgatgtgcctggtactggcgatgattatctttctgccgcaacgttttgcccgttatggcctgctggtcggtacgataaccggctggttgttgtggtacttttgctttccttcttcgcattcgctctccggtgagttgcactggcagtggttcccgctcggcagtggcggtgctttgtcgccgggaattattctgacggcggtgattacaggtctggtgaatatcagcaatacctacggtgcgattcggggcacggatgttttttatccgcagcagggcgcggggaatacgcgttatcgtcgtagctttgtggcgaccggatttatgacgctgataaccgtaccgctggcggtaattccattttcaccgtttgtttcatccattggtttattaacccagactggcgattacacgcggcgttcgtttatttatggcagcgttatttgcctgctggtggcactagttccggcactcacgcgactgttttgtagtattcccttaccggtaagtagcgcagtcatgctggtttcttatctgcctttactcttttctgcgctggtgtttagccagcaaataacgtttaccgcgcgcaatatttatcgactcgcattgccgttatttgtcggcatatttttaatggcattaccgcctgtgtatttgcaagaccttccattaacgcttcgtcctctgctcagtaacggcttactggtcggaattttactggctgttcttatggataatcttattccgtgggaacgcatcgaataa

SEQ ID NO: 477577 - DNA, 1146 bp, Shigella flexneri
atgaagattgtcattgcgccagactcttttaaggagagcttaagtgcagaaaaatgttgtcaggcaattaaagccgggttttcgaccctctttcccgatgcgcactatatctgtttgccgatagcggatggcggcgaagggacggtggatgcgatggtcgccgcgacgggtggcaacatcgtgacgcttgaagtctgcgggccgatgggcgaaaaagtgaatgctttttatggccttaccggagacgggaaaacagcggtgattgagatggcggcagcaagtggcctgatgctggtcgcgcctgaaaagcgtaatccgttgctggcctccagttttggtacgggggagttaattcgccatgcgctggataacggcattcgccatattattctcggcattggcggcagtgcgacggtcgacggcggtatgggcatggcgcaggcgcttggtgtgcgtttccttgatgccgacggccaggtgctggcggctaacggcggcaatttagcgcgcgtggcaagcattgagatggaggaatgcgatccgcgtctggcgaacagccatattgaagtggcatgtgacgttgataacccgctggtaggggcacgcggcgcggcggcggtatttggcccgcaaaaaggggcaacgccggagatggttgaagagctggaacaggggctgcaaaattacgcccgtgttttacaacagcaaactgaaattaatgtctgtcagatggcgggcggcggcgctgcgggcggtatggggattgcggcggcggtatttctcaatgcggatattaaaccgggcattgagattgtgttgaatgcggtcaatcttgcgcaggcggtgcagggggcagcactggtgatcaccggggaagggcgcattgactcgcaaacggcaggcggtaaagcgccgctgggcgttgcgtcggtggcgaagcagtttaatgtaccggtgattgggattgctggtgtattgggtgatggcgtggaagtggtgcaccagtacggcattgacgcggtattcagcattttgcctcgtctggcacctttagccgaagtgctcgccagcggtgaaaccaatctcttcaacagcgcgcgaaatattgcctgcgccattaaaataggtcagggaattaaaaactga

SEQ ID NO: 477578 - DNA, 2523 bp, Shigella flexneri
atgatgacgaccagaatagtggttggcctcacggcagggacgtgtctgattttctcgcaaaacctgatggccgaggtcagtgtattcaatccggcgcttctggaaatcaaccatcaatccggagtcgatattcgccagtttaatcgggcaaacctgatgcccccaggtgtttatagcgttgatatttttatcaacggtaaaatgtttgaacgtcaggatgtgacatttgttcaggataatccagatgctgatctgcacgcttgctttattgccattaaaaaaacactgtcctcctttggcataaaagttgatgcgctcaaatcgttcaatgatgtggatgagacggtttgcctcgatcctgctccacgtattgaaggctcatcctggcagtttgacagtgataaattgcagctgaatatatccattcaccaaatctacatggacgcgatggcttatgattacatcagccccacgcgttgggatgaggggattaatgcgctcaccatcaactacgatttttctggttcacatacactacgttcagattatggttcacaagagacagataccagttatctcaatctgcgcaatggactgaatattggaccgtggcggctacgtaattacagtactttaaacaccagcgatggccgtgcggaatacaactccattagtacctggatacagcgcgatattgccgcgttaagaagccagattatgattggtgatacgtggacggcgagcgatattttcgacagtacgcaaattcgcggcgcgcgtttgtatactgataacgatatgctacccgccagccagaatggctttgctcctgtggttcgtgggattgcaaagtccaacgccaccgtcatcattcggcagaatggctacgtgatttatcagtcagccgttccacaaggtgcttttgagatcaccgatctcaacaccgcaagtacaggtggcgatttggacgtaaccatcaaagaagaagacggtagcgaacaacgattcacccaaccttatgcttcattggcgattcttaaacgtgaaggtcagacagatgttgatgtcagcgtgggtgaattgcgcgatgaagacggatttacaccggacgtccttcaggcgcaaatacttcatggtttttcccacgggatcactttatatggaggtatgcaggctgctgaaaattatggttctgcagctctgggtgtcggtaaagatcttggcgctttgggcgcaatttctttcgatgtgacacatgctcgtgcgaattttagccatgatgatacagaaacgggtcagtcatatcgctttctctattcaaaactatttgacgacacagacactagcttgcgcctggttggctatcgttactccaccgagggctactataccctcaatgagtgggcatcgcggcgcaacagccctgaagacttttgggaaacaggtaaccgacgtagtcgcgtggagggaacgctaacgcagtcgttggggagagattatggcaatttatacctgacattaagccggcaacaatactggcataccgatgatgtcgaacgattaatgcaatttggctacagcagtagctggaagcgtctctcgtggaacgtctcctggagttattccaatactgccagacaggggacggggaacaaccatgccagtgataacaccagtgagcagatctacatgctctctttatctgttcctttatcgggctggtggggtaatagttacgccacctattctgtttcgcaaaacgataattccggtagctcacatcaactcggactcagcggtacggcgctggaaagaaataacctttcatggaatttaatgcagtcctataacagtcatgatgatgaggttggcggtaatatgtccctgacctatgatggctcttatggcacggtgaacggcagctataactacagccaaaattcccagaggctgaattatggtatcagagggggaattctggcacacagcgaaggggtaacgttaagtcaggagttaggtgaaactattgctcttgttaaagcacctggggccgccgggttagaaatagataatatgcgcggtgctgcgacggactggcgcggctatacggtcaagacacagctaaacccttatgatgaaaatcgggtagcaatcagcgataactatttctcgaagtcgaatatagaacttgataataccgtcgttacgatggttcccacgcgtggtgcagtggttaaagcggagtttgtgactcatgtgggttatcgcgttctcttcagagtgttaaatgcaaatggtaaaccggtaccttttggagccattgctgcgatacaagatgcaagtttggcagattcaggaattgtcggtgaccgtggcgaactttatctttctggtctaccagaaaaaggacaggttacgttatcctggggagaaaacgcctcaacaaaatgcatcttcaattattcactttcgacaccagaaagtgagagcggattaattgaacagggtgtgacatgtcattaa

SEQ ID NO: 477579 - DNA, 576 bp, Shigella flexneri
atgaaagagtatgatcgcgtgctggcgatggtgcagggggagtctcaggcccagcaacagcttattgacagcctgcgcgaggcgtttgccgatcgccaggtggcggggctgctttttggtaaagtgcagcgcgcccgcgaactggggctaaaaatgatcatcgtccccggtagccagctttcgcaactgccgccaggactggatagcaccgagtttgccgccattgttggcaatttacttgataacgccttcgaagccagcctgcgtagcgatgaaggaaacaagagcgttgaattattcctcagcgatgaaggcgatgatgtggtgattgaagtcgccgatcagggctgcggcgttccagagtctctacgagacaaaatatttgagcagggggtcagtacgcgtgctgacgagcccggtgaacatggcattgggttgtacttgattgccagctacgtaacgcgctgcggtggtgttatcactctcgaagataatgatccctgcggtaccttattttcaatctatattccgaaagtgaaacctaatgacagctccattaaccctattgatcgttga

SEQ ID NO: 477580 - DNA, 480 bp, Shigella flexneri
gtgcagggatttacgccagaagcgattgatgcactggtgcaacgaccagagtgtgacgtaattctcattgaagcagatggctcgcgtgcaatgccgttaaaagcgcctgatgagcacgaaccttgcatacctaaaagcagttgctgcgtgattgctgtgatgggaggacatattttgggcgcgaaagtgagcacagaaaatgtccatcgctggtcgcagtttgctgatattaccgggttaacacctgatgcaaccttgcaactgagcgatctcgttgcgctggttcgccaccctcagggggcgtttaaaaacgtaccgcaaggttgtcggcgagtctggttcattaaccgtttttctcaatgtgagaatgcgattgcgcaaagcgagctccttcaaccgctgcaacaacacgacgtagaggcaatctggctgggcgatatacaagaacatcctgcaatcgcgcgcagatttgtgaattag

SEQ ID NO: 477581 - DNA, 1626 bp, Shigella flexneri
atgaatattttcacagaggctgcaaaactcgaagagcaaaattgtccgtttgcgatggcgcaaattgttgatagccgaggctcgactccccgccattctgcacaaatgttagtgcgcgccgatggctctatcgtcggtacaattggtggcggaatggttgagcggaaggtgattgaagagtcgcttcaggcattgcaggagcgtaagccgcgattattccatggacgtatggctcgtaacggtgcggatgctgtcgggtcagattgtggaggtgcaatgtcagtatttatcagcgtccatggtatgcgtccacgtctggtgttgattggcgcggggcatgtcaaccgggcgatagcccagagtgcggcgctattaggatttgatattgccgttgccgatatttatcgcgaaagcctcaatcctgaactattcccaccatcaaccacgcttctccatgctgagtcgtttggtgcggcagtggaagcactggatattcgccctgataattttgtcctgattgccacgaataatcaggatcgtgaagccctcgacaaactcattgaacagcccattgcatggttggggttgctggcaagtcgtcgcaaggttcagcttttcctgcgtcaattgcgtgagaaaggcgtggctgaagaacatattgcccgtttacatgcgcccgttggttacaacataggtgcggaaacgccgcaggagatcgccatcagcgtgctggcagaaatattacaggtgaaaaataacgcgccgggtgggctgatgatgaaaccttctcatccttccggacaccagctggtggtgattcgtggtgcgggagatatcgccagtggtgtggcgctacgtctgtatcatgcgggttttaaagtgatcatgctggaagtggaaaaaccgacagtgattcgttgtaccgtggcgtttgcccaggccgtgtttgatggcgaaatgacggtcgaaggcgtcactgcccgcctggcaaccagctctgcggaagcgatgaaacttaccgaacgcggattcatccctgtgatggtagatcccgcctgttcattgcttgatgaactgaaaccgctttgcgtggtggacgctattctggcgaaacagaatttgggaacacgggcagatatggcaccagtaacaatcgcgcttgggccgggctttactgctgggaaggattgtcatgcggtaattgaaacaaatcgagggcactggctcggtcaggtgatttactctggttgtgcgcaggagaataccggtgttcctggcaatattatggggcataccacccgacgggtgatccgtgctcctgctgcaggcattatgcgatccaacgtgaaattaggcgatctggtgaaagagggcgatgtgattgcctggattggtgagcatgaaattaaagcaccgttgacggggatggtgcgtggcttgttgaacgacggactagcagtggtcggtggttttaaaattggtgatatcgatcctcgtggtgaaacggctgatttcaccagcgtttctgataaagcccgggcgattggcggcggcgtacttgaggcgttaatgatgttgatgcatcagggcgttaaagcgacgaaagaagtgctggaagtggcttaa

SEQ ID NO: 477582 - DNA, 933 bp, Shigella flexneri
atgagtaagaaaattgttctcgccctgggcgggaatgcgctgggcgatgacctggccggacaaatgaaagcggtaaaaattacttctcaggcaattgttgatttaattgcccaaggacatgaagttatcgtcactcatggtaacgggccgcaggtgggcatgattaaccaggcctttgaagctgctgcaaaaactgaagcgcactcgccaatgctgccgatgtctgtctgcgttgccttaagccagggttatattggttacgatctacaaaacgccttaagagaagaactgctttctcggggcattaataaaccggtagcaacgctggttactcaggtcgaagtcgacgctaacgatccggcattcctcaacccgaccaagccgatcggttcgttctttaccgagcaagaagcagagcaactgacaaaacagggttacactctgaaagaagatgctggtcgcggctatcgccgtgttgttgcctcgccaaaaccggttgatattattgaaaaagaaacggttaaagctctggtagatgcaggccaggtggtgatcaccgttggcggtggtggtattcctgttattcgtgaaggtaaccatctgcgtggtgccagcgcggttatcgataaagactgggccagcgcccgtttagcggaaatgattgatgccgatatgctgatcattctgactgcggtagaaaaagtggccattaacttcggtaaagagaatgaacagtggctcgatcgcctgtcattaagtgatgctgaacgctttatcgaagaaggtcattttgcgaaaggttctatgctgcctaaagtggaagctgccgcctcgtttgctcgctctcgcgcaggtcgtgaagcactgattaccgtattgagcaaagcgaaagaagggattgaaggcaaaaccggaacggtgatttgtcagtaa

SEQ ID NO: 477583 - DNA, 1386 bp, Shigella flexneri
atgcgcgtattgatcaaaaacggcactgtcgttaacgcagatggacaagccaaacaggatttgctgattgaaagcgggattgttcgccagttgggcaacaatatttcgccgcagctcccgtatgaagaaattgatgccactggctgttacgttttccctggcggcgtggatgtccatacgcatttcaatattgatgtcggcatcgcgcgcagttgtgatgatttttttaccggtacccgcgcagctgcgtgtggcggtacaacaaccattattgaccatatgggatttggcccaaacggctgtcggttacgccatcaactggaggtttatcgtggttatgccgcccataaagcggtcatcgattacagctttcacggtgtgatccagcacattaatcacgcaatcctcgacgaaatcccgatgatggtcgaggaaggactgagcagttttaaactctatttaacctatcaatacaaactcaacgatgacgaggttttgcaggcattacgccgtctgcatgaatccggcgcgctgaccaccgtgcacccggaaaatgatgcggctatcgccagcaagcgggcggaatttatcgccgcagggttaaccgcgccgcgctatcatgccttgagtcgccctctggaatgcgaagcggaagccatcgcccgcatgattaacctggcacaaattgccggtaacgccccgctctatatcgtgcacctgtctaacggcttaggtctggattatctgcgtcttgcccgtgcgaatcaccagccagtctgggttgaaacctgcccacaatatctcctgttggacgaacgcagttacgatacagaagatggcatgaagttcattcttagcccaccgctgcgtaacgtacgcgagcaggacaaactgtggtgtggcatcagcgatggtgcgattgacgtggtggcgaccgatcactgcaccttctcgatggctcaacgcctgcaaatttctaaaggcgatttcagtcgctgcccaaatggcttacccggtgtggaaaaccgcatgcagttactgttttccagtggcgtgatgacgggacgtataacaccggaacgctttgttgaattaaccagcgcaacgcccgccaggctgtttggcctgtggccgcaaaaaggattattagcgcccggttccgatggcgacgtggtgattatcgacccacgtcagagccaacaaattcagcatcgccatctccacgacaacgccgactactcgccatgggagggttttacctgtcagggcgcgattgtcagaaccttatcccgtggtgaaacgattttctgtgacggcacctttacaggcaaagccgggcgaggtcgtttcctgcgacgcaaaccgtttgtccctcccgtgctctaa

SEQ ID NO: 477584 - DNA, 1212 bp, Shigella flexneri
atggctaagaatattccattcaaactgattcttgaaaaagcaaaagattaccaggcggacatgactcgcttcctgcgcgacatggttgctattcccagtgaaagctgcgacgaaaaacgcgtagtacatcgtattaaagaagagatggaaaaagtcggcttcgataaagttgaaatcgacccgatgggcaacgttctcggttatatcggccacggcccgcgtctggtggcaatggacgctcatatcgataccgtcggcattggcaacatcaaaaactgggacttcgatccgtacgaaggcatggaaactgatgagctaatcggtggtcgcggtacttccgaccaggaaggcggcatggcatctatggtttatgccggtaaaatcattaaagacctcggtctggaagatgaatataccctgctggttaccggtactgtgcaggaagaagactgcgacggtctgtgctggcagtacattattgaacaatccggcattcgcccggaatttgtggtcagtaccgaaccaaccgactgccagatataccgtggtcagcgcggtcgtatggaaattcgtattgatgttcagggtgttagctgccacggttctgcgccagaacgcggtgacaacgccattttcaaaatgggtccgattcttggcgaattacaagaactctcccaacgtctgggttatgacgaattcctcggcaaaggcaccctcaccgtttctgaaatcttcttcacatccccaagccgttgcgctgtagcagatagctgcgccgtctctattgaccgccgtctgacctggggcgaaacctgggaaggcgcgctggacgaaatccgcgccctgcctgcagtacagaaagctaacgcggttgtttctatgtacaactacgaccgtccgtcctggaccggcctggtttacccaaccgaatgctacttcccgacctggaaagtggaagaagatcacttcaccgttaaagcactggtgaatgcctacgaagggctgtttggcaaagcgccggttgttgataagtggaccttttcaactaacggcgtatctatcatgggccgtcacggcattccggtgatcggctttggcccgggtaaagaacctgaagcgcatgcacctaacgaaaaaacctggaaatctcacctggtgacctgtgccgcgatgtacgctgcaatcccgttaagctggctggcaacagagtaa

SEQ ID NO: 477585 - DNA, 1197 bp, Shigella flexneri
atgtccgttttctcattgaagattgatatcgccgataacaaatttttcaacggcgaaacatcaccgctcttttcgcaaagccaggccaaactggcgcgccagttccaccagaaaatagctggttatcgcccaacaccgctttgtgcgctggacgatctcgcaaacctttttggtgtgaagaaaattctcgtcaaagacgaatcaaaacgattcggtctgaacgccttcaaaatgctcggcggtgcgtacgctatcgctcaattattgtgtgaaaaatatcatcttgatatcgaaacgctgtcatttgagcacctgaaaaatgccatcggcgaaaaaatgactttcgccaccaccaccgacggcaaccacgggcgcggtgtggcgtgggcagcacagcaactcggacagaatgcggtgatttacatgccgaaaggttctgctcaggaacgcgttgacgccattctgaacctcggtgccgagtgcatcgtcacggatatgaactatgacgataccgttcgcctgaccatgcaacacgcgcagcagcacggctgggaagtggtacaggacacggcatgggaaggttacaccaaaatcccaacctggatcatgcaaggctacgcaacactggcagatgaagccgtcgagcaaatgcgtgaaatgggcgtaaccccgacgcacgttctgctgcaagccggtgtcggtgcaatggccggtggtgtgctgggttatctggtcgacgtctacagcccgcaaaatctgcacagcattattgttgaacctgacaaagctgactgtatttatcgctccggcgtcaaaggcgacatcgtcaacgttggcggtgatatggccaccatcatggcgggcctggcctgtggcgaacctaacccgctgggctgggaaatcctacgtaactgcgccacccaattcatctcctgccaggacagcgttgccgcattaggtatgcgcgtgctgggtaatccgtacggcaacgacccgcgcatcatctccggtgaatccggcgctgtcggtttgggcgttctcgcagcggttcattatcacccgcaacgtcaaagcctgatggaaaaactggcgctgaacaaagatgccgtagtgctggttatcagcactgaaggcgacaccgacgtgaagcactaccgcgaagttgtctgggaaggcaaacacgctgtagcaccttaa

SEQ ID NO: 477586 - DNA, 1188 bp, Shigella flexneri
atgaaaactgttaatgagctgattaaggatatcaattcgctgacctctcaccttcacgagaaagattttttgttaacgtgggaacagacgccagatgaactgaaacaagtactggacgttgccgcagcattaaaagcactgcgtgctgaaaacatctcaaccaaagtctttaatagtggattaggtatttccgtattccgcgacaactccacccgtacccgcttctcttatgcttccgcgcttaacctgctcggccttgcacaacaagatctcgacgaaggcaaatcacaaatcgctcacggcgaaaccgtgcgtgaaaccgccaatatgatctccttctgcgccgacgctattggtattcgcgacgatatgtatctgggcgcaggcaacgcctatatgcgtgaagttggcgctgcacttgatgacggttacaagcagggtgtactgccacagcgtccggctttagtgaacctgcaatgcgatattgaccacccgactcagtcaatggctgacctcgcgtggttacgtgaacactttggttcactggaaaacctgaaaggtaaaaaaatcgccatgacctgggcctactctccaagctatggcaaaccgctctctgtaccacaaggcatcatcggtctgatgactcgcttcggtatggatgtcaccctggcccatccggaaggctacgacctgatcccggatgtggttgaagtggcgaaaaacaatgctaaagcctccggtggtagcttccgtcaggtcaccagcatggaagaagccttcaaagacgcagacatcgtttatccgaagtcatgggcaccttacaaagtgatggaagagcgtactgaattgctgcgtgcgaacgatcacgaaggcttaaaagcactggaaaaacagtgtctggcacagaacgcgcaacacaaagactggcattgtactgaagagatgatggaactgacccgtgatggcgaagccctgtacatgcactgcctgccagctgatatcagcggcgtatcctgtaaagaaggtgaagtgactgaaggcgtattcgaaaaataccgtatcgctacctacaaagaagccagctggaagccttatatcatcgccgcgatgatcctgtcccgtaaatacgccaaaccaggtgcactgctcgagcaactgctgaaagaagcgcaagaacgcgtgaaataa

SEQ ID NO: 477587 - DNA, 1779 bp, Shigella flexneri
atggagcttgctactacgcagtcagtattgatgcaaattcaaccgacaattcagcgttttgccagaatgcttgccagcgttttgcagcttgaggttgagatcgttgatgaaaacttgtgtcgcgtcgccggaacgggcgcgtatgggaagtttcttggtcgccagttgagcggcaactcacgcctgctccgccacgtcctggaaacgaaaactgaaaaagttgtgacacagtctcgcttcgatcccctttgcgaaggttgcgatagtaaagaaaattgccgcgaaaaagcatttctgggtacgcctgtcattttacaggatcgttgtgttggggtgataagtttgattgccgttacccacgagcaacaagagcatatcagtgataatttacgcgaattttctgattatgttcgccatatatccaccatttttgtttcgaaacttctggaggatcaggggccaggagataacatcagtaaaatattcgcgaccatgatcgataatatggatcagggtgtattagttgttgatgatgaaagtcgggttcagtttgttaatcagactgccttaaaaacacttggtgttgtacaaaataatattattgggaaacctatccgtttcagaccattaacatttgagagtaattttacccatggacatatgcagcatattgtttcgtgggacgataaaagtgaattaatcattggtcaattgcataacattcagggccgacaattatttttaatggcatttcaccaatcgcataccggtttttctgtagcaaatgcacctgatgaaccacatattgaacaattggttggcgagtgccgtgttatgcggcaattaaaacgactcattagccgtattgctcccagcccatccagcgttatggtggttggtgaaagcggcacgggtaaagaagtcgtcgcccgagcaatccataagttgagcggaagacggaataaaccctttattgctatcaactgtgccgcgattccggagcagcttctggaaagcgaactgttcggttatgttaaaggcgcatttactggcgcttctgccaacggtaaaacagggttgattcaggcggcgaatacgggcacgctgtttctcgatgaaataggtgatatgccattaatgttgcaggctaaattactgcgcgctattgaggcgcgtgaaattctgccgattggtgccagtagcccaatacaagtcgacattcgcatcatttctgcaactaatcagaatttggcccagttcattgccgaaggtaaattccgcgaagatctcttctaccgacttaatgttatcccgataactctgccaccgctgcgtgaacgtcaggaagatattgaactattggtgcattactttttacatctgcatacccgtcgtctgggatcggtttatcttggcattgctcccgatgtcgtcgaaatattgcgtaagcatcgttggcccggaaacctgcgcgagttaagcaatttgatggaatatctggttaacgtggttccttcaggtgaagttatcgacagcacgctattgccgccaaatctgctgaataatggcacaacggagcaaagtgatgtaacagaggtcagtgaggcgcacctgtcactcgatgatgcgggcggcacggcgctggaggagatggaaaagcaaatgatccgcgaggcgctttcacgtcataacagcaagaagcaagttgctgatgaactgggcatcggtattgctacgctctatcgcaagattaagaaatatgagttgttaaacacataa

SEQ ID NO: 477588 - DNA, 171 bp, Shigella flexneri
atgaattcccagacaacaaaagatattccctgcttccgttcttatttgcctgatgccctgcgtttaagatttgaagataaactgaccatccgggccatcgctcagcgtctgggtctcagtcattccacaatacatacgctttttcagcgatttcttgcatccggtatgtaa

SEQ ID NO: 477589 - DNA, 378 bp, Shigella flexneri
atgcagtcgttgtacgactggatacagttgcagaggaaaacgctgtcgaaacatgcggagatggcgaaggcgttcgactatatcctgaatcactggaatgcgctgaacgagttctgtcgtgacggctgggtggaaatagacaacaacatcggtgaaaacgcgttacgatcggtggcggttggaagaaaaaattatctctttttcggctcagacaagggaggagaaagtgcggcgatcatctacagtctgctggtcacctgcaaacagaacgaagtgaagccggaggactggttgcgcgaagtgatcgagaagctcaatgactggccgtcgaaccaagtgcatgaactgctgccctggaacttctcgtctgtaaaataa

SEQ ID NO: 477590 - DNA, 303 bp, Shigella flexneri; identical to SEQ ID NO: 473532

SEQ ID NO: 477591 - DNA, 801 bp, Shigella flexneri
atgaccttcgaacaatttgtacgtgagtttgccgaatggttttcacaaaaacgtccggcggcgatgatgatcggcatccgtgcggatgagtcctacaaccgttttgtcgccatcgccagtttaaataaacaacgttttgccgacgataaaccatggactacggccgcaccaggcggtcatagctggtacatttaccccatttacgactggaaagtggctgatatctggacctggtatgcaaatcatcaaaatctctgcaacccactgtataacctaatgtatcaggcaggcgttcctctgcgtcatatgcgaatttgcgaaccttttggcccggagcaacgacaaggattatggctctatcacgttatcgaaccggatcgctgggctgctatgtgcgcacgagtcagcggggtaaaaagtggcggcatttacgccggacatgacaatcatttctatgggcatcggaaaatcctcaaaccagaacatttagactggcaagaatatgcattattgctgctcaatagcatgccggaaaaaacagctgagcattaccgcaataaaatcgccatttatttgcactggtatcagaaaaaaggcatcgaggttccacaaacccagcaaggggacattggcgcgaaagatatcccctcctggcggcggatatgcaaagttttactcaataacgattactggtgtcgggcattatcatttagtcctacgaaagtgaagaactatcagcgttataacgaacggataaaaggaaaacgtcaggaatgggggatactatgcaacaacgattaa

SEQ ID NO: 477592 - DNA, 531 bp, Shigella flexneri
atgaataaacaatcctggctgcttaacctcagcctgttgaaaacgcacccggcgtttcgcgcagtattcctcgctcgttttatctcaattgtgtctctgggtttgctcggcgtcgcggtgccggtgcagatccagatgatgacccattctacctggcaggtggggctttcggtgacgctgaccggcggcgcgatgtttgttggcctgatggttggcggtgtgctggcggatcgctatgaacgcaaaaaagtgattttgctggcgcgcggcacctgtggcattggcttcattggactgtgccttaatgcactgctgccggagccgtcattgctggcaatctatttacttggtttatgggatggttttttcgcatcacttggtgttacggcgctactggcggcaacatctgcactggtagggcgtgaaaacttaatgcaggccggggcgatcaccatgttgaccgtgcgcctggggtcggtgatttcgcccatgattggcggtttattgctggcgaccggcggcgtagcctga

SEQ ID NO: 477593 - DNA, 378 bp, Shigella flexneri; identical to SEQ ID NO: 474621

SEQ ID NO: 477594 - DNA, 411 bp, Shigella flexneri
atgagcattattaaagaatttcgcgaatttgcgatgcgcgggaacgtggtggatttggcggtgggtgtcattatcggtgcggcattcgggaagattgtatcttcactggttgccgatatcatcatgccacctctgggcttattaattggcgggatcgactttaaacagtttgctgtcacgctacgcgatgcgcaggggggtatccctgctgttgtgatgcattacggtgtcttcattcaaaacgtctttgattttctgattgtggcctttgccatctttatggcgattaagctaatcaacaaactgaatcggaaaaaagaagaaccagctgccgcacctgcaccaactaaagaagaagtattactggcagaaattcgtgatttgctgaaagagcagaataaccgctcttaa

SEQ ID NO: 477595 - DNA, 219 bp, Shigella flexneri
atgagccgatatcagcatactaaagggcagataaaggataatgcgatagaagcattcctacatgatcccttattccgacagcgagtagagaaaaataagaaagggaaaggcagttacatgcgaaaaggaaaacatggcaatcgggggaactgggaggccagtggcaagaaagtaaatcacttttttaccactggtcttctgctttcaggcgcttgttaa

SEQ ID NO: 477596 - DNA, 396 bp, Shigella flexneri
atgtatcgcattggtgagctggcaaaaatggcggaagtaacacctgacacgattcgttattacgaaaaacagcagatgatggagcatgaagtgcgtactgaaggcgggtttcgcctgtataccgaaagcgatctccagcgattgaaatttatccgccatgccagacaactaggtttcagtctggagtcgatccgtgagttgctgtcgatccgcatcgatcctgaacaccatacctgtcaggagtcaaaaggcattgtgcaggaaagattgcaggaagtcgaagcacggatagccgagttgcagagtatgcagcgttccttgcaacgccttaacgatgcctgttgtgggaccgcccatagcagtgtttattgctcgattcttgaagctcttggataa

SEQ ID NO: 477597 - DNA, 369 bp, Shigella flexneri
atgtggttacttgaccagtgggcagagcgccatatagcagaagcgcaagcgaaaggtgagtttgataacttggcaggtagcggcgaaccattgatactggatgatgattctcacgtgccaccggaattacgtgcggggtatcgcttgctgaagaatgccggttgcttaccgccagaacttgagcaacggagagaagcaattcagcttctggatattctcaaaggtatccgtcacgatgatccgcaatatcaagaggttagccgtcgattgtcattactggaattgaagctgcgacaagctggattgagtaccgattttttacgcggcgattatgctgacaagttgttggacaaaatcaacgataactag

SEQ ID NO: 477598 - DNA, 213 bp, Shigella flexneri
gtgtccgttaaactcaggctacctcaatacaagcaaaaactttctcactggctgtcacccttgctggaaccgggtgaagatgtttatcagctttcgggtaacgatctcgcgctgcgactgaatacagaatcgcaccaggagcgcattaccgcactggatagtcatctcaagcaatttcgtttcttttgggatgggatgccgatgcaaccgtag

SEQ ID NO: 477599 - DNA, 444 bp, Shigella flexneri
atgattaacctgtctcatattcttattgattccttagatgatgcaaaggttaaccttacaccggtcatccattcgatgttggtgacttttttagaattgccatataataatgatgtaaaaatactggagtggtgttttaataaaagcatgcaatattttgatgattctgcaaagatagagcatgcatgctccgtaataaatcatattaattttctctgcgatcagtctaaagtagctgagacattatttttcaatctcgataaagaaccctataaaaatagccctgaattacaggagttgatttggaaaaagttggttgtatatgtcaatgattttaacttaagcaatcgagaaaaaacatatttaatacaaaggatatttaataatgttgagtcgctatttaataaagtacctgtcagcattttagttaatgatattttttga

SEQ ID NO: 477600 - DNA, 300 bp, Shigella flexneri
atgaaaaacactgagatgattaactggtactttcctcggttacttaagagttatgagggcgaaaaaaattatttggaatctaataaagaaattttgaagaatcaaccagataatgttatcaaagaaaaactgaataatgaattcaaacttagatttagaatgatgcaaactatctttaaatcgaaggttaatgtatcgccatatattgaccaacagcgtttaaatacactaaatcctccggaaaatttacgtatggcaatagaaaaatttggctggaagaaaaaaactatcactgcataa

SEQ ID NO: 477601 - DNA, 171 bp, Shigella flexneri
atggctcaagttattaatgaaatggatgttccgtcccattcttttgtttttcatggtacaggtgagagatattttcttatttgtgtggtgaatgtgttgttaacgattataacgctaggtatctatttaccatgggcattaatgaaatgtaaggcgttatctttatgctaa

SEQ ID NO: 477602 - DNA, 594 bp, Shigella flexneri
atgtcgctgccgcacctctcccttgctgatgcgcgtaatcttcaccttgccgcacaaggcctgttaaacaaaccccgccgtcgagcgtcgttggaggatattccggcaacgatctcccgcatgtccttgctgcaaatcgataccatcaatattgttgcccgtagtccatatctggtgcttttcagtcgtctgggaaattatcctgcccagtggctggatgagtctctggcgcgtggcgaattaatggaatactgggcgcatgaagcctgctttatgccgcgtagcgactttcgtcttattcgccaccgcatgctggcacctgaaaaaatgggctggaaatacaaagacgcctggatgcaggaacatgaggcggaaattgcacagttaattcagcatattcatgataaagggccggtacgttcagccgattttgagcatcctcgtaaaggtgcaagcggctggtgggaatggaagccgcataaacggcatctggaaggtttatttactgccggaaaggtgatggtgattgaacggcgcaacttccagcgcgtttatgatttaacccaccgtgtcatgcctgactgggatgattag

SEQ ID NO: 477603 - DNA, 210 bp, Shigella flexneri
atgcgttatagcgcgatgccgatgcgagtgccacttttccattcactcgctgaattaatggcaacgatgatgaggtattactgccatggtgaggtacctgaagcaatgttgcctgcacttgctgccagtaacggcttagcatcttttgttcagctggggcttcaatatcaccggttagaaaaatgctattcgtcccgtcatcaaccttaa

SEQ ID NO: 477604 - DNA, 378 bp, Shigella flexneri
atgcagtcgttgtacgactggatacagttgcagaggaaaacgcagtcgaaacatgcggagatggcgaaggcgttcgactatatcctgaatcactggaatgcgctgaacgagttctgtcgtgacggctgggtggaaatagacaacaacatcggtgaaaacgcgttacgatcggtggcggttggaagaaaaaattatctctttttcggctcagacaagggaggagaaagtgcggcgatcatctacagtctgctggtcacctgcaaacagaacgaagtggagccggaggactggttgcgcgaagtgatcgagaagctcaatgactggccgtcgaaccaagtgcatgaactgctgccctggaacttctcgtctgtaaaataa

SEQ ID NO: 477605 - DNA, 396 bp, Shigella flexneri
atggccgcaatggaatttgaactgaaacacgggcttctgaccggcaaaggcacggcagatgaaaccctgcataaaaccgtgaaactgcgcgaactgaccgccagtgatgtgattgatgcgcaactggccgcagaacgcgtcgtcatgggcgggaacggaaaggcggtggcctactgttctgaggtgctgatgggactggagatgatgcgccgtcaggttgcgtcaatcggtaatatccccggcccgctggacatgaaacagctgcgaatgctccacccggcagaccttgagcttatcagcacgaaagcggctgtgctggatgacatgcttgaggaggtggcaacgcgggggcgaactgatgccgctggcggcggcactgatgaacctgctggttaa

SEQ ID NO: 477606 - DNA, 357 bp, Shigella flexneri
atggcaaaaattcttggcatggcgaccattcgcgtgaatggccgcgaaattaaaaccgaggggaaatccacgctgaatccgggcggcttcagccgcacccagcatatgggcggcggcaaggtctggggtatctccagcaagatggcctcgccgtccatcaaggtaaccattgcggcggcagcggatatggacgtgattgaaatcagcagctgggaagatgtcacggtgatgttctacggcgacaacggcctgaactacatgatgacgggttccgccacggataacccggcagagctggacgaggattccggcaccatcagtgccaactttatcggtgaaaaatgcgtgaaggtgtga

SEQ ID NO: 477607 - DNA, 1476 bp, Shigella flexneri
atgtcgctgggttccattcctgatgatatccgcgtcccgcttgtctggatcgatatcgacaattcacaggcactggagggtgcatccgcgcaaagccgaaaaattctggtcatgggccatgcggtatcgtccggcagcgcagacgccctgtcactgacccgtatcaccagtgacagccaggcagaccagctttatggcaaagggtcgatgctggctgaaatgctcaaaatgctgcgtcgtgccaacacgtacacggaaacttgggcgatgccggttgccgctcctgaaggcgctgccgcaaaagccacgctgaccgtgctgggtacagcgaccgaagccggaacggtggcactgctgattaacggtgtgtccgttcaggtgagcgtgagcgccggggatacgaaggaaaacattgcaaaagccattgctgatgcggtgacgaaaaagcctgccacgcaggtggccgctgcggtgaaggatgatgccacggataccgtggagctgaccgtgaactggcacggcgtcaccggcaacggtgccgacgttcgcctgaactaccacaccggtgaagccttcccggcaggtgtgaaggtgaccgcaaccgcgtttaccggcggcaccgggacaccggaaatggcagacgccgttgcggccatcggcccggagtggtttaccgatatcatcgccccgttcaccgacacgaaaagcctgaacaccctgcgtgatgaactgctgaaccgctgggggccgctcaaaatgatggaagcgcagctgtggacggcgtttcgtggcacgcacggggaaaccggcacgtttggtgaaacccgcaatgactggctgattagctgcatcggcaccaacctgtcgccgcatccggcgtggatgtgggccgcgtcatacggcgcaacggcagcgtatcaccttgccattgacccggcgcgtccgcttcagacgctggtcctgaccggcattctgccgcctgcgcgtaatgttcgctgggatatgccggaacgtaacctgctgctgcatgacggcattgccacgcacatggtggacgccggggataacgtctgcatcgagcgtgaaatcaccatgtactgggttaaccagtacggtgatgcggatgtgtcgtatcttgatgtgcagtcacccgccacgctgggccgtatccgttacatcattaaaaaccgtttctcgaaccgttatccgcgccacaagctggcggatgatgacgtgctggactcgctggatgcggggcagccggtgatgacgccgaagctgtgcactgcagagctgctggatatctgccagaccgaacttctcccggcgggccttgtggaaaacttcagcgattacagggacacgcttcaggtgacacgcgacagcagcgataaaaaccgcctgaactttatctgccacccgaatctggtgaaccagttgcgtgtgctggcaggcctgattcagttcaagctttaa

SEQ ID NO: 477608 - DNA, 201 bp, Shigella flexneri; identical to SEQ ID NO: 468987

SEQ ID NO: 477609 - DNA, 612 bp, Shigella flexneri
atgacagaacaacgccctgaactgcgcacaccggggagcaccgttgcggccgcagagcacattgtggcctggctgcagacggcccttcagggggacacccctgaccgggctgacgtggtggagcgtcacatcggccagttcaacagcccggatgaagtgaaacgctatctgtccggtcgcaccggctgtatccgtgtcgcggccctgcgtgtccgggatatcaacccgcgcggcgggctgtccggtctggtcacctgggtggcttacatcatggcgacggattcgtgggggtattcccgcgacgtgcgctgtgaagtgctggccggaaaggtgatcaaacgcctgctgtcgtcggatgccacagcgggcatgggggctgaacgcatggctgctgatgtgcgggcagacaacatttactccgtcagcctcgacgggctgggtgtcaccatgtgggcggtgacgtgggagcaggaattccggctggatgaagagattgatctcgccgcgctcccggatttcctgcgcctcggggcgacactgcgcagcggcgaacacactgaaattaacgacgtgatccatgtacggggtgacgatggaacagaaactgattaa

SEQ ID NO: 477610 - DNA, 543 bp, Shigella flexneri
atggggatttctgtacaggtcagcggtgaccagcgtctggaggatatccgccgcgccgttgaaaagctggcagagggttcattgcagtcagagctgctggaaagcatcggtgcggtggtggaatcacagacccgccgccgcatcatcgatgagaaaaccagtccgggtggcgaacgctggccggactggtctgacgggtacaaaaagacccgccacggcaaccagagtctgctgcgcggtgaaggccatctgctggagagtatccagtacatcgtggaaaaccgcgtggtgcgtatcggttcaccgctggattatgcccgcatcatgaatgacggcttttccggcagcgtgccggtcagcgcccacaaacggcttatctcgcagtgtttcgggcgggcgctgaaatatccggtctggcagaccgtcggcgcacatcaccgcatgatgaacattccgcaacgtgaatttctggggctgtcttctgccagccagcaggagctgcaacaggttatcagtcatttctggaaggaggttctgccatga

SEQ ID NO: 477611 - DNA, 438 bp, Shigella flexneri
atgggatacatcacgcaggaagatctgttacgcgcggacggcaatcttgtctggaacatggcgattaaccgggaaaccaacgggctggatgaagacaaaatccgtcaggccatcagtgatgcggaagcggaaattgattcgtttctgtcccgccgctaccagctgccgctgggggtgacggaaatcccgcgcccgctgcaacgcgtggcggtatcgctggcgttttactggttatcagagcgtgacaatcaaatcacggagctgatccagaaacgctacgacgacgccattaaaaccctgcgtgaaatggcgaacggcacccgtgacctgggcctgccgacgtatgccaccccggcagaaaccgacaacgggaaaattattgtggtgggtgccaatgcccggctgttcacccgtaacaacctgaaaggggtgctgtga

SEQ ID NO: 477612 - DNA, 312 bp, Shigella flexneri; identical to SEQ ID NO: 468983

SEQ ID NO: 477613 - DNA, 906 bp, Shigella flexneri
atgtcacagactatcagttctgaaatccttcatgcactgaccacctgcctgagcgccgcctttacccgtggactgagtggtgtcgaaccgcagtggaatcgtattgcttctgaggtgccgagttcgtccgcctccaacacttacggctggatgaaagatttaccggacatcaaagaatgggtcggtgagcgtcagctggcaacgctggacggttatggttacaccatcaccaacaaactctgggaaagttccattcgcgttaagcgtgaacacattgaagatgaccagattggtcagtacagcattaccgccgaacgctatggccgtatgactgctgtgttcccggacaagctgtgttacgccctgttgtgtgccggttttaacaccctgtgctttgacggccagaacttctttgatgaagaccacccgctgggtgacggtacgtacagcaacgttgtcggcaccccggcatcagacaagggcgaaccgtggttcctgattgatgagtcgcaggtgctgaaacccatcatctggcagacgcgacgcgcctttaagtttgaagccctggacgatctgaacagcgagcacaccttcaagaaccacgagttcctgtacggcgtggacggtcgctgtaatgcgggcttcggcttctggcagaccgccgtcggttcccgtgcagcactgacggtggagaactacaaaaaagccaatgagttgctgcggggcatgaagggcaccaacggtgagccgctgggcatccgcccgaccacccttgtggtggggccgaaaaaccgtgcggacgcgaagctcattattgacgccatgctggttaacggcggcgattccaacatctggtacaaggatgtggagatcgtggacagcccgtacatcacccccccggcataa

SEQ ID NO: 477614 - DNA, 957 bp, Shigella flexneri
atgcaaccggaactgctggcgctgtgtttttccctgccagaacccatccctgagctgacacccgctcaactgccggaatggcttgaactcgttcctgcgggtgagttcaccgggcgcgatggccggacgtggatgaaccgcaatccacatgaggtggttgcccgttcgtccgacatcaacattccggtggacattgaacatgccaccgaaattaaaggcccgcggggtgaagaggctccggcgtatggctgggtggaagcactgcgggtgacggacagcggcaccattgaagggcgtgttgtctggagtgagtccgcccggtggatgctgagcgagcgccgctaccgctattacagcccggcgtttttccatgacgcagacggtgcggtgacgcgcctgtccagcgtcgggctgaccaacaaacctaacctggattttcctgcactgaatacggagaaaaacccgatgacagtacctgtgcaaatcaccggcctgcttgggctggctgaatccgccacggtggacgataccgtggccgccattaaacaacttcaggagaacgaacaggtggcgctgaaccgcgcacagacacctgacctgacgaagtttgtgccggtggaaacccacaatctggcactgaaccgtgccgaaaccgcagaaaaacgccttcagcaactggaagagaaggaagccgaggcgcttgtggatgcggccatcggggccggaaaagtcgccccggcaaaccgtgacatgttccttgccacctgccgcacggaagaaggccgcaaacagtttgcggagtacaccaaaggtgcacagccgctggttaacaacgacaagcccagccagggcaaggataaacccgcgcagacactgaccgatgccgaactggcgatgtgtcgcagcatgggtattaccggggaagagttcctcgccgctaaaccgaaacaggagtaa

SEQ ID NO: 477615 - DNA, 765 bp, Shigella flexneri
atgcgtgaaaccctcatcccgaaagaggcgctggcgtggctgaaggcgaagaagctgcgtcccggttttgattaccgggatgtgtggcgggaagagcaccggtacagcttccccgtggccagaatgctgcaactggatttgttgtcggatgtgaaagcccttgtggaagacgccctgcaaagcgggcagacgttcagcgagttccaggagatgctgcaaccgttgctgataaaacgcggatggtggggcgtacaggagatggatgatccgctgacgggtgaaacccgcaccgtgcaactgggcagcgaccgccgcctccgcacgatttttgataccaacatgcgcaccgcccgcgcggcgggccagtgggaacgcattcagcggacaaagcaggccatgccgtatctgatgtacgagctggggccatcccgtgagcaccgggtggagcatgtgaaatgggcgcgtctgtgtctgccggtagagcatccgttctggcagacgcattttgcccctaacggctggggctgcaaatgcaccatccgtcaggtcagccgtggtgagtatgcgcaactggcggcacagggcaccattcacaccgaagcgccggaaatcagaactgtccgctgggtgaacaaacgtacgggcgaagaggaagaggtgccggaagggattgatccgggctggaactacaatcccggcataaaccgtgagcaggagctggcgcgccagctggcggccagacaggcccgttttaacagtgaataa

SEQ ID NO: 477616 - DNA, 1572 bp, Shigella flexneri
gtgaacctgaaacaactggccggggccgttcgccgtctgctgaacccggcaaccggtgaggaagacacgctgaaaaaagagaggctcgatgaagtacaggcccgtccgcgtcaggcgggtgtgcgtccggcctctccgggcatcagcatcgcctccgggctgaatcccggcagactggccggtattctgcgcaatgccgccgacggtatcacgcgtgatttttttatccttgctgaagagatggaagaacgcgatttgcattacgcctcggtactgcgcacccgcaagctgacggtggcgggtatcgaaccggtggtggtggcggccagtgatgacgatgctgacgtgcagctggcggacgccatccgtgcgctgatggaagccccgcaaatccccgagctgatgtttgatctgctcgacgggctgggaaaaggcgtggcggtctgtgaaattctgtggaacacccgtaacaatcactgggtgccccgtgattatgagtgggttgatccccgttttctgaaagccgaaaagcccacactgcgccagttccgcctgctgacggatgatgaaccggtggatggtgtaccactgacaccgggaaaattcattgttcaccagccgcgcctgaaatccggtctgccgctgcgtaacggtctggcccgtctggtggcggtaatgtacatgctgaaatcctttaccgtgcgtgactggtgggcattcgcggaaaaattcggcattccggtcacggtggggaaatacggtcccaacgccacggaggagcaaatccgcgtactgattgatgcgattgcctccattgcctcggatgccgggtgtgccattccgcagtccatgcaactggagatgcaggaaaccgccagccggaataacggcggcgcactgttccgtgaaatggcggaatggtgtgatgcgcaaatcagtaaggctgtgctggggcagaccatgaccacggataacggcagttcgcgttcacaggcggacgtgcacaatcaggtgcgcatggacattgtgcgctgggacgcgcggcagctggctaacacgctgaatgaatatctggtgcggccctacatcgaggccaactacgggccacaggcgcactacccccgtgttgttctgcgtatcagtgaagccgaagatctgaaggcgctgacagatgctctggtggcgctgattgaccgggggatgcgggttcaggagtcggcgctgcgggaccggttcggcctggctgagccagacgaaggggctgatgttctgcatccggtgtctgccgggatgccgggtgatatggcgatgaaccgcgagcgcgtcgccctgaacagggaacaccccgacgaactggcacagatggtggatgatgccctgcgtgactggcagaaaaccggcgaggcgttcacgaacccggtgctgacactggcgcaggagtgcgacagttttgatgactttctgaaacgcctgcctgagcttcaggaaacgctgaacgcggacgactttgccctgcaactggcggaggtgtgctttaaggcgcgtgcgctgggagacactgctcatgcgtga

SEQ ID NO: 477617 - DNA, 1536 bp, Shigella flexneri
atgacacagatgaacgcattcagtgaatccgatgttctgctgccgtatcagaaacgctgggtggcggatgattcaaaactgaaaatcgccgaaaaatcccgccgtaccggtttaacctgggcggaagcggcagatgcggcactgaccgcatcactgaagaaggaaaacggcgggtgcgatcacttttacatcggttcgaataaggagatggcccgcgaatttatcgacgccgtggcgatgtgggcaaaagcgtttaatgcagccgcggaagaaatccgcgaggaagtgatcaccgacgaagacaaggacattctgacgttcgtcgtgtacttcgccagcggatttaaggtcaaggcgctgtccagtaatccgggcaacattcgcgggatgcaggggaatgtcaccatcgacgaagcggcgtttcatgaaaagctggatgaggtactcaaagcggtcacaccactgaccacgtggggcggtaaggttcgccttatctccacccatgacggcgtggacaacccgtttaaccagctgattcaggaaagccgcgcaggcaaaaaagattaccgtattcacaccatcacgctggatgatgcctgcaatgacgggctgtaccggcgtatctgtcaggtgcgcggcatggtgtggtcaccggaagccgaggccgaatggaaagaaggcctgctgcgaaataccgccacccgcgaagatgcgctggaggaatattactgcgtcccgaaaaacggcggcggcacgtatatcccccgctcactgcgtgaacgtgcggcccgtggcaccgggaaagtcttgcgctttaccggcacaccggaatttaacgcactgacggaaagtcagcgccgggcagatatccgggaatggctggaaacggtggtgcgccccgagctggaaaaactcccgaagaatctgcgccactgtctgggggaagactttgcgcgttcgggtgacctgaccgtgctggccccggtgacggtgaacgacgacaccacccgcgaggtgccgtttctggttgagcttgccaatgtgccgtttaaacagcaggagcaggtgctgttctggctttgcgatcgtctgccccgtcgtgacggtatcaaaatggatgcgcggggtaatggtcagtatctggcagaacaggcggcagaacgatacggcgacgaggtggaacaggtgatgctgtccgtggcgttctaccgcgaaaacatgccccgtttccgtgcggcgtttgaagatgatgagctgatccttccgaagcatgaagacgtgatcaatgacctcggggccattcagttactgcgtggcgttcccggtattgacgatgcccgtactaaaggcagcgatggccgcaagcgtcacggcgacgccgctgtggctattttcctgggcttccttgccagtaaagatgactgccaccgttacgagctgcaccgcctgaaccgcccggcgaaaccggaagagcgcaacgcacgccgccagatgaagctgacgcgtggcctgaaaaatgagggaggtttactgtga

SEQ ID NO: 477618 - DNA, 582 bp, Shigella flexneri
atggaaaatgaacaacgccccacccgtggccgtctttccaaagtggatttactcccggacagcatccgtgagcagttacaccagatgctgcgggaaaagcggcacacgcaggaagaaatccgcgaagccatcaatgccctgattgacgaacataacctgccgggggagatgcagttaagccggacgggcttaaaccgctatgccagccgcatggaaaaagtcggggcaaaaatccgcgcctcccgcgaaatggccgaagtctgggcggcaaagctgggttccgcgccgacgttagatgtcggcaggctgctgatggagtttgtaaaaacgctggcctttgaaacgtccatgtcgatgacagaagacgacaaacctgttgcaccgaaggcgctggggcaactggcgttggttgcccagcgtctggaagcggcagccatgaccagccataaacgcgaaaaagcaatccgcgatgcgtttgcgcaggaaatggcagagaaaaccgaagagctggtcagagcgggcggtctgtcaggcggtgcggctgacaccatcaaacgtgaaattctggggattagtgtatga

SEQ ID NO: 477619 - DNA, 288 bp, Shigella flexneri
atggcccgaaaactgaagccgttaagtcgtggagaacgggccgtcgtgcggcagctggcgtactgccttgtgctggcagatatcgagcaaaacgccattgtccgtacatacgaacaacagaccggaaagccctggaacccggatgcaccggatacccccgtgaaacgtgccctgcgttcatcaccggcatatgcgcggctgtggaagctgctgggtaaggatattcagtccgttcgtgaagaaatatacgccggtctgaaaacacagaggacagaagatggaaaatga

SEQ ID NO: 477620 - DNA, 294 bp, Shigella flexneri
atggcgatgaaagagatcctcactgaagaccgtcgtctggtgttgctgcgttccctgctggactgtggcgacagcgcgaatgaatccgtgttgcagacctgccttcaggcctacggtcataaggtatcccgtgatgtggtgcgcacccagcttgcatggctgcgcgagcaggggctggttcgtctgtctgatgtgggcggctgttacgtggctgaaatcaccggcagcggcgaggatgtggcaaacggcctgtccggtgtgccgggcgttaaaaaatcccgtgcgagggactga

SEQ ID NO: 477621 - DNA, 306 bp, Shigella flexneri
gtgtcctgggaagtgatcagagccaactggcccattctgtgggcattgctgatgacggggattaactttctccagttgattctggcgaagacttacgtcaaacgcgaagagtttgattcgctgcgttcccgcgtgtcggtgatggaaggcctggtgaatcagctacccgaccgcaatgaatttcaccgcctgcaactggatatcagcaacctgcggggtgaaatcaaagagctggggccatccatccgccaggtatcccgcatcagcgatttgttattagagaacgaattaaaggaaaaaaattaa

SEQ ID NO: 477622 - DNA, 228 bp, Shigella flexneri
atgaccgatgaaaccgaccgcatcagtgaagtggttttaaacgaacgtcaggacgtcgttaacgcctggctgatgcggataaaagaagcaccccacagtcggggcttctgcaatgactgcgggaacgttattccggcacagcgccttgcggcactgcctgatgtggtgacctgtattgactgtcagcaggcgcgggagcgcaggaggaaaacgtgtcctgggaagtga

SEQ ID NO: 477623 - DNA, 609 bp, Shigella flexneri; identical to SEQ ID NO: 468972

SEQ ID NO: 477624 - DNA, 411 bp, Shigella flexneri
atgcacagaatgaatagtctttttgttcgcgttatttactcccgctttatgttgtgccagtggtcgtttctggggctgtcggcagtactttttctggcgagctgttttgccggatggcgggcgtttgcggtcatggtgctggcatacggcgcgacactctgcctgattcacagtttccagctgggcaacgtaccttatcgcctgcaacccaaaaggcgtttccgggccgcctcccttcgaattgtcgtgtggtcatgggtggtctgggccgttggttttttcatgctgacattcggccttctttatctgaaggagccttatcagctggcgttctggctgggcggtatcttttgtgcggcactttataaacatcagcgccgttttcataagggggattcatggacccgttaa

SEQ ID NO: 477625 - DNA, 228 bp, Shigella flexneri
atgggcaaaggctgggatgcctcactgaaagccgggcgacgcgaccgcctgcgtcaggaggttctgcaccgtatggccggaggtccgcctccgaaaccgctggactataccggccatgacggcacacacgccagctactacatgcgtggctggaacaccgtggatacacgggacattttctggcagtgccagaagtacaaggaaaaactcaatgcacagaatgaatag

SEQ ID NO: 477626 - DNA, 588 bp, Shigella flexneri
atggaaaatcaaaaattctccccggcctttgagtatgcgctgaattttattctgcgtcccgatatcgaaggcgtctatgtcaatgaccccactgaccgtggcggcgaaaccagatacggcatttctgaccgccgcgacggtgtgattgacggcaaaaccgacgtcaacggagacggcaaaccggatacccgcatcaaagatttgacccgcgaacaggctgcgcagatttactggcgcgattactggctgccagccgggtgtgagcagtggcctgatggtgtagcgctgtttgtgttcgatgcggcggttcagcatggcgttaaaaaagccatcagaattttgcaggaagccgctgatgtggatgctgacggcatcatcggcccgcgtacccgcagggccgtgaacctgtctaacccggactggttgctgacccgctgtattgtccgtcgttcccgcttttatgccgacatcatcaaatcaaaacccgcccagggcaaatacctgaacggatggtttaaccgcatggaagaactgaccgacgcctgtctggaaatcatcgacaacgcgccgtccgccacgcgggggtga

SEQ ID NO: 477627 - DNA, 450 bp, Shigella flexneri; identical to SEQ ID NO: 468968

SEQ ID NO: 477628 - DNA, 552 bp, Shigella flexneri
atgagctgcacatccctgattaaattaattcatgttgcccgtcgtgacctgcaactcgacgatgacacttaccgcacctttctggtgcagtgcacgggcaaaaccagttgccgcgagctttccgttgcacaactggaacgtgtgctcgatgccatgaaagagcgcggttttaagaagcagaaaaaacatccccgccgtcgctttaaggggcatgtcacaccgcgcgagaagatttataaaatctggcagcagatgttccttgatggtttcgtctccgatatcagcgacgctgcgctggacaaatacgttgaacgcctgacagccagacgtaatggcggtcagggtgtttccacgctggcctggtgtcacggggaatcgttgcaggttgtgctcgaaacgctcaaacagtggcatatgcgctgcatccgtgaagcctttgcccgacatggtgtgcctttacctgtgagcgaaaccgggcaggagctgcgcggctatgatgcactgaccagtgcgtatgcccgcgcacgaaacagcgggagaattgctgtatga

SEQ ID NO: 477629 - DNA, 318 bp, Shigella flexneri
atgggatctgatgcgaaaaacttgatgagcgacgggaatgtgcaaattgttaagaccggcgaggtcattggcgcgacgcaacttactgaaggcgagttgattgttgaagctggcggaagagccgaaaataccgtggtcacgggggctggctggttgaaagtggcaaccggtgggatcgccaaatgcacacagtacggtaacaatggcacgctatcggtcagcgacggtgccattgccacagatattgttcagtccgagggaggcgcaattagtctctctacgctcgctacggttaatggccgccatcaccgaaggtga

SEQ ID NO: 477630 - DNA, 867 bp, Shigella flexneri
atgcctgatgacacatcgattcctgccgatgttgaagaaaaactgctgcgctttgcccgcgccggtttggccgtcgccagcatgaaaggtaaaagctatctgtcgctgggcggcgtttcgatgggtatcgccggttctattgttgatcacaacttctttgaatcctggctgggaatgaaagtccaggtggtggatatgaccgaactgcgtcgccgtatcgatcagaagatttacgacgaagccgaactggaaatggcactggcctgggctgataaaaacttccgctatggcgaagatgaaaataacaaacagtatcaacgcaatgccgagcaaagccgcgcagttctgcgcgaaagtttactgatggcgatgtgtatccgcgacatgatgcaaggcaacagcaaactggccgatattggtcgcgtggaagaatcacttggctacaacgccatcgctgcgggcttccaggggcaacgtcactggaccgatcaatatcccaatggtgacaccgccgaagcgatcctcaacagttcatttgactggaatggcgtgcgcgaaccctttgtcgtggcgaccgaaaacgacagtcttaacggcgtggcaatgctaatgggtcaccagctcaccggcaccgctcaggtatttgccgatgtgcgtacctactggtcaccagaagcaattgagcgtgtaacggggcataaactggacggactggcagaacacggcatcatccatttgatcaactcaggttctgctgcgctggacggttcctgtaaacaacgcgacagcgaaggtaacccgacgatgaagccgcactgggaaatctctcagcaagaggctgacgcttgcctcgccgctaccgaatga

SEQ ID NO: 477631 - DNA, 441 bp, Shigella flexneri
atgaaaaaaatcagcttaccgaaaattggtatccgcccggttattgacggtcgtcgcatgggtgttcgtgagtcgcttgaagaacaaacaatgaatatggcgaaagctacggccgcactgctgaccgagaaactgcgccatgcctgcggagctgccgtcgagtgtgtcctttccgatacctgtatcgcgggtatggctgaagccgctgcttgcgaagaaaaattcagcagccagaatgtaggcctcaccattacggtaacgccttgctggtgctatggcagtgaaaccatcgacatggatccaacccgcccgaaagccatttggggctttaacggcactgaacgccccggcgctgtttacctggcagcggctctggcagctcacagccagaaaggcatcccggcattctccatttacggtcatgacgttcaggatgcctga

SEQ ID NO: 477632 - DNA, 123 bp, Shigella flexneri
atgttagataaaattgaccgtaagctgctggccttactgcagcaggattgcaccctctctttgcaggcactggctgaagccgttaatctgacaaccaccccctgctggatccggaaaaaatag

SEQ ID NO: 477633 - DNA, 312 bp, Shigella flexneri
atgagtcaggcgctaaaaaatttactgacattgttaaatctggaaaaaattgaggaaggactctttcgcggccagagtgaaaatttaggtttacgccaggtgtttggcggccaggtcgtgggtcaggccttgtatgctgcaaaagagaccgtcccggaagagcggctggtacattcgtttcacagctactttcttcgcccaggcgatagtaagaaaccgattatttatgatgtcgaaacgctgcgtgacggtaacagcttcagcgcccgccgggttgctgctattcaaaacggcaaaccgatttttatatga

SEQ ID NO: 477634 - DNA, 189 bp, Shigella flexneri; identical to SEQ ID NO: 477258

SEQ ID NO: 477635 - DNA, 930 bp, Shigella flexneri
atgcagttacagaaattagtcaatatgtttggtggtgatctcacccgtcgttatgggcaaaaggtgcataagctgacgctgcacggcggttttagctgccctaaccgtgacggtaccatcgggcgtggtggctgcacattctgtaatgttgcctcgtttgccgatgaagcgcagcagcatcgttccattgccgagcaactggcgcaccaggcgaatttagttaaccgcgctaaacgctatctggcctactttcaggcgtataccagcacctttgcggaagttcaggtgctgcgttctatgtatcagcaggcggtgagccaggccaatattgtcggtttgtgtgttggtacccgcccggactgcgtgccggatgcggtgctggatctgctttgcgaatataaggaccagggttacgaagtgtggctggagctggggctacaaaccgcccacgacaaaacacttcatcgcatcaaccgcggccatgattttgcctgttatcagcgtacaacccagctggcacgtcagcgcgggctgaaggtgtgttcccacttaattgtcggcctgcctggcgaagggcaggctgaatgtttgcaaacgctggagcgagtggttgaaaccagcgtggacggcataaagctgcatccgctgcatattgtgaaaggcagcattatggcgaaagcctgggaagcggggcgtttgaacggtattgaactggaggattatacgctcactgccggagaaatgattcgccatacgccaccggaagtgatctaccaccgcatttccgccagcgcccgtcgcccgacgctgcttgctccgctgtggtgcgaaaatcgatggacgggaatggtcgagctggatcgctatctgaatgaacatggcgtacagggatcggcgctgggacgtccgtggctacctccaacggagtag

SEQ ID NO: 477636 - DNA, 387 bp, Shigella flexneri
ttgtgccgggggggggttggcgcggcgaagaatttaagcaattttgccagtcttggtagcgaatgcaccgttgaccgtgaattaaaggcgctggcacaagcgatgcatcaggccggaaaaccgcttggttttatgtgtattgccccggcgatgctgccgaaaattttcgatttcccgctgcgtttgaccatcggtactgatatcgataccgcagaagtgctggaagagatgggcgcggagcatgtgccgtgtcctgtcgatgatatcgtggttgatgaagacaataagattgtcaccaccccagcatatatgctggcgcagaacattgcagaagcggcgagcggcattgataagctggtttcccgcgtgctggttctggctgaatga

SEQ ID NO: 477637 - DNA, 243 bp, Shigella flexneri
atgagtaaaagccgcttaacggtgtttagtttcgttcgccgttttcttttgcggttaatggttgtcctcgccgttttctggggcgggggcatcgcgttgtttagcgttgcgcctgttcccttctcagcggtaatggtcgagcgacaggtcagcgcctggctgcatggcaattttcgttacgtggcacattctgactgggtcagtatggatcaaatctcgccggtaatgctgccaacttactga

SEQ ID NO: 477638 - DNA, 1392 bp, Shigella flexneri; identical to SEQ ID NO: 474296

SEQ ID NO: 477639 - DNA, 363 bp, Shigella flexneri
atggctacagtcccaacccactcattcctcaaaattgagaccgtcaacggcaaggccgttattttctctttgcatgtggcctgccactttaagcgcatgcaccagaacatcgtagacaaaatcgagtatctgaactgctcgcgcgaattttttacccgcaatttcataccgggtacttaccacatctatgacgactctctgcgtggttattacatcacccttgatggtctgatgctgcttcagcttgggttaagtctgcgcacaatgcggtactacgagagttgcattgaagcgttccatgaggctgaaaccgtccaggtgcattccgctttccgtcgtcatcaacgggaggtgcacctatga

SEQ ID NO: 477640 - DNA, 330 bp, Shigella flexneri
atgaactacactatcgaatactacagtgaagaggtccgactggaggtcgatcagcttccattgagtatgcgtgccagataccagcatcttgttgaacgcatgaaggtatacggcagcaatctcggagaacctcacaccagcgcctttggtgatgggctttttgagcttcggattaaaggcagcgatggcattgcccgcgttttttactgcacactgacagggaagcgcatcatcatgctgcacagcttcatcaagaaaactcaaaaaactccaccagctgagcgtaaaaaagctgaaaccagaatgaaggaggttaagcatgactggtaa

SEQ ID NO: 477641 - DNA, 774 bp, Shigella flexneri
atggttcggcaccaacaagtacgaatgtgcggaatcttaaaagaatttatccgtaaggagatggcagtgaacaccgcaatttttaacgacaaagtatccatgaccagcgttgaaatcgcagagctggttggaagtcaacacggcaatgtcagaatatcaatagagcgtctggcaaaacgcggggtgattcaacttcctgcaatgcaaaaagttgagaacgaacaatcatttagccaaaacaaattcacaaacgcatatattttcgaaggcgaacaaggcaaacgcgacagcatcattgtcgtcgcacaactttgcccggaattcactgcccgcctggtagatcgttggcgcgaactggaagagcaggtgcgcaaaccaatgagcgaaatcgaaatggttgccgcgatggctcttgaagccgttcgtcagcaaaaacgcctcgacaagatggaagaaaaagtcagtcacgttactgaaactgtcgaacaaatcaaaagaggcaccatccgcgatggttatgcaggctaccgtcagctggtggcggaaacgggtatgtcagatgcgaaatgccgcaatctggtgaacatctatcaaattccaactgatactcacgaatttcttactccggacggattgttgtcacgccgcgcaattgttgcagtggaaccgtttatggctgctttccatcgtatgatgagcgaagcggaaccgagaggaactcgttggtatcacccgaaaatggggctgttccaggcgctgggctggcaggggtga

SEQ ID NO: 477642 - DNA, 294 bp, Shigella flexneri
atgaaagttcaggccgttggtttattctggtttcgcgatgctattcagtatcatgagttcaaaaagatttttactgatgcagatgtgctctccgacagttacaccgagtggaaacacgacgctgaaaaattgattaagcgtgtcgaaagaagcgggcaacgagttattaaagttgaagcggatacaaccgagttcatcacctggtgtacaagcgaaggcattggactcaatgccaaaggtagaatgcagttcgcatcctttaaggcttaccaacaacttctcagcgaacgctaa

SEQ ID NO: 477643 - DNA, 273 bp, Shigella flexneri
atgaaaggaaatgattacgacaaacttcgtgcattaattgcgcaaaatgccatagcgcgaaatctgggtgtgacaccgcaagcggtgaatcagtggttttcaaaaagcacaattcctgcccgtttcgttttacgcgtatgtgaagtagttgcatgtaaggtcacgccgcatggcttaaggccagatctttatcctcaccctgaagatggaattcctgattcgttacgcaaaatttcaaatccaagcttagcgcacacagaggatgagaagtga

SEQ ID NO: 477644 - DNA, 690 bp, Shigella flexneri
atgaagaacgtcaaaaacacggaaaatcgaatagccgcgatgctgaaagcaaaaggatggactcaggctcaactggcccgcaagttaggtgtgagtgcgcaatcagtgcagtactggacaacaggaaaaacatttccacggagtgataagctcgcgcatttatcagagattagcggttatccacaatcctggttcttaggtgaagactcctcaccaaccttttcctcgcaagagaaacaccagacaagaacagatagcgtcgtgtttaatgtccttgatgttgagtttagttgcggtgatggaactcatgtccgtggtgacttgatagatgtagtgcgctcaatagaacttgatcctgaatatgcccgacgtcttgttggaaatcgggcattcaaaaatatagaaataggtaacgccagaggagacagtatggctcccacaatctcacctggtgaccttctttttcttgataagacagtaacttattttgatggcgatggtatttatgcattttgttttgatggagaatgctacgtgaaaaggcttcaaaaaattggaagcaaaatcatggtgttatctgataaccccaattatcaaccatggagcatcgaaaaagaggggttagctctgctttatatccagtctaaagtgatctcatcagtaccattcaacataaacagatttggttag

SEQ ID NO: 477645 - DNA, 549 bp, Shigella flexneri
atgaagacactaaaagcaactccagaaacaactaattttatcaactgcggctgtgttacgcttaagggcttagaacttgattcctttgcattaaatattgcaaatttgctaagtgctgtacgcacattccatcttctggattgtgctcgctcaaaggaactgggcattgaggtaatggaatttatccatgaatatgctctatctgcggcttctcctgcacaacaaaaacaatccttccctgaaagctggctggttaaccttcgcacccaacgcgaagcctgcggcttaacaaccgccgaactcgccaggctgctcgatgtggatgaagaagtcatcatccagtgggagagcggagagtatgaaccaactatcagtatgcttatcccactgacaaatattcttggctgcgatccgatgtggctgttaactggcgaggttactcctccggagcaaccaaaaagtgaggagcagcaacaccatgacgcatctcaacaagtttgctccttatctcgcgaagctcttctacggaagaaccaataccaatggtga

SEQ ID NO: 477646 - DNA, 261 bp, Shigella flexneri
atgttttcgaactttttcatggcttcctcagctgacttatatgttctgctatatagcgagtctcagaagtgttttcatattgagactgtttccgcaatgattgataaaaatgttcgcatgtaccttgaggggcgaagcggcgattttgtcaccattggtattggttcttccgtagaagagcttcgcgagataaggagcaaacttgttgagatgcgtcatggtgttgctgctcctcactttttggttgctccggaggagtaa

SEQ ID NO: 477647 - DNA, 1227 bp, Shigella flexneri
atgtcaggaaccataccgaaaatcaaaacaggtgaaaatgttctgtctgcagccattcagcgcattgaatggctatttggaacgtttccttctgtctgcttgtccttttctggtggtaaggattctaccgtgcttttccatcttgtgtccgaagtggcccgcaaaaagaggcgtcgtttttcggtattgttcattgactgggaagcacaatatcaatgcaccattacgcatattcagaagatgcagaagatgtacctggatgtgacggacaggttttactgggtggcccttcccctgactacggtaaacggtgtctctcagtttcagccggagtggatatgctgggagcctggtgtgacctgggttcgccatccaccggaatatgctattacggatatggcgtattttcccttttaccgatatgccatgacctttgaggaatttatcccggcgttttcctcctggtttgccagggataaatacctggtggctgttctgaccggagtccgggcagatgagtccctcaaccgctttatgggactggtatcccgtcgcaaacagagatatgccgatgataaaccctggactacggcatcacctgaagggttttattacaccatgtatccgttgtatgactggaaagcccgtgatatctggatatataacgccagaacccgagctatctacaatcccctgtatgacctgatgcaccgtgcctgtgtgccgttacgcaacatgcgtgtctgtgagccttttggtcctgaacagcgtaaggggctgtggctttatcatgttctggagccggaaacctgggccaggatgtgtgagcgggtgtcgggtgctgccagcggggcgctttatgccaatgagagcggtgcctattttgccctgcgtaagcgtatcacaaagccgcctcatcatacctggcgtagctatgcgatgttcctgctggatgtgatgccggaaagaacggcagaacattaccgtaataaaattgctgtctacctgcgctggtatcagacgcggggcttcccggatgacatcccggatgaacaggagaatgacctggggagccgggatatcccgtcctggcgacgtatctgtaagacactcataaagaatgatttctggtgccggactctctccttcagtccgaacaaaccccggcactatgaacgttacctgcagcgtatgaaggaaaggaggaaggaatgggggattctgtga

SEQ ID NO: 477648 - DNA, 753 bp, Shigella flexneri
atgaaaaaggtgacgttgtttctgtttgctgccagccacctgccttcctgtgtactggcctggaacacgccaggagaaaatttcagcggagagcttaagctggaaggcccggtgaccagtacccgtaacccgtgggtatggaaagtcgggcagggaaatggaggtctggaggttaaacagagtggcggtgggggggggattcaggtcgcactgccggcgatgaccgttttactgggaaaaaccaccctgaccacaccggcaggacgtgaggggctttcaccccgggtcagttacggaaaaggcactgaggggttttcacttgtatggacagcgcctggcatggctgaagtgacgctacctgtcaccggagataataatgcccgggcaggcacatttgttttcagaattcaggctgtgggggtgttgcgccatgtgcagggcggacaaccggtgtatgttggtatgtatgacgacctgaatacgaatggtttgccaggtgaaagcactgccatgaaggtttctgatattccgggcgttctgcagaagatgttcagtggggaaggccccggctggcttcagacaatgacactcagtggttattcaggggtgagtcatttcagtgatgacttcctgcgccaggttgaaggcgtgtatggtgcacagactgtggctggcagtggtgaattacggctgaacggcgagatgccggaacactggagggtgtcactgtcagtaaacattgaatatcagtaa

SEQ ID NO: 477649 - DNA, 798 bp, Shigella flexneri
atgaaaataacgcatcattataaattcttcctttctgctgttattttggtaacaatattttattcggcagtgccatatgcaaatattcttgatggcggcgaaattcagtttaatggctatgttactgatgaagcacccaaatgggcctggcagataagttctcccgaccagacctggtctgtggatactgccgatgcccgtacagagaacgggcaactggtttttaatttgcatgataaaggggctctgccatttctggagggacatctgcatgatgtggctgagcgcggtggtcccggattcacgccatttattactttcagcagtaacggacagccttttactgtgacggaaggaaatggtgcctcagcacagcactttcgcgcctctgtcccggtgcgtgacccggagacggggaacgtgtcgggacagcttttttttaccctgaatcagggaatggcggtcagtaccggcagacaggacgacggggcatccgtaccggctggcatgtcgctggtcagtggacagagtgtgacggatgtacagccgggaagtctgccacaggggctgaaagcccgactctcttccctgttactgatgaatcagaattttggcaatggcatgaatgcggtggataacggacaggttatcaaccaggggatactgactgacggtcgggtgatggatctggctgcggcatatgcctctgaggtgtcggattttgaactgcggttgccggcagagggtacacctgcagcatggcaggcggggctgaatgtgacggttacagtacagtga

SEQ ID NO: 477650 - DNA, 801 bp, Shigella flexneri
atgaaaaagactctgattgcactgactgtggctgcttctgccgcagtatccggctctgctatggcgtggaatccctctggccttggtggcaacggtggcacctttagcatgagtggtactctgaccaaagctgagaaaacagtaccgtgggcagtggaaataggtgctccggtaacagcgcttgatgtgaccgttaaacctgaccagaagaatgttttcattcttttagaaaaagacataccgatacttggcattcgtagcaacccgactggtttcatgggggaaaaggggattgccccacaaatcgattataataaagccgctgatgtggattatatggataaggggaatttacctacgcaaattgatgtcacatcatctgatggtaagaaaattggtactctggcgttcgtaatgcgagttgcctgtcaggccagcgaaaagaggggtgaaggcgacgacaagttagagagtaacatgctattcgccagttcaaaaggtaaagctttctttggtggagttgccaaagatgacaaaggtgtctggagtgacgccgctgcctatacttgggctacccacctttttagcagtattgctgactcgtgggatactaaaattccttacacggcgggcgatacagatgaaaccgacttcagtaatggagacaggctttaccgaggttactatgcatccggccttgccaaggatatccccatggaactagttcttgatcagactataacgtctgctaccccagttccgtggaaagcttctctgccaattgttatctcctacatgtaa

SEQ ID NO: 477651 - DNA, 492 bp, Shigella flexneri
atgaagaaaacaatgatggtagtcgccttggccctgagtgcactcagtattcagtcaatacttgccgctgaatacagcgagaaagcacagtatctgggtgtggtgaatggccaggtggtgggtaacagcgtggtgaaggtaacccgcataccgacagatccggtgctgtaccggagtggagacacgacgcctcttcccgaccgcctgaccatccgtaatgcagaatccagagcagcatctggtggcttggcgtatatcacggtgaaacaggtgctgccggataacggggaagcccgcatcaccctgaagacggccctgatggttgacggaaagaaagtggcaatcagcgccagacagcagggtgaggatatggtgataactttgccggaagcacagaagcagattgaattaagaacggatgcaccggcagagctggaagtaccggtcagttaccggggaaatctgcagatagcgctgcaggtggaggactga

SEQ ID NO: 477652 - DNA, 792 bp, Shigella flexneri
gtgagtaagcgtaacgcagtaacgacgtttttcactaaccaggtgacaaaagcactgggaatgacgctggcgctgatgatgagctgtcagagtgcggtggcttccctggcggcagaccagacccgctatatctttcgcggggacaaggatgcgctgaccatcacggtcaccaacaatgacaaggaacgtacctttggtggtcaggcatgggtggacaatatcgtggagaaagacacccgtccgacttttgtggtgacgccgtccttcttcaaggtgaagccgaatggtcagcagacactgcgtatcatcatggcctcggaccatctgccgaaggataaagagtcggtgtactggctgaacctgcaggatattccgccggctctggagggcagcggtattgcagtggcgctgcgcacgaaactgaaactgttctatcgcccgaaggcactgcttgaaggtcgcaagggggcagaagaaggcatcagtctgcagagccgcccggatggcaggaccatgctggtgaacaccacgccatacatttttgcgattggcagcctgctggacggaaacggaaagaaaattgccgcggataacgagacggcgcagaaactgctgatgttcatgccgggtgatgaagtacaggtgaagggaaatgtggtgaaagtggactctctgaatgattacggtgaactgcagacatggacgattaaccagaagaaatcagcaatatcgtctgcacagaagtcatctgatacagagggtaattcacctgataaagctggtaaaaaataa

SEQ ID NO: 477653 - DNA, 2439 bp, Shigella flexneri
gtgtgtgcaggaaagaaggtggttgcagagctggtttcgtctttgttttcccgtcgggctgcgcttgctgtatcagctgctttcgccagtaccacaggtgttgcaggtgaaaaactggatatgtcctttatccgggggggggccggggttaatccggaagtctgggcagcgctgaacggcagctatgcgccgggacgttatctggttgacctgtccctgaacgggaaggaggccgggaaacagatactggatgtgacaccacaggacagtgatgaactgtgcctgacagaggcatggctggcgaaggccgggatttacgtcagtgcagattactttcgtgagggatatgacgccacacggcagtgttatgtgctgacaaaagcgccgtcagtgaaggtggattttgatgtttccacccagagtctggcgctgtccattccccaaaaggggctggtgaagatgccggagaacgtggactgggattacgggactggtgcatttcgcgtgaactataacgcgaacgccaacatcggccggaataacacctcgacctttggctcggcagacctgaaggccaatatcgggcactgggtggtgaattcttctgcctcagccagcggtggtgacagcggggataactccgccacgataaacgcgttcacggccacccgggccatccgcgcactgagtgcggacctgacggtcgggaaaacatccaccgggagcagtctgctgggcagtacgggaacgtacggagtgtcgctgagccggaacaacagcatgaagccgggcaatctggggtataccccggtgttcagcggcattgcgaacggggcgtcgagggtgacactgacacagaacgggcggttactgcattcggagatggtgccggcaggtccgttctccatcacggatgtgccgctgtacaccagtggggatgtgaccatgaaaatcaccggcgaggacggtcgtgagcagactcagctcttcccgttgtcggtgatggccgggcagttaaacccgggacaacacgagttcagcgtggcagtcggtttgtctgacgatgacagtgacctgaaaggcggcgtgtttgcggcgtcatacggttacggtctggatggactgacgctgcgcaccgggggcgtgtttaaccgggactggcagggtattagcgccggggctgttctggggctgagttatctgggggcagtgtctgctgacggggcttatgccatggcggaataccgtgacggcagccgcagcggaaataaggtgcagttgtcctggagtaaacaactggagatgacgaacaccggactgcgggtgagctggtcacggcagagtgaggaatatgaggacatgtcctcctttgacccgacagagctgtggtcgcagtcaaatcatggtcgccggccgaaggatgaatggaatgccggtatcagtcagtcggtgggggggctgttcagtctgtcggtgtccggctggcagcggagttattacccggcacagatgactggccgttatcggtacagcgatgacaatggtctggacacagggattaccggtaccctgagcacacagattaagggcgtcagtctgaatctgggctggtccggctcacggaattcgcagggagagaataacaggtcggcgtcagcctctatctcggtgccattcacgctgtttgagcgtcgctacagcagcagtacatcggtgagtaccagtaaaggcggtggcacgggcttcagcactggcgtgtccggctcgctgaatgaccgtttcagctatagcctgggcggcggtcgtgacagcggtggtggtgtgagtagttatctaaacgcgtcgtacagtggtgaccgggcttatctgaatggtgccctgaaccactcacagtccggcggaaccagtggttctgtatcagtcagcggttcggtactggtcgtcccgatggcgaaagacattatgttcagccgcacgaccggggacaccgtggccgtggtgaacgtgaaggatacaccgggtgtgaaggtgacgtccggtgacggacagactgacagtgacggcaacctggtggtaccgctgaacagctatgactggaacacggtgacgattgatgcgggcacactgccgctgagcaccgaactgacgaacaccagtcagaaggtggtgccgacggacaaggcggtggtctggatgccgtttgatgccctgaaagttaagcgttacctgctgcaggtgaagcagcgtgacggtgagtttgtgccagggggaacctgggcacgtgacagtaagaacacaccgctgggctttgtagctaacaatggtgtgctgatgattaacacggtggatgcgccgggtgatatcaccctaggccagtgccggatacctgcggccagactgcaggatactgagaaactacaggagattacgtgtgagtaa

SEQ ID NO: 477654 - DNA, 543 bp, Shigella flexneri
gtgagtattaaatatattgtgtttgtctctgctttattaatttccaatacgggaaaagggggggggcagcgagttgttttcaatgtggatattgtaggttctgcctgtcatgtggtggtggatgcggacggtttcggcaacagtggtcgactgatattcgggacttaccgtaaatccagtggcgtgcctgtattgccacgtgactttgttgtgcgcttgtatgagtccggcgctacggttcaaggttgttcagcctttcgagcggggcaggtcgcaactctggattttggtaacccgggccaactggatgcaaagggcgtggtcactcgcggtgctggtgatggtattcgcgtggatgtacgggcggtggatacacaggcggattatcgcggacgtctgactcaggacagtcattcggtgaattacccggtggagtttgctgttaagggacagttccgttttcgtgcacagccggtgttcccggcgaacgtgaaggcaggggaatacacaggggcgctgacctttgtggtcacgtatcagtaa

SEQ ID NO: 477655 - DNA, 165 bp, Shigella flexneri
atgtttttcgataaaagcaccgataactttttcatgaaattttacagagcgagagaaacagatggttctgcgagccaggcgtttgattcgggttctcaggggcagattgttgcgctcaatgcgctgagtaaaaatcttaccagtcagatacttctctttcggtaa

SEQ ID NO: 477656 - DNA, 147 bp, Shigella flexneri
atgtatcagcagttactgaaggttgacccgctgaagtgcgagctgtgcggaggtcagatgcggtttacgggactgaagatgggttaccgtctggcagagcagattatgatgcatgagccgctggcacgaatgcggtggtgcggctga

SEQ ID NO: 477657 - DNA, 1596 bp, Shigella flexneri
atgaaacctgtaaaaccacctcgtattaatggacgagtgccggtcctgtcggcacaggaagcggtgaattatattcccgacgaagcaacactttgtgtgttaggcgctggcggcggtattctggaagccaccacgttaattattgctcttgctgataaatataaacagactcaaacgccacgtaatttatcgattattagtccaacagggcttggcgatcgcgccgaccgcggtattagtccgctggcgcaagaaggtctggtgaaatgggcattatgcggtcactggggacaatcgccgcgtatttctgatctcgcagaacaaaataaaattattgcttataactatccacaaggtgtacttacacaaaccttacgcgccgccgcagcccaccagcctggtattattagtgatattggcatcgggacatttgtcgatccacgccagcaaggcggcaaactgaatgaagtcactaaagaagacctgattaaactggtcgagtttgataacaaagaatatctctattacaaagcgattgcgccagatatcgccttcattcgcgctaccacctgcgacagcgaaggctacgccacttttgaagatgaggtgatgtatctcgacgcattggttattgcccaggcagtgcacaataacggcggtattgtgatgatgcaggtgcagaaaatggttaagaaagccacgctgcatcctaaatctgtccgtattccgggttatctggtggatattgtggtggtcgatccggatcaaacccaactgtatggcggtgcaccggttaaccgctttatttctggtgacttcacccttgatgacagtaccaaacttagcctgcccctaaaccaacgtaaattagttgcgcggcgcgcattattcgaaatgcgtaaaggcgcggtggggaatgtcggcgtcggtattgctgacggcattggcctggtcgctcgggaagaaggttgtgctgatgactttattctgacggtagaaacaggtccgattggcggaattacttcacagggtatcgcctttggcgcgaacgtgaatacccgcgccattctggatatgacgtcccagtttgatttttatcacggtggtggtctggatgtttgttatttgagttttgctgaagtcgaccagcacggtaacgtcggcgtgcataaattcaatggcaaaatcatgggtaccggtggatttattgatatcagtgccacctcgaagaaaattattttctgcggcacgttaactgcgggcagtttaaaaacagaaattaccgacggcaaattaaatatcgtccaggaaggacgggtgaagaaatttattcgggaactaccggaaattactttcagcggaaaaatcgcgctcgaacggggactggatgttcgttacatcaccgaacgtgctgtattcacgctgaaagaagacggcctgcatttaatcgaaatcgctcctggcgtcgatttacaaaaagatattctcgacaaaatggatttcaccccagtgatttcgccagaactcaaactgatggacgaaagattatttatcgatgcggcgatgggttttgtcctgcctgaagcggctcattaa

SEQ ID NO: 477658 - DNA, 1152 bp, Shigella flexneri
atggatttttctttaactgaagaacaagaactgctgctggccagtattcgcgagttgattacgactaactttccggaagagtattcccgcacctgcgatcaaaacgggacatacccgcgtgagtttatgcgggcactggcggataacggtatttccatgcttggtgtgccggaagagttcggcggtatccctgcggattacgttacccagatgctggcgctgatggaagtgtcaaaatgcggtgctccggcatttttgattaccaacggtcaatgtattcacagtatgcgccgtttcggttctgcagagcagctacgtaaaacggcagaaagcacactggaaacgggtgatcccgcctatgccctggcgttgacggagccaggcgcaggctcagacaacaacagtgccactaccacttacacgcgtaaaaacggcaaggtttacatcaacggacagaaaacctttattaccggtgcgaaagagtacccgtatatgctggtgttggcgcgcgatccgcaaccgaaagatcccaaaaaagccttcaccctgtggtgggtcgactccagtaagcccggcattaagattaacccgctgcataaaatcggctggcatatgctcagcacctgcgaagtctatctcgacaacgtggaagttgaagagagcgacatggtgggcgaagaaggaatgggtttcctcaatgtgatgtacaactttgagatggagcgcctgatcaacgccgcgcgcagcaccggctttgccgagtgtgcctttgaagatgccgctcgctatgccaaccagcgtatcgcttttggtaaacccattgggcataaccagatgatccaggaaaaactggcgctgatggcgattaagatcgacaacatgcgcaacatggtgctgaaagtggcatggcaagccgatcagcatcaatcactgcgcaccagcgcggcgctggcaaaactgtactgtgcacgtaccgcaatggaagtcattgatgatgcgattcaaatcatgggcggtctgggctataccgatgaggcgcgcgtctcccgcttctggcgtgatgtccgttgtgaacgtatcggcggcggtacagacgaaattatgatttacgtagcaggtcggcagatcctgaaagactatcagaacaaataa

SEQ ID NO: 477659 - DNA, 600 bp, Shigella flexneri
atgaaagtgacattaacgtttaacgaacaacgtcgtgcggcgtatcgtcagcaagggctatggggcgatgcttcactggccgattactggcagcagaccgctcgtgcgatgccagacaaaattgccgtggtcgataatcatggtgcatcgtacacctatagcgcgctcgatcacgccgcgagctgtctggcaaactggatgttagcgaagggtattgaatcaggcgatcgcatcgcatttcaactgcctggctggtgtgaatttaccgttatctatcttgcctgcctgaaaatcggtgcggtttccgtgccgctgttgccttcctggcgggaagcagaactggtgtgggtgctcaataagtgtcaggcaaaaatgttctttgcaccgacgttgtttaaacaaacgcgtccggtagatttaatcctgccgctgcaaaatcagcttccacaactacaacaaattgtcggcgtggacaaactggctcccgccacctcttccctctcattaagtcagattatcgccgacaatatcccactgaccacggcgataacgacccacggcgatgaattagctgcggtgctgtttacctccggaacctag

SEQ ID NO: 477660 - DNA, 738 bp, Shigella flexneri
atgctaacgcataacaatattctcgccagtgagcgggcttattgcgcgcggctgaatctgacctggctggatgtctttatgatgcctgcgccacttggtcacgcaacgggctttctgcatggcgtaacggcaccattcttaattggcgctcgcagcgtgttgttagatattttcactcctgatgcgtgtctcgcgctgcttgagcagcagcgttgcacctgtatgctaggcgcaacgccgtttgtctatgatcttttgaatttactagagaaacaacccgcagacctttcagcgctgcgcttctttctttgcggcggtaccacaatccccaaaaaagtggcgcgcgaatgccagcagcgcagcattaaattattaagtgtttatggttccacagaaagttcgccgcatgcggtggtgaatctcgataattctttgtcgcgctttatgcataccgatggttacgctgccgcaggtgtagagattaaagtggtcgatgacgcacgcaagaccttaccgccaggttgcgaaggtgaagaagcatcgcgtggccccaatgtgtttatggggtattttgatcaacctgaattaaccgcccgtgcgctggatgaagaaggctggtattacagcggcgatctctgccgtatggatgaggctggcggtaatgactccaacttactgatagtgttttatgttcagataatgcccgatgaccttgtcatgcagctccaccgattttga

SEQ ID NO: 477661 - DNA, 138 bp, Shigella flexneri
atgaaatcgaaccgtcaggcacgtcatattcttggactggaccataaaatttctaaccagcgcaaaatagttaccgaaggcgacaaatccagcgtggtaaataacccaaccggcagaaaacgccccgctgaaaagtaa

SEQ ID NO: 477662 - DNA, 216 bp, Shigella flexneri; identical to SEQ ID NO: 262705

SEQ ID NO: 477663 - DNA, 2886 bp, Shigella flexneri; identical to SEQ ID NO: 25667

SEQ ID NO: 477664 - DNA, 615 bp, Shigella flexneri; identical to SEQ ID NO: 100706

SEQ ID NO: 477665 - DNA, 276 bp, Shigella flexneri; identical to SEQ ID NO: 19894

SEQ ID NO: 477666 - DNA, 858 bp, Shigella flexneri; identical to SEQ ID NO: 146957

SEQ ID NO: 477667 - DNA, 324 bp, Shigella flexneri
atggaaaactacgctaaatttgttgctactgaaatactgaaacaactcggtggaaatcgtttcatagcgatgacaggggcaacaaaatttgcttatttcgatgaaaatggtgagtgtggccttttctttcgtttgccttcaaactttgcaatgaagggcattaatttagttaaaatcaaattaacattttctgatacatacctggtgacatttttccgtatccgtggaaccacaaaaaaaggaatatcaaaatttgataacatttattgtgatcagcttaaaagtttgtttagcgaagaaaccggacttgcaaccagattttaa

SEQ ID NO: 477668 - DNA, 132 bp, Shigella flexneri
atgcttattggctatgtacgcgtatcaacaaatgaccagaataccgatctacaacgtaatgcgtttatttgtgccggaagtgagttgattgttgagcgaatgggaagttggccagaagttgttatggcatag

SEQ ID NO: 477669 - DNA, 162 bp, Shigella flexneri
atgttacgtaatggaaataaatatctcctgatgctggtgagtataattatgctcaccgcgtgcatcagccagtcaagaacatcatttataccgccacaggatcgcgaatctttactcgccgagcaaccgtggccgcataatggttttgtggcgatttcatga

SEQ ID NO: 477670 - DNA, 222 bp, Shigella flexneri
atgaaaagattaattcctgtggcattgctcaccgcattgctggcgggctgtgctcacgattcgccctgcgttccggtttatgacgatcagggtcgtctggttcacaccaatacctgtatgaaaggcacgactcaggataactgggaaacggctggggctattgctggcggggcagcggctgttgctggcctgacgatggggatcatcgctctgtcgaaataa

SEQ ID NO: 477671 - DNA, 291 bp, Shigella flexneri
atgacaaattatgtgaattgtaaaaatagtgaagggagcgggaactatagaaagcttttaaagagtgagcagaagaatatcttattaatttttatgggtttcactggaaataataaaggcacccgaaagcgcctttatgtttctgatttatcctttaaagcaacggcgaatcaccacaaagaacaccggtacgaagaagattgccagcaacgttgcagagaccattcctcccattaccccgatacccacagcgttctgcgcgccactgccggcaccgttactgatagctag

SEQ ID NO: 477672 - DNA, 849 bp, Shigella flexneri
ttgggtgggacttacgttaacgacttcatcgaccgtggtcgcgtgaaaaaggtgtatgttcaggcggatgccaaattccgtatgctgccagaagatgtcgataaactttatgtccgcagcgccaacggcgaaatggtgccattctctgcctttaccacttcacattgggtgtatggctctccgcgactggaacgctacaacggtctgccgtcaatggagattcagggggaagccgcgccaggaaccagttccggcgatgccatggcgttgatggaaaaccttgcgtcaaaattacctgcgggcattggttatgactggacgggtatgtcgtatcaggaacgcttatcgggaaaccaggctcccgctctggtagcaatttcctttgtggttgttttcctgtgccttgctgcactctatgaaagctggtcaattcctgtctcggttatgttggtcgtgccgttagggattgtcggcgtgctgctggcggcgacactctttaatcaaaaaaatgacgtctactttatggtgggcttgctaacgacaattggcttgtcggccaaaaacgctattttgattgttgagttcgctaaagatctcatggagaaagagggtaaaggtgttgttgaagcgacactgatggcagtacgtatgcgtctgcgtcctatcctgatgacctctctcgcctttattctcggcgtattaccgctagctatcagtaacggtgccggcagtggcgcgcagaacgctgtgggtatcggggtaatgggaggaatggtctctgcaacgttgctggcaatcttcttcgtaccggtgttctttgtggtgattcgccgttgctttaaaggataa

SEQ ID NO: 477673 - DNA, 2214 bp, Shigella flexneri
atggcaaacttttttattcgacgaccgatatttgcatgggtgctggccattattctgatgatggcgggcgcactggcgatcctacaattgcccgtcgctctgtatccaaccattgcaccgcctgcggtttctgtttcggcaaactatccaggtgctgatgcgcagaccgtgcaggatacggtgacgcaggttatcgaacagaatatgaatggtatcgataacctgatgtatatgtcctccaccagcgattccaccggtagcgtgacaattacccttaccttccagtcggggaccgatcctgatatcgcgcaagtgcaggtgcagaacaaactccagctcgccacgccgttgctgccgcaggaggttcagcagcaggggatcagtgttgaaaagtccagtagcagctatttgatggtggcgggctttgtctctgataacccagacaccacacaggacgatatctcggactatgtggcctctaacgttaaagatacgcttagccgtctgaatggcgtcggtgacgtacagcttttcggcgcacagtatgcgatgcgtatctggctggacgccgatctgctaaacaaatataaactgacaccggttgatgtgattaaccagttgaaggtacagaacgatcagatcgctgccggacagttgggcggaacgccagcgttaccagggcaacagttgaatgcctcgattattgctcaaacgcggttaaaaaatccggaagaattcggcaaagtgaccctgcgcgtaaacagtgacggctcggtggtacgcctgaaagatgtcgcacgggttgaacttggcggtgaaaactataacgttatcgctcgtatcaacggaaaaccggcggcgggcctggggattaagctggcaaccggcgcgaatgctctcgataccgcgaaagccattaaggcaaaactggcggaattacagccattcttcccgcagggaatgaaggttctctacccttatgacaccacgccattcgtccagctttctattcacgaagtggtaaaaacgctgttcgaagccattatgctggtgttcctggtgatgtatctgttcttgcagaatatgcgagcaacgctgatccccaccattgcggtacccgtggtgttgttagggacgtttgccatcctcgccgcttttggttactccatcaacacactaacgatgttcgggatggtgcttgccatcgggctgctcgtcgatgatgcgatagtggtggtggagaacgtcgagcgcgtgatgatggaggataagctcccgccaaaagaagcgacggaaaaatcgatgtcgcaaattcagggcgcactggtgggtatcgcgatggtgctgtcagcggtatttattccgatggcattcttcggcggttctactggggcaatttatcgccagttctctatcaccatcgtttcggcaatggcactttctgttctggtggcattgattcttacccctgcgttatgtgcaacgctgcttaaacccgtctctgctgagcatcacgaaaataagggcggtttcttcggctggtttaataccaccttcgatcatagcgttaaccactacaccaacagcgtcggcaaaatcctcggttccacaggacgatatttactgatctatgcgctgattgttgcaggaatggtggtgttgtttttacgtcttccgtcttccttcttacctgaagaggatcagggtgtctttctgaccatgattcagttacccgctggcgcgacgcaagagcggacgcaaaaagtgttggatcaagtgacggattactatctgaagaacgagaaagcgaacgttgaaagtgtctttacggttaacggctttagcttcagcggccaggcacaaaacgccggtatggccttcgtcagtctgaaaccgtgggaagagcgtgatggtgatgaaaacagtgcggaagcggtaatccatcgtgccaaaatggaattgggcaagatccgcgacggttttgtcattccattcaatatgccagccattgttgaactgggcacggcaacgggtttcgactttgagttaattgatcaggctgggctgggtcacgatgccctaacccaggcccgtaaccagttgcttggtatggcggcgcaacatcctgccagcttagtcagcgtgcgtcctaatggcctggaagacaccgcgcagtttaaactggaagttgaccaggaaaaggcgcggcattag

SEQ ID NO: 477674 - DNA, 1158 bp, Shigella flexneri
atgacgaaacatgccaggtttttcctcctgccctcctttattctgatctccgcggctttaatcgccggttgtaacgataagggagaagagaaagctcacgtcggtgaaccgcaggttaccgttcatattgtgaaaacggccccgttagaagttaagactgaattaccaggccgcaccaatgcttaccgtatagccgaagttcgcccacaggttagcgggatcgtactgaatcgtaatttcactgaaggcagcgatgtacaagcaggccagtccctataccagatcgatcccgcgacctatcaggcaaattatgacagcgcgaaaggcgaactggcgaaaagtgaagccgccgccgccatcgcgcatttgacggtaaaacgttacgttccgctcgtgggtacgaaatacatcagccagcaggagtacgaccaggccattgctgatgctcgccaggccgatgccgccgtgattgccgcaaaagccacagtcgaaagcgctcgcatcaatctcgcttataccaaagtgactgcgccaattagcggacgtatcggcaaatcgaccgtgaccgaaggcgctcttgtcactaatgggcaaacgactgaactggcgactgtccagcagctcgatcctatctacgttgatgtgacccaatccagcaacgattttatgaggctgaagcaatccgtagagcaaggaaatttgcataaggaaaacgccaccagcaacgtagagttggtcatggaaaacggtcaaacctatcccctgaaaggtacgctgcaattctctgatgtgaccgttgatgaaagcaccggctccataaccctacgtgctgtcttccctaacccgcaacatacgcttttgccgggtatgtttgtgcgtgcacggattgatgaaggcgtccaacctgacgccattcttatcccgcaacaaggcgttagccgcacaccgcgtggtgatgcaaccgtgctgattgttaacgataaaagtcaggtggaagcgcgccctgtcgttgccagtcaggcgattggcgataaatggttgattagcgaaggtctgaaatctggcgatcaaatcattgtcagcggcctgcaaaaagcgcgtccgggagagcaggttaaagccactaccgatacccccgcagatactgcatcgaagtaa

SEQ ID NO: 477675 - DNA, 663 bp, Shigella flexneri
atggcaaaaagaaccaaagccgaagctctgaagacccggcaagaactgattgaaactgccatcgcccagtttgcgcaacatggcgtaagcaagacgacgctcaacgacattgccgatgccgctaacgttacgcgtggcgctatctactggcacttcgagaacaagacccaactgtttaatgagatgtggttgcaacagccttcattgcgggagttaatccaggaacacttgacggctggattagagcatgacccgtttcaacaattgcgtgaaaaattgattgtcggcttgcaatatattgccaaaattccccgccagcaggcgttgctgaaaatcttatatcacaaatgtgaatttaatgatgggatgctggccgagggagtgatacgcgaaaagatgggctttaatccgcagactctccgcgaagtattgcaggcgtgtcagcaacaaggttgtgtagcaaataacctcgatttagatgttgtgatgattattattgatggtgccttcagcggaattgttcaaaactggttaatgaatatggcgggttatgatctttataaacaagcacccgcgctggtcgataacgtattaagaatgtttatgccagatgaaaacataacgaaattaattcatcaaacgaatgaattaagtgtcatgtaa

SEQ ID NO: 477676 - DNA, 381 bp, Shigella flexneri; identical to SEQ ID NO: 458903

SEQ ID NO: 477677 - DNA, 597 bp, Shigella flexneri
gtggctacgaatccggtaacagcaacccgcacagcaaagtcagaagtaaggcgctcaaggctgacagctaatgagtatgtcgagatttaccatgcagccgaacctctccctatctggctgaggctggcaatggatttggccgtcattacagggcagagagtgggcgatttatgtagaatgaagtggtcagacataaacgacaaccatcttcacattgagcagggtaaaacaggggctaagctcgccattccgctgacgctaacgattgacgcgctcaatatctcactggttgatacactacagaaatgcagggaagccagcagcagtgaaactataatcgcatcaaagcatcacgatccgctttccccgaaaacagtatcaaagtattttacaaaggcgagaaatgcctccggactctcatttgatggagacccgccaacattccatgaactgcgtagcctgtcagcgaggctataccggaaccagattggcgataaatttgctcaacgtcttctcgggcataaatcagattcaatggcggcgcggtatagggacagccgagggagagaatgggacaaaattgaaatcaacaaatga

SEQ ID NO: 477678 - DNA, 546 bp, Shigella flexneri
atgttgcatttaaaaaatattacggcaggtaatccgaaaaccgcggaacaatatcagctgacaaaacagtatgatgtcacctggcttttttcggaagacggcaaaaactggtatgaagaacagaagaactttgccagtgacaccataaaaatggtttacaccggagacgggcgcgtggtgtgggtcggtaaggatgtgacaggcattgaaccccgtaacgccagtgttattgaagttcctgatattaccgccaaccgccgcattaccgcgccgggttactggttttaccgcaatgatgaatttgtctttgactacagactcaaagcggaagatgagcgtgatgcccttctggctcaggtcagtgcccggacaggggaatgggaagaagacctgctgctggggttaatcagcgacgaagataaagaaaagctgaaagcgtaccgtatttacgcgaaatcactgcaggcgatggatttcagcaccatcacagataaagccacatataacgccatcaactggccggagcgtcccgatgccgcagcttaa

SEQ ID NO: 477679 - DNA, 1101 bp, Shigella flexneri
atgttttatgtggataacccgacgggtgtgccggtaatgccacctgtcgcagctgaattaagcaaaacaacgctttatttcaccgaaggcgggaacggtattccgcccacgtatccggggccggactggtttaatattattcagtctgaattactggaaatactccggcaggcaaatatcaaaccggataaaaacacaaccgaccagattatgacggcgctgaaaaagctgtttattacgaacagtggttcagccggtgctattgccggattaaccggtcagaataatacattcccttattttaccggcaaagacacaatggcattaacgccgctcagtgcttttgtgcgcggtattctcggcaaagagagtgcaacagattttgcagatgcactgaaagtcataaaacaatcaggcggcacgatgacaggggagctgaaaatccgtggtgttaatgcgctgaggattttcaacgaagcttttggcctgatttttcgtcgttcggaagagtgccttcaccttattcccaccagtgaaggtcagggggaaaatggcgatattggtcccctgcgcccgttcaccattaatttgcggacgggtgaaatatccatgtcgcataaagtgtctgttggcggtggttcgcaggtcaatggtgcgctgggtatcggcgttcagaacgccctgggggggaattcaattgttcttggtgataatgacaccggatttaaacagaatggtgatggcctgctggatgtttatgccaatagcgtgcatgtgttgcgttttcagagtggcagtatccagagtaataaagctgtaaacgttacaggacgggtaacaccgtcagactacggaaactttgatgcccgttaccagcagcgaaatggtggcgtgcaggatgtgcggtatggttatgaaatgtattacggccccggcagtaacactgtttcatggacatttcgcgcaccttcgggacacgggttgtcagggatatcgatatcggataccggccgtaactcagcggataacgtcaacggtgtgtattaccgaccgctgcaaaaactgattaatggcacctggtataacgtagcgagtatttaa

SEQ ID NO: 477680 - DNA, 585 bp, Shigella flexneri
atggctcacagcgtgacggaatggctggccgcactgcaacaggtcatgccacggggtaaggcatggccgcgtgataacgacgcggatttaaaccgctttttaagggcgcttgcagaacgtttaaaccgcactgaatacgacgcctcgcgtctgcatgtggagatgcgcccggaaaccacgctccggctgctgccggagtgggagcagtatctggcgctgccggaatgcggaattgcccccaccaccagggaagcccgccgccgtgccgtggtggagaaataccgtcgcaggggcgggctggcaacctggcagactgaagccgcagcagcggcgctgggcttcaccattaaggtgacagccgttctgccgcaccactgtctgcgcgactgcatgtatccgctgcatccggcgcggtatcgctggatgctgaaagtgaacgtcccgggtaaagatgccgggcggtttacctgtattgatggcgtcatgacaccattaatcagcgaacgcccccgtgagctggaatgcctgctgaagcattaccggctggcgggcacggaatatgaatattattacaccggagaataa

SEQ ID NO: 477681 - DNA, 1077 bp, Shigella flexneri
atgccgtatgaaatccccacgctgggcaaactgattgccgacggcgaaaaagatattgcgtatgaactcggcctgcaaaagctgccgcctgtcagtgttgagcaggcgctgaacgtgtcattcagcagtcaggtccgggatttatacgaccatcagagctggattaaggaccagataatcccgtccaccacgtctgatgatgaaaccattatcaaaacagcaaagtatgaaggggttatccgcaagcaggccacctttgccagcgggcgggtgaccttcaccagtcagtccccccttccggcagaaacccggatgcagtccgacacgaaccaggtgtatcaggtactcacgtccggcgaggtgcaggacggcgaggtcaccgtcatcgtgcaggctgaagaagccggtgtggcgggcaatcttgctgccggtgccgtactcaccctgctgtccccgctgcccggaacggccagcacaggcgcggtggctgaaggtggcatcaccggtggcgcagacactgaatccatcgcagcgctgctggaccgtctgctgtatgtgcgccgcaatccaccgacaggcggcgcgttgcatgactacgtgatatgggcgcgtgaagtgccgggcgtcagccgcgcgtgggcgtgggatgcatggcacggccccggcacggtcgggctggcatggctttatgatgaccgggaaaacatcgtgccaacccgcgaagacctgaagacaatggagcagtatctgttctgccacaaacacccggccacgggcgtcatggtgggtaaaccgggcggcattgaggtctggccggtacaggtcaggctgaagaaagtcagcatatccatccgtctgacaccggacagcttggcgaacaggagcgccgtccgggcaaacctgaccgcgttacagaagacactggcacccggtcagacgctgccggtgtcctcgctgcgcacggccatcggtatgacgtccggcatcacggattacttccttaacatcggggaggacaccaccagtgatgtggatgagcttatcaccatcggggaggtgacatggctcacagcgtga

SEQ ID NO: 477682 - DNA, 453 bp, Shigella flexneri
atgacgacagaaatccgctggaataacatgctctcacgaggtgacatcaccgtcacccataacggcctctcacgggatgaggggctggtcactcaggttcttatctgccttttcaccgatgcccgcgctgatgacgatgatgtcattcctgacggctccggcgacccgcgcggctggccgggcgacacgtacagcgatttttcgtggggttcccgcctgtggctgcttgagcgtgaaaagctgacggaagatgtccgcctgcgcgtggaagattacgcgcggctgtccatgcagccgcttctgcgtgccggttacgcccgtaacgccaccgtcacggccagcatcatcattcctgaccgtattgcctttctggtggtgttaacccgcccggacaaaaccacactcagaatcgaaatcacccgtcgatgggaggccaccattaatgccgtatga

SEQ ID NO: 477683 - DNA, 537 bp, Shigella flexneri
atgggattaaacgcaattgctcgccgcctgcgactgatggttgaccgcgctgttgtccgcctggtgtctgacggtctggcacggcagaacctgcaaattcagacgctggcagatgccaccgatgacgacgtggaacgcttccagaactacgggtttacgtccgttccgccggaaggttctgaagccattgtgctggccgttggcggacggcgtgacgggctggttgccatcgcggtggaagacaagcgatgtcgcccgaaaggactgtcccccggcgatgtcagggtgtatcaccgggacggcaaatcacacatcaccctgaaggaaaacggcgtcattgaaatcacaggagaacaattagacttttcagggaaaacggtaaatctcactgccgacgaactgctgaatattatcggtaaacaaatgaaattcgtcggtccctgtgaattcactgaagatgtcagaatcaagggtaaatcattcagcgaacacattcataaggacggcgacaatgagaatacatcaccgcccgtatga

SEQ ID NO: 477684 - DNA, 1071 bp, Shigella flexneri
atggaatccgtgattcttaccgttgacggcaaactgtgggaaggctggacggaaatgtccgtcagccgttccctgaaggcgattgccggtgagtttgaactcagtgtgacaacccgctggtcagcggcggcaccgcgcgtgattcgtgaggggcaaccctgcacggtcaggctgggcgcggataccgtgctgacggggtatatcgatgattttattcccggctatgacgctgaaaacttggagattcgcgtcatggggcgcgataaaaccggcgacctggtggactgctctgtggtgcattcgtccgggaaatggaaaggcgtgcggcttgaacaggtggcggctgatgtctgccgcccgttcgggataaccgtcatcacggaaaccccgaccggggaggcatttgcgtctgtcgttctggaacagggtgaaacgggctttgaactgctcgaccggctggcaaaacagcgcggcgttctgctgacgtctgacggcgcgggtaacctgattatcacccgcgcctcttccgttcgcgcgggcgtgtcactggtgctgggaaaaaatatcctcgccgcccgtgggcgcttcagctggcgggagcgtaacagccagtacatcatcaagggcaccaccagtgccggtggcaaactgtgggacagccagcctgccccgatggtgggcggtcgccagtacatcaccgaagacccggaaattaaccgttaccgcccgcgcattctggtcaatgaagacagcctgaccgtgggcggggccagcatgcgcggggaatggtacaaagcccggatgctgggagagtcccgcacgacggaaatcacggtggcaggctggcgcgaacagggcgacagcggcccgctgtggcagaccaaccgccttgtcgatatcgacgacagcattcagaacctgaaaaccacctggctgatatccggggtgacatggacggatggcgcacaggggaggatgacggttctggcgctggttccgcctgaatcactggacatgccggaaatgaaagcgaagacgaaaaaaacaaaggcggtggccacatgggattaa

SEQ ID NO: 477685 - DNA, 1275 bp, Shigella flexneri
atgacaacgagcaacggtaaatgggacgggctgcgcgacgcctcgtttcgtggcgtccccttctttctggtggatacggagggcaccggtggtcgtcgtgccattccccgtgcttatccccggcgtgaaaccgcctggacggatgataacggggccgttccggggcaacagcagattaacgcaaagctgccaggtaaaaacttccgggatgatttaaacgcccttttagatgcgctcaatacccccggccccggcgagcttgtccacccgtggttcgggatacagaccgtacaggttggcaaggtcacccatcgcctctgcacggaggaagacggcattgcgtatgtcacctttgaagtgtttgaggcaggcgagcgcctgttcccgtctgcggcggataacacgcagcaggaagtgctgacaggcattgatgcggtgaaagccgccattgacgatggcgactggttcggcgcactcgacgggctgggtgacatggccgacagttttctggccgatatggaaaaccttgtggctaacctgcccacgttaccggcagcactgaatcagtggatggacaggctgaagcattttaaggcgatggccggaaccctcattgccacaccggggcgtctggtcagtgagctgtcagcacgggtggaagatattgcgggccttgtgacggaaccacccgaagcactggcggtttacacgacattacgcaaccagtgggccggagaacgtgccaggcagattgccaccggcgcactgccggaagatatcaccgtgaagcccggcagcgtggcagacggcaaccccggctttgccatcgggctgtcaccggattatcagccggtatctgacagcctgcaaaagaacattgacgacttccgccaggtggttgtgctgggagccctgctgggacaggccagtgccgtggcctcgatgacgttcgatacccgtgatgcggcgttatctgccggtgacacgctggcggctgaactgcatgagcaggcggtggcggcggtggaaaacaaccagcggacattgtggcgaacgctgcgcgatttacggcaggccgtgattacggatgcccgcgagcgtgccgcccgtctgccggaaacccggcaggtgacgctgaccacaaccacctctgccgcattgctggcatggcgcgagcatggtgacacacgccgacgggatgaaatcgtgcagcgtaaccgcctgcgtcatccgtcattcatcctgccgacgcaacctgtggagatcaccgactga

SEQ ID NO: 477686 - DNA, 1821 bp, Shigella flexneri
atgatcaaccttgccgggaacctgaccgccaaagcccggcagtatggcgcgaatatgtcgcagttcgcccggaataaccagaaagccatgcgcctggtcaaagccacaaccgacgccgctgggcgcagtctggatgcgcttggcaaccgctacacggcgatgattgccgagcttggtggcagcatgacggtaaaaggcgtggctgattttgatgctcagatgcggcgtatgggaaccaatgccaaattaaacgcagagcaggtcaacacgctgaagaacgcgatccgggacgtttccagtcagaaggatatccgtattgatgcctcagccctcggtgaaggggttgatgccctgctgggaaaaaccggtgattatcagtatgtggtggacaacctgcgcaacatggggctgtttatgcaggcgtttggtgttgacggacaggtggcagccgggatgatggcgcagttctgggaaaaaggtgtccggggcgctgatgcggtcagcaacacaatggacaggttgtatgcacagttcgcggtgggttctgtcagcgttgctgatgttgcccgcgcggccccgaaactgttttccatcattcaggatcagggaccggaagccattgcgcagatgggggcatttgctcaggtgtttgccaaaaacaaaggcagcattgatgagacagtgaccagtattcaggccatgtatgcctccctgtcggacaaaaagaacattgagttcctgaaaaaaaacggggttgacgtttttgtcaaaggcacaaaagacattaaaaagccctatgaactgatgatggaaatcctcaaacgggctaaatacgacccgctgaaacttcaggatgtgtttgatcagaccgggatgcaggggattaaggcgttactcagcccggagaaccggcaattgctggagaaaatgatttacggcatggctgaacagggttccacgcaaaaggccgcacagaccaatgccgaaggctttaatgccgcgatgcagtcgctgaataacgaatggcaacgtttcgctgaagggcaactggcaaagcccgttcaggatctggcggatgccattaacagcgtggaccagaacactgtccagaactggttgcaggtcggtaaatatatggcggcgctgggcggcattatcgccatcagaaagacgtacaggttcggtaaaaccatccacgacatcatgaatcccaaagggaaaggcaaagggatacccggcagcattacggatgtttttggttccggcgtgatgccggtttatgtggtcaatatgggcagtggcgggctgaagggtaataccggcggtctgccggatgcgccggattcatcgcgcaatccccgtaacccacgcaatccacgaggttcgggtaactgtggaggaaaggcaggtaaaggcgctggcatcattgccggtgctctggagttttacgattttctgaccacgcaatatgccctaccaggtgaggttgacagccttacaaaattcgttgccggtgatgccagcgccagcccgtgggagcgcgagttcgctcaacaaagccaggataaccagaaagcgctcgagtccgtctggcgtaaggtaacggactggtttaattcgctgggtgacaagaacattgccgacccgcgaccgtgggcaggtatgcaacccacacagaattatcctttccttccgcaacaattgcagggggaaatccgtgtggtggtggaaggtgatgcccgcgtgaaaagcgtcagagtggatcaacccggcgtcagactcagtgcgcaggctggcgtcaccagcgtggagcagggttaa

SEQ ID NO: 477687 - DNA, 2094 bp, Shigella flexneri
atgcagtcgtacgttaccgtaaatgaccttctcggtgttcctggaatgccagccaccgcgaaaggcatccgacaggcgttacagcgtttttctcgtgctcttggtgacgttagtcgccgtcgagcaggtacaaaagccattgagtaccatatcgattgcctgcctgaggtaacccaaaaggcactgcgtgaacgctatgtggaacaactggtggctacagagaacaacgtctccgaagtgaagaccgttaccaggacggcgcgtaaccctgatgctgttcaggcagttgaagcatatcggggttctccgcaactaatggaagaacgcctgaatgccctgactgaaaatcagcgccgggtgtctgaagcaagagcggcgctggcagtggaagtgctgaagctggaaagcgccggtaacctcgggcgactgaaagccattaactttctggttgaaaaagcccgtaaaggtgagttgccggaacgactgcaacaggctgcgattaacgctaatgcaaaacgtggcactaatcgcaccatcagccgtgatccgctttaccagtgggtactgaaatacaaccggtcgcagaacgccgcagaacgactgttgttactggcaccaggaaaacgcgacgaaataaaaccggaagaaattagctggctgcctgaatttctggcgcagtatcgtcaggctaacggcagacctatgtcggaagcctacgaggattttgtcacggaatggcaacgtcgctatgcggacgaaccgtacatgctggaggtgatgccttcctatgatgttgtccggtatgccatgaaaaaattgccggaagtggtgaaacaaaaaggacgcgttaccggcagtgaataccgccagcttgagggattcacccgccgcgactggacagctatgccggtgaattatgtctggattggtgacggccacggtatgaagctgaaatgtgcgcatccgatccacgggcgtccattttcaccggaagtcacgtttgttatcgacggtggaacccggtttgttgttggctggagtcttgatcttgcggagaacgtgtttgctgttgccggggcgatacagcacggaattcgcaatcacggaaaacccttcctgtattactcggataatggttccggtgaaacggcagatatgctggataaagagatcgtcgggattctgccccgtctgggtattaaccaccccaccggtattgccggaaatccgcagggacgcggcatcattgaacgtctgaaccggacgctgccgatgcgtatagccagacggtatcgcacctattttggcaagggggcagaccgggaaacactgcgtgtactcaatcgcgatctgcgttcagcatttaatgccctgcaacaggacaaaccgctgaatgcccgccagaaatctgcaatgcgcgagctgccgtcctggtcagaactgattgaggctattcgtgaaggagtggaatggtacaacaaccgcccgcattctgaactgccgatgaaaccaaacgggaagcattacagcccggctgagttcagaaaaaaacgcctggcggaagaaaacaccgaaattgaatggctgagtgatctcgaactgcgcgacatgttctgcccgatggtggagcgtccggtaagacgctgtgaaatcaaatggcttgggaatatttattacgcgccggagctgcgtgatgaacatggtcgcaaagtgcttatcagctatgacattcatgatgcagagcgaattacagtgcgccgtaaggatggcagttttatttgtgaggcgatatggaacggcaataaacgcgccgccttcccggtcagcgccgactattacaaacaacagcagcgtattaaaggaatgcacaaacgcgcagaagaaaaaatccgtgatgccgtggatgaaggtattcaggttattgaacaaaaaacgacagaaccctggctggataatgtttatcgacccgttggcaatgtgatgaccgttcagcaacaggaatatgaagaggagcacgacgaagaatccgaacgcaatttcaggcggggattacagaaactcattgccatgcaggacgatgacccactggcctga

SEQ ID NO: 477688 - DNA, 3153 bp, Shigella flexneri
atgattgaatggattattcgtcgctcggtggcgaaccgttttttggtgctgatgggcgcgttgtttctgagcatctggggcacctggaccatcattaatacgccagtggatgcgttgccggatctctccgatgtgcaggtgattattaaaaccagctatcccggccaggcaccgcaaatcgttgaaaatcaggtgacttatccgctaaccaccaccatgttgtcggtgcctggcgcgaagactgtgcgtggtttctcgcagtttggcgactcttatgtgtatgtcattttcgaagatggcaccgatccgtactgggcgcgttcgcgggtgctggagtacctcaaccaggtacagggtaagctgcctgcgggagtcagcgccgagctgggaccagatgccacgggtgttggctggatctatgaatatgcactggtggatcgcagcggtaagcacgatcttgccgatttacgctcattgcaggactggtttctcaaatatgagctgaaaaccattcctgacgttgcggaagtggcgtcggtaggcggtgtggtgaaagagtatcaggtggttatcgatcctcagcgcctggcgcagtatggcatcagtctcgccgaagtaaaaagcgcgctggatgcttcaaaccaggaagcgggcggttcgtcaatcgaactggcggaagcagaatatatggtgcgcgccagcggctatctacaaacgctcgacgactttaatcacatcgttttaaaagccagtgaaaatggcgtgcccgtttatctgcgcgatgttgcgaaggtccagattggcccggagatgcgccggggcattgccgaactaaacggcgaaggcgaagtggcgggcggggtggtgatcctgcgatccggcaaaaacgcccgagaagtgatcgccgccgtgaaggacaaactggaaacgctgaaaagtagtctgccggaaggcgtggagatagttacaacatacgaccgcagccagctcattgaccgggccatcgacaacctcagcggcaagttgctggaagagtttattgtggtggcggtagtctgtgcgctgtttctctggcatgtgcgctcggcgctggtggcgattatttcgttgccgctggggttgtgtattgcttttattgtcatgcccttccaggggctgaatgccaatattatgtcgctgggtggcattgcgattgccgtcggggtgatggtcgatgccgctatcgtcatgatcgagaatgcgcataaacggctggaagagtggcagcaccagcatcctgacgccacgctggataataaaacgcgctggcaggtgatcaccgatgcgtctgttgaagtggggccggcgctgtttatcagtctgctgattatcacgttgtcgtttatcccgatcttcaccctggaagggcaggaagggcaggaagggcgtctgtttggcccgttggcgttcaccaaaacgtatgcgatggcgggtgcggcgctgctggcgatcgtagtgatccctatcctgatgggttactggatccgtggcaaaattccgccggaaagcagtaatccgctcaatcgctttttgattcgtgtttatcatccgctgttgctgaaagtactgcactggccgaaaaccacgctgctggtggcggcgctttcggtgctgacggttctctggccgctcaataaagttggcggggaatttttaccgcagatcaatgaaggcgacttgttgtatatgccatcgacgctgccggggatttccgcagcagaggcggcgagtatgctgcaaaaaaccgacaagctaattatgagcgtacctgaagtggcgcgggtatttggcaaaaccgggaaagcggaaaccgccaccgattctgctccgctggagatggtagaaacgaccatccagcttaagccacaggatcagtggcggccaggcatgacaatggacaaaatcattgaggaactggataacaccgtgcgtctgccggggctggcgaatctgtgggtgccgccaattcgtaaccgtatcgatatgctctcaaccggcattaaaagccccatcggcattaaagtttccggcactgtgctggcggatatcgacgcgatggctgagcaaattgaagaagtggcgcgaacggtgccaggcgtagcttctgcgcttgccgagcggctggaaggtgggcgctatatcaacgttgagattaaccgtgaaaaagccgcacgttacggtatgacggtggcggatgtgcagttgtttgtgacttctgcggtgggcggggcgatggttggcgaaacggtggaagggattgcccgttatccaattaatctgcgttatccgcaaagctggcgcgatagtccgcaggcactgcgccagttgccgatcctgacgccgatgaagcagcaaatcaccctggcagacgtggccgacgttaaagtctctaccggaccgtcgatgctgaaaaccgagaatgcgcgcccgacgagctggatttatatcgatgcccgcgatcgtgacatggtgtcggtggttcacgatttgcaaaaagcgatagctgaaaaagtgcagttaaaaccgggcaccagcgtggcattctccgggcagttcgagctactggagcgcgccaaccataagctgaaactcatggtgccgatgacactgatgatcatcttcgtgctgttgtatctggcattccgtcgggtgggcgaagcgttgctgattatcagcagcgtaccgtttgcgctggtgggcggcatctggttactgtggtggatgggctttcatctttctgtggcgacgggtaccggctttattgcccttgccggggtcgccgccgaatttggcgtggtgatgctgatgtatttacgtcacgccatagaggccgagccgtcgttgaataatccacaaacattcagcgagcagaagctggatgaggcgttgtatcacggcgcggtcctgcgcgtgcgcccgaaagcgatgacggtggcggtgattatcgccggtctgctgccgattctgtggggaacgggggctggttcagaggtgatgagccggattgccgcaccgatgattggcggcatgatcaccgcacctttgctgtcgctgtttattatcccggcggcgtataagctgatgtggctgcaccgacatcgggtacggaattaa

SEQ ID NO: 477689 - DNA, 315 bp, Shigella flexneri
gtgaaaaacgcgtcaaccgtatcggaagatactgcgtcgaatcaagagccgacgcttcatcgcggattacataaccgtcatattcaactgattgcgctgggtggcgcaattggtactggtctgtttcttggcattggcccggcgattcagatggcgggtccggctgtattgctgggctacggcgtcgccgggatcatcgctttcctgattatgcgccagtgtattgattcacttgaagtacgaaaaaaaccgggaggacattggattattcgggatctgatgggattagatttggtggggcttgcaagcctgtag

SEQ ID NO: 477690 - DNA, 591 bp, Shigella flexneri
ttgaaaagtaactttatagaaaaaggtaatactgaaaagtcaatttggtgttcgccgcaagaaattatggctgctgatggtatgcctggatctgttgctggtgttcactatcgagcaaatgttcaaggctggacgaagcgaaaaaaggaaggtgtcaagggggggaaagctgttgaatacgatgtgatgtctatgcccaccaaagaacgagagcaagttattgcgcacttggggttatccacaccggatactggtgttcaagccaatgagaaacaggattcttcggaactgataaacaaattaaccacaaccttaatcaatatgattgaagagctggaaccagatgaagcacgcaaagcactgaaacttttaagtaaaggggggttgttggcgttaatgcctcttgtatttaatgaacagaaactttacagctttataggattttcacagcaaagtattcagacgttgatgatgttagatgcattacctgaagaaaaacgcaaagagattttgtcaaagtatgggattcatgaacaggaaagtgttgtagtaccttcacaggaaccacaggaggtaaaaaaagccgtataa

SEQ ID NO: 477691 - DNA, 228 bp, Shigella flexneri
atgtgttccaacgaaaaggcccgtgattggcatcgtgcggatgtgattgcgggacttaagaaaagaaagctctctttatcagctctttcccggcagtttggttatgcgccaactacattagctaatgcgctagaacgacactggccaaagggtgagcagatcattgctaacgccttagaaactaaaccggaagtaatctggcctagccgatatcaagcaggtgaataa

SEQ ID NO: 477692 - DNA, 855 bp, Shigella flexneri
atgtcgcaggctgatatcgcctgttatgcctccaaaaatggtggacggggccgggtgacggtttacgaaccacagcaagctgccgcacatagcgaacgggcggcgatgtcgcttgatgaacagtggcggatgattaaagagaatcagttgatgatgatcgcccacggtgtcgcttcgccgcggatcccggaagcgcgtaatttgtggctgatttcacttaagctctggagttgcgaaggcgagattattgatgaacaaaaatttcgtcgtagcttcagcgatccggcacttagccatgctcttgaccgacgggtattccacgaatttttccagcaggccgcaaaagcggttgccagtaaaggcataagcatcgccctccccctttccgttgccggtttgagtagcgccacgctggtgaatgatctgcttgagcagctggaaaatagccctctaccaccacggttattacatctgattattccggctgaagcgattttagatcacgcagaaagcgtgcaaaaactgcggctggcgggatgtcggatagtgctcagccaggtgggccgcgatctgcaaatcttcaactcgctgaaagcgaatatggcagattacctgctacttgatggtgagttatgcgccaacgtgcagggtaatttgatggatgagatgctgattacgattattcaggggcacgctcagcgactcgggatgaaaaccatcgccgggccagtcgttttacccttagtgatggatacgctttctggcatcggcgtcgatctgatttatggtgatgtgattgccgatgcccaaccgctggatttgctggtgaatagcagttatttcgcgattaactga

SEQ ID NO: 477693 - DNA, 276 bp, Shigella flexneri
atgtcaccgcagaataatcatctgcagcgtccgcctgctgctgtgttatacgccgatgaactggcaaaattaaaacaaaatgataacgcaccttgcccgcccggttggcagttaagtttgcctgcggcccgtgcttttatccttggcgatagcgcgcaaaatattagccgtaaagtggtgattagtccctggatttgcccctatatttccagacatctgttatcacttaacccattacaagcccgctgccgcagatattcccgtggcgagcgataa

SEQ ID NO: 477694 - DNA, 147 bp, Shigella flexneri
atgtttaagcccaggaattgcggctggatacgtttacttcccctgtttatgctgagtcttccagtacaggcggaacttcgatgtgttgcaaatgcagttgatattgaaccatttttttctgcggctaccgctgaagataaacggtaa

SEQ ID NO: 477695 - DNA, 576 bp, Shigella flexneri
ttgcccgccttttctccggcagagttgcaaaaagcggtgcacgataatctacgtaatctcggcctggacgtactggatgtggttaacctgcgcgttatgatgggggatggtcatggcacagcggaaggatcgattgaggccagcctgaccgtgctggcagagatgcaacaacaaggcctggtaaaacatattggcctgagcaacgtcacaccgacgcaggttgcagaggcgcgcaagattgccgaaattgtctgtgtgcaaaacgaatacaacatcgcgcaccgtgctgatgatgcaatgattgatgctttggcccacgatggcattgcctacgtgccgttcttcccgctcgggggctttacaccgctgcaatcgtccacactttccgatgttgctgcgagcctgggtgcaacacccatgcaggtggcgctggcgtggctgttacaacgttcaccgaatattttgctgatcccagggacgtcttctgttgcgcatttacgggagaatatggctgctgaaaaattgcatctttctgaggaagtgttgtctacgttggatggtatttcgcgagaataa

SEQ ID NO: 477696 - DNA, 597 bp, Shigella flexneri
atgccaatttaccagatagatggtctgactccggttgtgccagaagagagttttgtccatccgacagcggtattgatcggcgatgttattctaggcaagggcgtttacgttgggccaaatgccagcctgcgtggcgattttggtcgtatcgtggtgaaagatggcgcgaacattcaggataattgcgttatgcacggttttcccgaacaggatactgtcgtggaagaagatgggcatattggtcatagcgctatccttcatggttgcattatccgccgcaatgcattagtgggaatgaacgcggtagtgatggacggcgcggtgattggcgagaacagcattgttggcgcatccgcatttgtgaaagccaaagcagaaatgcctgccaattacctgattgtcggcagcccggcgaaagcgattcgtgaacttagtgagcaggagctggcatggaaaaagcagggtacgcatgagtaccaggtgctggtgacacgctgtaagcagacgttacatcaagtcgagccattgcgggaagttgaacctggcaggaaacgcctggtattagattatccgcgaagcgctttatccttactctga

SEQ ID NO: 477697 - DNA, 951 bp, Shigella flexneri
atgagtaaacttgatacttttatccaacatgctgtaaacgctgttccggtcagtggcacatctttgatctcctctctgtatggtgattcgctttcccatcgtggtggtgaaatctggctgggtagtctggctgctttgctggaagggctgggatttggtgagcgtttcgtgcgcaccgctttgtttcgtcttaataaagaaggctggctggatgtttcccgcatcgggcgacgcagtttctatagcctcagtgataaaggcttgcgcctgacgcgacgggcagaaagtaaaatttatcgcgcagagcaacctgcatgggatggtaaatggctcctgttgctctcggaaggtttagataaatcaacgctggctgatgtcaaaaagcagttgatctggcaaggttttggcgcactggcccccagcctgatggcatcgccgtcgcaaaaactggcggatgtacagacacttttgcatgaagcgggggtggcggataacgtgatttgttttgaagcgcaaataccactggcgctttctcgtgcagcactgcgtgccagagtggaagagtgctggcatttaactgaacaaaatgccatgtacgaaacctttattcagtcatttcgcccgctggtgccgctgttaaaagaggcggcggaggagttaaccccggagcgtgcatttcatattcagcttttactgatccatttttatcgccgtgtcgtccttaaagatccattgttgccggaggagttgcttccggcgcactgggcagggcatacggcgcgtcagctgtgtatcaacatttatcagcgcatagcgcctgctgctttagcgttcgttagtgaaaaaggtgaaacctcggtcggtgaactgcctgcgccgggaagcctgtattttcaacgttttggcggtttgaatattgaacaggaggcgttatgccaatttaccagatag

SEQ ID NO: 477698 - DNA, 1314 bp, Shigella flexneri
atgataaccaatacaaagcttgacccgattgaaaccgcgtctgttgatgagttacaggcgttgcaaacacaacgtctgaaatggacgctcaaacacgcgtatgaaaatgtgcccatgtatcggcgcaaattcgacgcagcaggcgtacatcctgatgatttcagggaactttcagacctgcgtaaatttccctgtaccaccaaacaggatttgcgcgacaactatcccttcgacacctttgccgtgccgatggaacaagtggtgcgcattcatgcttcttcgggaaccacaggtaaaccgacagttgtcggttatacgcaaaacgatattgataactgggccaatattgtagcgcgttctttgcgtgcggcagggggctcgcccaaagacaaaattcatgttgcctatggttacggcctgtttactggtgggctgggcgcgcactatggtgccgaacgtctgggcgctacggtgatcccgatgtctggcgggcagacggaaaaacaagcgcaactgatccgcgattttcaaccagatatgatcatggttacgccatcttattgccttaacctgattgaagagctggagcggcagttgggcggtgatgccagcggttgctcgctgcgggttggagtgtttggtgctgagccgtggacacaggccatgcgtaaagaaattgagcgtcgcctggggatcaccgcactggatatttatggcctgtcagaagtgatggggccgggggtggcgatggagtgtctggaaactaccgacggcccaaccatttgggaagatcatttctatcctgaaattgttaatcctcatgacggcacaccgcttgccgatggtgaacatggcgaactgttattcaccacgctgaccaaagaagcattgccggtcattcgttaccgcacgcgtgatttaacccgactgttaccaggaacggcgcgaactatgcgccgcatggatcgcatcagcggacgcagcgatgacatgttgatcattcgcggtgtaaatgtcttcccgtcacaactggaagaagagattgtcaaattcgaacatttatcgccccattaccaactggaggtgaaccgccgtgggcatcttgattcactttctgtgaaagtagagctgaaagaaagtagcctgacattgacgcatgagcagcgttgccaggtgtgccaccagctacgccatcggattaagtcgatggtggggatttctaccgatgtgatgatcgttaactgtggcagtatcccgcgttcagaaggcaaggcgtgtcgggtgtttgatctgcgcaatattgttggtgcctga

SEQ ID NO: 477699 - DNA, 1206 bp, Shigella flexneri
atgcgtgaagcctttatctgtgacggaattcgtacgccaattggtcgctacggcggggcattatcaggtgttcgggctgacgatctggctgctatccctttgcgggagctgctggtgcgaaacccgcgtctcgatgcggagtgtatcgatgatgtgatcctcggctgtgctaatcaggcgggagaagacaaccgtaacgtagcacggatggcgacgttactggcggggctgccgcagagtgtttccggcacaaccattaaccgcttgtgtggttccgggctggacgcactggggttcgccgcacgggcgattaaagcgggcgatggcgatttgctgatcgctggtggcgtggagtcaatgtctcgggcaccgtttgttatgggcaaggcaaccagtgcattttctcgtcaggctgagatgtttgataccactattggctggcgatttgtgaacccgctcatggctcaacaatttggaactgacagcatgccggaaacggcagagaatgtagctgaactgttaaaaatctcgcgagaagatcaagatagttttgcgctacgcagtcagcaacgtacggcaaaagcgcaatcctcaggcattctggctgaggagattgttccggtcgtcttgaaaaataagaaaggtgttgtaacagaaatacaacatgatgagcatctgcgcccggaaacgacgctggaacagttacgtgggttaaaagcaccatttcgtgccaatggggtgattaccgcaggcaatgcctccggggtgaatgacggagccgctgcgttgattattgccagtgaacagatggcagcagcgcaaggactgacgccgcgagcgcgtatcgtagccatggcaaccgctggggtggaaccgcgcctgatggggcttggtccggtgcctgcaactcgccgggtgctggaacgcgcggggctgagtattcacgatatggacgtgattgaactgaacgaagcgttcgcggcccaggcgttgggtgtactacgcgaattggggctgcctgatgatgccccacatgttaaccccaacggaggcgctatcgccttaggccatccgttgggaatgagtggtgcccgcctggcactggctgccagccatgagctgcatcggcgtaacggtcgttacgcattgtgcaccatgtgcatcggtgtcggtcagggcatcgccatgattctggagcgtgtttga

SEQ ID NO: 477700 - DNA, 423 bp, Shigella flexneri
atgagtcataaggcctggcaaaatgcccatgcaatgtatgagaacgatgcctgcgccaaagcgcttggcatcgacattatctcaatggatgaaggctttgctgtagtgaccatgaccgtcactgtacaaatgcttaatggtcatcaaagttgccacggcgggcagctattttcactggctgatactgcctttgcctacgcctgcaatagccaggggttggcagctgtcgcttctgcctgcacgattgattttttacgtccaggctttgccggagacaccttaactgcgactgcgcaggtacgtcatcagggcaagcaaaccggtgtttacgacatcgaaattgttaaccaacaacaaaaaacggttgcgctgtttcgcggtaaatctcaccgcatcggcggcaccattacaggagaagcctga

SEQ ID NO: 477701 - DNA, 1383 bp, Shigella flexneri
atgggggcaggcattgctgaagttgtcgccagtcatggacatcaggttttactgtatgacatttctgctgaagcgctgacccgcgcaattgacggaatacacgcgcggctaaattcacgcgtgacgcggggaaaactgaccgctgaaacctgtgaacgcacattgaaacgccttatcccggtgaccgatattcacgcgctggcagcagcgaatctggttattgaagcggcgtctgagcgtctggaagtcaaaaaagcgctctttgcacagctggcggaagtttgcccgccacaaacgctattgaccactaacacttcgtcaatctctataaccgcgattgctgcggaggtgaaaaatcctgaacgtgttgcggggctgcatttttttaacccggcaccggtgatgaagttggtggaggtggtcagtgggctggcaacggcagcggaagttgtcgagcagctgtgtgaactgacattgagttggggtaagcagccagtgcgctgtcattcgacccccggatttatcgttaaccgtgttgcgcgtccttattattccgaggcctggcgggcactggaagagcagattgctacaccagaagtgattgacgctgcgcttcgcgatggcgctggtttcccgatggggccgctggaattaaccgatctgattggtcaggacgtcaattttgctgtcacctgttcggtgtttaacgctttctggcaggagcgtcgttttttaccttcgctggtgcaacaggaactggtgattggtggacggttgggcaagaaaagtgggctgggcgtgtacgactggcgcgcggaacgtgaggcagttgttggcctggaagcggtaagcgacagttttagcccaatgaaagtagaaaagaaaagtgacggtgtcacggaaattgacgatgttttattgattgagacacaaggcgagacggcacaggcgctggcaacacgactggcgcgcccggtggtagttatcgacaaaatggcgggcaaggtggtgaccattgctgcggcagcggtgaacccggactcagcgacccacaaggccatttattacctgcaacagcagggcaaaacagtgctgcaaattgcagattacccaggaatgctgatttggcgaacggtagcaatgatcatcaatgaagcccttgatgcgctgcaaaaaggcgtggcctctgaacaggatatcgataccgccatgcgtcttggggtgaattatccatatggcccgcttgcctggggagcgcaacttggctggcagcgaatattaaggctcctggaaaatctacaacatcactatggcgaagaacgctatcgcccatgttcattgctgcgccaacgggcgcttctggagagcggttatgagtcataa

SEQ ID NO: 477702 - DNA, 789 bp, Shigella flexneri
atgatggaattcatcctcagtcatgtagaaaagggcgtgatgacactaacgctcaaccgcccggaacgcctgaacagttttaatgatgagatgcacgcacaactggcagagtgcctgaaacaggtcgagcgcgacgacactatccgttgcctgttacttacaggtgccgggcgcggattttgtgctggtcaggatcttaacgatcgtaacgttgatcccacaggccccgcaccggatttagggatgtcagttgaacgtttctataacccactggtacgtcgcctggcaaaactgccaaaaccggtgatctgtgcagtcaatggcgtggcggcaggggctggcgcaacactggcactgggatgcgacatcgttattgctgcccgttcagcaaaattcgtcatggcgtttagtaagttaggtttagtacccgattgcggtggaacctggttactgccacgcgttgctgggcgagcgcgcgccatggggctggcactgctggggaatcaactgagtgctgaacaggcgcacgaatgggggatgatctggcaggttgttgatgatgaaacgctggcagataccgcgcaacagctggcacggcatctggcgacacaaccgacatttggtcttggacttatcaagcaagcgataaatagcgctgaaaccaatacgctcgatacgcaactggatctggaacgtgactatcagcgacttgccggacggagcgcagattatcgtgaaggtgtcagtgcgttcctggctaaacgctcaccgcagttcacggggaaatag

SEQ ID NO: 477703 - DNA, 768 bp, Shigella flexneri
atgagcgaactgatcgtcagccgtcagcaacaagtattgttgctgacccttaaccgtcccgccgcacgtaatgcgctaaataatgcccttctgacgcaactggtaaatgaactggaagctgcggctaccgatagcagcatttcggtctgtgtgattaccggtaatgcacgcttttttgccgctggggccgatctcaacgaaatggcagaaaaagatctcgcggccaccttaaacgatacacgcccgcagctatgggcgcgattgcaggcctttaacaaaccactcatcgcagccgtcaacggttacgcgcttggtgcgggttgcgaactggcattgttgtgcgatgtggtggttgccggagagaacgcgcattttggtttgccggaaatcactctcggcatcatgcctggcgcaggaggaacgcaacgtttaatccgtagtgtcggtaaatcgttagccagcaaaatggtgctgagcggagaaagtatcaccgctcagcaagcacagcaggccgggctggttagcgacgtcttccccagcgatttaaccctcgaatacgccttacagctggcgtcgaaaatggcacgtcactcgccgctggccttacaagcggtaaagcaagcgctgcgccagtcgcaggaagtggctttgcaagccggacttgcccaggagcgacagttattcaccttgctggcggcaacagaagatcgtcatgaaggcatctccgctttcttacaaaaacgcacgcccgactttaaaggacgctaa

SEQ ID NO: 477704 - DNA, 282 bp, Shigella flexneri
gtgactgtacgtcaggatgggcgtgatcgggaaatcgtgcttaatgccgacgatgaaagcattctcgatgcggcattgcgccagggggctgatctgccctatgcctgcaaaggcggcgtctgtgcgacctgcaaatgcaaagtgctgcgtggcaaagtggcgatggaaaccaattacagtctggaaccggatgaactggccgcaggctatgtgttgagttgccaggcactgccgctgaccagcgatgtggtggttgactttgacgcgaaggggatggcatga

SEQ ID NO: 477705 - DNA, 483 bp, Shigella flexneri
atgattctctccatcgacagcaacgacgctaataccgcgcccttgcacaaaaaaacaatcagcagcctgagtggcgcagtggagagtatgatgaaaaaattagaagatgttggtgtactggtagcgcacattttaatgccgattctgtttattaccgcaggctggggaaaaatcaccgcttactctggtacccaacaatatatggaagcaatgggtgtcccgggttttatgctgccgctggtgattctgcttgagttcggtggtggtctggcaatcctgttcggtttcctgactcgcaccacagccctgtttactgcgggctttacgctgctgacggcatttttatttcacagcaactttgctgaaggcgtcaactcgctgatgttcatgaaaaacctgacaatttctggcggattcctgctgctggcaattaccggtccgggcgcgtatagcatcgaccgcctgctgaataaaaagtggtaa

SEQ ID NO: 477706 - DNA, 372 bp, Shigella flexneri
gtggtgtgggtcggtaaggatgtgacaggcatcgagccacgcaatgccagtgttattgaagttcctgatattaccgctaaccgacggattaccgcgccgggttactggttttaccgcaatgatgaatttgtctttgactacagactcaaagcggaagatgagcgtgatgcccttctggctcaggtcagtgcccggacaggggaatgggaagaagacctgctgctggggttaatcagcgacgaagataaagaaaagctgaaagcctgtcgtatttacgcgaaatcgctgcaggcgatggatttcagcaccatcactgataaatcctcatacaacgccattgaatggcccgcctctccggaaggttcttcctga

SEQ ID NO: 477707 - DNA, 1386 bp, Shigella flexneri
atgaaggccagtgataaaccccgccagctggcggtcccctttgcgagtaccggagataaaaaccgtatcccggacaaggcgacacagcagaccagagagagcggtaatgctgcgtatgattcaggttttcctccggtgaccatgacagcggtctcagcgggaggtataccgccacacggcaaggattttaacggtctgatgtacgatattaccgcagcaatacggttcgcccaggctggcggtttgtacacgtataatgccggttttgcgggggccattggtggatatgcaaaaggagccattctcgccggagtcgcaacaacagcggtctggctgaataccacagacgataacctgaccgatcctgaaggctccgacagtgcgggctgggtaaatcttcttgaggatccgaaaaggatattcctgcggcagaagaacaatctgtcagaccttcagaataaagggacggcacgggataatcttcaggtttacagtaaagagcagtcagatcaacgctatgttcatcgggaaggcgataaaataaccggagagctgaaaatccgtggtgttaatgcgctgaggattttcaacgaagcttttggcctgatttttcgtcgttcggaagagtgcctgcaccttattcccaccagtgaaggtcagggggaaaatggcgatattggtcccctgcgcccgttcaccattaatttgcggacgggtgaaatatccatgtcgcataaagtgtctgttggcggtggttcgcaggtcaatggtgcgctgggtatcggcgttcagaacgccctgggggggaattcaattgttcttggtgataatgacaccggatttaaacagaatggagacggtattctggatgtttatgctaatagtcagcgtgtattccgctttcagaatggagtggctattgcttttaagaatattcaggccggaactgccagaaaattcacgttatccagcgccaacaactccacgaaaaatgcagcgttttatttgtggggtaatccatccaggcctgttgttgcagagcttggcgatgattcaggctggcattttttcagccagagaaacccggataacagcatagtgttcactgttaacggacaggtaattccgttaaattacggaaacttcgatgcccgctataaatatcgaacagagggggtacaggatgtacggtatggccatgaaatgtattacagccccggcagtaacaccgtttcgtggagattttgcgcaccttcgggacacgggctgtcagggatggcgatatcggataccggccgtaactcagcggataacgttgacggtgtgtattaccgaccactgcaaaaactgattaatggcacctggtataacgtagcgagtatttaa

SEQ ID NO: 477708 - DNA, 258 bp, Shigella flexneri
gtgcagaatgtggctgccactgtgcttgcgcagtatgctgccagcccccgactcaatgccctcattaacagctttaacgcagcgctttcccccgacagttttatcagtgatttttatggtcttatctggaacatcgataccgcagaaaagtatggtcttgatgtctggggaaagattgtgggtgtcagtcgccggctgacggtaaaggacgattttaattacctggcttcagcgagtccaggatggacaccccggtaa

SEQ ID NO: 477709 - DNA, 357 bp, Shigella flexneri
atgcagtcacgatcacttcttcttgacaccgggacatgggatatcctgcttgatgataccggaaatcttgccattactgataatccccatgcggtagctcaggatgtggcgtgtgcgtgcagtacttttctgggggagtgctggtacgactcaacggctggcataccttactggccacgcatcctcggacactggcccggcaaacaactggtgaatgccactctgcaacaggaagcacttaaactgccgaccgtgagcgccgctgtctgcctggtcacagctgatcaaacccggacagtaacaggtgtgctgcgtattacagataccaataatgacatttttacggtactgctatga

SEQ ID NO: 477710 - DNA, 678 bp, Shigella flexneri
atggcacaaccactcagtaacccgacagacgtgaacagcgaaatcaatgcacaggactttatgctgcggcagtttctcggacgtcatgcgtttatcactctgggacgggtggtagccgtggaagagggatttattgaggcccgaccgatggtaatgggcgttgcagcagacggttccccggttgaacatgaggtgatttataacattcccgtatggcgactacaggggggcggtaatgcggtgattatgccgccacatgtgggggatatcggttttcttgccatctgcgatcgggatatcagtgcggtaaaagccacgcgtcaggctgcgatgccgggatcaaagcgtacccataattatgctgatgccatctggctgggtggcgtgctcaacggtgatcccgtccagtttgtggtatttgatgacaaccagatacggattgtatctccctggaaagtggagatatccgcgcctgagggtgtgattaatgcgccgaaaagcttcaccgttaattcaccacaaattgcgctgaacggcgataccgccgtcagtaaggggcttgacgttaccgggcagtccaggctttccggcggttcgaacatcgggggtattgattttggaaaccacgttcacggcggcgttgagtccggcggctcaaccacgcagggaccccggtaa

SEQ ID NO: 477711 - DNA, 870 bp, Shigella flexneri
atgagctacagacaacataaaataacggtggagttcactctttcagacggacgaacgtttggtaatggccagggcaatatgctgaccattaccgacgcaagctgttttgccagtattgccgtatatggaggggtggctggtacacaaatcacgctgtatatctggggaatgtcaccggcgcatatgacgaatttaagctggcgcggtgtgtggcgacaggagcagagtaccgcaaataaaatgcggctgtgggccgacgggcggcttatttttgaaggtgatattactgatgcatacgccgactacaaccaggcgccggatattccgctcattctgacaggacagattcattttaatctgcgtaatcagccggcggcagatttcagcgcaaagggcgatgttgcggttgcagatattatccgtgcgctggcgtcaactgtcgggcttggatttgaaaaccagggggtcagccgcagtctgtctgacccgcatttttccggtaatgttgtacaacaaatgctggatgtcgcttcagccgccgatattaacattgatctggggaatgtggagaaagtcaccatctggccgaaagggcagaaccggaatattccgccggtactgatttcgccggatcacggactgactggctatccggtttacaccatgaccggactcagcgccaccacgatattctgccccgatctctttactggcaggccagcgcatctggaatcgtcactgcctgatatgacgggcgattatacgatcacaggggtgatacacaccattacttcgcgaaccgtgggcggtccgtggagttccaactgtaccatgatgagggctgaagaaaatggcacaaccactcagtaa

SEQ ID NO: 477712 - DNA, 303 bp, Shigella flexneri; identical to SEQ ID NO: 462573

SEQ ID NO: 477713 - DNA, 870 bp, Shigella flexneri
atgccgttaccattccccttcgattttaaacatcctgattaccagatggtttttgaatggcggatggaacgcctacagcgcattcgccagaatcctgaaatattgcctgcactaaaacagttttaccgtaccaacccggctcagttcattatcgactggggcatgacaacggacccgcgtaatattgattatggcctgccggtgaccattccgtttttactcttccctaagcaggaggagtggatccactggattatgaaacgctggagcaatcgggagaatggtattaccgaaaaatcccgtgaaatggggctcagttggaccgcgatcggactggcctgctcgctttgtctcttcaacaaagaaatggttatcggtttcggctcccgtaaagaggaatacgtcgacagcaccggtgacccgaaagcattgttctggaaggcgcgcaagttcgtggaaacactacctgtagagtttcgcggttcgtggagcgagaagaagcacgcgccatatatgcgtgttgagtttcctgaaactggcgcggttatcaaaggtgaggctggcgataatatcggtcgtggtgaccgtacgaccctttattttgtggatgaggctgcttttctccagcgaccattacttattgatgccgcgctttcccagacaacccgatgtcgtatcgatctctcatcggttaacggtatgaacaaccccttcgcacagaagcggcacagtggaaaaatcccggtgtttacgtttcactggcgtagcgatccgcgtaaagacgatgagtggtccgaccttactgacggttactgcggtatttcagaccgtaatgaatacaggagaggtgtcagtgggaagtacggataa

SEQ ID NO: 477714 - DNA, 246 bp, Shigella flexneri
gtgtgccacttcagaatggatgtcgtggagatggtatccgcagatagcgccgcacttctgaagaaaatcaaatggcctgataaggttaaaaaccttgagttgcttgggcgccatgtttctgttcaggcgtttaaagacaacgtcaaaaatgaagtgactggcgctgacggaggaccagtcagaacagaaattaccaaattaacgcctgagcaggccgcagaggtgtatagaaaaatgatgggctaa

SEQ ID NO: 477715 - DNA, 888 bp, Shigella flexneri
atgaataaaataatcaatcaggcctatgaattgaaatccggggctgagacagacaaaacgaaacgggcgagtttaattgaatttgtcagtcgttatgtcggtcaggcacccgagaatgatttgcttttttgggggcgaattggtttcagtaaacctgaaattctgcgtctggcgactctatgggcgcaggaaggcgaccccgaaatggattatattgtcggaaatctttatctcgatgatttttcaccttctgatgatagacgttctttagacaccataaagaaagcactgcaatggtttcgtactgcggcagaaaaaggttatccgatggcgcagtataccatgggcgatacctacgaaaatggcagtgctggtttaaagattgatgctgtcgaagccaaaaaatggtacgaattagctgcaaataagaatgacgaaaaagcattagtggccctggggaatatatactattctggtttgaccggtgaggttgattattctaaagcgagcatgctttttgacaaggctgaacagcaaggggcaaaaaaagccgcattgtggttaagttggatgtattacaacggattaggtgaaacgcttgattgtgataaggtatgggattattacgaaaaaggtgcggggaaatattcaatgaaattcaataaggatgaatatttaacccgttgtaatcaagatcagaaaacccgagaaacacagggtgatactttaccttacatcacgttaaaacattacgggacctatggctttaacgcaaatgaaaaacccaaaatatgcgatgtcagtattgaaattaatgcagataaaattagtagtataactaatttgcagttgacgcttgagctaaaaggggggggagggagtgagtaa

SEQ ID NO: 477716 - DNA, 234 bp, Shigella flexneri
gtgagtaaagaatatactctttctgtccctccttttagtttgaatacgctcggtgtggatatgtataataattccagtcatataagaaaaagctatatagacatcccaatgtataatcgtaatttatgcgattttcatgatttgacttattctattaaatctgcgacagcgatactgaatggaaaacaacgtgatttattaaaagaagagcatattcaggtacaagataaataa

SEQ ID NO: 477717 - DNA, 303 bp, Shigella flexneri; identical to SEQ ID NO: 473532

SEQ ID NO: 477718 - DNA, 900 bp, Shigella flexneri
atggaagctaaagaatgtaaggtgcaggatatccttactgaaaacaaaaagtttattattccttcttatcagcgtccttacagttggacggtagataatgcagagcaactcattgatgacatttataaaagctctcaatcagaagagaatgaatattttattgggagtatgatttgtatcaataaagggcaaaatcagtatgaagttgtagatggacaacaacgtcttacaacgttaagcattattgtctccgagctaaaaaaaatcatcccgattcaggggataaaagatgatttgcaaaaaagagttctacctattgatgtttattctgatgaaacagatgaaccaagactaattgttagaaaaaaagagtatgatctttataaatattatatactgcaggattctaaagattataagcctgaaaagccatcggatactgatttagtattcattagcaacgctgaaacaattagagattatttgttgcggttatctgttgatgagttgaagttgcttgctaaatatattttacaaaatgtatatatcgtatttgtgcaaacagatgatttcgcatcatcatttagactctttaatgtattaaatagtcgaggtttacctctaagtaatgcagatcttttaaaaaatgcactgtttgaatcagcttctacacataataaaaaatcagagcaaatagaatcagcatggtcgcaaattgaagatatggttggagtgagacggcttgataaatttcttactcttcataagctttccgagaaaaaagatcgtgacagggtgttacaaaaaggttttgaagcttttattgaaaatctccagcagcaatttgatggagatgctattgctatgtcactgatgttggttaattctgcaaaaaattag

SEQ ID NO: 477719 - DNA, 729 bp, Shigella flexneri
atgacaacgtttcattccttaacagtggcaaaagtcgagccggaaacccgtgatgcggtgaccattacctttgcggtgccccagcctttgcaggaggcgtatcgctttcgccccggtcaacatttgaccttaaaagccagctttgatggtgaagaattacgccgttgttactccatttgccgcagctacctgcctggcgaaattagtgtggcggtaaaagccattgaaggcggacgtttctcccgctatgcccgcgaacacatccgccaggggatgacgctggaagtcatggtgccgcaggggcatttcggctatcagccgcaggccgaacgccagggccgctatctggctattgcagcaggatcaggtattacgccaatgctggcgattattgccaccactttacaaaccgagcctgaaagtcagttcaccctgatctacggtaaccgtaccagccagagcatgatgtttcgccaggcactggcagacctgaaagacaaatatcctcagcgtttacagttgttgtgcattttcagtcaggaaacactcgacagcgatctgcttcacgggcgtattgacggtgaaaaattacagtcacttggggcctcgctcattaattttcgtctttatgatgaggcatttatttgtggtccggcggcgatgatggatgagacggaagccgccttaaaagcactgggaatgccagataaaaccattcatctggagtaa

SEQ ID NO: 477720 - DNA, 498 bp, Shigella flexneri
atgcaacgtctggccaccattgcaccgccgcaggtgcatgagatatgggcgctactcagccagatcccggacccggagatcccggtgctgaccattaccgatttaggcatggtgcgtaatgtgacacagatgggagaaggatgggtgatcggctttacgccgacatattccggttgtccggcaacggaacatttgattggcgcgatacgtgaggcaatgtcaacccacgggtttacccccgttcaggttgtgctgcaacttgacccggcatggaccaccgactggatgacccccgatgcccgtgagcgtctgcgagagtatggcattagcccgcccgccggacacagttgccatgcccatttgccgccagaagtacgttgcccgcgctgcgccagcgtccataccacacttatcagtgaatttggttccacggcctgcaaagcattgtaccgctgcgatagttgccgcgaacctttcgattatttcaaatgtatttga

SEQ ID NO: 477721 - DNA, 747 bp, Shigella flexneri
atgaatcagttaacggcttacaccttgcgcctgggcgataactgcctggtgctctcccagcggttgggtgaatggtgcggtcacgcaccggaactggaaatcgatctcgcactggcaaacattggcctcgatttattaggtcaggcacgcaacttcttatcgtatgccgctgaattagcgggagaaggcgatgaagataccctggccttcacccgagacgagcgccagttcagcaacttattgttggttgaacaaccaaacggcaattttgccgacaccattgcacgccagtatttcatcgatgcatggcatgtggcgctctttacccgtctgatggaaagccgcgagccgcaactggcggcgatttctgccaaagcaattaaagaagcgcgttatcacctgcgttttagtcgtggctggctggagcgactgggcaatggtactgacgtatcagggcaaaagatgcagcaggccatcgacaagttgtggcgttttaccgccgaactgttcgatgccgacgagattgatattgcactgagtgaagagggtattgcggttgatccacgcactttacgcgcagcgtgggaagctgaagtttttgccgggatcaacgaagccacattgaacgtaccgcaagagcaggcgtatcgcactggcggtaaaaaaggactgcataccgaacaccttggacccatgctggcagaaatgcagtatctccagcgtgtcttgcccggtcagcaatggtaa

SEQ ID NO: 477722 - DNA, 288 bp, Shigella flexneri
atgagtaatgtttactggccgttatacgaagttttcgtgcgtggcaaacagggcttatcacaccgccatgttggcagtttacatgctgccgatgagcggatggcactggaaaatgcccgtgatgcttacacccgtcgtagcgaaggatgttcaatttgggtggtgaaggcgagtgaaattgttgcctcgcaaccggaagaacgcggtgaattttttgatccggctgaaagcaaagtctatcgccatccaacgttttacaccatccctgatggcattgagcacatgtga

SEQ ID NO: 477723 - DNA, 930 bp, Shigella flexneri
gtgacccaagaagaacgctttgagcaacggatagcccaggaaacggctatcgagccacaggactggatgcccgatgcttaccgaaagacactgatccgccagattgggcagcatgcgcactccgagattgttggtatgttgcctgaaggtaactggatcactcgcgcaccaaccttgcggcgtaaagccattctgttggccaaagtgcaggatgaagccggtcatggtctgtatctctatagcgccgccgaaacactgggctgcgccagagaagacatctaccaaaaaatgctcgacggacggatgaaatattcctccatctttaattatccgacattgagttgggctgatatcggcgttatcggctggctggtggatggcgcagcgatcgtcaatcaggtggcgttatgccgcacttcttatggcccgtatgccagagcaatggtgaaaatctgcaaagaagagagttttcaccagcgtcagggggttgaagcctgcatggcactggcgcagggcagcgaagctcaaaagcagatgttgcaagacgccattaaccgtttctggtggccagccttaatgatgttcgggccaaacgatgataactcgccaaacagcgccagaagtctcgcctggaaaatcaaacgtttcaccaacgacgaactccgccagcgtttcgtggacaacaccgttccacaggttgaaatgctcggtatgaccgttcctgactcggatctgcattttgacactgaaagcggtcactaccgctttggtgagatcgactggcaggagtttaacgaagtaattaacggtcgcggaatttgtaatcaggagaggctcgacgccaaacgtaaagcctgggaagaaggtacctgggtacgggaagcagcgctggcccatgcacaaaaacaacttgcccgtaaggtcgcataa

SEQ ID NO: 477724 - DNA, 2046 bp, Shigella flexneri
atgcagcagttagccagtttcttatccggtacctggcagtctggccggggccgtagccgtttgattcaccacgctattagcggcgaggcgttatgggaagtgaccagtgaaggtcttggtatggcggctgcccgccagtttgccattgaaaaaggtgcccccgcccttcgcgctatgacctttatcgaacgtgcggcgatgcttaaagcggtcgctaaacatctgctgagtgaaaaagagcgtttctatgctctttctgcgcaaacaggcgcaacgcgggcagacagttgggttgatattgaaggtggcattgggacgttatttacttacgccagcctcggtagccgggagctgcctgacgatacgctgtggccggaagatgaattgatccccttatcgaaagaaggtggatttgccgcgcgccatttactgacctcaaagtcaggcgtggcagtgcatattaacgcctttaacttcccctgctggggaatgctggaaaagctggcaccaacgtggctgggcggaatgccagccatcatcaaaccagctaccgcgacggcccaactgactcaagcgatggtgaaatcaattgtcgatagtggtcttgttcccgaaggcgcaattagtctgatctgcggtagtgctggcgacttgttggatcatctggacagccaggatgtggtgactttcacggggtcagcggcgaccggacagatgctgcgagttcagccaaatatcgtcgccaaatctatccccttcactatggaagctgattccctgaactgctgcgtactgggcgaagatgtcaccccggatcaaccggagtttgcgctgtttattcgtgaagttgtgcgtgagatgaccacaaaagccgggcaaaaatgtacggcaatccggcggattattgtgccgcaggcattggttaatgctgtcagtgatgctctggttgcgcgattacagaaagtcgtggtcggtgatcctgctcaggaaggcgtgaaaatgggcgcactggtaaatgctgagcagcgtgccgatgtgcaggaaaaagtgaacatattgctggctgcaggatgcgagattcgcctcggtggtcaggcggatttatctgctgcgggtgccttcttcccgccaaccttattgtactgtccgcagccggatgaaacaccggcggtacatgcaacagaagcctttggccctgtcgcaacgctgatgccagcacaaaaccagcgacatgctctgcaactggcttgtgcaggcggcggtagccttgcgggaacgctggtgacggctgatccgcaaattgcgcgtcagtttattgccgacgcggcacgtacgcatgggcgaattcagatcctcaatgaagagtcggcaaaagaatccaccggacatggctccccactgccacaactggtacatggtgggcctggtcgcgcaggaggcggtgaagaattaggcggtttacgagcggtgaaacattacatgcagcgaaccgctgttcagggtagtccgacgatgcttgccgctatcagtaaacagtgggtgcgcggtgcgaaagtcgaagaagatcgtattcatccgttccgcaaatattttgaggagctacaaccaggcgacagcctgttgactccccgccgcacaatgacagaggccgatattgttaactttgcttgcctcagcggcgatcatttctatgcacatatggataagattgctgctgccgaatctattttcggtgagcgggtggtgcatgggtattttgtgctttctgcggctgcgggtctgtttgtcgatgccggtgttggtccggtcattgctaactacgggctggaaagcttgcgttttatcgaacccgtaaagccaggcgataccatccaggtgcgtctcacctgtaagcgcaagacgctgaaaaaacagcgtagcgcagaagaaaaaccaacaggtgtggtggaatgggcggtagaggtattcaatcagcatcaaaccccggtggcgctgtattcaattctgacgctggtggccaggcagcacggtgattttgtcgattaa

SEQ ID NO: 477725 - DNA, 1257 bp, Shigella flexneri
atgggaagcccctctctgtattctgcccgtaaaacaaccctggcgttggcagtcgccttaagtttcgcctggcaagcgccggtatttgcccacggtggtgaagcacatatggtgccaatggataaaacgcttaaagaatttggtgccgatgtgcagtgggacgactacgcccagctctttaccctgattaaagatggcgcgtacgtgaaagtgaagcctggtgcgcaaacagcaattgttaatggtcagcctctggcactgcaagtaccggtagtgatgaaagacaataaagcctgggtttctgacacctttattaacgatgttttccagtccgggctggatcaaacctttcaggtagaaaagcgccctcacccacttaatgcgctaactgcggacgaaattaaacaggccgttgaaattgttaaagcttccgcggacttcaaacccaatacccgttttactgagatctccctgctaccgccagataaagaagctgtctgggcgtttgcgctggaaaacaaaccggttgaccagccgcgcaaagccgacgtcattatgctcgacggcaaacatatcatcgaagcggtggtggatctgcaaaacaacaaactgctctcctggcaacccattaaagacgcccacggtatggtgttgctggatgatttcgccagtgtgcagaacattattaacaacagtgaagaatttgccgctgccgtgaagaaacgcggtattactgatgcgaaaaaagtgattaccacgccgctgaccgtaggttatttcgatggtaaagatggcctgaaacaagatgcccggttgctcaaagtcatcagctatcttgatgtcggtgatggcaactactgggcacatcccatcgaaaacctggtggcggtcgttgatttagaacagaaaaaaatcgttaagattgaagaaggtccggtagttccggtgccaatgaccgcacgcccatttgatggccgtgaccgcgttgctccggcagttaagcctatgcaaatcattgagcctgaaggtaaaaattacaccattactggcgatatgattcactggcgtaactgggattttcacctcagcatgaactctcgcgtcgggccgatgatctccaccgtgacttataacgacaatggcaccaaacgcaaagtcatgtacgaaggttctctcggcggcatgattgtgccttacggtgatcctgatattggctggtactttaggactctggtgactacggtatgggcacgctaa

SEQ ID NO: 477726 - DNA, 606 bp, Shigella flexneri
atgggcacgctaaccccaccaattgctcgtggtaaagatgcaccgtctaacgcagtgctccttaatgaaaccatcgccgactacactggcgtgccgatggagatccctcgcgctatcgcggtatttgaacgttatgccggaccggagtataagcatcaggaaatgggccagcccaacgtcagtaccgaacgccgggagttagtggtgcgctggatcagtacagtgggtaactatgactacatttttgactggatcttccatgaaaacggcactattggcattgatgccggtgctacgggcatcgaagcggtgaaaggtgttaaagcgaaaaccatgcacgatgagacggcgaaagatgacacgcgctacggcacgcttatcgatcacaatatagtgggtactacacaccaacatatttataatttccgcctcgatctggatgtagatggcgagaataacagcctggtggcgatggacccagtggtaaaaccgaatactgccggtggcccacgcaccagtaccatgcaagttaatcagtacaacatcggcaatcgagtaggcagcctgacggctgcggcttgtcatggtctgcaattaccgttataa

SEQ ID NO: 477727 - DNA, 381 bp, Shigella flexneri; identical to SEQ ID NO: 458903

SEQ ID NO: 477728 - DNA, 672 bp, Shigella flexneri
atgactgaacaggcaacaacaaccgatgaactggctttcacaaggccgtatggcgagcaggagaagcaaattcttactgccgaagcggtagaatttctgactgagctggtgacgcattttacgccacaacgcaataaacttctggcagcgcgcattcagcagcagcaagatattgataacggaacgttgcctgattttatttcggaaacggcttccattcgcgatgctgattggaaaattcgcgggattcctgcggacttagaagaccgccgcgtagagataactggcccggtagagcgcaagatggtgatcaacgcactgaacgccaatgtgaaagtctttatggccgatttcgaagattcactggcaccagactggaacaaagtgatcgacgggcaaattaacctgcgcgatgcggttaacggtaccatcagctataccaatgaagcaggcaaaatttatcagctcaagcccaatccagcggttttgatttgtcgggtacgcggtctgcacttgccggaaaaacatgtcacctggcgtggtgaggcaatccccggtagcctgtttgattttgcgctctatttcttccacaactatcaggcactgttggcaaagggcagcggtccctatttctatctgccgaaaacccagtcctggcaggaagcggcctag

SEQ ID NO: 477729 - DNA, 864 bp, Shigella flexneri
ttgctgattgaaacgctgcccgccgtgttccagatggacgaaatccttcacgcgttgcgcgaccatattgttggtctgaactgcggtcgctgggattacatcttcagctatatcaaaacgttgaaaaactatcccgatcgtgtcctgccagacagacaggccgtgacgatggataaaccattcctgaatgcttactcacgcctgctgattaaaacctgccataaacgcggtgcttttgcgatgggcggcatggcagcgtttattccgagcaaagatgaagagcgtaataaccaggtgctcaacaaagtaaaagcggataaagcgctggaagccaataacggtcacgatggcacatggatcgctcacccaggccttgcggacacggcaatggcggtattcaacgacattctcggctcccgtaaaaatcagcttgaagtattgcgcgaacaagacgcgccgattactgccgatcagctgctggcaccttgtgatggtgaacgcaccgaagaaggtatgcgcgccaacattcgcgtggctgtgcagtacatcgaagcgtggatctccggcaacggctgcgtgccgatttatggcctgatggaagatgcggcgacggctgaaatttcccgtacctcgatctggcagtggatccatcatcaaaaaacgttgagcaatggcaaaccggtgaccaaagccttgttccgccagatgctgggcgaagagatgaaagtcattgccagcgaactgggcgaagaacgtttctcccagggccgttttgacgatgccgcacgcttgatggaacagatcaccacttccgatgagttaattgatttcctgaccctgccaggctaccgcctgttagcgtaa

SEQ ID NO: 477730 - DNA, 1557 bp, Shigella flexneri
atgctggcggatgagacctggatgtccggtgccgaatgtctggcacatggatttgctgatcaggtgacgccagccgttaaggcaatggcatgtattcagtcaaaacgtacagaggaatttaaaaagatgccggaatccattcgaaacatgattactccgccacgcaacagtgcaacgcgtgaacctgaaaacaaaaatactgcatctcagacacaggagcagactacggctcaggttgccacaaccgcgaccaccacaaatgcaccttccgcagatgaaagcagtatccgtgcgcaggtactggcagagcaaaaagcacgtgtgagtggtattaatgaactgtttggtatgtttggcgggcgttatcagacattgcaggccagttgtctttccgatccggagtgctcgcttgagcaggcccgtgagaaattacttaacgaaatgggtaaggaattttcaccatcaaataaaaataccccggcccatatttatgccggaaacggtaattttgtgggggacgggatccgccaggcgctgatggcgcgtgccgggtttgaaaaaactgaacgtgataatgtctacaacgggatgaccctgcgtgaatatgcccgtatgtcactgactgaacggggtattggggtttccggttataacccgatgcagatggtcggggcagcgttcacacacagtacgtctgacttcggtaatattctgctggatgttgcgaacaaagccattctgcagggctgggaagatgcccctgaaacctatgaacagtggacgcggaaaggtcaactgtctgattttaaaattgcccatcgtgtgggtatggggggcttcagtgctctgcgtcaggtgcgtgaaggggcggaatataaatacgttactaccggagataaacaggccacgattgcactggcgacctatggtgaactgttcagtatcacccgtcaggccattatcaacgatgatctgaatatgctgaccgatgtcccgatgaaactgggccgtgcggcgaaatccactattgccgatctggtttatgccattctgacgtctaacccgaaaatctccacagataatgtaagcctgttcgataaagcgaaacatgcaaacgtactggagagcgcagcaatggacgtggcatcgctggataaagcccgccagttgatgcgtgttcagaaagagggtgagcgtcatctgaatattcgtcctgcgttcgtactggtaccgacggcgatggagtctgttgctaaccaggtcattcgctcctcaagtgtcaagggggctgacattaacgccggtattattaacccggtgaaagattttgcgaccgttattgcagagcctcgtcttgatgataacagccagaccactttttatctggcagcgtccaaaggctccgatacgattgaagtggcttatctcaacggtgtggatacgccatatattgatcagatggagggcttcagtgtggatggcgtgacaacgaaagtgcgtattgacgctggtgttgcgccagttgatcaccgcggtctggtgaaatgtacggcgtaa

SEQ ID NO: 477731 - DNA, 324 bp, Shigella flexneri
atggcaaagaattttgtagaagaaggaaaaacggtggcgattgttgccagtgcagccatcagcagcggagatctggtgcaggtgggtgatgtttttgcggtggcgctgaccgatattccacagggtgaaacaggcgacggcctgaccgaaggtgtgtttatgctgcctaagctgaaaacggatgacatgaaaacgggtaagaaggtttttctgaagtccggaaaagttcagctgactaacagcggctctgatccgctggtcggggttgtctgggcagatgccggagctggtgcagaagaagtgccggtaaaactcaatgtctga

SEQ ID NO: 477732 - DNA, 276 bp, Shigella flexneri
atgtctgatcccttttcccggctggcagcgcgtatggatgcgatcacggtcagaaagatgggaaagatggcctcgattaatgatgtttatatgcctgtgctcccgggagaaactctggcagagctgaacgctctgtccggaccggcggtctctctggtggtgttttcttcgggataccgcccacggcgcggggaccgcgttgtttatgacggacaacaatggacggtcacacggcatgaacgctttaacggtaaaccaatgatctttattgagtaa

SEQ ID NO: 477733 - DNA, 285 bp, Shigella flexneri
atggctcatgtccggagaaaaatccacgatgtgcatgcaagagtgccaaccgacatcaccacggaagccctgcagcgtatcggtgaactgtatgccattgaggcagaagtccggggatgttcagcagaacagcgtctggcggcaagaaaagccagagccgcgccactgatgcagtcactgtatgactggatacagcaacagatgaaaattcattcgctgaaaatggaatgtctccacggaaaacactattatccatcgggaaatagtgcgggcaacagtgtttag

SEQ ID NO: 477734 - DNA, 510 bp, Shigella flexneri
atgtcaaagccaaaatacccttttgaaaagcgccttgaagtcgtgaatcactacttcactactgatgatggttacaggatcatctcggcacgttttggtgtcccccgaacccaggtcaggacatgggttgccctctatgaaaaacatggagaaaaaggtttaattcccaaacctaaaggcgttagtgctgatccagagttgcgtattaaggtcgtgaaagctgtgatcgagcagcacatgtcccttaatcaggctgctgctcactttatgcttgctggtagtggttctgtagccaggtggctgaaggtctatgaagagcgcggagaagctggtttacgcgcgctcaagattggcaccaaaagaaacattgcaatatcagttgatccagaaaaagcggcatcagcattggagctgtcaaaagaccgacgcattgaggtgaggtgtactggcaatagcggacactaccatttgttcttttttaagcagccatctgatgatatttttccctga

SEQ ID NO: 477735 - DNA, 747 bp, Shigella flexneri
atgacaacggataacacgaacacgacacgtaacgattcactggctgcacggaccgatacctggttgcagtcatttctggtctggtcacccggacagcgggatatcatcaaaacggtggcactggtgctgatggtactggaccacatcaatctgatattccagctgaagcaggaatggatgtttctggccgggcgaggagcctttccgctgtttgccctggtgtgggggctgaatctgtcccgtcatgcgcatatccggcaaccggccattaaccggctgtggggatggggaattattgcccagttcgcatattatctggcaggctttccctggtatgaggggaatatcctgtttgcctttgcagtggcggcacaggtgctgacgtggtgtgaaacgcgcagtgggtggcgtacagcagcggccattcttctgatggccctgtgggggcccttgtccggcaccagttacggcattgccgggctgctgatgctggcagtcagccaccggctgtaccgggcagaagacagagcggaacgtctggcgctggtcgcctgcctgctggctgttattccggtgcttaaccttgccaccagtgatgcagcggcggtggccggtcttgtgatgacggtgctgaccgttggtctggtgtcgtgtgcaggaaaatcattaccccgtttctggcccggggattttttcccggtattctacgcctgtcatctggctgtgctgggcgttctggcgctgtga

SEQ ID NO: 477736 - DNA, 828 bp, Shigella flexneri
atgaattatgaaaaatatcatagcacaaacagaagcaagggtttgcgaaccttctgctacttaatttattatgtgcaggtgatttttaatgtgatgaagtgttttatgactcgcggaaactttgattttataaactctaacgtggttttctcagaagccgataagtcattgtggattgatctcattaacaccgattgtatttggtatgatatgataattaatcctcctgatgatataagaacaaataagataataaagaactatctcagaattatggaaaaatatacgagggaaagctgtgaaaagagatttatttatttcttaggttcaagaaaaaaagtgaggttttcaaccaagaaacagcctaggtataacccattcacaaaaaatatagtattcactctgttgattggcaaagaagagcgaaagcttcggataaaatattccttttgcacgtttacgcagaatggggtagtgaaggtaactccaaatgttagagtaactgagaagtttctctacattgaatatgaaaatggcaatttatgtgtgatgtcagttcatgatttcgtaaacggacattatattgatttaggaattcatacagaagtgcattacgtaggatatacacgtcatccgcatcggcgccctgttgattttattcaccgtggcttatcaaagatgctgtatagcgtttcaaatgacgataatgatttttttgtttgttttagtatatttaatccaaggattatatctctgaataataaatgtaatgtggtctttaatatttcaaattctctactgggtaatgctgccaacttactgatttag

SEQ ID NO: 477737 - DNA, 1236 bp, Shigella flexneri
atggcgctgtctgatgcgtggttgcgttcagtcgttggaaaggaacgtgataaggttttggttaaatccgatcgtgatggtctgtctgtcagagtatcaccgaaaggtcgcgtagtgttccaatatcgttatcaatgggcagggaaaggtgagcgccttgatatcggaacttacccggcaactggattaaaagaggccagagaagaagttatccgtctccgtggtgaactcgagtcaaaccgcaatccacgattagtcaagcaggctgaaaaacgaaaagctactgaagccatgacggtagagtctgtgatccgtgcctggtatgaagcatattgtgtaaaaaataaaaaaggttctgaacagatactccgctcgtttgagctgcacctgttctctaaaatcgggaatatccctcacgatgcagctacattgcatgattggttagaagtcctggagcctcttagcaccaagactccagcaatagtagaccgattgctaattaacgcaaagcaggctcatgtctgggcgtataagagaaagctcattgaaactcgcccactgtcggatatcacgggtaaagatatggatatccgtaaaggtcagaaaaaacggtttctgacacatgatgaaattaacatcctttatgctgcgatcgatggttctcgaatggttcctaaataccgagccttcattaaactattgctgcattttggttgccgtagttcagagctaattactgctagggtggatgattttgatttcataaataaggtatggactgtaccaccagaacgacataagactggggacataacaggcgaaccgctaaagcggcccattattgaaccggttgaagagcttataaaatacgttatctctatgaacaacggttccgatatgctttttactaaggaaggaagcagggagccagttggtcggacatcattgcagtcgctgccttacaatttaatgcagttcgcatggcgacgtttggggtatcaatttcctcattggtctcttcatgatttgagacgaacagcacgaacaaacttttctgatcttactgctcctcatattgctgaaataatgcttggtcataaactgccaggtgtatggcaagtttatgataagagcgattatctagaagaacagcgtaaagcttactgggcatggtgggagagggttgaatcgatcgttacttgtactgacttaatctccaacggacagtttgcgtag

SEQ ID NO: 477738 - DNA, 1725 bp, Shigella flexneri
atggagatgttgtctggagccgagatggtcgtccgatcgcttatcgatcagggcgttaaacaagtattcggttatcccggaggcgcagtccttgatatttacgatgcattgcataccgtgggtggtattgatcatgtattagttcgtcatgagcaggcggcggtgcatatggccgatggcctggcgcgtgcgaccggggaagtcggcgtcgtgctggtaacgtcgggtccaggggcgaccaatgcgattaccggcatcgccaccgcttatatggattccattccattagttgtcctttccgggcaggtagcgacctcgttgataggttacgatgcctttcaggagtgcgacatggtggggatttcgcgaccggtggttaaacacagttttctggttaagcaaacggaagacattccgcaggtgctgaaaaaggctttctggctggcggcaagtggtcgcccaggaccagtggtcgttgatttaccgaaagatattcttaatccggcgaacaaattaccctatgtctgccctgagtcggtcagtatgcgttcttacaatcccactactaccggacataaagggcaaattaagcgtgctctgcaaacgctggtagcggcaaaaaaaccggttgtctacgtaggcggtggggcaatcatggcgggctgccatcagcagttgaaagaaacggtggaggcgttgaatctgcccgttgtttcctcattgatggggctgggggcgtttccggcaacgcatcgtcaggcactgggcatgctgggaatgcacggtacctacgaagccaatatgacgatgcataacgcggatgtgattttcgccgtcggggtacgatttgatgaccgaacgacgaacaatctggcaaagtactgcccaaatgccactgttctgcatatcgatattgatcctacttccatttctaaaaccgtgactgcggatatcccgattgtgggggatgctcgccaggtcctcgaacaaatgcttgaactcctgtcgcaagaatccgcccatcaaccgctggatgagatccgcgactggtggcagcagattgaacagtggcgcgctcttcagtgcctgaaatatgacactcacagtgaaaagattaaaccgcaggcggtgatcgagactctttggcggttgactaatggggacgcttacgtgacgtccgatgtcgggcagcaccagatgtttgctgcgctttattatccattcgacaaaccgcgtcgctggatcaattccggcggtctcggcacgatgggttttggtttacctgcggcactgggcgtcaaaatggcgttgccagaagaaaccgtggtttgcgtcactggcgacggcagtattcagatgaacatccaggaactgtctaccgcgttgcaatacgagttgcccgtactggtggtgaatctcaataaccgctatctggggatggtgaaacagtggcaggacatgatctattccggccgtcattcacaatcttatatgcaatcactacccgatttcgtccgtctggcggaagcctatggtcacgtcgggatccagatctctcatccgcatgagctggaaagcaaacttagcgaggcgctggaacaggtgcgcaataatcgcctggtgtttgttgatgttaccgtcgatggcagtgagcacgtctacccgatgcagattcgcgggggcggaatggatgaaatgtggttaagcaaaacggagagaacctga

SEQ ID NO: 477739 - DNA, 2514 bp, Shigella flexneri
gtggaacagatgtataaaaaattaaaattaaccacaataagcgaattgattaaaaatatttattgttcattatccgttctcatcattggttgtgcgtcagcttatgccgttgaattcaacaaagatttaatcgaagccgaagatcgtgaaaacgttaacctttcccaatttgaaactgatggccaattacccgtaggtaaatactcattaaacgctcttattaataataaaaggacgccaatccatctggacctgcaatgggtattaattgataaccaaactgcagtttgtctgactccagagcaattaacattattaggctttactgatgagattattgaagaggctcagcaaaacctgatcgatggttgttaccctatcgaaaaagaaaaacaaattacaacttatctcgataaagggaaaatgcaattatccatatctgcacctcaggcatggttaaaatacaaagatgcaaactggacgcctcctgaactttgggatcatggtattgctggggcatttcttgactacaatttatatgcctctcattatgcaccatatcagggcgataattcacaaaatataagttcctatgggcaggctggggttaatcttggggcctggcgcctgcgtactgattaccagtacgatcagtcatttaacaatggcaaaagccaggcgaccaacctggattttccgcgtatttatttgtttcgcccaatcccagcaatgaatgcaaaactaactataggtcaatacgatactgaatcctctattttcgactctttccatttttctggcatttcgttgaaaagcgatgagaatatgttaccgccagacctacgtggttacgcaccgcaaatcacgggtgtcgcacaaacgaatgcaaaggtcactgtctcacagaacaaccgtattatttatcaagaaaatgttcctccaggcccatttgctattaccaatttattcaatacattacaggggcaacttgacgtcaaggttgaagaagaggacggacgcgttacgcaatggcaagttgcatctaatagtattccttatctgacgcgtaaagggcagattcgctacaccactactatgggtaaaccgaccagcgttggtggtgattccttacaacaacccttcttctggactggtgaattctcatggggttggctgaacaatgtatccctgtatggtggttcagttttaacaaaccgtgattatcaatctctggctgccggcgttggttttaaccttaactcattgggttcattatcttttgatgtcacacgatctgatgctcagttgcataatcaggataaagaaacgggttatagctaccgcgctaactattcaaaacgttttgaatctaccggtagccagctcactttcgctggttaccgtttctctgataaaaactttgtgacaatgaatgaatatatcaatgacactaaccattacacgaattatcagaatgaaaaagagagttatattgtcacgtttaaccagtatctcgaatcattaaggttaaatacatacgtaagtttggctcgtaatacttactgggacgccagcagtaatgtgaattattcattatcacttagccgcgattttgatctcgggccattaaaaaacgtctccacttctctaacatttagccgaataaactgggaagaagacaatcaggatcaactgtacctaaatatttcgattccctggggaaccagtagaacattgagctatggtatgcaacgaaatcaggataacgagatttcgcatactgcttcgtggtatgactcttccgatcgaaataattcctggagcgtttctgcttcaggcgacaatgatgaattcaaagatatgaaagcgtcactacgcgccagttatcagcataataccgagaacggtcgtctctatctctccgggacatcacagcgagacagttattattctctgaatgccagttggaatggttcattcacggcgactcgtcacggagccgctttccatgactatagtggtagtgctgactcgcgttttatgatcgacgcagatggtgcagaagatattccgttgaacaataaacgcgcggtaactaatcggtatggcatcggagttattccatcagtcagcagttacataacaacatcattaagcgttgatacccgaaatcttccagaaaatgtggatatcgaaaactcggttatcaccaccaccttaaccgaaggtgctattggctacgccaaacttgatacccgcaagggctatcaaatcatgggggttattcgcctggcagatggtagtcacccaccactggggattagcgtaaaagataaaaccagccataaagaattaggactggttgctgatggcggctttgtatacctcaacggcattcaggatgacagcaaacttactttacgctggggtgataaatcctgttttattcaaccacccaatagcagcaacttaaccaccggaacggttattttaccgtgtattagccaaaattaa

SEQ ID NO: 477740 - DNA, 378 bp, Shigella flexneri; identical to SEQ ID NO: 477589

SEQ ID NO: 477741 - DNA, 723 bp, Shigella flexneri
atgaacgagctgataaatagcaacgccattaaaatgaccagcattgaaatcgctgagttggtgggtaagcgtcatgacaatgtgaaacgtaccatcgaaacgctggctaaaaatggtgttatccggcatcctcaatttgaggtttccgaaagaatcaataacttagggttcaatgttcagtacgagcattacgtcttcgaaggcgaacaaggtaagcgcgacagcattattgtcgttgcccagttgtcgccggaattcaccgctcgtcttgttgaccgttggcgagagcttgaaggggcaaccgcgaaaatcccacaaaccttttctgaggcattgcgccttgcggccgaccttgaagaccagaaggctgaactggagaaacagcttgctctcgcagcacctaaagttgagtttgccgatcgcgttagcgaggccagcggaattttgattggaaactttgcaaaggttgttggaattggtccaaacaaactgtttgcgtggatgcgcgatcacaaaatccttattgcttcaggttcccggcgcaatgtgccaatgcaggaatatatggatcgcggctatttcacagtgaaagaaacagcagtcaacacaaatcacggaatacagatatcgttcaccacaaaaatcaccgggcgtggccaacagtggctgaccagaaagctgctctataacggaatgctgaaagttgaggtgtactggcaatag

SEQ ID NO: 477742 - DNA, 687 bp, Shigella flexneri
atgactgttcaagttgctgtcaaaaacctttcccctgtcacttataaccagattcctgtaatcacaactgagttactcgcccgcctttacggaacagaagcaatccgtatacagcagaatcaccatgaaaataaatctcgatttattgagggaaaacacttctttaaagctgttggtgatgagctcaaaaatttgcgactagttttaaacgagtcgcaaaatgaggtgaaaatttctccaaaaacccgctccctcatcctctggacagaacgcggcgcagctcgtcacgcgaagatgctcgaaaccgatcaggcatgggacgtgttcgaaaaactggaagactgctatttcagccagacttcgaaaagcgcaggtcatcacgagaagaaaaccagcgagctttctgcaaaagatgcaaacagtctggtatggttgtgggattatgccaaccgctcacaggcattattccgcgaactgtatccggcgctaagacaaattcagtctaactattccggcagatgccacgactacggtcatgagttctcgtatgttatcggaatggcgagagacgttttaatcaatcacacacgagatgttgatattaatgagccagacggaccaacgaatctttctgcatgggtaagacttaagaacaaagaattacctccttcactacatcactactga

SEQ ID NO: 477743 - DNA, 390 bp, Shigella flexneri
atgtgttgtcgtcaactacaggccttgaatgcatataacaattttgttatgttgatacctatgaactacactatcgaatactacagtgaagatgtaaggctggaagtcgatcggcttccattgagtatgcgtgcccgataccaacatctcgttgaacgtatgaagatatatggcagcaatctcggagaacctcacaccagcgcctttggtgacggacttttcgaactcagaattaaaggcaacgatgggatcgcgcgtgttttttactgcactctgacagggaaacgcatcatcatgctgcatagttttgtaaagaaaacgcagaaaacaccgccagccgaacgcaagaaagctgaaaccagaatgaaggaggttaagcatgactggtaa

SEQ ID NO: 477744 - DNA, 309 bp, Shigella flexneri
atgactggtaaacgcactctccccaccatgacacacgacgaaatggcagccaaatggatggaagacccggcttttaaagcagaatacgacgctatcgctgacgaattcgcactgcttgatgaaatgctggcagcacgcaaagaagctggcttaactcaggctgaagttgccgagcgaatgggaacaaaagcgaccgcgatcaccagaatggaaagtaatctcgcatcaggtatcagcggcccatcatttgccaccctaaaaaaattcgcccgcgctactggaaaaaaactccagatccgcttcgtttaa

SEQ ID NO: 477745 - DNA, 447 bp, Shigella flexneri
gtgaagcaattattcctgcttcgcaacgaagcaatcagaaataacgccatagacgccattctctcactacccatcgacgacaagtcaccccacgaagtccacgttagagaacccaaacgcagcaaagcgcagaatgaccgtatgtggccgatgctgaacgatgtttcgcgtcaggtgctatggcatggtcaacggctggcgccggaagactggaaagacctgttcactgccctgtggcttaagaccaaaaaactggagcaacgaagtgcgcctggtatcggcggtggcgttgtcatgcttggcgtgcgtaccagcaaaatgcgaaaggccagcatgactgagcttatcgaaatcatgttctggttcggctcagagcgcaacgtgcggtggagtgataactcccggcgagagtatgaatggtcacaacgaacagggagggcggcatga

SEQ ID NO: 477746 - DNA, 297 bp, Shigella flexneri
atgagcaaagtatcacgaggaatgaaaatatcgcttattttcatccttaatccgcatcgtatctttttggcttcagcagtatggctgtcatattttgtttattggttagcagataaattggatgattttgcgaaatggcttgagaattttgcgaatgcgaggtttgagtcatggccgcttatcggagagaagatgtctgacgaattaaaccggtattacgcggataagcgcaaggagaagagcaggagggcaagtgaagcaattattcctgcttcgcaacgaagcaatcagaaataa

SEQ ID NO: 477747 - DNA, 216 bp, Shigella flexneri
atgagttcgttgactgagcttgtccgcgccgactttcaggagaacattggtcgtgcaaagcggtactggtctgcttccagacttccgactggcgagagacagaaaaacgcccctaagccacggagctatccgcgtgaccgcgttcttcgccggttggttaaaatcgataatgattttcagtgtgacagaattatccggagtctggatttaaagtga

SEQ ID NO: 477748 - DNA, 516 bp, Shigella flexneri
atgagaagagtattctttagctgtttctgcgggttactgtggagttccagtggatgggcagctgaccctttaggaacgattaatatcaatttgcacggtaacgttgttgatttctcctgtaccgtaaacacagcggatattgataagacggtagatttaggcagatggcctacgacacaattactgaacgctggcgataccacggcactcgtcccttttagcctgcggctggagggatgtcctccgggttcagttgcgattttatttacgggaacgccggcatccgataccaacctgctggctctggatgatcccgcaatggcgcaaaccgtcgccatcgaattacgtaatagcgatcgctcccggctcgcactgggggaggcgagcccgactgaggaagtagatgcaaacggcaatgtcacactaaacttttttgccaattatcgagcgttagccagcggtgttcggccaggggtggcgaaagcggatgcgatatttatgatcaattataattaa

SEQ ID NO: 477749 - DNA, 1008 bp, Shigella flexneri
atgaagataatctgcagattattattggcgatggcatgtttgtgtctggcaaacatatcctgggctactgtttgtgcaaatagtactggcgtagcagaagatgaacactatgatctctcaaatatctttaatagcaccaataaccagccaaggcagattgttgttttaccggaaaaatccggctgggtaggtgtctcagcaatttgtccacccggtacgctggtgaatcatacataccgtagttatgtcaccaactttattgttcaggaaactatcgataattataaatatatgcaattaaatgattatctattaggtgcgatgagtctggttgatagtgtgatggatattcagttccccccgcaaaattatattcggatgggaacagatcctaacgtttcgcaaaaccttccattcgggctgatggattctcgtttaatatttcgtttaaaggttattcgtccctttattaacatggtggagatccccagacaggtgatgtttaccgtgtatgtgacatcaacgccttacgatccgttggttacacctgtttataccattagttttggtggccgggttgaagtaccgcaaaactgcgaattaaatgccgggcagattgttgaatttgattttggtgatatcggcgcatcgttatttagtgcggcagggccggggaatcgaccagctggcgtcatgccgcaaaccaagagcattgcggtcaaatgtacgaatgttgctgcgcaggcttatttaacaatgcgtctggaagccagtgccgtttctggtcaggcgatggtgtcggacaatcaggatttaggttttattgtcgccgatcagaacgatacgccgatcacgcctaacgatctcaatagcgttattcctttccgtctggatgcagctgcggcagccaatgtcacacttcgcgcctggcctatcagtattaccggtcaaaaaccgaccgaagggccgtttagcgcgctggggtatttacgcgtcgattatcaatga

SEQ ID NO: 477750 - DNA, 2136 bp, Shigella flexneri
ttggcagcattacccgctcacggttacattccgcctgaagagtgggatgaaggtattcctgctttactcctgaattataatttcaccggtaacagaggtaatggtaacgatagctatttttttagtgagctcagcgggattaatattggcccgtggcgtttacgcaacaatggttcctggaactattttcgcggaaatggatatcattcagaacagtggaataatattggcacctgggtacagcgcgccattattccgctgaaaagtgaactggtaatgggagacggcaatacaggaagtgatattttcgatggtgttggatttcgtggtgtacggctttattcttccgataatatgtatcctgatagccagcaagggtttgccccaacggtacgtgggattgcccgtacggcggcccagctaacgattcggcaaaatggttttattatctatcaaagctatgtttcccccggcgcttttgaaattacagatttgcacccgacatcttcaaatggcgatctggacgtcaccatcgacgaacgcgatggcaatcagcagaattacactattccgtattcaacagtgccaattttacaacgcgaagggcgtttcaaatttgacctgacggcgggcgattttcgtagcggtaatagtcagcaatcatcacctttcttttttcagggcacggcactcggcggtttaccacaggaatttactgcctacggcgggacgcaattatctgccaattacaccgcctttttattaggactggggcgcaatctcggaaactggggggcagtgtcgctggatgtgacccatgcgcgcagtcagttagccgacgacagtcgtcatgagggggattccattcgcttcctctatgcgaaatcgatgaacaccttcggcaccaattttcagttaatgggttaccgctattcgacacaaggtttttatacccttgatgatgttgcgtatcgtcgaatggaggggtacgaatatgattacgattacgacggtgagcatcgggatgaaccgataatcgtgaattaccacaatttacgctttagccgtaaagaccgtttgcagttaaatatttcacaatcacttaatgactttggctcgctttatatctctggtacccatcaaaaatactggaatacttcggattcagatacctggtatcaggtggggtataccagcagctgggttggcatcagttattcactctcattttcgtggaatgaatctgtagggatccccgataacgaacgtattgtcggacttaatgtttcagtgcctttcaatgttctgaccaaacgtcgctacacccgggaaaatgcgctcgaccgcgcttatgcctcctttaacgccaaccgtaacagcaacgggcaaaatagctggctggcaggtgtaggtgggaccttactggaaggccacaacctgagttatcacgtaagccagggtgatacctcgaataatgggtatacgggcagcgccacggcaaactggcaggccgcttacggtacgctgggggtcgggtataactacgaccgcgatcaacatgacgttaactggcagctgtctggcggtgtggtcgggcacgaaaatggcataacgctgagccagcctttaggggataccaatgttttgattaaagcgcctggcgcaggcggtgtacgcattgaaaatcaaactggcattttaaccgactggcgcggctatgcggtgatgccgtatgccacggtttatcggtataaccgtatcgcgcttgataccaatacgatggggaattccatcgatgttgaaaaaaatattagcagcgttgtgccgacgcaaggcgcgttggttcgtgccaattttgatacccgcataggcgtgcgggcgctcattaccgttacccaaggcggaaaaccggtgccgtttggatcactggtacgggaaaacagtaccggaataaccagtatggtgggtgatgacgggcaagtttatttaagtggtgcgccattgtctggtgaattactggttcagtggggagacggcgcgaactcacgctgcattgcgcactatgtattgccgaagcaaagcttacagcaagccgtcactgttatttcggcagtttgcacacatcctggctcataa

SEQ ID NO: 477751 - DNA, 1398 bp, Shigella flexneri
atgaaaatggtctcacgtattaccgcgatcggcctggctggcgtcgcgatttgctatttagggttatctggttatgtgtggtaccacgataataaacgcagtaaacaggccgatgttcaggcatctgctgtcagtgaaaataataaggttttaggctttctccgcgaaaaaggatgcgactattgccacacgccttcggcagaattacccgcctattattatattcctggcgcgaaacagttgatggattacgacattaagcttggatataaatcttttaacctcgaggccgtgcgtgcggcactgctggctgataaacccgtttcgcaaagcgatctgaataagattgaatgggtgatgcagtatgaaactatgccaccaacgcgttataccgcgctacactgggcgggtaaggtgagtgatgaagagcgggcggaaatactggcctggattgcaaaacagcgcgcggaatattacgccagcaatgatactgctccggagcatcgcaatgaaccggtgcagcccatcccgcaaaaactgcccaccgatgcgcaaaaagtggcgttgggctttgcgctgtatcacgatccccgtttatcggctgatagcaccatttcatgcgctcattgccatacgttgaatgcggggggcgtcgatggcagaaaaacatcgattggtgttggtggcgcagttgggccgattaatgcgccgacggtatttaactcagtatttaacgttgagcagttctgggatggtcgtgcggcaacattgcaggatcaggcaggtggaccgccgttgaacccgattgaaatggcgtcgaaatcctgggacgaaattattgctaagctggaaaaagatccgcagcttaaagcgcagttcctcgaagtttatccgcaaggtttcagtggcgaaaatattactgatgccattgctgaatttgagaaaacattaattacgccggattccccatttgataaatggttgcgtggagatgaaaatgcgctgacggcgcaacagaaaaaaggctatcaattatttaaagataataaatgtgcaacttgtcatggtggtattattctcggcggacgttcctttgaaccgttggggctgaaaaaagactttaactttggggaaattacggcggcggatattggtcgtatgaatgtgactaaagaagagcgtgataaattgcgtcagaaagtacccggtttacgtaacgttgctttaacggcaccgtacttccatcgcggtgacgtgccgacgctggacggggcggtgaaactgatgctgcgctatcaggtaggcaaagagctgccgcaggaggatgtggatgatatcgtagctttcctgcacagtctgaacggggtgtacacgccgtatatgcaggataaacaataa

SEQ ID NO: 477752 - DNA, 1878 bp, Shigella flexneri
atgccattctatttcaggaaggagtgtccgttaaactcaggctacctcactgacgctgtccaggcaatcgaagcatatcgcggttctccacaactgatggaagaacgcctgaatgcgctgaccgaaaaccagcgctgggtatctgaagcaagagctgcgctggtggtggaagtgctgaagctggaaagcgccggtaacctcgggcgactgaaagccattaactttcttgttgaaaaagcccgtaaaggtgagctgccggagcgcctgcaacaggccgcagttaacgccaatgcaaaacgtggcgctaatcgtactatcagccgcgatccactttaccagtgggttctgaaatacaaccagtcgcagaacgccgccgaacggctgctgttactggcaccgggaaaacgcgacgaaataaaaccggaagaaatcagctggctgcctgaatttctggcgcagtatcgccaggtgaacggcagacccatgtcagaagcctacgaggattttgtcgcagaatggcagcgtcgccatgcggacgaaccgtacatgctggaggtgatgccttcctatgatgttgtccggtatgccatgaaaaaactgccggaagtggtgaaacaaaaagggcgcgttaccggcagtgaataccgtcagcttgaaggattcacccgccgcgactggacagctatgccggtgaattatgtctggattggtgacggtcacggtatgaagctgaaatgtgcgcatccgatccacgggcgtccattctcaccggaagtcacgtttgtgatcgatggtggaacacggtttgttgttggctggagtcttgaccttgccgaaaacgtgttcgccgttgccggtgcgatacagcacggcattcgcaaccacggaaaaccgttcctgtattactcggataacggttccggtgaaacggctgacatgctggacaaagaggtcgtgggtattctgccacgcctggggattaaacaccctaccggtattgccggtaatccacagggacgcggcattattgaacgcctgaaccggacactgccgatgcgtatagccaggaggtatcgcacctattttggcaagggtgctgaccgggaatcgttgcgtgtacttaaccgtgatctgcgttcagcgtttaacgccctgcaacaggacaagcctctgaacgaccgccagaaagcggcaatgcgcgagctgccatcgtgggcggagcttattgaggctattcgtgaaggcgtggaatggtacaacaaccgcccgcattctgagctgccgatgaaaccgaacggacggcattacagcccgacagagttcagaaaaaaacgcctggcagaagaagacaccgaaattgagtggctgagtgatcttgagctgcgcgacatgttccgcccaatggtggaacgaccggtaagacgctgcgaaattcagtggctgaacaatatttactacgcgccggagttgcgtgacgaacacggtcgcaaagtgcttatcagttatgacattcatgacgccgagcgaattacggtacgtcgcaaggacggcagctttatctgtgaggcgatatggaacggcaataaacgcgcagcctttgctgtcagtgctgaatatcacaaacaacagcagcgtattaaaggaatgcgcaaacgcgctgaggaaaaaattcgtgatgctgaagatgaaggtattcagattctggaacacaaacaggctgaaccctggctgagtaatgtttatcgcccggttggtaatgtggtggcagttcagcaaccggaatatgaagaagagcatgacgaagaatttgaacgcgatttccggctggggatgcaaaaactttttgccatgcaggaagaagatgatccgctggcctga

SEQ ID NO: 477753 - DNA, 264 bp, Shigella flexneri
atggcaaaagtaattattgaaattaaaaatacagtatctggaattaaaggactgaatttgcgcaccagcattgcggtggacggtagtgcggaactggacggtgatgagggtacacttgctggcatggtggcgttactggtgcttaataaaagccagaaaataattaatgagtcagcccatgaagctatcgagattttgaaaaacgatagtgtcatcaccggtggccgtgtcactgaaatggctgttgaaaaaacatgccactga

SEQ ID NO: 477754 - DNA, 204 bp, Shigella flexneri
atggcaaaagaattaagtggcgcactgtgggtcagtcgctttcctggaagttcttccactaatgatttgcaggggacttttcgtgcatcagtagataattttttgcgcgcgcttggtaatgcgcgtgcaagggtcagtatctctgtaacatatcgccctcccgccagagcatatctcatgcactggtcaattgatggacattaa

SEQ ID NO: 477755 - DNA, 1491 bp, Shigella flexneri
atggtacgcgggttagtcaccacgcttgaaaaacaccatgacgtgctgatccttgatgaggccgtgcgcgccgccgtacagctttctcaccgttacattccggcccggcaactacccgataaggccatcagcctgctggatacggcggcggcccgtgtagcgctgtcgctgcataccccgcctgcgagagtccagtatctgcgccagcagctcaacgctgccgaactggagctggagttgttattaaagcaggaaaaaatgggtatccgctcggagcggggcgatgtactggcggcgcggattatatcgctgaatgccgatctttctgacaccgaagcgcggtggcagcaggaactggaactggttcaccgattacaggaacagcgtgccgcagaacccggcgagcgtgacgaaatcacgctgcaacaggcagaaacggcattaagagactggcagggcgaaaaccccgtcgtgttcccggaagtcagcgcggcagtggtggccgcaattgtttccgactggaccggtattcccgccggacgcatggtgaaagatgaagccagtcagatcctggaactgcccgcccgtctggcgcagcgtgttaccgggcagagggacgcgctggcgcagattggcgagcgtatccagaccgcgcgggcgggtttaggtgaccagcgtaagcctgtgggcgtctttttgctggccgggccgtccggtgttggcaagactgagaccgctctggcgctggcagaggctatctatggcggtgagcagaacctgatcaccatcaacatgagcgagtttcaggagtcccacaccgtttccacgctgaaaggcgcaccgcccggctacgtgggttatggcgaaggcggcgtgttgacagaagcggtacgccgccatccctggagcgtggtattgctggatgaaattgaaaaagcccatcacgacgtccacgagctgttcttccaggtgtttgataagggggcgatggaagatggcgaaggtgtccacatcgatttcaaaaataccacgctgttgttgactactaacgcgggagcggaacttatcagccagctctgtgaggatccgacgctgatgcctgattcggcaggactaaaagaggcgttaatgccggagttacgtaaacacttcccggcggctttcctggggcgtgtgacggttattccttatttaccgctggatgagaccgcgcgtggtgttattgcccgcctgcatcttggcagattgatggatcggatggcggagcagcatggcgtttcactggtgtatggcgatgaattgattacgcatattgtgtcgcgctgcccgatgcacgaaaccggcgctcgtttgctcatcggctatatcgaacaacatatcctcccacaactgtcccgttactggttgcaggcgatgacagagaaaacggccatcacgcaaatccgcattcgtgttgatgacgatgaacaggttatttttgaaacggattaa

SEQ ID NO: 477756 - DNA, 387 bp, Shigella flexneri
atgactgcgctggcccgtgaaggcaatatcgatccggtcaccggtcgcgaacacgagatccgtactatgacggatattctgctgcgccgtcgccagaacaacccgctactgaccggcgaagcgggagtcgggaaaacggcagtggtggaaggattcgcgctggcgattgccgggggggaagtaccgccttcactgcgtaacgtgcggttgctgtcactggatgttggcgcgctgctggctggggcgtccatgaagggtgaatttgaatcccgcctgaaagcgttgctggaagaggccgcgcactcgccgcagccggtaatcctttttgttgatgaagttcacacgctggtggtacatccggtacgggggatgctgccaacctgctga

SEQ ID NO: 477757 - DNA, 543 bp, Shigella flexneri
atggacactcctgtttcgcgcagtgcactatatggaaagctaaccaaatctttgtttagatctttggaatctgcgacaacgttctgtaaattacgcgctaatccttatgtcgaactgacgcattggttgcatcagttaatacaacaaccagagaatgacattcacaatgtgcttcgacattatcaaataacatctgctgatgttgagaaggcgttaattcagcaattgaatatattgcctgccggagcgagtgtaattaacgatttttcccatcatatcgatctttctgttgaaaaagcctggatgttggcaagtatccgctttggcgatcaaaaaattcgtagtggatggttattacttgcctggttaaccacgccagaattgtgtcgggtgttaaaaaatatttgtgcgccattggcagagctaccggtagatgaactattagatattcttccgtctttaatcacgtcatctcctgaattaacagaaatgccttatgacggctcggatttaaattctgcagtaccgggggaagctagctag

SEQ ID NO: 477758 - DNA, 273 bp, Shigella flexneri
atggtcacagttaactttcattgcccccgttgccagtccgttcaggtttaccgtcacgggcagaacccaaaaggacatgatcgattccgttgccgtgactgtcaccgggtgtttcagctcacttactgttacgaggcccgtaaaccgggagttaaaaaccaaatcactgaaatggctttcaacggtgccggagttcgcgatactgcccgtacgctgaaaatcggcatcaataccgtcatacggacattaaaaagctcccgccccggcggataa

SEQ ID NO: 477759 - DNA, 312 bp, Shigella flexneri; identical to SEQ ID NO: 475543

SEQ ID NO: 477760 - DNA, 831 bp, Shigella flexneri
atgaaaaaaacaattgcgcttgttttcgcggtcagtctggctgtcttcggacttgtaggttgcgatcgcgttgaaccaggtaatgtgggtatcaaagtcaacaaactgggcgacgacaaaggtgtcggtgaggtggtcggtgttggtcgctactggactggctggaatactgaagtttacattttcccgaccttcaaacaaatgaagacctacgatgatccattcagcttccagatgagcgacggcacaaccatcggttatcacatcggcgtggcctataaggttgatccatcgaaagttaccacggtatttcagacctaccgcaaaggcgtggatgacattaccgatacagacctgcgccagaagatcgccgacgcactcaatcggctggccagcaaaatgaccaccgacaaatttattgacggcggtaaatctgaattactggatgccgctctaaaagacatccaggaagaaatgacacccatcggtattcaggtaatgagcctctcatatgtgggtaagccagagtacccaccaaccgttatcgacagcattaacgccaaagtcacggcaaaccagaaaacactgcaacgcgagcaggaagttaaacaacgcgaagcagaagccaacatgctgcgtgcagaagctgccggacaggctgatgcgattcgcacaaaagcccaggccgaagccgatgcaattcgtttacgcggtgaagctctgcgccagaaccccggtgttatggagctggaagccatcaataaatggaacggcacactgctgcagtacatgaccagcggtgccaacacaccatttattcaggttaagtaa

SEQ ID NO: 477761 - DNA, 393 bp, Shigella flexneri
atgatcgacaaccgcaccgccagcgccattgaccaggcattacagaaacatgatacacccgtcggcccgttattttttgtaacacgccacggaagaacaaaaaaatgcctcacccgaaaaacggcaattcgttacctggcattctttatgaccacccgcgcttttgaacgttcaggattccgacaacgccatcctgacaagcgttttatcttcaacgggaatgagatatggaaacgtggagaatcaaccacagagtatacccgcgcacaccagcgaacaatcagacgactgcgcagactcatcgccaggaaacagtatacagaaaaatggttcagaaaatatgacacatggagcgccggatattacgaactgatggcaacaaaaccattctga

SEQ ID NO: 477762 - DNA, 216 bp, Shigella flexneri
atggctaatttatcccctgtatctgttgtgcacgaaaaagtgcagatcgttatgactattgaaaatggccaggtaacaggtgtctgcaaagtccgcgatggagagctgattgccagcatggatacattcatatggctggcagaaagagcggggtatcagataacagcacctgctcaggaggaaaccagtgacattaacagcaacacgaattcctga

SEQ ID NO: 477763 - DNA, 360 bp, Shigella flexneri
atgacacatgaacccattaatacatatcgtcgccgtatagctgttgcggcactccatcgaataaaacgtaaaacaggtggtgatctgcttattgttgaccttctggatgagaacattacgaccatagaaataacagaacagtttataaaccagttgctgttgcgctttgaaggtattacccgtggtgaattgggtcgagtggagggtgaaacagaaatccgaactgcataccagaatgctatcgggattaatcaacatactgaataccaggctgaaaccggaaagttaattatagacaaccttttacaagaggttattgattacgcgaaagaaaaatatatcagcggaggaattaactga

SEQ ID NO: 477764 - DNA, 207 bp, Shigella flexneri
atgacagaaacaacctcacagcaagataattacgaaggcatttgtctggagcctgattcatttgcggtaaatgtttatcatttattgcatgcaacacaggtattacatatgtccagtaacctcgtaacgaaagcacttggcagcgatattctggactttgcatgtgagtattcaaaagctgctgccgaaaaagaattagcgcaataa

SEQ ID NO: 477765 - DNA, 381 bp, Shigella flexneri
atgctgggagcggtggaacgccgcttcggcaacgatcttccgtcgtctccagtggagtggctgacggataatggttcatgctaccgggctaatgaaacacgccagttcgcccggatgttgggacttgaaccgaagaacacggcggtgcggagtccggagagtaacggaatagcagagagcttcgtgaaaacgataaagcgtgactacatcagtatcatgcccaaaccagacgggttaacggcagcaaagaaccttgcagaggcgttcgagtattataacgaatggcatccgcatagtgcgctgggttatcgctcgccacgggaatatctgcggcagcgggcttgtaatgggttaagtgataacagatgtctggaaatatag

SEQ ID NO: 477766 - DNA, 156 bp, Shigella flexneri
atgaatactatcgatcttggcaacaacgaatctctggtgtacggcgtgttccccaaccaggacggcacattcaccgccatgacgtataccaaaagcaaaacgtttaaaaccgaagctggcgcacgtcgttggttgggaagacattcaggtgagtaa

SEQ ID NO: 477767 - DNA, 1035 bp, Shigella flexneri
atgggtaaaattggcacatcacctactgatattcagaatctttgtaaacgtctcaggtcaaagtcatcgcaggtcagtatcgtttatgaagcggggccctgtggttatggactttatcgtcggctggtgaaatccggttttgactgcatggtctgcgccccctcacttatcccgaaaaaaccgggggagcgggttaaaaccgatcgccgtgatgccatcagacttgtgcgttcactgcgtgcaggagatctttctgctgtctacgtacccggcattgaagatgaggcattccgggatttggcccgggcatgggcatctgcccgcgatgatttacggcatgcaaggcaacgtctgaaatcgtttcttctggttcatggggtccattatgtcgggcgagcagattggggccctgcacaccgacgcaggctcagcaaatactcattcgaaagtccctggcgacaattagcttttgacgaacaccgtcgtacaatagaagaccggcaggcacaatgtgaacggctggaatccgccctgaaggaggccgttaccgaatggaggctgtatccggtagtagaggcgctgcaagccatgcgagggattcagtttattactgcggttggattaatttctgaactgggtgatctgacccgttttgaacatccacgacaactgatgtcatggtttggtatcacgccatcagaatattcatcgggtggaagcagacatcagggcagcattaccaaagccggaaacagctatgccagaaagctattggtcgaggcagcgtggagttaccgtcatccggcacgcatcagtccggcaatacaaaaaaggcaggaaaatttaccccgccccgtcattgacagagcatgggatgctcaactcaggctttgtaagaggtatcgaaaacttcaggccaaaggaaagaatgtcaatattacaattgttgctgttgcacgtgagctggcgggttttatctgggatatgggccgaatagcaatgtctgtcgcacaacaaccacaatgtcacaaataa

SEQ ID NO: 477768 - DNA, 267 bp, Shigella flexneri; identical to SEQ ID NO: 474455

SEQ ID NO: 477769 - DNA, 273 bp, Shigella flexneri; identical to SEQ ID NO: 474355

SEQ ID NO: 477770 - DNA, 765 bp, Shigella flexneri
atggatgatatcgttaattctgtgccttcctggacgtttaccgcaattattgccgtatgcgttctgtttattattggaattattttcgccaggctctatcgtcgcgcttcggcagagcaagcatttgttcgtactggtttaggtgggcaaaaagtggtgatgagcggtggcgcaatcgtgatgccgatctttcatgaaataatccccatcaatatgaatactctgaagctggaagtcagccgctcaaccattgatagcctgattacgaaagatcgtatgcgtgtcgatgtagtagtcgctttctttgtacgggtaaaaccgtctgtagaaggcatcgccactgcagcgcagacgttggggcaacgcacgctatcaccagaagacttacgtatgttggttgaagataaatttgtcgatgccctccgtgcaacagctgcacaaatgaccatgcatgagttacaggatacccgcgagaacttcgtgcagggagtacaaaatactgtcgcagaagacctgtcgaaaaacggtcttgagctggaaagcgtttcacttaccaactttaaccagacctcgaaagaacatttcaatccgaacaatgcctttgacgccgaaggtttaaccaaactgactcaggagacggagcgccgtcgtcgcgaacgtaacgaagttgaacaggatgtagaagttgcggtgcgtgagaaaaaccgtgatgcactttcgcgcaagttggagattgaacaacaggtaatgctgccaacttactga

SEQ ID NO: 477771 - DNA, 630 bp, Shigella flexneri
atgaatttattcgccgaccataacaccccttatcttttcgctatttcctttgtactgttgatcggtcttttagaaatttttgcgcttatctgtagccacatgctctccggtactcttgatgcacatcttgaccattatgattccataaccacaggtcatattagccaggcacttcattatctcaatatcggaagattgccagctctcgtcgttctctgcttactcgctggtttttttggtcttattggcatcctgttgcaacatgcctgcatcatggtctggcaatcaccactgtcgaacctgttcgtggttcctgtcagtttactgtttacgattattgcggtgcattataccggtaaaatagttgcgccctggattccacgcgaccatagttcagctattacagaagaagaatatattggtagcatggcgttaattaccggtcatcaagccacttcaggtaatccctgcgaaggaaaactcaccgatcaatttggccaaatacattatttactactggagcctgaagaaggaaaaattttcactaaaggagacaaagtgttaattatttgtcgactttctgcaactcgatatttggtggaaaacaatccctggccccaaatattgtaa

SEQ ID NO: 477772 - DNA, 474 bp, Shigella flexneri
ttgtctggagattcagggggccagtctaccgagtgcctgacgtttattgatgcttttacaccgggcagtatcactctcactatagagctcacagagcgagaaccctttgataacagcgatgagatgcgatgccagcttaagcgtattcatgatgcaggcattgcccttgcgctggacgactttggcaccggttacgcaaatatggaatatcttagtgagatcccagtcgatatcatcaaaattgatcgcgtctttgtgaacagaataggtcagggcgaatctgcagaacacctgctgaccagccttatcgagatggccaatacgctgaagaaagagattatcgccgaaggtgtggaaaccgaggcgcaggccgcgtggctatatgagcgtggtgttggcaagttacaaggattcctatattcaccggcattaccgcccgataagttggcactgtttaaaccgaaaatgtcgtga

SEQ ID NO: 477773 - DNA, 687 bp, Shigella flexneri
atggtggggcgtacagggccgacttcggtcgggccgggttcggtagtctccggtaacgccaaccctgtacgtctcaccacctctgtgattggcgtcccatgtggtgagttttctaaaaaactgactaccggggctgtcactatgactactctcccaaccctcactcaacctgaaattgccatcgttgatggtcaggctgttacttcatccctagctgttgccaacttcttctccaaacgtcatgacgatgtactgaaaaagatccgcacgcttgaatgctccgcatcattcactgcccgcaatttttcggtgagtgattacaccgattgcacaggccgcaaactaccttgctatcaaatcacccgcgatggcttcgcgttccttgctatgggcttcactggtaaacgtgctgcccggttcaaagaggcatacataaatgcctttaaccagatggaaaaactgctttcaaagccatccacgctgagcgatgccgcagataacgccagcgtgctttactcccacctgtcggtaatccacaaggtctggctgcagcagctttatcccatgttggcaaaagccgaatctccgctggctgttagcttgtatgactatattaatgatgcttcggcgctggcctgcctcataaatttgtcgctgaatccttcagaggtaagggggcgtaaatga

SEQ ID NO: 477774 - DNA, 873 bp, Shigella flexneri
atgatccggaatattttcaaactgtttaccaatcgccaccagcacattgattctgccattccgggacgttacactgttcaggcaccttataaagcgggtgccgggcgtggaaacccgaaattcaatatagagcacaaccgcgctcatgcggttttttcgtgtcatgagcatcgttacgcccaaattatggtggggcgtgcagggccaacttcggttgggccgggttctatgttgaccggtatttccacccctgtacgtctcaccacctatatggtcgtggaaagccttggtggtgagttcattgaattcaacataggggctgtcaccatgactactctcccaacccaatctcaccctgaaatcacgattatcaatggtcgcgttgtcaccacatctcttgcagtagctaattactttactaaacggcatgagcgggttttagatagaattagaaacctcgaatgttccgctgaatttactgaacacaattttgtgttaagtgaatacaccgacgcatcaggccgcaaactcccttgttaccaaatcacccgcgacggttttgcgtttcttgccatgggcttcacgggtaaacgtgctgcccagttcaaagaggcatacatcaatgcctttaaccagatggagaaacagctttcaaatccctctgtactgagcgatgttgcacataacgccagcgttctctattcctacatttcatcaattcatcaggtctggctgcagcagctttatcctatgttggcaaaagccgaatctccgctggctgttagcttgtatgactatattaatgatgcttcggcactggcctgcctcataaatttgtcgctgaacccttcagaggtaagggggcgtaaatga

SEQ ID NO: 477775 - DNA, 207 bp, Shigella flexneri
atgatccggaatattttcaaacggtttaccaatcagactttccgttgtcctcgtccgggtcagtggtacaccacacctgcagggcatgttctacgtgttagcctggttgaccgtgaatgtcagaaggtgatttgtgaaccgctgggccgtaattaccgcgtcagtatgccgcttatagccttttgctccggaaaaatgtttaagtga

SEQ ID NO: 477776 - DNA, 372 bp, Shigella flexneri
atggtgggctggacgggggcactgaaaggtgcgccggtttccgataacgccggttacgccaaccccgttcagttcaccaccagcgaaattggcgtttccggtggtgaaggtaattcactgttatcggaggctgccatcatggctactgtcccagccctcactcgtctgaatgatgaagacttacataaactcagttatgtaacaactgcactacgtgctctgcgcaaggtaactctttcggatccgcaggcgcatcaggttctggtagaaacccttcttaacttgcaggctgaacgtatccgtttggcggataaggctaattttcatattcaccgtctcctgaatatcagcggagggcatcgtcatgcttaa

SEQ ID NO: 477777 - DNA, 237 bp, Shigella flexneri
atgcttaatccgttgatcctcaatatttgccgtttgcttcagcgtaaaaaaatatcaattcctacagttgggcagtggtacaccacgcctgcagggcatgttctatgtgttagcctggttgaccgtgaatgtcagaaggtggtttgtgaaccgctgggccgtaattaccgcgtcagtatgccgcttatagcctttcgctccggaaaaaacatgaagcatctcggaggtgcagcatga

SEQ ID NO: 477778 - DNA, 831 bp, Shigella flexneri
atgagtatggagctgatggttaaagcgatgaaaattcgagtgggtaatccattgcgaaaactggttctgatcaagctggctgataatgccagcgatcagggtgagtgctggcccagctaccagcatattgctgaccagtgcgagattagcaaacgttctgtgatgaatcatattgcggccctttgtgagtccgggctggtaaaaaaagtcacccggaaaggtgaaaaaggtaactcaagtaatatctatctccttcatcttgatggtgcaggagattcactagggggtagtgcaaataattcactatctggtgcagcaaattcaccaggtagtgcaggagttgcaccagggggtagtgcaggagattcacccagaaccagtcactcttttgaaccagtcaaagaaccagtcaaagaaccagtcaatgacccaatagctgttggtgcatctgctgatgagtctgtgcgagttcgttcaaaccgaccggaatactctccggagtttgagcaggcatggctggcctatcccaaacgtgctggtggcaattcaaaatctgcagccttcaaagcctggaaagcccgtttgaatgagggggtaaaccccgaaaccatgctggaaggtgtgaaacgctacgcgggctgggtatctgcgatgggtaacagcggcacacaatttgtgaaacaggctgtcacgttctttggtccggatcgtcatttcgaagaatcctgggaagttcctgcagtatctgcagccagacgcgaggacccgtacttcaaagccagttacgacaacgtggactacagccagatcccggcaggattcagggggtga

SEQ ID NO: 477779 - DNA, 486 bp, Shigella flexneri
atgatacccgcatttaaacaacaaaaattagctaagggattagagttagctataatcgctttgaataaccaactcacttcacaacaccaatatccggctaatccttcagaaagtgaatcaacgtcttccactgatcattattactttgctattttttgggtatttgcagtgatgttcttccctttctggttttttcatcaaggcagtaatttttgtcgcgcatgtaaaagtggagtctgtatttcagcaatccatcttttagatttattcctgttctccgataaaactttttccattgctgtattttccttcttttttactttcaccatatttatggtctttacctgtttatgtgtacttcagaaaagagcatctggtagaagttatcattcagacaacagcggttccgctggaggctcaagtggcggcggatttagcggcgggggaggttcttctggcggtggcggcgcatccggccgctggtaa

SEQ ID NO: 477780 - DNA, 936 bp, Shigella flexneri
gtgccgtttggtgatattacgacttcgctgaattacagctattccaataatatatggcaaaacgatcgggatcatttactcgcttttacgcttaatgttcccttcagtcattggatgcgtacagacagtcagtcggcatttcgtaattcaaatgccagttacagtatgtcaaacgatttgaaaggcggcatgaccaacctatcaggggtttatggcactctgctgccggataataacctgaattatagcgttcaggtcggtaacacccaagggggtaatacatcgtctggcaccagtggttacagttctcttaattatcgtggagcttacggtaatacgaatgtcggttacagtcggagtggtgacagcagccagatttattacggaatgagtggtgggattattgctcatgctgatggcatcacctttggacagccgctgggcgacacaatggttctggttaaggctcctggtgctgataatgtcaaaatagagaaccagaccggaattcataccgactggcgtggctatgccatattaccatttgcgacagaatatagagaaaaccgtgttgctcttaacgcgaattcccttgcagataatgttgaactggatgaaaccgtggtcactgtcatcccaactcacggtgctattgccagagcaacatttaatgcacaaatcggcgggaaagtattaatgacgttgaagtacggtaataagagcgttccattcggtgcaattgtcacacacggagagaataaaaatggcagcattgtcgcggaaaatggtcaggtttatctgactggacttccacagtcagggcaattacaggtttcatggggcaaagataaaaactcaaactgtattgtcgagtacaagcttcctgaagtttctcctggtaccttactgaaccagcagacagcaatctgtcgctaa

SEQ ID NO: 477781 - DNA, 375 bp, Shigella flexneri
atgaaatacaataacattattttcctcggtttatgtctggggttaaccacctattctgctttatccgcagatagcgttattaaaattagcgggcgcgtcctcgattatggctgcacagtctcatcggattcgcttaattttaccgtagatctccaaaaaaacagtgccagacaatttccaacgaccggtagcacaagtccagccgtcccttttcagattacgttaagtgaatgcagcaaagggacaacgggggttcgggttgcatttaacggtattgaggatgcagaaaataatactctgttgaaactggatgagggaagcaatacggcctccggtttgggtaagaaatactggacggaaatatgcgtccggtga

SEQ ID NO: 477782 - DNA, 762 bp, Shigella flexneri
ttgaaagataaattagcagacattgaaaaagttcatttaatttgtcttggtaggaatgaaggtatagcaaaagcacaaaatattgggattcgatattctcttgaaaaaggggcagagaagataattttttttgatcaagatagccgtattcgcaatgagtttatcaaaaaactttcctgctatatggataatgaaaatgcaaaaatagctggcccagtttttattgatagagataagtcacattattatcctatttgtaatatcaaaaaaaatggtcttcgagagaaaattcatgtcactgaaggacagacaccgtttaaaagttcagtaacaatctcatccggaaccatggtttcaaaagaagtttttgagattgttggaatgatggatgaggaactttttattgattatgtcgatacagaatggtgtcttagatgcttaaactatggcatattagttcatatcattcctgatatagaaatggttcatgctattggggataagtcagtaaaaatctgtgggattaacataccaattcactcgccagtacgtcgttattatcgagtaagaaatgcatttcttttgcttagaaaaaatcatgtgcctcttttactctctattagggaagttgttttttctttaattcatacgactttaattatcgcaactcaaaaaaataaaattgaatatatgaaaaaacatattttggctacgctggatggaataagaggaattactgggggcggtcgttataatgcatag

SEQ ID NO: 477783 - DNA, 435 bp, Shigella flexneri
gtgtttccaaggttaagtaacatcaaagactttaaagaatttaaacgtaatgtaaataaatcattgcttttaatgtttctaatctgtttgccggtgataatcataggcttgttatattcagggcttgtattgaaaatatggtttggtgagaattaccaaattaattcctttaatatattaaatgtgttattgatcggttttttcttcaatgcgctggcaatgataccattctctgcaatccaggcattaggaaaatctaaaattactgctttgattcattgtgctgaattggttccttatttagcccttttgtattttatggtcgaaaaatatgggttactgggtgccgcaatatcctggagcatacgtgtaattttagatgctctgttattacaatggctttatactagaatgtgttctgtatatgaaaactaa

SEQ ID NO: 477784 - DNA, 219 bp, Shigella flexneri
atgtttatggacctggtggaaaataaaaaaattaaaaaaatatacgttaattttcaatatgaaaggaataatgagtatttctgcttttactctaaagttgttccgccgaaatttcatcatttctttgtgttggatttttctgatggcaagataaatattgatagagaccaggatatgatgactcagatggcattgtgcatggggtattataattattaa

SEQ ID NO: 477785 - DNA, 537 bp, Shigella flexneri
atgtcatttattaaaactttttccgggaagcatttttattatgacaggataaataaagacgacatcgatattaacgatatcgcggtttccctttcaaatatctgtcgctttgccggtcatctttcacacttctacagcgtcgcccaacatgcggtgctttgcagccagctggtaccgcaggaatttgcttttgaagcgttaatgcatgatgcaacagaagcgtattgccaggacatccccgcaccactgaaacgctttcttcctgactataaacggatggaagaaaaaatagacacagtaatccgtgagaaatacgggttacccccggttatgagtacacccgtgaaatatgccgatctcatcatgctggcaaccgaacgccgcgatctcgggcttgatgatggctctttctggccagtactggaaggcatctctgccacagagatgttcaaagttattccactgtcgccaggccatgcctacgggatgtttatggaacgctttaacgagttatcggagttacgcacatgcgcatga

SEQ ID NO: 477786 - DNA, 267 bp, Shigella flexneri
atgactcaaagatattttctgttttcgggaataattttatgtgcttttattgcagcaattctgagccatattgcgtttcatcattccaatgaaccagcagagcaaaacatatcatgtaatgcccatgttattaatttcaccgatcatacaaaaatggatcaatatttttcgttaaatatgatttctgaaaataacacaggaaacatgtatctcacgggcgcatacacggtagatggaaaaaaatgggcttcatccgccgatatgtga

SEQ ID NO: 477787 - DNA, 249 bp, Shigella flexneri
atgggcttcatccgccgatatgtgagttttacatacaagaaattccgtgataccgtttatctcaccacagttaaaatccaaaaaatacaaaaagatgataacatcagcgatgaaatccttgaaaatatcacttctgatttcttcataaaagcagacacttcaattaattattatgttacgcgtcaaaatgattataactacatattctctacaggcaggacaccacgattcatatgtattactcactaa

SEQ ID NO: 477788 - DNA, 567 bp, Shigella flexneri
atgcgctggcaacgcgaagatggtaaaaatatatctccggtagtttttatccgcgctgcagaagaggaaaatttaataataccgttaactaaacatctctttgaactgattattcaggatgtacaaagctggaaagtgaaaaagccgtttcaccttgggataaatattgccgcggaacatcttgcacatcctgactttgttggtgatgttttacatattaaaaatgcaatatctgataaatttaatattgtccttgagattaccgaacgcaatctggttgaagacactaatcttgcattacagaaaataaatgaattaaggatccatggctgtgaatttgcagtcgatgattttggcacgggatattgttcccttggccttctgcaaaagttgtctgttgattatcttaaaatagataaaagctttatagacacacttactacagcggaagacgaaacgccagttttagatattattattaagctgagtaatcggctcaatttgataacgattgcagaaggtgtcagtactcctcaccagcagaatatcttattcataataacgtga

SEQ ID NO: 477789 - DNA, 516 bp, Shigella flexneri
atgggcgactgcttgcgtcagcatccacagcagcatatttcgatcaatcttgaatccaccgtgctcacctcggaaaaaatcccgcaattgctgcgtgaaatgatcaatcactatcaggttaatcccagacagatcgcgcttgaactcactgaacgcgagtttgccgatccgaaaaccagcgccccgataatttctcgctaccgggaggcgggccatgaaatttatcttgatgattttggtacggggtattcaagtttaagttatttacaggatctggatgtcgacattctgaagatcgataaatctttcgttgatgcgctggaatataaaaatgtcacgccgcatatcatcgaaatggcaaaaacactgaaactgaaaatggtagcggagggaatcgaaaccagtaaacaagaagagtggctacgccagcatggcgtgcactacggtcagggctggctctacagcaaggcattaccgaaagaagatttcttacgctgggccgagcaacatttgtga

SEQ ID NO: 477790 - DNA, 765 bp, Shigella flexneri
atgatcaaagagactgttacgatgagtcataaggaactccaccgacttcagattattcaggagtcaattaatcgacatattactcaggaacaagctgcggcacgcattggcatttctattcggcaggttaaacgtctggtgcaacggtatagaaatgaagggccttctggtctggtttcccaccgacgtggaaagcgtcctaataattccttttctactgaattcagagcaacagtaatttcactcctcaaaggccgttacgctgattttggacctacgtttgcgtgcgaaaaattgcgcgagatacacggtttatctttatccgttgaaactctcagaaagtggatgatagaagagggggtatggcgtgaacgccgtcgtaaaattgcacgtatatatcaacgccgcatgcgacgaccatcttacggtgaactgatccagattgatggctcacctcatgactggtttgaaaatcgaggccccagatgtacactgatcgttttcattgatgatgccaccagtgcgttgatggcgttgcgttttgtgcctgctgaaacaacccgggcttacatggaaaccctccggggttaccttaatgatcatggcgtaccactcgctctctactctgatagacacagtatattcagggtaaataacccagagcgggaaggtgagctgacccagttcactcgtgcgataaagacactgggcatcgagccaatccatgccaacagcccgcaggcaaaagggcgggtagtgaggtag

SEQ ID NO: 477791 - DNA, 183 bp, Shigella flexneri
atgttaactggggcttttctctacctgccgttggtgttcgtgcccgaggcagatagcctcaagcacccgcagtcattctacttaactaagatttccccgcaaaccgtttttgtccagcacagtaaatatccaactaaaccaatggagttcgctgtatttaccgccagtattcaatgcacatga

SEQ ID NO: 477792 - DNA, 798 bp, Shigella flexneri
ttgggtttaaccatttctcgttatattggcgcagttgcaattttgtgggtgctggcgattggttttaatcctgcgctaaggatttcgttaaagagctattttaaaccgctgaattttagcattatctgggaagtcatggggattggtattccagcgagtgtcgaatcagtgttatttaccagtggtcggttattaacccaaatgttcgttgccgggatcgggaccagcgttattgccggaaattttatcgcgttctcaattgcggctcttatcaacttacccggaagtgcgctcggttctgcttctacgatcattacaggccgaaggttgggggtagggcagatagcgcaagcagagattcagttgcggcatgtgttctggctgtccactcttggattaacggccatcgcctggctaacggctccctttgccggggttatggcatcgttttacacccaggatccacaggttaaacacgtcgttgtgattctgatttggctaaatgctttatttatgcctatttggtccgcctcatgggtgctacccgctggatttaagggtgctcgtgatgcccgttatgccatgtgggtttctatgttgagcatgtggggttgccgggttgtagtcggttatgtgcagggaatcatgcttggctggggtgtggttggtgtctggatgggaatgtttgccgactgggctgtgctgttttactggcgaatggttactggacgttggctgtggaaataccctcgatccgagccgcaaaagtgtgaaaaaaagccagttgtgtcggaataa

SEQ ID NO: 477793 - DNA, 225 bp, Shigella flexneri; identical to SEQ ID NO: 133446

SEQ ID NO: 477794 - DNA, 297 bp, Shigella flexneri
atgttaaagcaggtgtatgaaatgaaagtccagattttaaacaataactgtgaagtcgtttggtcatacgacatagccgcccatgtagatcagagcggcgatagctgggccaatgggaaacatcagattatggctggagttgtattctctttacgccgtgctttagaacaggctgaagtctttccatcaggccctgaatggaaatggcctttttctatttgtccaaattcggagagtacatttcagaaaattggtcagaaagtcgcactcgaagagcatcagccaactgtttcctga

SEQ ID NO: 477795 - DNA, 378 bp, Shigella flexneri; identical to SEQ ID NO: 474621

SEQ ID NO: 477796 - DNA, 204 bp, Shigella flexneri
atgactaataacacaaatgacacaatcaagattgacccaaggacaccagaaggccgtaaggcgttacgcctgatggtggtacccaccaaggcactgatagctactctgggtctgcctgccaaggaaaaccgcccgtattactctaaagctgccctctgtctcatggcggttgacgcagggctgaccccaagagatttcatgtaa

SEQ ID NO: 477797 - DNA, 411 bp, Shigella flexneri
atgtctatttcttatcgcaaactggatatcgcactgagcgctgacaaagaaactgtactggtattcggtcaggagctatccactaagtatttcaccgaaattgtcgttacaaccatgctgaacagtacaggctctgacatggcgaactcaaatcgtattcttaacgatattcacgccgctggtcttgatgcaggtgattacggcaagtattcccgctggtgggctcaaagcaacgcacaggagcgccaagaggctgaacgccgacgtaaagaagctaaggcacatcaagaacgtatggctgctattcatgctacaccagaagagattgctaaggcggtcgctgaacgtaaagcccgagaggaagcattgattaaacgcttcggcaataaaggggccgctttcgggctgtaa

SEQ ID NO: 477798 - DNA, 984 bp, Shigella flexneri
atgagccgttacgcccccacaccggaagttatggctattggtcaaattaatatttccggcaatgttacacctgcgacctggtggaaatatattcgactacccagtgggcgtccggatgcgacggctatcgctctgctttcagagatcgtttactggtaccgcccgacagaggtcagggatgagcacaccggagcgttgctgggatatcgcaagcgttttcagggcgacaaactgcaaagaagctaccaggcgtttgctgagcagtttggtttcgggaaaagggaaaccgcagatgcgctgaagcgtctgcgcgatgcagggtttattactctggatttacgcacggtggaaatgctcgatggggtgaaatgcagcaatattttgtttgtcgggatcaacccacaggcaattgcggccatcaccacaccttcttctgtttcgccagaaagtaacagcaataatgcaatcagcgatacaactattacgttaaaacggaacaccccccgacgtcataacggaacaggggatacgccgaatgttgatacaaatacagagattactacagagattacaacggagactaaaaacactattggcgcatccgctgacgcgtctgcaccagcgcgttctgccagacaggaatattcaccggaatttgaacaggcctggcaggaatatcccaaacgtgctggtggtaattcaaaatccgccgcttttaaagcctggaaagcccgaatcagggaaggtgtgacacccgaaaccatgctcgacggtgtgaaacgctatgccgcctgggtgcgtgtctctggaaataccggtacccagttcgtgaagcaggcgtcgacgttctttggtccggatcgtcatttcgaagaatcctgggaagttcctgcggtatctgcagccagacgcgaggacccgtacttcaaagccagttacgacaacgtggactacagccagatcccggaaggattcagggggtga

SEQ ID NO: 477799 - DNA, 300 bp, Shigella flexneri
gtgaactgttttcagtttgtgtgcggatgtgctttcgataacccgattcagcgcctgattatgttgcgtgttttgatgtcgggttcttcagacggtgaaggcgagagagttattgatcatcaggtgcttgctgatttctgctgttgttctaagcaagcgatattcagggaaaccctggcactggaaagagctggttatcttcatatccgaaaaattgcaacgcttactattgatgcaaaagccagactacaacctgcgcgtggctacacaattctcatgctgcggaaggaggttgtatga

SEQ ID NO: 477800 - DNA, 381 bp, Shigella flexneri; identical to SEQ ID NO: 458903

SEQ ID NO: 477801 - DNA, 441 bp, Shigella flexneri
atgactcaaaatatcaggccgttaccccaattcaaatatcatcccaagccactggaaacaggcgcatttgaacaggataaaaccgtagagtgcgattgctgtgaacaacagacgtcagtttattactcgggtcccttttattgcgttgatgaagttgaacatctctgtccgttgtgtattgcggacggttctgctgctgaaaagtttgcaggtagttttcaggatgatgccagcatagaaggtgttgaatttgagtatgatgaagaggacgaatttgccggtattaagaacacatatcctgatgaaatgctgaaagagttggttgaacgcacgccaggttatcatggatggcaacaggaattctggcttgcgcattgtggcgatttctgtgcttttatcggctatgtgggctggggtaatgctgccaacttactgatttag

SEQ ID NO: 477802 - DNA, 474 bp, Shigella flexneri; identical to SEQ ID NO: 474215

SEQ ID NO: 477803 - DNA, 378 bp, Shigella flexneri; identical to SEQ ID NO: 477604

SEQ ID NO: 477804 - DNA, 888 bp, Shigella flexneri
atgactctgaggtgtctgttaaacccgtggcgattcagtgagcgcattctgaccgaccgtgaaaatggtgaaaaaggcgataattctcaagatacctcttatgcccgtgtaggcgtgaaaggtgaaactcagatcaaccctgaaatgactggttacggtcagtttgaactagacctggaagcatcaaacagacacaaccctgaccaaactcgtttggcatatgctggtttgagttacaaagattttggttcattcgactacagtcgtaatgtcggtgtcgcgtatgatgcagaagcatttactgatatgtttgttgagtggggcggtgactcatgggctggtactgacctgttcatgaccaaccgtaccaacggtgttgcaacctatcgtaacacagatttctttggcatggttgaaggtctaaattttgctctgcaatatcagggtaaaaatgaaggtacaggcaactacaaagcaaatggcgatggccatggtttatctgcaacttacactattgacggtttctcatttgctggtgcttatgcaaactctgaccgtactgattggcagtctggtgatggtaaaggcgaaagagccgaagtttgggcgttgtcaacaaaatatgacgctaacaatgtttatgctgctgtgatgtacggtgaatctcacaacatgaattccgacgacggtgatgttgtgaacaaaacacaaaacttcgaagctgttctgcaatatcagttcgactttggtctgcgtccatccatcggttactcctattctaaagcactggacgtagcaggttggatttgcccctatatttccagacacctgttatcacttaacccattactggcttgctgccgtagatattcccgtggcgagcgataa

SEQ ID NO: 477805 - DNA, 444 bp, Shigella flexneri
atgcagataaccgtcgccgttgatccactgcatggcgtccaggtgttccacagttcgctgctgtgccggtatcagatgcatcagtgcatgttcaccttcacgacaggcaacaaccattgcctcgtccagttgctgaatccggcgaaaggccgtggcacgggagggaatactccagccatgctcgcgggctgccagttccagacgctcataacatttgcggaaggcgggtttttccggtcgcagataatctgcaatcagaaactgccaggcatcctcgtcaaattcacttttgtgaacattgcgacgggatgctccacgtccatcaacaagtgcagccgcccagtcaggcttcgcaaacttctgtacctggtaatacttgtcccgcaaagtggatgcgctgacctggtaatgccctgcaacggtcgcaaaagccgttttcgttga

SEQ ID NO: 477806 - DNA, 810 bp, Shigella flexneri
atgaataatctgatggtcattgatggtattgaagttcgtcgtgatgtttatgggcgttacagcctgaacgatctacatcgcgcagcagtagcatctggtgcaaatgccagaaccaaggagccaggaaagtttctttccagccaacaaactgttgaacttgttcatgaattgaccaacacccagaatttgggtgttgacccggtgagtgtgattcatgggggaaatgaacggggaacgtatgtctgcaaggaactggtgtatgcctatgcaatgtggatcagcccgtcattccatctgaaggtgatccgtactttcgacatggtaaccagcacaccggaaaaattatccggacaggctgctgacaagatgcaggctggtgtgattctgctggactttatgcgtcgggaattaaacctgtctaactcatctgtgcttggggcttgtcagaaactccaggaggctgttggcttaccgaatctggcaccacgctatgccattgatgctcctgctgatgcacacgatggctcaagtcgcccgacactgtcactgagtgcactgctgaaacagtatggtatccgcctgacggctaatcaggcatatcaccagatggtgaagctggggatcgtcgagcagcgcgaacgatacagccgtaccgcgattaacaacatcaaaaaattctggtcgctgacagcgaaaggctgcatgttcggcaagaacatcaccagtcccgcaaatccgcgcgagacgcagccgcatttcttcgaatcccgattccctgagctgttaaagctgctcgataccgttcattga

SEQ ID NO: 477807 - DNA, 369 bp, Shigella flexneri
atgatttactctaatcagcttcgttacactggcaaagatggtgtttacttccatctacaaggccaaccagataatttcttgtcactatcagcaactgaaaacatggaatttgatagccctatgatggttaccactcaaaatatgcaatcagggcagactgtaacagataatgtaatgcgttcacctagaactggatttgcccctatatttccagacatctgttatcacttaacccattacaagcccgctgccgcagatattcccgtggcgagcgataacccagcgcactatgcggatgccattcgttataatgctcgaacgcctctgcaaggttctttgctgccgttaacccgtctggtttgggcatga

SEQ ID NO: 477808 - DNA, 282 bp, Shigella flexneri
atggataataacggtaactggctttgcggctcgcaagttattccaggcaactatggcaattttgattccagatatgtgaaagatgtccggcttggttcacagcaatattatggagtgaacaactggcaaacatggaatttccagtgcccgtcaggctatgtactgacggggattaacgtacaggataccggaaaaaactctgccgataatattgcaggcgttcattacaggccagtgcaaaagtatataaatggcacctggtataatgtggcgagtatttaa

SEQ ID NO: 477809 - DNA, 225 bp, Shigella flexneri
atggctggacttgctgccgccagaaataaaggccgtattggtgggcgaccacctaaactaaccaaagcagaatgggagcaggccgggcgtttattagcacaaggaatcccccgcaagcaggtcgcattgatctacgatgtggccctgtcaactctgtataaaaaacaccccgcgaaacgaacgcatatagaaaacgacgatcgaatcaatcaaatcgatcggtaa

SEQ ID NO: 477810 - DNA, 354 bp, Shigella flexneri
gtgctgattggctatgtaagggtatcaacaaatgaccagaatacagacctgcaacgaaacgctcttgtttgtgcaggatgtgaacaaatatttgaagataaattaagcggaacaaggacagaccgacctggattaaaacgcgctttaaagcgccttcaaaaaggtgacacactggttgtctggaaactggatcgcctcgggcgaagcatgaaacatttgatttctctcgtaggggaattacgagagcgagggattaattttcgcagtcttactgacagtattgatacgtcatctccaatggggcgtttttcttccacgttatgggtgccctggctgaaatggaacgagaactaa

SEQ ID NO: 477811 - DNA, 240 bp, Shigella flexneri
gtgtttaataacaccatcactgttaaagattctaccgtaacctctggttcatggactgatgaaggtactactggttggttcgttaatacaggtaatgccagcgattatagtggtaaatctaactttgtcaccgtagatactgacggagatggtgttgctgatagcactattgcaagctgggatgatgttgcattagctgtagttgcacatccgaatgctgataatgctatgcagacctga

SEQ ID NO: 477812 - DNA, 219 bp, Shigella flexneri
atgttggtatcgctgattaccttcattgtttgttgcattaacccgaacgcgatttcgatgatttacgcgatcagcggcccgctcattgccatgatacttttcatcatgcctacgctgtcaacgtatctcatcccggcgcttaaaccctggcgttccatcggaaatctgattacgctgatcgtgggtatcctgtgcgtatcggtaatgttctttagctaa

SEQ ID NO: 477813 - DNA, 459 bp, Shigella flexneri
gtgaatgccacatcactggtacaggctataggtcgccttcagacgatacgtagcctaggagtgacattacctgcaattacgccagtttcggatatccgtattgcggccatggcacgttatgcctcaacggctaagataacagcgcttcagcgcttaccagaaaaaagaaaactggctacgcttgttgcattctcttgctgcatggaggcgacagctcaggatgatgctcttgagttacttgaagcgctactccgggatctgtttaatgaagcggttcaagcagataaacgtaaccgccaacgaacacttaaagatctggatcgtgcagcagaaatactggcaaaagcatgtcggatgcttcttgacgataaattatctgatactgatgttcgtgatagtatcttcaatatcattcccgaagatgtactgactcatgcagtaaatagactggccccctga

SEQ ID NO: 477814 - DNA, 660 bp, Shigella flexneri
gtggaagttactggcactcgcggcgcaatgaccatacgcgttactacgccaagtacgtccagcggcggcggaatcactaacgctcaattcacttatattaatcatggtgatgcttacgctcctggctggcgacgagactacaacacgaaaaaccagcagcctgcatttgctttagggcaaacaggaagcagggttgcaaatgataaagctgttggctggaactggaatagcggtgtttatgatgcagatatcaaaggcgcaacagcattaatactccacttcaatatgaatacggggagttgccctgccgtacagttccgtgtgaattataagaacggcggtattttttatcgttcagcgcgtgatggttatggatttgaggctgactggtcagaattctacaccacaacacgtaagccatcagcgggagatgttggcgcatatacgcaggcagaatgtaactcaaggtttattacaggtattcgccttggtggtctgtcatctgttcagacatggaatggtcccggctggtctgacaggtcaggttatgttgttaccggttccgttaactcaaacagagatgcactaattgatacaacacaggtaaggccaattcagtattgcattaatgggacgtggtataacgcggggagtatttaa

SEQ ID NO: 477815 - DNA, 510 bp, Shigella flexneri
gtgacgctgcgtattattcagggattgggtgcaggtgcggaaatttccggtgccggtacgatgctggcggaatatgcgccaaaaggtaagcgcggaattatctcctcatttgtggctatgggaactaactgcggcaccttaagcgcaacggcaatctgggcctttatgttcttcattctcagtaaagaggaactgctggcgtggggatggcgtataccgttcctggcgagcgttgtcgtgatggtctttgctatctggttgcgtatgaatctgaaagaaagcccggtctttgagaaggttaacgacagcaaccaaccgacagcaaaacctgcacctgctggtagcatgttccagagcaaatccttctggctggcaacagggctgcgttttggtcaggcgggtaactccggtttaattcagactttccttgcaggatatttagtacagacgttattgtttaacaaagcaattccaacagatgcattgatgatcattagactggccccctga

SEQ ID NO: 477816 - DNA, 180 bp, Shigella flexneri
atgaataagccgcaactggcggaatcacagaagaccgctttgcttaccgaagcggagtctgtcatccggccgccggggcgtgctgtcaggctgaacagggaaacggatgaatccggggaggcccgggggcgggcctctgtttttccggagtcagtccggtctgtggtttatgcgatgtga

SEQ ID NO: 477817 - DNA, 243 bp, Shigella flexneri
atgtcatttattaaaactttttccgggaagcatttttattatgacaagataaataaagacgacatcgtgattaacgatatcgcggtttccctttcaaatatctgtcgctttgccggtcatctttctcacttctacagtgtcgcccaacatgcggtgctttgcagccagctggtgccgcaggaatttgcttttgaagtgaggtgtactggcaatagcggacactaccatttgttctttttttaa

SEQ ID NO: 477818 - DNA, 378 bp, Shigella flexneri; identical to SEQ ID NO: 474621

SEQ ID NO: 477819 - DNA, 507 bp, Shigella flexneri
gtgaaagctgtcagaaaaactatcgcggcgttgccggggggttacgctgaagctgctgagtggctggatgtaacagagaacgctttattcaaccgccttcgtgcagatggcgatcagattttcccgctgggatgggcaatggttttacagcgcgcggctggcactcactacattgcggatgctgtcgcacagtctgctggtggggtgttcgtatcgcttcctgaaattgaggaagtagagaacgccgatataaaccagcgcctgctggaagtcatcgaacagatcgggaattactcaaagcagattcgttcggcaatcgaagatggggtcgtggagccacacgagcagacagcaattaatgatgagttgtatctgtcaatttcgaagctccaggagcatgcagcactggtctacaaaatcttctgcgctccagaaaagagtgacgcccgcgagtgtgcagctccgggcgtcgtggcgttttgtgtctgtggagaaactaacgcatga

SEQ ID NO: 477820 - DNA, 696 bp, Shigella flexneri
gtgggaaaagagaaaaaatcacgcattctgacgaaaccgtgcgttattgagtatgaaggccagattgttggctatggttcaaaggagctgcgcgttgaaaccatatcctgctggctggcccgcacaattattcagacaaagcactattcccgccgttttgtgaataactcttacctccacctgggagtattcagcggacgcgatctggttggcgttctccagtggggatatgcccttaaccccaactcaggtcgtcgtgtcgtgcttgaaacggataaccggggctatatggagttgaatcgcatgtggctacacgacgacatgccccgcaactctgaatcacgggccatcagctacgcgctgaaagttatcagattactgtatccgtcagtggagtgggttcagtcctttgctgacgaacgctgcggacgcgcaggcgttgtgtatcaggcgtcgaattttgattttattggcagccatgaaagcacgttctacgagctggatggtgagtggtatcacgagataacgatgaacgcgattaagcgaggtggacaacgaggcgtgtatttacgggctaataaagagcgtgccgtggtgcacaaatttaatcagtatcgctacatcagattcctgaacaagcgagcaaggaagcggctaaataccaagctattcagggttcagccataccctaagtga

SEQ ID NO: 477821 - DNA, 627 bp, Shigella flexneri
ttgccgtctgcggggattgtgtggcgaagggctgcgccaactctgcgtatccgtgacccgcataaagatgaaaagatggcagcaatccataaagcactggacgaatgcagcgcagagcatccggtcttttatgaagatgaagtggatatccatcttcatcccaaaatcggtgcggactggcaactgcgcggacagcaaaaacgggtggtcacgccgggacagaatgaaaaatattatctggccggagcgctgcacagcgggacaggtaaagtcagctatgtgggcggcaacagcaaaagttcggcgctgttcatcagcctgctgaagcggcttaaagcgacataccgtcgggcgaaaaccatcacgctgatcgtggacaactacattatccacaaaagccgggaaacacagagctggctgaaggagaacccgaagttcaggggcatttatcagccggtttactcgccatgggtgaatcatgttgaacggctatggcaggcacttcacgacacaataacgcgtaatcatcagtgccgctcaatgtggcaactgttgaaaaaatttcgccattttatggaaaccgtcagcccattccccggaggcaaacatgggctggcaaaagtgtag

SEQ ID NO: 477822 - DNA, 543 bp, Shigella flexneri
gtgtccatcaatatagatgggcgcgattgttgccagacaggacaattttcacaagacgtcgctgatggggcgcttacggagcaccgaaatgtccttcgtgatattcgcaatatggttgaggagcttaacgcactcaaaactgagcactgctcaaaactgagcagtcctataggggtgattgaagatgtctatctaaatgcgcaggggaaacagcagcctctgtaccgtctcgaccgtaagcatacttttattctggtcgctggctattctgttcacctacgcgccaagtgttacgaccatattcagacgttagagcgtcgagttcttcaactggaagaccagaagaaacgagcagccattcagtcagctaatcgtcgaggcgtgacttggggcgattactgcaaggccaatggtctacccgctcagaaactgatgaccatccttaagaaagagcgcaagctgttccgagtacattcaagcagtggcgagtggtcagtcaatccaaactatgtgggtaagcgccccatcagcgacgtcttgtga

SEQ ID NO: 477823 - DNA, 153 bp, Shigella flexneri
atgacttttgatgaaaaagaacttgataatgcaattaataaaatcatcgtaacgtcgctcttttcctgtctcagcgacactcagcaaaaacagttctacgaatcggctttcaacatgattgaagtggtcaacaaaaactggccaccgagttag

SEQ ID NO: 477824 - DNA, 168 bp, Shigella flexneri
atgaataatgacaataccgattacgtgagtaatgaatcagggacgctttcgcgattatttaaactacctcagcatgggaccaccgtccgcacagaattgattgcggggatgaccacttttttaaccatggtgtacattgtttttgtgaacccgcaaatcctcggctag

SEQ ID NO: 477825 - DNA, 222 bp, Shigella flexneri
atgctggcaaaatccgacattgtacgggacgtgatgacgtggggtgatgccgataatcagcaggtgaaactgtcgatgccggaactggaagaactggccacagcgatgatacaggccattgttgagcgcaacgatgagatttatcgccgtcagcgtgaaatgaaagaggagctgagcggtctggatgatttggcttcaattcgggcgtttgacgttgagtaa

SEQ ID NO: 477826 - DNA, 180 bp, Shigella flexneri; identical to SEQ ID NO: 477816

SEQ ID NO: 477827 - DNA, 195 bp, Shigella flexneri
atgctggagaatgagtaccctcagagggtggctgaccggctgaaagcatcaggtctgagcggtgatgcggatgcggagagggaagccggtgcacaggtgatgcgagagactgaacagcagatttaccgtcagctgactgacgaggtactggccctgcgattgtctgaaaacgactcacaactgcaccattcataa

SEQ ID NO: 477828 - DNA, 327 bp, Shigella flexneri
atgactaaaaatactcgtttttcccccgaagtccgtcaacgggcagtccgtatggttctggaaagtcagggcgaatatgactcacaatgggcgacaatttgttccattgctccaaagattggctgtacgccggagactctgcgtgtctgggttcgccagcatgagcgggataccgggggcggtgatggagggctcaccaccgctgaacgtcagcgtctgaaagagctggagcgtgaaaatcgtgaactgcgccgcagtaacgatatccttcgccaggcttccgcttattttgcgaaggcggagttcgaccgcatctggaaaaaatga

SEQ ID NO: 477829 - DNA, 303 bp, Shigella flexneri
atgagcagaaaaacccaacgttactctaaagagttcaaagccgaagctgtcagaacggttcttgaaaatcaactttcgatcagtgaaggcgcttcccgattattccttcctgaaggcactttaggacaatgggttaccgccgccagaaaagggctcggtactcctggttcccgcacggtggctgaactggaatctgaaattctgcaactgcgtaaggcgttaaatgaagctcgccttgagcgagatatattaaaaaaagcaacagcgtattttgcacaggagtcgctgaaaaatacgcgttaa

SEQ ID NO: 477830 - DNA, 219 bp, Shigella flexneri
atgtgctggccgctgtggcaaaaacctcgacctgacgagtggcagctgtacatgcttgatgtcgggcaagggctggcaatggtgatagccagaaacggcaaagcgattctctatgacacaggactggcctggcctgaaggggatagtgggcaacaactgattatcccctggctccactggcataatcttggtaagcgccccatcagcgacgtcttgtga

SEQ ID NO: 477831 - DNA, 378 bp, Shigella flexneri
  misc_feature (324)..(333): n is a, c, g, or t
atgacagacgacgagaagaagattcaaacgctggaacagcagctttcacaagcaagatcattacttagtcatacgatggatacactccaagaggaacggtacttagcatcgctcagaaaaaaccgcgtaacaggtggttattacatgatgagcagagcagcagaaaaaaacttaagagccttgcaaaccgcaaatccagcggcagcactggtatttagtgtgatccgtgaaaacatgcagattggaaccaatgccgtagccatcagtaacacagcgttctgcaagattattggtaaatcacgggctactgtgactagagcgatnnnnnnnnnngcgagagattataccgctcgccgcagccccagcgaccgaacgtag

SEQ ID NO: 477832 - DNA, 378 bp, Shigella flexneri; identical to SEQ ID NO: 477604

SEQ ID NO: 477833 - DNA, 381 bp, Shigella flexneri; identical to SEQ ID NO: 458903

SEQ ID NO: 477834 - DNA, 402 bp, Shigella flexneri
atgtctggaaatataggggcaaatccagtaaataatgtgacatcaattattcgaccagataataacgtttacttcaatgaacttgattctaaattcaaaacggtgcggcgtttcttacctgacttactttccagaatacattttgagggcaatgcctcagccaaaacattaattgaagcgctttgctggattgaagttaatttaaaaaagaaaaaaacagataacgatgcaccacgcgaaataatcaataaaccgtggcaacagcatgtgataagaaaagatggtagtattgatttccacgcctatacattttgtgcacttaaggaacttcagcttgcactgaaaaaacgggatatttatgtcaatcccagctggcgttatgcagaaccccgggcaggatga

SEQ ID NO: 477835 - DNA, 312 bp, Shigella flexneri; identical to SEQ ID NO: 474748

SEQ ID NO: 477836 - DNA, 327 bp, Shigella flexneri; identical to SEQ ID NO: 477828

SEQ ID NO: 477837 - DNA, 381 bp, Shigella flexneri; identical to SEQ ID NO: 458903

SEQ ID NO: 477838 - DNA, 141 bp, Shigella flexneri; identical to SEQ ID NO: 462785

SEQ ID NO: 477839 - DNA, 195 bp, Shigella flexneri
atgctggagaatgagtaccctcagagggtggctgaccggctgaaagcatcaggtctgagcggtgatgcggatgcggagagggaagccggtgcacaggtgatgcgtgagactgaacagcagatttaccgtcagctgactgacgaggtactggccctgcgattgtctgaaaacgactcacaactgcaccattcataa

SEQ ID NO: 477840 - DNA, 252 bp, Shigella flexneri
atgttcaaagatggcatagtgataaagcgaacttataccggggaagagcagaggcaacaagtggaaaatgaaaagcaaagcctgttgcaacttgtcagggataaaacccagctatgggactcacagctacggctgggcatcatttccgccgggaataagcagaaattaaccgagtggatgctctacgcgcagaaggtcgaatccacagacacctccagtctgccagtaacgtttcccgaacaaccagaatga

SEQ ID NO: 477841 - DNA, 276 bp, Shigella flexneri
atggctgcgcaagggttcttactgattgccacgtttttactggtattaatggtgctggcgcgtcctttaggcagcgggctggcgcggctgattaatgacattcctcttccaggtacagcgggcgttgaacgtatactctttcgtttacctggcgtctctgaccatgagatgaactggaagcaatatctttgtgccattctcggcctgaacatgctggggctggcggtgctgttttttatgttgctcggtcagcactatctgccgcttaatccatag

SEQ ID NO: 477842 - DNA, 2559 bp, Shigella flexneri; identical to SEQ ID NO: 471653

SEQ ID NO: 477843 - DNA, 303 bp, Shigella flexneri
atgagcagaaaaacccaacgttactctaaagagttcaaagccgaagctgtcagaacggttcttgaaaatcaactttcgatcagtgaaggcgcctcccgattatctcttcctgaaggcactttaggacaatgggttaccgccgccagaaaagggctcggtactcctggttcccgcacgctggctgaactggaatctgaaattctgcaactgcgtaaggcgttaaatgaagctcgccttgagcgagatatattaaaaaaagcaacagcgtattttgcacaggagtcgctgaaaaatacgcgttaa

SEQ ID NO: 477844 - DNA, 297 bp, Shigella flexneri; identical to SEQ ID NO: 476754

SEQ ID NO: 477845 - DNA, 2181 bp, Shigella flexneri
atgacaactaaaaatatgaatacgccaccaggcagcactcaggaaaatgagatcgatctgcttcgtctggtcggcgagttatgggatcaccgtaagtttattatcagcgtgaccgcgttattcacgctgatcgctgtcgcttactcgctgttaagcacaccaatttatcaggcagatactctggtccaggttgagcaaaaacagggcaacgccattctcagcggcctgagcgatatgatccctaactcatcgcccgagtctgcaccggagatccaactgctgcaatcgcgcatgattctcggtaaaaccattgctgaactgaatctgcgcgacatagttgagcagaagtattttccgattgtgggtcgcggctgggcgagattaaccaaagaaaaactaggtgagctggcgatcagctggatgcatattccacaactgaatggtcaggatcagcaactaacactcacggttggggaaaacggccactatacactggaaggtgaagagttcaccgtcaatggtatggtcggccagcgtctggaaaaagatggcgttgcgctgactatcgcggacattaaggccaaaccaggaacacagtttgtcctgagccagcgtaccgaactggaagcgattaacgcattgcaggaaacctttaccgttagcgaacgcagtaaagaaagcgggatgctggaacttaccatgactggtgatgatccccagttgattactcgtattctgaacagcatcgctaacaactatttgcaacagaatatcgctcgccaggcggcgcaggattcacaaagccttgaattcttacagcgccagttacctgaagtgcgcagcgagctagaccaggcggaagaaaaactcaacgtttatcgccagcagcgcgattcggttgaccttaacctggaagccaaagccgttcttgagcagattgtgaacgttgataatcaactcaatgagctgaccttccgcgaggcagagatctcccagctgtataagaaagatcacccaacttatcgtgcgctgctggaaaaacgccagacgctggagcaagaacgcaaacgcctgaataagcgggtatcggcaatgccttccacccaacaggaagtgttgcgtttaagtcgtgacgtagaagcgggccgtgcggtatatctgcaattacttaaccgccagcaggagttgagtatttcgaaatccagtgccattggtaacgtgcggattatcgacccggcagtcactcagccgcagccagtgaaaccgaaaaaagcgttgaatgtggtgcttggttttattcttggcctgtttatttcggtgagtgccgtgctggcgcgtgcgatgttgcgtcgtggtgtagaagccccggaacaactggaagagcacggcatcagcgtttattccactatcccaatgtccgagtggctggataaacgcacccgtctgcgtaagaaaaatttattttctaatcagcagcgccatcgtactaaaaatatccccttcctggcggtggataacccggcggattctgctgtggaagccgtacgtgcgctacgaaccagtctgcatttcgctatgatggagactgagaataacattctgatgatcaccggtgcgacgccagacagtggtaaaacgtttgtcagttcaactctggcagcggtgatcgcccagtccgatcaaaaagtgttatttattgatgccgacttacgccgtggttattcgcataacctgtttaccgtgagtaatgaacatggcttgtcggaatatctggcaggtaaagatgagctcaacaaagtgatccagcattttggcaaaggaggctttgatgtgattactcgcggtcaggtgccacctaacccgtctgaactgctgatgcgcgatcggatgcgtcaattactggaatgggcgaacgaccattacgatctggtgattgtcgatacgccgccgatgctggcggtgagcaatgctgcggtcgtgggacgctctgtcggcaccagcctgctggttgcgcgttttggcttgaacaccgccaaagaggtgagcttgtcaatgcagcgtctggaacaggctggcgttaatattaaaggcgcaatcctcaatggtgtgattaaacgcgccagcaccgcttacagttacggctataactattacggttatagttactccgagaaagagtaa

SEQ ID NO: 477846 - DNA, 615 bp, Shigella flexneri
atggctgaaacctacccacgcttgcaacgcggacgtatggcctggctgttaatgcaggaaatatctcaaggcaatcgtgagccgcatgtgttgcaggcattccgggagctggaaggcgaccttggttacggcatgttgctctcccgctatgcgccggatatgaatcatgtcacagccgcacagtaccaggcggcgatgcgtggcgcgatacctcaggttgcgccggtattctggagtttccgcatcatggtgggctgtggttccctgctgctactggtgatgctgattgcgcttgtccagacgctgcgtggcaaaatcgaccagcatcgctgggtgctgaaaatggtgctctggagtttgccgttgccgtggattgcgattgaagccgggtggtttatgaccgagtttggtcgtcagccgtgggcgatacaggacatcttaccgacatactccgcgcactccgctttaaccacaggacaactggctttctcactgatcatgatcgtagggctttacaccctgttcttaatcgccgaagtctacctgatgcagaaatatgcccgtctggggccgagcgcgatgcagagtgaacaaccgacgcagcaacaggggtaa

SEQ ID NO: 477847 - DNA, 429 bp, Shigella flexneri; identical to SEQ ID NO: 475968

SEQ ID NO: 477848 - DNA, 123 bp, Shigella flexneri
atgtcaacgattattatggatttatgtagttacacccgactaggtttaaccgggtatctgttgagtagagggttaaaaaaagagaaatcaacgacattgaaaccgttgatgaccttgccatag

SEQ ID NO: 477849 - DNA, 600 bp, Shigella flexneri
atgaccactatgaccaaagagcgactactgacaatcaagcagtggcgcgaaacatacggacctggtagcaacgttgaactgccagcagaagaagcggaagaactggcacgaattgctctggcatcgctggaagcagaaccagttgcttatattttcaaacatcctgccgggaaattattctgggctttaacggatgaaagcaataaagagcaagcggacgttattcctgtttatgctgccgcgcctgcgtcggttgtgccggataatgcatcagagcctcttgcttatgcttacaaagagcttacgcctgagattatgcgcaaccatttagctgtattcgagcgatatggaatagccccaaacgatagctctaccacaattcaggcactgcgaatcgcgctggatggcatagagcggagcgacgccatgcttcatggtgccgaaactgtaagccaaacttacaagttgcctcccctgtcatccagcgaagtaaacgacgcggcatggaaattacacaacatgctgactgaacacggcctgctaaatgggcgtcagttcaacaatctgaaaggttgcttctatgaggcattaaaggtctag

SEQ ID NO: 477850 - DNA, 561 bp, Shigella flexneri
atgaaacaaatgtcactaattgagatggatggttttctgaaaggtaaatgcatcccacgagatttaaatgttaacgaaacaaacgctgaatatctggtgcgtaaatttgctgaagcggaggccaagattttggcgctggccgaagaccaacagaaagcgattgagtcaattaagcaggctgattcggctgttaagttggcacacgagaagttttcggcactggcagcggagaatgcggggctgaagtctggcgctatggacgaaatcaaggttatcaaccgtggagggcaggcatattgcgtaaaagatggagtgcaagttaatcccatgtatgcaagagggtggaatgactatcgcgcaaagtctatgcaatcagacaccccagccaccgatgctttcctgactgaagtccgggctaaggcgtttgatgacctttgcgcggcgttcgttaagcacgcgtcggtgtccgggctggacgatggcgactgcgttacggtgaaagaggcgactgacgccctgctgcattgtgcggaacagcttcacaagggagtgcattcatga

SEQ ID NO: 477851 - DNA, 549 bp, Shigella flexneri
atgaatcacttgatggttgaccttgaaacaatgggcaacgggccatacgcgccagttatttctattggggcggtattctttgacccgaataccggagaaacaggagaagagttctcggtaaatatctcgcttgaatcatcaatgcgatatcgagcgcgtcctgacgcttcaacgattttatggtggctggaacagagtgaagaagccaggaaatcgctaaccagcaacactcaggagctttcaacggctctttcatggttatctgaattcatcataaagaacgctaaccacaaattcgttcaggtttgggggaatggagcatcatttgactgcgttattctccgcaacagttattcgctgacagggcagccagttccgtggcagtggtggaatgaccgcgacgtaagaacaatcgtcgaacttgggaaggcaataggattcgaccctaagcgagatatgccattcaaaggaactcgccacaacgctcttgatgatgccattcaccaagccaaatacgtttcagcgatctggaaaaagttagctaaataa

SEQ ID NO: 477852 - DNA, 516 bp, Shigella flexneri
atggcaagcagaggcgtaaataaggtgatcattattggtcgccttgggcatgatccagaaatcagatattcaccatcaggaacggcatttgcaaaccttaccgttgctacgtcagaacaatggcgtgataagaaaactggagagcaaaaggagcagacggagtggcaccgcgtggtaatgagcgggaaactggcagaaattgccagcgaatatctgcgaaaaggctctgaggtttatcttgaaggcaaattgcggacaagaaaatggcaggatcaaagcggacaggatcggttcactaccgaagtcatcgtgggcgttggtggaaccatgcaaatgcttggtggcaagcaaggaggcaatgaacagtcttcacctcagcgaaataatggtcagcaacaaagacagcaacctcagcagcagggaaatcacagcgaaccacctatggattttgacgacgatatcccctttgcaccagtaactctccccttccctcgtcacgctattcacgcaatttaa

SEQ ID NO: 477853 - DNA, 171 bp, Shigella flexneri
atgtcacttgcaaccacagtgaaggagagcaagttacagagacgcatgtacacgcagaaagctctctggtatcgccataatggtgaccgcgaaggaatgcgggtatgccttaatttgtccagagtcgaagtattaaaccagcgttatttccttgggccatgtccattctga

SEQ ID NO: 477854 - DNA, 327 bp, Shigella flexneri
atggactctcaaacacgccgccgcgaacgtcgcgcagagaaacaggctcaatggaaagcagcaaatcccctgttggttggggtaagcgcaaaaccagttaaccgccctattctctcgctgaatcgcaaaccgaaatcacgagtagaaagcgcactgaatccgatagaccttacggtgctggctgaataccacgaacagattgaaagcaacctgcagcgtattgagcgcaagaatcagcgcacatggtacagcaagccacgcagtgaaatgggtgtgacttgtgttggtcgccagaaaatgaaattaggcagcaaaccacttatttga

SEQ ID NO: 477855 - DNA, 129 bp, Shigella flexneri
atgaaacataacgaacactttatggcttggttgaagtcaatgcgtgatgaagcaaagcgtcctgaaacaacaatgacgcgaatcgtggaaatcttctcctgcatcagcaagtacgcaacctgccaataa

SEQ ID NO: 477856 - DNA, 633 bp, Shigella flexneri
atgagtatttcttccagggtaaaaagcaaaagaattcagcttggacttaaccaggctgaacttgctcaaaaggtggggactacccagcagtctatagagcagctcgaaaacggtaaaactaagcgaccacgctttttaccagaacttgcgtcagctcttggcgtaagtgttgactggctgctcaatggcacctctgattcgaatgttagatttgttgggcacgttgagcccaaagggaaatatccattgattagcatggttagagctggttcgtggtgtgaagcttgtgaaccctacgatatcaaggacattgatgaatggtatgacagtgacgttaacttattaggcgatggattctggctgagggttgaaggtgattccatgacctcacctgtaggtcaaagcatccctgaaggtcatatggtgttagtagatactggacgcgagccagtgaatggaagccttgttgtagccaaactgactgacgcgaacgaagcaacattcaagaaactggttatagatggcggtcagaagtacctgaaaggcctgaatccttcatggcctatgactcctatcaacgggaactgcaagattatcggtgttgtcgtggaagcgagggtaaaattcgtatga

SEQ ID NO: 477857 - DNA, 216 bp, Shigella flexneri; identical to SEQ ID NO: 14809

SEQ ID NO: 477858 - DNA, 282 bp, Shigella flexneri
atgggtactattgcaactaaaagcaagaaagcggctcgcatcgagtcagccttgctgaacaaactggcactgatggggcagaagacattcgctcgagcaatgggggttcctgaatatcaggtaagccgatggaagaatggtttcttctcgcaggtaagcatgatgcttgctgttctggaatacggaatcgaagacgatgaaatggctgaattgactaagcggcttgccgattacctgacaaaagaaaaagccccgaagaacggcgaattcttcgaggcctaa

SEQ ID NO: 477859 - DNA, 147 bp, Shigella flexneri
atgacaaaacaactcagtccttaccaggacaaaattcacaaacacatactacgtgatcgcttcctgtccagcttcaagcagcatggtcgattccgggctgagttggaaaaagtgaagctgatgcagaaggagaaaggtcatgagtaa

SEQ ID NO: 477860 - DNA, 453 bp, Shigella flexneri
atgagtaatcttgcaaccgtaacacatttaaggccttcacaacggcctgtggagcgtcgtgtggcagaagttgaagatggttatacccgtcttgcaaatgccctgtatgaagagcttatcggcgcagatttaacgaaaaatcagagcaaggttgcccacgccatatgccgtaaaacatacggctacggtaaaaagatggatcgcatctctgatagtcagttagctcaaattaccaggctgccaagacagaaggtaaacaaggccaagaatgagcttatcgcgatgaaggttatccttcgcgaaggccagcaaatcgggcctaacaagaacatcgaggaatggcaaatagaagggtgtcactactctggtgataatgtcactgcattggtgacaaaaagtgtcaccaaaacagggacacacaaaagaaactattacaaaagaaaaaagaaataa

SEQ ID NO: 477861 - DNA, 207 bp, Shigella flexneri
gtggctgagctgattttctctgcattgaggcttctcggtgcgtcgtggatggtggtgacgttcattgtgattgccagcagttttatccggttggtaggtgaaggtaaagacatggtgggtgtgcttttcggtagcactctcatgtgggtgattatcggtgttgcgcctgtcgctgttgcaaaaatggcgtggcgttttgtgagttga

SEQ ID NO: 477862 - DNA, 315 bp, Shigella flexneri
atggacgaatcaagaaagcagtttgaagaaagttggttgcgacgtgggggcgaatcttcagaccttatccgttaccctgaaaatcaccatgaaattggcagcggtaatattggtggtcaatacgtgatggacgatgttcaaggccactggcaaacgtggcaggcatcgagagcagctattgaaattgagctgcaaaagccaaagaaaggcccacttcccggtgattatcacattggctatgactcaggtgcagaatcacaatacgaaagcgatgtagaggccatccgcactgctggagtcaaagtgaaggagtga

SEQ ID NO: 477863 - DNA, 165 bp, Shigella flexneri; identical to SEQ ID NO: 402584

SEQ ID NO: 477864 - DNA, 384 bp, Shigella flexneri
atggattattcacagttaagtgattttgaaattaacgtggcggtattcgaagccattcataacggatcaccggattacaaagaaggtgagaatggcgcgatggtgtttatctcatttgagggagacattgtaaacggagacgcagttgaagtagaggttgagcgcggatcctttaacccatgcgcaaacccagcagacgcatggccgattatcactgaaaacaacatcagcataattttagacaatccctcaatgccgtgcgctacagacaacgcaagggacttgtttgatgatgccggaccgaatgttggtgtcgcatatgacaatccactccgtgccgccatgattgtctttctcatgatgcaggacgccaataatgcttag

SEQ ID NO: 477865 - DNA, 393 bp, Shigella flexneri
atggtaattagccgatacggacaaataacgtttaaacattttcaagacaatccaacatgggctgctgcggctggatatgactttaattattttgattgtctgtcagtcgcatgtattgcaactaccaatgttgctaacaacataatcgatgaattcttggattttccagactatcaggtcagagagttgcctgcattttttgtgaaagtatctgttgctacagctctgttatttattttgttattcgcatatccattgcttgccgtatttgtttatgtgagatgcaaacactcacaaaagaaatacagcggagagcataccgatattaccagccaaaatatgcgagtgtggttgaggagatgccaagagaaatgggggagacgtcatggctaa

SEQ ID NO: 477866 - DNA, 291 bp, Shigella flexneri
atggctaacctacgcaaagaagcgcgcggaagagaatgccaggtacgtatttacggcgtatgcaatggaaatcctgaaactacagttctggcacattaccggatggctggaatttgcggaactggaatgaagcctgacgacctgatcggggcatgggcttgtagcgcgtgtcacgatgaaatcgaccgacgcacccataatctcgacaacaaagacgccagactttaccacctcgaaggcgtgatcaggacgcaggcgatactgctgaaggagggaaagattaagccatga

SEQ ID NO: 477867 - DNA, 363 bp, Shigella flexneri
atgaacgaatatcagtttgtgcttccatacccgccgtcggtgaacacctactggcgaagacggggaagccaatactacatcagcgataaaggccagaaataccgaaaagacgttcagaaaatcatccgccaactcaagttagacattttcaccaaatcacgactccgcatcaaagtaatcgcagacgttccagactcccgccgccgcgacctcgataacatcctgaaaggtttactcgactcacttatccacgccggatttgcggaagacgacgagcaattcgatgacattcgcgtaattcgtggtgtgaaagtaccaggcggaaggcttggaataaaaatcaccgaactggagaacgcatga

SEQ ID NO: 477868 - DNA, 189 bp, Shigella flexneri
atgaacgccacaattcaaacgataccagagcttcttatccagacacgaggaaatcagaccgaagtggcgaggatgctttcctgcgcaagaggaacagtgctcaagtacaaccgagacagcaaaggcgagcgtcacgtaatagttaacggcgtcctgatggtcaaacagggcaaaaggggaaggccatga

SEQ ID NO: 477869 - DNA, 438 bp, Shigella flexneri
atgagcagagtcaccgagattatctccgctctggttatctgcatcatcgtctgcctgtcatgggctgttaatcattaccgtgataatgcaatcgcctacaaagagcagcgcgataaagccacatccatcatcgctgatatgcagaagcgtcaacgtgatgtagctgaactcgatgccagatacacaaaggagcttgctgatgctaacgcgactatcgaaagtctccgtactgatgtctctgctggtcgtaagcgcttgcaaatcgccgccacctgtgcaaagtcaacgaccggagccagcggcatgggcgatggagaaagcccaagacttacagcagatgctgaactcaattattaccgtctccgaagtggaatcgacaggataaccgcgcaggttaactacctgcaggaatacatcaggacgcaatgccttcgatga

SEQ ID NO: 477870 - DNA, 153 bp, Shigella flexneri; identical to SEQ ID NO: 8650

SEQ ID NO: 477871 - DNA, 174 bp, Shigella flexneri
atggtttccgtgaacaaagatccgaaggaaggcgttgaatacatcactggtgctgatggtgtgaaaagaccaatggcttattacaaagcggctgaagagagggcaagaatagaaaatccccctaaatgcggatcatttttcgacatgctgaatcttcaacaatggaagttgtga

SEQ ID NO: 477872 - DNA, 243 bp, Shigella flexneri
atggcagagattattcccatgactgaagaacagaaattccagttagagatttacaaactggtcatgaaccagaacgcagccgcggaggaagcatttcaattcattggcactgacgaactgaagcttgagctattcaaaattcacttccagtcaggcggcgcgaattcagatatcacgatccgcacattcgaagcggtgcgtaaatcgaaggaagcgttagacctgttcactaccggagcataa

SEQ ID NO: 477873 - DNA, 489 bp, Shigella flexneri
atggcagcaccaaagggcaaccgattttgggaggcccgcagtagtcatgggcgaaatcctaaattcgaatcgcctgaggcgctgtgggctgcttgttgtgaatacttcgagtgggtggaagctaacccgctatgggagatgaaggcgttctcgtatcagggtgaagtgatacaagagcctatcgccaagatgcgagcgatgaccattaccggcctcactctgttcattgatgtgacgcttgaaacatggcgcacatatcgcctgcgagaagatttatctgaagtcgttacgcgagcagagcaggtcatctacgatcagaaattctctggcgcagccgctgaccttctcaacgctaacatcatcgcccgtgatttgggcctcaaagagcagtcgcaagttgaagacgtgacacctgataagggagatcgcgataagcgacgctctcgtatcaaggagctattcaaccgtggaactggacgcgattcttga

SEQ ID NO: 477874 - DNA, 984 bp, Shigella flexneri; identical to SEQ ID NO: 473802

SEQ ID NO: 477875 - DNA, 243 bp, Shigella flexneri
atgaaaacactggttgtagctcttgggggcaacgccttactccagcgcggtgaggcgctgacggcggaaaatcaatatcgcaatatcgccagtgctgtacccgcgctggcacgcctggcccgttcttatcggctggcgattgttcacggcaacgggccgcaggtggggctgctggcgttacagaatctggcgtggaaagaggtagaaccgtatccgctggatgtactggtggcggaaagctag

SEQ ID NO: 477876 - DNA, 576 bp, Shigella flexneri; identical to SEQ ID NO: 473829

SEQ ID NO: 477877 - DNA, 834 bp, Shigella flexneri; identical to SEQ ID NO: 476228

SEQ ID NO: 477878 - DNA, 129 bp, Shigella flexneri; identical to SEQ ID NO: 476230

SEQ ID NO: 477879 - DNA, 288 bp, Shigella flexneri
gtggcccacgtttttggtgaacgcacaatgttcacgctggagcgtcttctgagcctgctatcggcctttgacgtggtggtattgatgacggacggatggccgctttatgaatcccgcctgaaggaaaagctgcacgttatcagcaagcgatatacgcagcgaattgagcggcataatctgaggcagcatctggcaaggccgggacggaagtcactgtcgttctcaaaatcggtggagctgcatgacaaagtcatcgggcattatctaaacataaaacactatcagtaa

SEQ ID NO: 477880 - DNA, 477 bp, Shigella flexneri; identical to SEQ ID NO: 475559

SEQ ID NO: 477881 - DNA, 327 bp, Shigella flexneri; identical to SEQ ID NO: 476847

SEQ ID NO: 477882 - DNA, 1122 bp, Shigella flexneri
atggctcttacaaatcaaattaacaaagcatcctcactggcttctctgcgtcagcctcagcgagataaagacggtcaaatcattaaagggtctgtatggggcactgacatctcacgcactgactatgttcagatgaccaatggtcaagacgcccaagttctcaacgtaggctttacggaccgctcaggccgtccgatggcctttgggaatgactcacatgattacgttcaggcgctggaggactctttggatgagaccttcaatgatggagacttccgcactgctgtaatggagaatgtcttcccttgtgagtttcgcccatacggcactgaccctacgcctattcgccgtcaggctctccagaatcgcaccgtccgctttaagcataatggcgcgtttaatccagctgaggatgctccgtctaccacagtcatcaaaggggcaagcgtaactgtcaccccagtgttgaaccctgagaccaataagacgggcatcctgtgttctgctgctactcatgtgtctgacctcgatatgatgggcggttggaccgagggggcattaatccagactgtatgcgatatgcaggttcaatactgccgccagatgttcgccgctgtggtcgatgtcctgaaagatacgccagaccttcaaatcattgaggcagccccactaagtggtaaaccgtctgatcaagctgaagatcttctggatacattagcgttgaatcttccggtcgagttgggaaatacactgagcgattacgctgtattggtccctgagaaacttgaggcaatcttggaccgagccgctcaacgcgcaggtcatgaaggtattagtgagctattgggctgcactgtatgcggctatgcgggcgatgatacaggtgtctatctcctgcctaagcggttcgcttctatctctttcaggtcaactaaagacgctaagacggtagatgtcaaagtgacccgaaatagcaacactgctgggtatgaccttgagttaatcagtgtggtcgatgtgttggctactggttccgttaaggtgaaagcaggtgagtttgacgttgagaaagacgcctctttcccgttggtccatgttattcggtttactaccccagagtaa

SEQ ID NO: 477883 - DNA, 1677 bp, Shigella flexneri
atggataagagcgacgctaagcactgcacggtgattaacgccttgtcgcgcaatggctggaaagagttcgcagaggattacggtattgacccggataccctgccatctttccagaatcctaacgatacatggctattcccgtgggtgtcgaatgatgtcgtctacgtcgctgagtattacgaggtagaagaggagaaggagaaggtcttcatctaccgcgacccgctgacaggtgagccggtcagctattaccagcaggatatcaaagacgtcatcgacgacctggctaatcgtggattcattaaggtagcagagcgcaaggtgaagcgtcggcgtgtgtataagtcgatcatcacctgtacgcagatactgaaagaccgcgagaagatagccggagagcatattccaatcgttccagtgtatggcgaatggtcattcgctggtgacaaggagtgctacgagggtgtggtaaggctgacgaaagacggtcaacgccttcgtaacatgattatgtcgttcaacgccgatattgttgctcggtcaccgaagaagaaaccgaccttcttccctgagcaaatcgaaggctacgaatacatgtacggtggaaatgatgactatccgtactatctgcagaacaggactgatgaaaacggtaacgacctgccgattggtccaatctcctacatggaaaaccctgaagtgccgcaagccaacgcttacatgcttgaggctgccaccaacgcagtgaaagaagtggctagtcttggcgtggatgcgcaggcggcaaatggtcaggtcgcttttgataccgtcaatcaactgaacatgcgggcagaccttgagacatacgtgtttcaggataacctggctaccgcaatgcgacgtgatggcgagatttatgcctcaatggtcaacgatatttatgacgttcctcgtcatgtaacgctgacacttgaagatggaagcgagaaagacgttcaactctatgcgcaagttgtcgattaccagtccggcaatgtggtcacactcaacgacattcgcggtcgatatgagtgctatacagacgttgggccatccttccagagcatgaaggaacagaatcgcgcagagattcaggagttgctaaccaaggttccgcaaggtactccagagtgccagatgctgatgctgcaatacttcacgttgcttgacggtaaaggcgtcgagatgatgcgagagtacgcgaacaagcaactggtgatgatggggctgaagaaaccagaaacacctgaagagatggagatggtgcagcaggcacaacaacagccgcagcagccatcagcagagcaaattcaggcgcagggtatccttctgcaaggtcaggctgaattgctcaaggcagagaaccaacaggcgcagattcaggttgaagctgccaaggttgaagcccaaaaccaactcaacgccgcgaagattgcagaaatattcaacaatatggacctcgacaagcaggcagaactgcgtgagtacctcaggctcgtaggtcaattccagcaacagcgcagcaaagatgctcgtgctaacgctgagctgcttcttaaagatgcagaccagactcattcacaacgcatggatttcgcgaatcttatgcgtcaagttcaaatcccctccggcggagtagccgagacacctcaataa

SEQ ID NO: 477884 - DNA, 912 bp, Shigella flexneri
atggaccaaaccaccgacattcaggcttctgaagaattaaccctgcccggcaatcatgcagcggcatctgctgatggcttagttgtcgataatgccaacgacagcgcaggtcaggaagaaggctttgagattgtcctgaaagacgatgagaaaccaaaacaagacccggcaactaatgctgaatttgcccgtcgccgcatcgaacgcaaacgccagcgtgagcttgagcagcagatggaagcggttaagcgtggagagttgccggagcacctgcgggtgaaccctgagttaccaaaacaaccagaccctaacgattatctttccgaagatgcactggctaagtacgactatgaccagagccgcgcactggctgccttccagcaggcaaacagtgaatggcagatcaaggctatggacgcacgaagccaggctgtcgccgagcagggtcgcaaaactcaggagttcacccagcaatcagcgcaatacgtcgaggcggcccgtaagcactacgaggcagcggaaaagctcaatatccctgactatcaggagaaagaggatgcattcatgcaactggtgccgccagcagtcggtgccgacatcatgcgcctcttcccggagaaatccgccgctctcatgtatcaccttggtgctaatcctgagaaaacacgccagttgctggcgatggacgggcaatccgcgctgattgaactcactcgactgtcagaacgtttaactctcaagcctcgagccaaacctgtttcagaagccccgttacctgatgaacccattcagggacatgctgttgctgcaaatatctctgcgattgaaaagcagatggaagcggcagcaaacaaaggggatgtagagacataccgcaagctcaaggcgcaactgaataaaggaattcgataa

SEQ ID NO: 477885 - DNA, 201 bp, Shigella flexneri
atgcaacacgaactacaacctgattcactggttgatttgaaattcatcatggctgatactggctttggtaaaaccttcatctacgaccggattaagtccggcgacctgcctaaagccaaagttatccacggtcgagcaagatggttatatcgtgaccattgtgaattcaaaaataagctcttaagccgcgccaatgggtaa

SEQ ID NO: 477886 - DNA, 180 bp, Shigella flexneri
atgtcttgtccaaaatgcggttctggaaatattgcaaaagaaaaaacaatgcgtggatggtctgatgattatgtgtgctgcgattgcggatacaacgactctaaagacgcatttggagagcgtggtaaaaacgattttgtcaaaattaataaagaacgcgaaggcaacgaaaaaagctaa

SEQ ID NO: 477887 - DNA, 285 bp, Shigella flexneri
atgcgcaactctccggtaactcaggatagttggataagctgtagtgagagaatgcctgtaatcggcgagctaaattggagaactagttttcctttgctgattacgtgtgagatcggcgttataccagcttattacggctttgtgagcgttaatgggaataagcattatggttttatggagagtcttaaatacggagacgataacggcaaccatcctcaaactaatgaatatggtctgattagcaatgtaacccactggatgccactaccagagcctccactttga

SEQ ID NO: 477888 - DNA, 693 bp, Shigella flexneri
atgttatatgcatttaagctgggcagaaaactgcgcggcgaggaaccttggtgccctgaaaaaggcgggaaaggtggtagctctgataaaagcgcaaagtatgcagcagaagcccagaagtatgccgcagacctgcaaaatcagcagtggcagacgatcatgaaaaaccttgctccgttcacgcctcttgcggagcagtatgttaaccagcttcagaacctttccagtttagaaggtcaggggcaggcacttaatcagtattacaactctcagcagtataaagaccttgcagggcaggcgcgttaccagagtcttgctgctgcggaggcgacgggtggacttggttcgacagccacaagcaatcaactggctacgatcgcgccgacactcggtcagtcttggttatcaaatcagatgagcaattacaacaatctggcaaacgttgggcttggtgcgctgcaaggtcaggcaaacgccgggcagacgtacgccaacaacatgagcagcattgcacagcaaagcgcagctcttgccgctgctaatgccaataaaccatcaagtcttcagactgcaattagcggtggcacgtctggtgcgattgccggtgcaggtcttgccagccttttgggaacatcaacgccttggggcgctggcattggtgctggtatcggattgcttggctcgttgttttaa

SEQ ID NO: 477889 - DNA, 273 bp, Shigella flexneri; identical to SEQ ID NO: 474355

SEQ ID NO: 477890 - DNA, 1032 bp, Shigella flexneri; identical to SEQ ID NO: 474356

SEQ ID NO: 477891 - DNA, 366 bp, Shigella flexneri
atgattgatgtcttaggaccggagaaacgcagacggcgtaccacacaggaaaagatcgctattgttcagcagagttttgaaccgggaatgacggtctcccttgttgcccggcaacacggtgtggcagccagccagttatttctctggcgcaagcaataccaggagggaagtcttactgctgtggccgcaggagaacaggtcgttcctgcctctgaacttgctgctgccatgaagcagattaaagaactccagcgcctgctcggcaagaaaacgatggaaaatgaactcctcaaagaagccgttgaatatggacgggcaaaaaagtggatagcgcacgcgcccttattgcccggggatggggagtaa

SEQ ID NO: 477892 - DNA, 366 bp, Shigella flexneri; identical to SEQ ID NO: 462994

SEQ ID NO: 477893 - DNA, 960 bp, Shigella flexneri; identical to SEQ ID NO: 474419

SEQ ID NO: 477894 - DNA, 1767 bp, Shigella flexneri
atgtctgactttggtaatggacttgctgaaaccgggcgcggcttactacaggcaggaatcaacgtagcgaacatacctgctgaactcactgatgctgtaacaagcgcggcggcttgggctggcggtaaactcgttattggcgatggtacatatcaaccagcgccacgagtaacaacgcagggattagagcaggactttggccttcagcaaggcgcgctgactccacaaacgacagagggaagggtatttgctgaagcattgccttacctcactcctgctggcgttgagagagcggcagcacaggcaccaacacttgctggtcgaattgctcagggggcaactcgccttctcgctgaaaacgcagttggatcacttgctgcaaatagtgcgaaagatgatgcggaagcactcgccaccgatttaggcgttggcgttctggctggcggcgctattaactctgccggacgtggattaggcgctgcttatcgtggcgttcgtggtgctattgcaccagaagcgcagcaagctatcagatttgcagagcgtgaaggagtgcctctgcacaccacagacctgttacaaccaacttcccgcgtcggaaaaatggcgcagactacagcagaaaatatccctctggctggcacaagcggaatgagagcaacgcaacaggaagcgagaagccagttggtgcagagatttgctgataaattcggtgagtatgatccagctgttgttattgacagccttaaagcgaaaacatcaggaattcgtcgtgctgctgggaaccgtcttgagcaggtacagaatgcaatggcaggaatcaacattcaacctgccagagcaattcagcagatagatactgagatatctaacctgcagaagcttggtaaggtcgctgataacgagacgatttcaaaacttcaatcctatcgtgatgagcttattcgcaatgctggtcctgatggtccggtaaatctggatttgaagcaattaagcgatctacgcagccagttcagaatggacgtgaagggtgagagaccagtgctaccaaaccgttccgatgccgccattcagcgcgtttacaagtcgatgacagacgatatcaatggtgccattggtcagaatcttggcaatgatactctccgtaaatatcagcaggccaatgccgtctacgctgacgaagcggcgaaactaaagaataccaggctgaagaatgttctcatgaaaggcgacctgacaccggaagttgtcaacaacatgctattcagcaagaacaaatcggaaattaagacgctgtataactcagttggtcgtgttggcagggcgcaaatgcgcaatggcatcattggaaaggcgatggagaaatctggcggatcccctgaccagttccttcgacagcttaacatcctgcaaaaccagactggcatcacatttaaggggcaggacgctgcttatctgaaaggattgaaaaactacctgcaatccacgcagcaggctgcaaaagcggcagtaacaacaccaacagggcagcaaaccatcccgttcattatcggatatgggacagcaatgaaccctgcgacaactggcgcagcggtaagctacggacttcttactcgcgcatatgagagcgagccattcagaaatgcaatgctccgaatggcaaacaccccacgcggatcaacagcctttgagaaagccatgcagcaagcgcaaaaagcgattaatgcactgacgcagggtgctaagtctgatgcgttgtcagaatag

SEQ ID NO: 477895 - DNA, 366 bp, Shigella flexneri; identical to SEQ ID NO: 462994

SEQ ID NO: 477896 - DNA, 744 bp, Shigella flexneri
atgcaactgctggaagtaatccgcagatttgaagatcgcggtgcaatggagcgagccaacaaagcccgcagaagatgcggcgaggttttccgttacgctattgtcaccggaagggctaaatataacccggcacctgaccttgcagacgccatgaaaggataccgcaagaaaaacttcccatttttacctgccgaccagatcccggcattcaacaaagcacttgcaacattttcaggaagtatcgtatcgctcattgcgaccaaagttttacgctacacagccctaagaacgaaagagcttcgttccatgcaatggaagaacgtcgattttgaaaacaggattatcactatcgacgccagtgtgatgaagggacgcaaaattcatgtggttcctatgtcagaccaggtgattgaacttctcactacgctaagctcaatcactaaaccagtgtcagagtttgtttttgccgggcgcaacgataagaagaagccaatttgcgagaacgctgtactacttgtgatcaaacaaatcggctatgaaggtctggaaagcggtcacggattcaggcatgaattcagcacgattatgaacgagcacgaatggcctgctgacgctattgaagtgcaactggcacatgccaacggcggatctgtgcgtgggatttacaaccatgctcagtatctcgataagcgcagagaaatgatgcagtggtgggcggattggcttgatgagaaggttaggtag

SEQ ID NO: 477897 - DNA, 2031 bp, Shigella flexneri; identical to SEQ ID NO: 474425

SEQ ID NO: 477898 - DNA, 525 bp, Shigella flexneri
atgttgacgcgctgtgagctgaccagcgaggcgaaggcggcagaagctgcaatacgtctgtgtaaagagctgggagatcagtcggtcgtgattagcggtgacacgaggctggaggaattggggattagtgaacgtttgcagcaggaatgcaatgccgttgtttgggatccggcgaaaggtgccgagaatatctcgcaggcagagcaggctaaagtgggtgtcgtgtatgctgaatatggtttaaccgaatcgggaggcgtggttcttttttccgccgccgagcgcgggcgttcattgagcctgctcccggaatcttctctttttatcctgcgtaaaagcacaatcctgccgcgtgtagcgcaactcgcagaaaaattgcatcagaaagcgcaggccggtgaacgaatgccgtcatgtattaacatcatcagtggtcccagctcaacggcggatattgagcttatcaaagtcgtcggggttcatggtccggtgaaagcggtgtatctgattattgaggattgctga

SEQ ID NO: 477899 - DNA, 303 bp, Shigella flexneri; identical to SEQ ID NO: 473532

SEQ ID NO: 477900 - DNA, 189 bp, Shigella flexneri
atgatcaatgatatacgcatttgcaccaaaatcaacagtgtgatgttttgtattcagggggtgttttttctgatggttagagatttcaacgccaaaaaacacaaagtcatgattagctattttttttatatcatcagcgtatgtgtttcgttttgtgcatattccttcagactgaattttattgaatga

SEQ ID NO: 477901 - DNA, 627 bp, Shigella flexneri
atgattgacgtcatcggtcacgcaataagcggtacgcaggagcgtgaattatctctggctgaattatcctggtgggcggtccgcaatcaggtggcggacgcgctaccggaagcggtattacgtcgttcgctggggttgcgtgcggaaaaaatccgctcaatgtaccgtgaaagcgacatcgtaccgggagagcagaccgccaccagcatactgaaacagcgcacaaaaaatcttgcgccgctgcctcacgcccaccagcaacagaatccaccacaggaagagacggtggtcagcattgccgttgatccggaatctccggctcagtatctccagcgccagaaaccacaacgggaagagatgcctgtatacacgcgctgggtaaaaacgcagaaatgcatgacgtgtggcaatcaggcagatgatccgcaccacatcattggtcatggactgggagggatgggaacaaaggctgacgatttgtttgttattccgctgtgtcgtaaatgccataacgaactacacgccggggtaaaagattttgaagaaaaacacggtagtcagttgttgttgctgattcgttttttaatgcacgcgagaaattcgggtgttctgaagtggaaagcataa

SEQ ID NO: 477902 - DNA, 366 bp, Shigella flexneri; identical to SEQ ID NO: 474398

SEQ ID NO: 477903 - DNA, 690 bp, Shigella flexneri
atgaataaccagtatttacagtttgtgcgtgagcagctcattatcgccaccgctgatttgagtggggcaacaaaaggtcagcttgaagcctggcaagagaatgccatgttcgatacagggcgttacaggcgtaaaaaaatccggtaccgcgatgaagtgactggaaaaatgataacgcgggataatccaccaatcccgggaaaacaatcactggcgaagggggcgtcaattcctctggtcagtcaggttgcgttttcgacatcatcgtggcggcgggctgttctgtctcttgaagagcactataaagcctggttgttgtggtgttacagcgggagtatttgttgggaatatcagatcgcgataacacagtgggcgtggaatgaatttaatgctcaatccggtaccagaaaaattgcagggaaaacgcaggaacgcctgaaaaaattaatctggctggcggcgcaggcagtaaaagcagaactttttggtggggaaggttatgaataccaggagctggcattactggcgggagtgacaactaaaaactggtccaaaacatttactcgtcactgggttgcaatgaaacacatttttcaccgactggatagtgaggctttattgtttgtgatgagaacacgttcagaacaaaaagcggcattttcaaagcaaagtattgcaaaagtagattaa

SEQ ID NO: 477904 - DNA, 327 bp, Shigella flexneri; identical to SEQ ID NO: 473546

SEQ ID NO: 477905 - DNA, 303 bp, Shigella flexneri; identical to SEQ ID NO: 473532

SEQ ID NO: 477906 - DNA, 291 bp, Shigella flexneri
atggtggatttacttaaagcggcgcgggggcagatgtgcaccgtcagaattcctggctactgcaatcacgatccggaaacgtctgtgctggcgcattaccgactggcgggaacgtgcggaacagcgataaagccacacgatatgcaggcagcgattgcctgtagctcgtgccacgatttaatcgacgggcgggtaaaaaccagcgattacaccaaagaagaattacgcctgatgcatgcagaaggtgtttttcgcacacaagaaatctggagaaaggagggatatttatga

SEQ ID NO: 477907 - DNA, 483 bp, Shigella flexneri; identical to SEQ ID NO: 474711

SEQ ID NO: 477908 - DNA, 210 bp, Shigella flexneri; identical to SEQ ID NO: 9340

SEQ ID NO: 477909 - DNA, 303 bp, Shigella flexneri; identical to SEQ ID NO: 473532

SEQ ID NO: 477910 - DNA, 372 bp, Shigella flexneri
gtggtgtgggtcggtaaggatgtgacaggcattgaaccccgtaacgccagtgttattgaagttcctgatattaccgccaaccgccgcattaccgcgccgggttactggttttaccgcaatgatgaatttgtctttgactacagactcaaagcggaagatgagcgtgatgcccttctggctcaggtcagtgcccggacaggggaatgggaagaagacctgttgctggggctaatcagcgacgaagaccgggaaaaactgaaagcgtaccgcatttacgcgaaatcgctgcaggcgatggatttcagtgtcatcactgataaaacctcatacaacgccattgaatggcccgcttctccggaaatttcttcctga

SEQ ID NO: 477911 - DNA, 153 bp, Shigella flexneri; identical to SEQ ID NO: 474734

SEQ ID NO: 477912 - DNA, 807 bp, Shigella flexneri; identical to SEQ ID NO: 477023

SEQ ID NO: 477913 - DNA, 327 bp, Shigella flexneri; identical to SEQ ID NO: 474582

SEQ ID NO: 477914 - DNA, 267 bp, Shigella flexneri; identical to SEQ ID NO: 462029

SEQ ID NO: 477915 - DNA, 225 bp, Shigella flexneri; identical to SEQ ID NO: 468765

SEQ ID NO: 477916 - DNA, 267 bp, Shigella flexneri; identical to SEQ ID NO: 462029

SEQ ID NO: 477917 - DNA, 180 bp, Shigella flexneri; identical to SEQ ID NO: 474761

SEQ ID NO: 477918 - DNA, 828 bp, Shigella flexneri
atgttgttcggccagagttcagagaaaaagcgtcataagcttgaaaatcagatccgacaggcagaaaaacgactgtcggaactggaaaaccggctgaacacagccagaaatcttctggaagatgcatcgtcagtcacagattcacctgacaccagtcccccgtcagaaaacccgatcgccagtaagcctgaatccccgggacgaaaatcttcacgaaaaccgctgccggcagaacttccccgggagacacatcgccttctgcctgctgaaaccagttgcccggcctgtggaggtgttctgaaagaaatgggggaaacaatctcagagcaactggatatcattaataccgcctttaaagttatcgaaaccatacgtcccaaactggcctgtagccggtgtgatgtcatcgttcaggcaccacttcctcctaaaccgatcgaacgcggttatgccagtgcagggttacttgcacggatcctggtcagcaaatatatggaacatatccctttatatcgccagtcagaaatatacgcgcgacagggcgtggagctgagccgtaataccatggtgcgcagggtatcagaaatggcagacaaactccgtcctctgtatatagcgctgaatgactatgttctggaggcaggaaaggtgcacgcagatgacactccggtgaaagtactggccccggggaacggaaagacgaaaacgggtcgtctgtgggtatacgtcagggatgatcgtaatgcgggttcatccctagactggcccctgaatctccagacaaccagtatcacttatttaagtgatagtcttaatactagtttttag

SEQ ID NO: 477919 - DNA, 126 bp, Shigella flexneri
atgtctctggcgcaatgcccgggctttttattcgcacatcgtgaggaatgcactgtggaaattaaaaaaatcattaatccccgttataccgaaagtggcgcagtagactgtgacgtttttttttga

SEQ ID NO: 477920 - DNA, 510 bp, Shigella flexneri
gtgacgtttttttttgacgacagggaccaggcagtcccctacacagccaccgctgatgatgtcgcaccgacgggtcagcaaatctggcaggaactgcaaagtggcaaatggggtgagatagccccattcactgtgacaccagaaatgctggaagcggccagagaggccagacgtcaggaaattgaagcatggcgcacagaacaggaggcgaagccgttcacgtttgaatggaacggtcgtatctggaatgctggccccgactcactgggccgcctgtccccggtagtcatgctggcaaaatctgtcacagcacaaacacatatggcgtggagcgatgccgataatcagcaggtgaaactgtcgatgccggaactggaagaactggcggcagcaatggtgcaggcgcaggtcgatcgcaacgatgagatttatcgccgtcagcgtgaaatgaaagaggagctgagcggtctggatgatttggcttcaattcgggcgtttgacgttgagtaa

SEQ ID NO: 477921 - DNA, 195 bp, Shigella flexneri; identical to SEQ ID NO: 464447

SEQ ID NO: 477922 - DNA, 303 bp, Shigella flexneri; identical to SEQ ID NO: 473532

SEQ ID NO: 477923 - DNA, 195 bp, Shigella flexneri; identical to SEQ ID NO: 464447

SEQ ID NO: 477924 - DNA, 216 bp, Shigella flexneri; identical to SEQ ID NO: 474400

SEQ ID NO: 477925 - DNA, 210 bp, Shigella flexneri; identical to SEQ ID NO: 476021

SEQ ID NO: 477926 - DNA, 279 bp, Shigella flexneri
atggaagttggccttcaacgtgcaagtgctgaacgttcaattgatttcgtattttctaaagatgcaaatcaagtaaaagatttcacaaagtcattagctcaaacaacgggtttagatatcgctgaactgcaatcacagtttgctggtttcggtgcttcagctagagagtctctaggcattcaaggttctgaagaactttttagaaatatgattggctattctcgtctgatggggcgaagtgaagaagagattaagcgagcactgacagcattatcatag

SEQ ID NO: 477927 - DNA, 306 bp, Shigella flexneri
atgttgcaggagcatgcgacatggcctgatggcggtaacgctgttgagccaggcatcactgaattgcgcgacatgatgctcgatggtcgcttcaaagtattcaacacctgtgagccattctttgaggagttccgcctctatcaccgtgatgaaaacgggaaaatcgtcaagcttaacgacgacgtgctatccgccgttcgctatgcatacatgatgcgccgcttcgcaaaaatgatgcgcgacatcaaaaaaccaaaagagaaaaagataccagccccaatcaggcccatcgcacggagaacttaa

SEQ ID NO: 477928 - DNA, 267 bp, Shigella flexneri; identical to SEQ ID NO: 463627

SEQ ID NO: 477929 - DNA, 642 bp, Shigella flexneri
gtgtatatcatcgactccggtcaggtatcaccaatcgccagcgcgagcattgagaaaatcctccgttcctacactgctgatgaactggctgatggtgtgatggaatcgctgcgatttgatgctcatgagttgctgattatccatcttccgcgccatgtcctcgtatacgacgcatcttcaagcgccaatggtccacaatggtgtgtactgaaaacaggcctgtatgacgatgtgtaccgcgctatcgacttcatttacgaagacaatcagataacgtgcggcgataagctggaatcggttaccggcaaattgcagttcgatatcagcagccagtacgacaagcaacaggaacacctgctgtttactccgttgttcaaagcggataacgccagagttttcgaccttgaagttgaatcgtcaactggagttgcgcagtatgctgaccgcctttttctctctgcaaccactgacggcataaattacgggcgtgagcagatgattgagcagaatgaaccgttcgtttacgacaaacgcgttttgtggaagcgtgtcgggcgaatcaggaaaaatgtcggcttcaaattgcgcgttatcacgaagtcacctgtcactctgtctggctgccagataaggatcgagtaa

SEQ ID NO: 477930 - DNA, 279 bp, Shigella flexneri; identical to SEQ ID NO: 127146

SEQ ID NO: 477931 - DNA, 168 bp, Shigella flexneri; identical to SEQ ID NO: 461648

SEQ ID NO: 477932 - DNA, 444 bp, Shigella flexneri
atggctaaccatctgtcagaaatcgcagcagcaggcgaaaaggcacaacagaagtcccgggataatctggggctgaaaagtgcggccacgatggaagcacagagcgacatttacgaccggacaaaaggccgtctggcgatacccggcgcattcggctttgggtgtgcttttctgcctgaagatgttatccgttttgacactaagagtgatttcctggcctgggtaaggaatgcgctgccaggtgaatattccgttgctggcccctacggcatcatcatacccgacacacggtttgaaggggtgctcagcatccggtggactgatgcacgccctgagacaacagaaccgcggtacagagccaaatcccttactttttacggcattaacggccccatttatcacacccgctaccgctactggcccatatccagactgactgggtga

SEQ ID NO: 477933 - DNA, 501 bp, Shigella flexneri
atgaacctgacaacgaagggtgatttagttcttgcggcattacgtaagctcggtgtggcatcaaatgccacgttaaccgatgtcgaacctcagtccatggaagatggtgtcaacgaccttgaaatgatgatggctgaatggcttggcggtgatgcgtcaccaggtatcaacgttggctacattttcgctgatgcagatgtcgctccggatccgggcgatgagcacggtttatcaaataacgctatcaatgccgtcatttttaaccttgcctgccgcattgctccagattatgcgctggaagcgtctgcaaaacttataaccactgccagatacgggaaagagcgactcgtcaaactgtctgcaatggacagggcaaaagcagctaaatgtaagtccggttatccaaaccgtatgcctgttggtagtggtaaccagttggcgaagtggaatggttggaattacttccaccgaaaggaaccttgcgataacgggagcgaataa

SEQ ID NO: 477934 - DNA, 300 bp, Shigella flexneri; identical to SEQ ID NO: 475664

SEQ ID NO: 477935 - DNA, 543 bp, Shigella flexneri
atgaacaatgaactccccgatgatattgagctgcttaaagccatgttgcgtaagcaacagagtcggcttcgacagtatgcctgtcaggtcgcgggctatgagcaggaaattgaacggctgaaagcgcaactcgacaggttgcgtcgtatgttgttcggccagagttcagagaaaaagcgtcataagcttgaaaatcagatccgacaggcagaaaaacgactgtcggaactggaaaaccggctgaacacagccagaaatcttctggaagatgcatcgtcagtcacagattcacctgacaccagtcccccgtcagaaaacccgatcgccagtaagcctgaatccccgggacgaaaatcttcacgaaaaccgctgccggcagaacttccccgggagacacatcgccttctgcctgctgaaaccagttgcccggcctgtggaggtgttctgaaagaaatgggggaaacaatctcagagcaactggatatcattaatactgaaccgccccgggaatcctggagactaaacttcctgagaaagaggtaa

SEQ ID NO: 477936 - DNA, 558 bp, Shigella flexneri; identical to SEQ ID NO: 473961

SEQ ID NO: 477937 - DNA, 303 bp, Shigella flexneri; identical to SEQ ID NO: 473532

SEQ ID NO: 477938 - DNA, 303 bp, Shigella flexneri; identical to SEQ ID NO: 473532

SEQ ID NO: 477939 - DNA, 327 bp, Shigella flexneri; identical to SEQ ID NO: 475432

SEQ ID NO: 477940 - DNA, 234 bp, Shigella flexneri; identical to SEQ ID NO: 28524

SEQ ID NO: 477941 - DNA, 210 bp, Shigella flexneri
atgacggatggctgtccgctgtatgaatcacgcctgaagggaaagctgcacgttatcagcaagcgttacactcagcgcattgagcgacataatctgaatctgagacaacatctggcaaggctgggacggaagtcactgtcgttctcaaaatcggtggagctgcatgacaaggtcatcgggcattatctgaacataaaacactatcagtaa

SEQ ID NO: 477942 - DNA, 441 bp, Shigella flexneri; identical to SEQ ID NO: 477631

SEQ ID NO: 477943 - DNA, 318 bp, Shigella flexneri; identical to SEQ ID NO: 477629

SEQ ID NO: 477944 - DNA, 210 bp, Shigella flexneri; identical to SEQ ID NO: 476166

SEQ ID NO: 477945 - DNA, 276 bp, Shigella flexneri
atgtcctggattatcttagttattgctggtctgctggaagtggtatgggccgttggcctgaaatatacccacggctttagccgtttgacgccgagtgttattaccgtgacggcgatgatagtcagtatggcgctacttgcctgggcgatgaaatcgttaccggtagggacggcttatgccgtgtggacgggtattggcgcagtcggcgcggccataccggcattgtgctgctcggtgagtccgctaacccgatgcgtctggcgagtctggcgttaa

SEQ ID NO: 477946 - DNA, 297 bp, Shigella flexneri; identical to SEQ ID NO: 475195

SEQ ID NO: 477947 - DNA, 927 bp, Shigella flexneri
gtgaaagaagcaccgattggtatcgaggtcatccccgcgcacgtcactgaatatctgaacaaggtactgactgaaaccgatcatgccaaccctgatccggaaatcgtggatattgcctgcggtcgctcctctgccccgatgccgcagcgtgtaacagaagaaggaaaacaggatgatgaagaaaaaccgcagccatctggcgcaatggcagatgaacaggcaacggctgaaacaatggaaccggatgcaactgaacatcatcagaacacgcagccgctggatgctcagtcacaggtaaattctgttgatgagaaatatcaggaactgcgggcagaactccatgaagcccggaaaaacattccgcccaaaaatcctgtcgatgcagacaaattactggctgcctctcgcggagaatttgttgaagggattagcgacccgaatgatccgaaatggattcccggtcatcatatctcctcaaatgaagtcaaaaaaacggaaaatgaagtgcgacagactgaagataaacagcaccagaacagcgaaccggaggagggaacaccctgcaatcagactggcgaggataactgccctgactgtggcgcggtgatgggagacgcaacttatcaggaaacttttgacgaaaaaaaaccagatgaagcacaggaagaagagccgaagaaaacggaaaaagctgatgatttgttaccggagaacgctggcagcgatcagcataatgatagcaataatgaaactggcgaagatgaactcaactggaaaaaacaggtgttgattgcggcggtttacggtttatgtgcgaatcctgcgtgcatagcctatgcgcctgcaatccctgacatcgcaatgatgattgccaacaagcttgaaaattttggagtgaccagtgatgagcgcttacccgatttttga

SEQ ID NO: 477948 - DNA, 375 bp, Shigella flexneri; identical to SEQ ID NO: 475895

SEQ ID NO: 477949 - DNA, 606 bp, Shigella flexneri
atggaactgcttttattgagtaactcgacgctgccgggtaaagcctggctggaacatgcactgccgctaattgctgaacagttgcagggtcgccgctcagcggtgtttatccctttcgctggcgtaacgcagacctgggatgattacacagagaaaacggctgcggttctcgctccgctgggtgtttctgtcaccggtattcatagcgttgtcgatcccgttgccgcgattgaaaatgcggaaattgtgattgtcggcggcggtaatactttccagttgctgaaacagtgccgcgagcgcgggctgctggctccaattactgacgtggttaaacgtggcgcgctgtatattggctggagcgcaggcgctaaccttgcttgcccaaccattcgtaccaccaacgatatgccgattgtcgatccgcaaggtttcgatgcgctaaatctgttcccgttgcaaatcaacccgcacttcaccaacgcgctgccggaaggtaactggatcacagtgagtaaaggtcacgctacgctgggtggcccgaacaccacttatgtgtttaaggctggtgaagaagcggttccgctggaagctggtcaccgtttttaa

SEQ ID NO: 477950 - DNA, 3669 bp, Shigella flexneri; identical to SEQ ID NO: 477485

SEQ ID NO: 477951 - DNA, 210 bp, Shigella flexneri; identical to SEQ ID NO: 477941

SEQ ID NO: 477952 - DNA, 576 bp, Shigella flexneri; identical to SEQ ID NO: 477579

SEQ ID NO: 477953 - DNA, 375 bp, Shigella flexneri; identical to SEQ ID NO: 475895

SEQ ID NO: 477954 - DNA, 219 bp, Shigella flexneri
atgtcatatttttattctgcatcgacaaacggattttattcgactgaatttcacggcaccaatattcctgatgatgcagtggaaatctcggaatcagagtggaaaacactgattaatgcacagagtgtaacaaaaatgggtaatgactccaacttactgatagtgttttatgttcagataatgcccgatgaccttgtcatgcagctccaccgattttga

SEQ ID NO: 477955 - DNA, 210 bp, Shigella flexneri; identical to SEQ ID NO: 477941

SEQ ID NO: 477956 - DNA, 375 bp, Shigella flexneri; identical to SEQ ID NO: 475895

SEQ ID NO: 477957 - DNA, 531 bp, Shigella flexneri; identical to SEQ ID NO: 477592

SEQ ID NO: 477958 - DNA, 330 bp, Shigella flexneri
atgaaaaacactgagatgattaactggtactttcctcggttacttaagagttatgagggcgaaaaaaattattttgataatttaaaatatgatataaatgatgaggaatctaataaagaaattttgaagaatcaaccagataatgttatcaaagaaaaactgaataatgaattcaaacttagatttagaatgatgcaaactatctttaaatcgaaggttaatgtatcgccatatattgaccaacagcgtttaaatacactaaatcctccggaaaatttacgtatggcaatagaaaaatttggctggaagaaaaaaactatcactgcataa

SEQ ID NO: 477959 - DNA, 213 bp, Shigella flexneri; identical to SEQ ID NO: 477598

SEQ ID NO: 477960 - DNA, 162 bp, Shigella flexneri; identical to SEQ ID NO: 477669

SEQ ID NO: 477961 - DNA, 249 bp, Shigella flexneri; identical to SEQ ID NO: 477787

SEQ ID NO: 477962 - DNA, 312 bp, Shigella flexneri; identical to SEQ ID NO: 477633

SEQ ID NO: 477963 - DNA, 1683 bp, Shigella flexneri
gtgttaagaagcatttattccaactcaatgaatgcgtatgccaaaagcgagattctcgaattttcaaatgttttgtactccttagtacatcaaaatggtcttaattttgaaaacgaaaagggacttcaaaaaattgtcgcacagtattcggaactaattataaaagataaattatcccaagattctgcctttggaccatggtcggcaaagaataagaaactccatcaattacgacaaaacattgagcacagacttgcactattagcacaacaacacacatctggtgaagctttatcattgggacaaaaactcctcaatactgaagtatcatcatttatcaagaataatattcttgctgaattaaagttaagtaatgaaactgtttcatctctcaaactagatgatttagttgacgcacaggcaaaacttgcctttgatagtttgcgcaatcaacgtaaaaatactattgatagtaaaggatttggtataggtaaactgtcaagagacttaaatacagtagccgtgtttcctgagctgttgagaaaagtccttaatgatattttagaagatataaaagattcgcatcctatccaagatggcctccctacacctcccgaagatatgccagatggcggaccaacccccggagccaatgagaaaacatcccaacctgtaattcactatcatataaataatgataatagaacttacgataatagagtttttgacaacagagtatatgacaatagctatcacgagaacccagaaaatgatgcacagtctcctacttctcagacaaacgatctattatcccgtaacggaaactcattactaaatccacaaagagcactagttcaaaaagtaacttccgttctaccacactctatatcagatactgtccagacatttgcaaataattcagctttagaaaaggttttcaaccatactccagataattcggatggaataggttcagacctgttaactacgagtagtcaagaaagatctgcaaataactctctttctcggggacacaggcctctgaacatacagaactcttcaaccaccccccctctccacccggaaggagtgacaagcagtaatgataactcatcagatacaactaaaagtagcgcttctctttctcatagagtagcttcgcaaatcaataaattcaactcaaacactgattcaaaagtacttcagactgattttttatcaagaaatggagacacatatttaacacgggaaacgatatttgaagcttcaaaaaaagtaacaaactccctaagtaatcttatatctctcattggaactaaatcaggaacacaagaacgagagttacaggaaaaatcaaaggacattacaaaatccacaacagaacacagaataaacaacaaattaaaagttacagatgcaaatataataaactacgtaacagaaaccaacgcagatacaattgataaaaatcatgcgatctatgaaaaggcaaaagaagtatctagcgccctcagcaaggtattgtcaaaaattgacgatacctctgcagaattacttacagatgatatatctgatttaaaaaataacaatgatattacagctgaaaacaataatatatataaagcagcaaaagatgtaaccacttccctatcaaaagtattaaagaatatcaataaggattaa

SEQ ID NO: 477964 - DNA, 219 bp, Shigella flexneri
atgccagagctgcgctgttttcgtgaacacgcggcggacagcctcacttcccaggcgctggcgggcctgaataacggcactgggggcaacgaaggggcgattgcccggcagcatgatgtccaggcgattcacaatctggtgaagaggttctttacgctcaagcgccatgccaacaatacaccagaccatcatttcgaggggaagacggcgcttgcgtag

SEQ ID NO: 477965 - DNA, 771 bp, Shigella flexneri
atgatgagtatcgcgcaggtcagatcggccggaagtgccggtaattattataccgacaaggataattactatgtgctgggcagcatgggagaacgctgggccggccagggggctgaacaactggggctgcagggcagtgtcgataaggatgtctttacccgccttctggagggcaggctgccggacggggcggatttaagccgcatgcaggatggcagtaacaggcatcgtcccggctacgacctgaccttctccgctcccaaaagtgtctccatgatggccatgctcgggggggacaaacgtcttattgaagcacataaccaggccgtggattttgctgtccgtcaggtggaggcactggcctccacacgggtgatgacggacggacagtcagaaacggtgctgaccggtaatctggtgatggcactgtttaaccacgacaccagtcgcgatcaggaaccacagttacacacgcatgcggtggtgactaatgttacgcagcataacggcgaatggaagacactgagcagtgacaaagtggggaaaacggggttcattgagaatgtgtacgctaatcagattgcctttggcaggctctaccgggaaaaactgaaagagcaggttgaggcgctgggctatgaaactgaagtggtcggtaagcacggtatgtgggaaatgccgggtgtaccggcgctcacagactatccgggaggccgtcggggaagacgcctcgctgaaatcccgggatgtggcggcgctggatacgcgtaa

SEQ ID NO: 477966 - DNA, 480 bp, Shigella flexneri
gtggcggacctgacgtatgttgccacacaggagggatggttgtacctcgctggcatcaaagatgtttatacgtgtgaaattgtcggctacgccatgggagagcgcatgacaaaagagctgacaggtaaagccctgtttatggcgctcaggagccagcgcccacctgccgggctaatccaccactctgatcgaggttcacagtactgcgcatacgattaccgggtcatacaggagcagtctggtctgaaaacatcaatgtcgcgtaaaggtaactgttacgacaacgctccgatggaaagcttctggggaacgctgaaaaatgagagcctgagccactatcgttttaataaccgggatgaagccatctcagtaatacgggaatacattgagattttctacaatcgtcagcgtcgtcactctcgtctggggaatatctccccggcagccttcagggaaaaatatcatcagatggctgcttaa

SEQ ID NO: 477967 - DNA, 1296 bp, Shigella flexneri
atgaaaacaatcactttaaacgacaaccatattgcacatttaaacgccaaaaacactacaaaactggaatatttaaacttaagcaataacaatttactgccaaccaatgacattgatcaactaatatcatcaaaacatctttggcatgtattagttaacggcatcaacaatgatccacttgcacaaatgcagtactggactgcagtaagaaatataattgatgacactaatgaagtgaccattgatttatcaggacttaatttaaccactcaaccaccagggctgcaaaacttcacctctatcaatcttgataataaccaactcacacattttgatgcaaccaactacgatagactcgtaaagctaagtctgaatagtaatgctcttgagtcaataaattttcctcaaggcagaaatgtaagtattacacatatatctatgaataataatgctctcagaaatattgatatagataggctttcatcagttacttattttagtgcggcacataatcaactagagtttgtgcaattagaatcttgcgaatggctgcaatacctgaatctcagccataatcaattaactgatattgttgcaggtaataaaaatgaactcttactgctggatctatcccataataaactaacaagtttacacaatgtcttatttcccaacttgaatacgttacttattaacaacaatttgctttctgaaattaaaatattctatagcaacttccgcaatgttcagacattaaacgctgctaacaaccagttgaaatatataaatcttgatttcctgacttatcttccatctatcaaaagtttaagactggacaataataaaataacccacattgatactaataatacatccgatattggaactttattccccataataaaacagagcaaaaacttaaattttttaaatgtttctgggaagaacaattgccctactatgcagctcatgttatttaatttgttttccccagcacttaagcttaatactggcctggcaattctttcgcctggtgcatttgaagttcactctgacggaatagatgtggataacgaattgtttcactatactattaaaaaagcatataccccatataatatacacacttacaagacagaggaagttgtaaaccagaggaatataaaagttaaaaacatgaccttagatgaaataaacaatacttactataataacgattattacaatcaggcaataagagaggaaccgatagactttctggacagatcgttttcctccaattcatggcctttttag

SEQ ID NO: 477968 - DNA, 945 bp, Shigella flexneri; identical to SEQ ID NO: 475096

SEQ ID NO: 477969 - DNA, 210 bp, Shigella flexneri; identical to SEQ ID NO: 477941

SEQ ID NO: 477970 - DNA, 168 bp, Shigella flexneri
atgtcggtgcatctttttgagtttttattgtttcttattgtgactcattttgagtctatgtcaagcggtgttgctcttttagagtctctttatgttcttgttgtggttcattttgagttcttattggtttctcattttgcgccacgaactgagacggatactacttaa

SEQ ID NO: 477971 - DNA, 864 bp, Shigella flexneri; identical to SEQ ID NO: 477729

SEQ ID NO: 477972 - DNA, 210 bp, Shigella flexneri; identical to SEQ ID NO: 477941

SEQ ID NO: 477973 - DNA, 375 bp, Shigella flexneri; identical to SEQ ID NO: 475109

SEQ ID NO: 477974 - DNA, 303 bp, Shigella flexneri; identical to SEQ ID NO: 473532

SEQ ID NO: 477975 - DNA, 747 bp, Shigella flexneri
atgaaaaatattgcgacaggcggcgttttggaacgcatccgccgactgaccccgccacatgtaaccgccccattcagaacggtagcggagtggcgcgagtggcaacttgctgaaggccagaaacgtagcgaggagatcaaccgcctgaatcgccagttgcgggtggaaaaaattctgaatcgctcaggcatccagccgttgcaccgtaaatgctcgtttgcgaattaccaggtgcagaacgacggccagcgatacgcgttaagccaggcgaaatccatcgccgatgaactgatgaccgggtgtacaaattttgcgttcagcggaaaacctggtaccgggaagaatcacttagcggcagctatcgggaatcgcctgctgaaagacggtcagacagtgattgtggttaccgtggctgatgttatgagcgccctgcacgccagctatgacgacgggcagtcaggcgaaaaatttttgcgggagctgtgcgaagtggatctgctggttcttgatgaaattggcattcagcgcgagacgaaaaacgagcaggtggtgctgcaccagattgttgatcgccggacagcgtcgatgcgcagcgtggggatgctgacaaacctgaactatgaggtgatgaaaacattgctcggcgagcgggtgatggatcgcatggtcatgaacggcgggcgctgggtgaattttaactgggagagctggcgtccgaatgttagccattcgagggttgttaagtag

SEQ ID NO: 477976 - DNA, 600 bp, Shigella flexneri
atggcacatatacaactggtcaaacaaacctcttccggattacttctcccggcgacgccggagagttgcgattttctgcatcaaatcaaaataggtgagtggatacacgcagactttaagcgtgtgcgtaactacgcattccacaagcgttttttcaaactcctgcaactgggtttcgattactggactccggtcggtggggcgatcacgcctcgcgaacgaaaactggtgtccggtttcgttgattacctgtgtgaatcagtaggccgggaacatacgccagctctgagcgaagccgcagagcaatatctgaatacagttgcgacacgcagaacccgtgatacggctttgctaaagtcgtttgaggctttccgcgagtgggtagccattcaggccggattttacaccgagcatttttatccggacggtagccgtgggtgtcgggcgaaatctatcgcgtttgcgaatatggacgaaaccgagtttcagcaggtttataaatctgtactgaatgtgctgtggaactggattctgttccgtaaattttcctctccggaacaagtcgaaaatgtggccgcgcagctgctggagtttgcgtaa

SEQ ID NO: 477977 - DNA, 291 bp, Shigella flexneri; identical to SEQ ID NO: 477906

SEQ ID NO: 477978 - DNA, 2343 bp, Shigella flexneri
atggatacccaacgattccaatcccaatttcattggcatttatcgtttaaattttctggcgcgatagcagcgtgcttgtccctgtctcttgtgggaacagggcttgctaaagctgatgattcgcttccttccagtaactatgcgccgcccgccgggggaacattctttttgcttgctgacagcagttttagcagcagtgaagaggcgaaagtgcgactggaagcgccggggcgtgattatcggcgctatcagatggaagagtacggcggcgtggacgttcgcctgtatcgtattcctgacccgatggcatttttgcgccagcagaaaaacctgcatcgcattgtggtgcaaccgcaatatctgggcgacgggctgaacaatacgctgacctggctgtgggataactggtacggcaaatctcgccgcgtgatgcagcgtactttctcttctcagtcacggcagaatgtgactcaggcattacccgaattacatctcggcaatgccattattaaaccttcccgttatgtacagaacaaccagttttccccgctgaaaaaatatcccttggtggaacagttccgttatccactatggcaggctaaaccggtcgagccgcagcaaggggtaaaactggaaggcgcatccagcaatttcatctcgccgcagccgggtaatatttatattcctctcggccaacaagagccggggctgtacctcgtcgaggcgatggtaggtgggtatcgggcgacgacggtggtgtttgtttccgataccgtggcgcttagcaaagtgtcaggtaacgagcttctggtatggaccgcgggtaaaaaacagggtgaagcgaagcccggctcagagatcttgtggactgacggtcttggcgtgatgacccgcggggtgaccgatgacagcggtactttgcagttacaacatatatcgccagaacgttcatacattctgggtaaggatgctgaaggcggcgtttttgtctccgagaacttcttctacgaaagcgaaatctacaacacccgcttgtatatttttaccgatcgcccgctatatcgcgcaggcgatcgtgtcgatgttaaagtgatgggccgcgagttccgcgatccgttgcattcatcccccatcgtcagcgccccggcgaagctttcggtgctggacgctaacggcagtctgttgcaaaccgtcgatgtcacgctggatgcgcgcaatggcgggcagggaagtttccgcctgccagaaaatgccgttgccggaggttatgagttacgtcttgcttaccgcaatcaggtctatagcagcagttttcgagtggcaaactacatcaagccacatttcgagattggtttagctctcgacaaaaaagagttcaaaactggcgaagcggtcagcggcaaactgcaactgctctacccggatggcgagccggtaaaaaatgcccgcgtgcagttaagtttgcgcgctcagcaattatcaatggtcggtaacgatttgcgttatgccggacgtttccccgtgtcgctggaaggcagcgaaacggtgtccgacgccagcggtcatgtggcgttaaatctccccgccgccgataaaccgagccgctatttgttaaccgtctccgccagtgacggcgcggcgtatcgcgtcaccaccaccaaagagatcctcattgaacgcggcctggcgcattactctttaagtaccgccgcacaatacagtaatagcggcgagtcggttgtgttccgttatgccgcgctggaatcttcaaaacaggttcctgttacgtatgaatggttgcgtctcgaagaccgcacgagccatagcggagagctaccgtcaggcggcaaatcctttaccgtcaatttcgctaaacctggcaactacaatctgacattacgcgataaagacggcttaattctcgctgggttaagtcatgccgtcagcggtaagggcagcacggcgcatactggtacggtagatatcgtggcggataaaacgctgtaccagccaggcgaaaccgcgaagatgctgattactttcccggagccaattgatgaagcgttattgacgctggaacgcgatcgcgtggaacagcagtcgctgctttcgcatccggcaaactggctaacgctacaacgtttaaacgatacccagtatgaagcccgggttccagtgagcaattcctttgcgcctaacatcactttttcggtgctgtatacccgtaatggtcagtacagttttcagaacgccgggatcaaagttgccgttcctcagcttgatatccgggtgaaaacggacaaaacccattaccagcctggtgaactggtcaatgtcgaatga

SEQ ID NO: 477979 - DNA, 339 bp, Shigella flexneri
atgacacacaagagaattcctaaagattgggtaatcaaacgctcaactccgttcttcacaaaagagaacgtaccttcagcgttattaacacatcataatacagcagcaggtgtttttgggcagttgtgcgtaatggaaggcactgtaacatattatggttttactgatgagaatgctactgaaccggagataaaagtagtcattaatgctggcgcttttgcaacaagcccaccacaatactggcaccgtgttgaactaagcgatgatgctcagtttaatattaacttttgggtcgctccagacttttcgggcgaaaaagtctatagcaccaaaaaatag

SEQ ID NO: 477980 - DNA, 600 bp, Shigella flexneri
atggcgcatatacaactggtcaaacaaacctcttctggtttacttctcccggcgacgccggagagttgcgattttctgcatcaaatcaaaataggtgagtggatacacgcagactttaagcgtgtgcgtaactacgcattccacaagcgttttttcaaactcctgcaactgggattcgattactggactccggtcggtggggcgatcacgcctcgcgaacgagaactgctgtctggtttcgttgattacctgtgcgaatcagttggtcgggaacacacgccagccctgagtgatgccgcagagcaataccttaacaccgttgcgactcgtagaacccgggatacggcgttgctaaagtcgtttgaggctttccgcgagtgggtaaccattcaggccggattttacaccgagcatatttatccggacggtagccgtgggcgtcgggcaaaatccatcgcttttgcgaatatggacgaagtcgagtttcagcaggtttataaatctgtactgaatgtgttgtggaactggattctgttccgtaaattctcctctcaggaggaagttgaaaatgtggccgcacaactactggagtttgcgtaa

SEQ ID NO: 477981 - DNA, 291 bp, Shigella flexneri
atggtgaatttacgtaaagcggctaaaggccagatgtgccagatcagaatccctggctactgcaatcacaatcccgaaacctctgtgctggcgcattacaggctggcggggacgtgcggaacagcgacaaaaccacatgatatgcaggcggcgatagcctgtagctcatgccacgatctaatcgacgggcgggtaaaaaccagcgattacaccaaagaagaattgcgcctgatgcatgctgaaggggtttttcgcacacaagaaatctggagaaagaaaggtcatttatga

SEQ ID NO: 477982 - DNA, 2526 bp, Shigella flexneri
atggttaatcttgataccgtaacatttcttgatccagcaagtctatataacaagctggaactggatgtagacgatcagaaaatcgcgcatatagtgaaagaaaaattatcgcagccgctagctcgccacggtgaattggcttgcggttatgtacgtactgactcagggtgtggttttctgaataccgatacgctggaaataatctataatgatgaagaaagttcggcaacgttgtttattaatccgcaatggaattcagctttcgatgcgaagtcattatatttaaatccagacaaaaatactgttaacgcttttatacatcagcaagacatcaatgttctggcacaggatgattaccaatcgttgtctattcagggaaacggtgcgctgggaataacagaaaatagctatattggtgcacactggaatttcaacggttatgatgcagatgatgtcagtgacagtaatactgacgtcagcgatctctattatcgttatgattttttacgtcgttattatgtgcaggcgggtcgcatggacaaccgcacactatttaatgcacaaggcgggaactttacctttaactttctgccactcggtgcaatcgatgggatgcgtatcgggtcgacactgagctatttaaaccaggcgcaaagccagcaaggaaccccagtaatggttctgctttcgcgcaattctcgtgttgacgcttatcgtaatgagcaacttttgggatcgttttatctcaatagtggttcgcaatttattgataccagttcctttccgccaggcagctacagcgtggcattaaaagtctacgaaaataaccaactcacccgcaccgagcttgtgccgtttaccaaaaccggcggtctgactgacggaaatgcgcaatggttcttacaggcaggtaaaactacatcacaggtttctgatgatgaaagttcagcttatcagctaggagtacgcctgccattacatccgcaatatgagctctacgcagggctggcgaatgccgatgatgtgagtgctttcgagttaggtaataactggacggcagatttaggcggggtggggaatcttgcaatcagcgccagcgtgttccgtaacgatgacggcggcaaaggtgatatgcaacaggccaactggagtaatccgggatggccgacgttgggcttttatcggaccaactctgacggcgatgcttgtacaaccgacagcagagagagctataacgccttaagctgttatgaaagtatttccgcgacagtttcactgaattttgtcggctggaatatgatgctgggttatacccgcacacaaaataacactgatgatagtttgcgttgggataaacagcagagctttgaaaataactatcttcgccagacaacagcgcaaagtatctctgaaactgtacaacttagcgcttcccgcgctattgtgatgcgtgactggattttgagtacgtcagtcggtgttttccatcgtaatgacaacggtggcgataacgacgacaacggcttgtacttatcgttttcgttatctgacacgccaacgatggatagcaataacaacagccattcaaccaatgtgtctacggattatcgttatagcgaacaggatggcgatcaaacgtcatggcagttatcgcataccttttataacgattcattcagccataaagaacttggcgtaaccgtcggaggcctgaacaccgataccataaacagcgcggttaacgggcgttgggatgggcaatacggaaatgtctacgctaccgtatctgatagttatgaccgtaagaatcatgatcatctttcggcctttacgggcacttatagctctacgctggctgtcagtcgctatggcgttaatttgggagccagtggtacagacgatttgctgggtgcggtactggtggatgtgaaaggcttctctgaacaggatgaagagagtcaggatctgcaactcgaagcgcgggtggcaggcagccgaactttgcagcttggtcaaagtgacagtgtgttgttcccttatcctggatttcagtctggttttgttgaggttaacgacagtagccagggcaatcagcaggggacaacaaacatcattaacggtgcagggaatcgtgaattaatgttgttgcctggcaagctgcgctatcgcgaagtgtctgccagctttaactacaactatatcggtcgtttattactgccggcagcggtgaaaaaattcccgattgtggggctgaacagcgccattttactggtagctgaagatggcggatttacacttgaaattaacggcagcgaaaaagagctctatctgctttccgggcagcaattccttaagtgtccactgagtgttgtaaagaaacgcgccagcattcgttacagcggagatgttacttgtagtgtggtgacttattcacaattaccggagtcgattcaggttcaggcacagttgaaacagcctaaattacgtggaaacgttcagacggcgcaaagggaggttgcaccatga

SEQ ID NO: 477983 - DNA, 297 bp, Shigella flexneri
gtgataaccgatggttgtgccgtcgctcatctggaagctgaatggatcatcgtaggtcttcatttgtttgaaggtcgggaaaatgtaaacttcagtattccagccagtccagtagcgaccaacaccgaccacctcaccgacacctttgtcgtcgcccagtttgttgactttgatacccacattacctggttcaacgcgatcgcaacctacaagtccgaagacagccagactgaccgcgaaaacaagcgcaattgtttttttcatttttccctcccggggaaagaaagacccttataa

SEQ ID NO: 477984 - DNA, 303 bp, Shigella flexneri; identical to SEQ ID NO: 473532

SEQ ID NO: 477985 - DNA, 366 bp, Shigella flexneri; identical to SEQ ID NO: 462994

SEQ ID NO: 477986 - DNA, 486 bp, Shigella flexneri; identical to SEQ ID NO: 477779

SEQ ID NO: 477987 - DNA, 423 bp, Shigella flexneri
atgtgtcgcaaactatatgataaactttatgaaataacaggtgcaaagcttgattttaacgataaaaatcaagcctttatattgctcgaagaacaaatacctgtttgtataacagataatgatgaatacatctttttgaccggacttcttaatgaacatgaactttttacagaaaatattattaatccagaacacatactcatccttaactactctttgagtagagattatggttcttctatctgtcttctccctgatactcatcaatgtgttttgaccaagaaacactacaaaaaatatctttcacctgatgaactcattgaatctttgtatgaatttttattttgtattaatcacttcagaagtgaactaacatatagggggtatcatgcaaattctaaacaaaatacttccacaggttga

SEQ ID NO: 477988 - DNA, 375 bp, Shigella flexneri; identical to SEQ ID NO: 475109

SEQ ID NO: 477989 - DNA, 240 bp, Shigella flexneri
gtgatagccgatggttgtaccgtcactcatctggaagctgaatggctcatcgtaggtcttcatttgtttgaaggtcgggaagatgtaaacctcagtgttccatcccgtccagtagcgcccaacaccgaccacttctccgacgcctttatcgtcgcccagtttgtttaccttgatgccaacattaccaggctcaacgcgatcgcaaccgacaagtccggtggtcagcagaacaagggctaa

SEQ ID NO: 477990 - DNA, 366 bp, Shigella flexneri; identical to SEQ ID NO: 462994

SEQ ID NO: 477991 - DNA, 168 bp, Shigella flexneri; identical to SEQ ID NO: 38557

SEQ ID NO: 477992 - DNA, 366 bp, Shigella flexneri; identical to SEQ ID NO: 462994

SEQ ID NO: 477993 - DNA, 351 bp, Shigella flexneri; identical to SEQ ID NO: 464002

SEQ ID NO: 477994 - DNA, 180 bp, Shigella flexneri; identical to SEQ ID NO: 477816

SEQ ID NO: 477995 - DNA, 279 bp, Shigella flexneri; identical to SEQ ID NO: 127146

SEQ ID NO: 477996 - DNA, 441 bp, Shigella flexneri; identical to SEQ ID NO: 477801

SEQ ID NO: 477997 - DNA, 375 bp, Shigella flexneri; identical to SEQ ID NO: 13405

SEQ ID NO: 477998 - DNA, 303 bp, Shigella flexneri; identical to SEQ ID NO: 477829

SEQ ID NO: 477999 - DNA, 165 bp, Shigella flexneri; identical to SEQ ID NO: 461984

SEQ ID NO: 478000 - DNA, 402 bp, Shigella flexneri; identical to SEQ ID NO: 477834

SEQ ID NO: 478001 - DNA, 168 bp, Shigella flexneri; identical to SEQ ID NO: 477824

SEQ ID NO: 478002 - DNA, 375 bp, Shigella flexneri; identical to SEQ ID NO: 475895

SEQ ID NO: 478003 - DNA, 303 bp, Shigella flexneri
atgagcagaaaaaaccaacgttactctacggagtttaaagccgaagccgtcaaaacggttcctgaaaatcagctttcgatcagtgaaggcgcttcccgattatctgttcctgaaggcactttaggacaatgggttaccgccgcaagaaaagggctcaatacaccaggctcccgcacagtggctgagctggaatctgaagttatgcaactgcgtaaggctttaaatgaagcacgacttgagcgagatatattaaaaaaagcaacagcgtattttgcccaggagtcgctgaaaaatacgcgttag

SEQ ID NO: 478004 - DNA, 375 bp, Shigella flexneri; identical to SEQ ID NO: 13405

SEQ ID NO: 478005 - DNA, 219 bp, Shigella flexneri; identical to SEQ ID NO: 475596

SEQ ID NO: 478006 - DNA, 180 bp, Shigella flexneri; identical to SEQ ID NO: 477816

SEQ ID NO: 478007 - DNA, 417 bp, Shigella flexneri
gtgggcgatctgcaatgtgaagcgattctttccgagcctttctttctgctttgccatcgcgatagcgctttggccgtggaagattatgtaccttggcaggcattacagggagcgaaattggtgttgcaggattacgcgtcaggcagccgaccgctgattgacgcagcgctggcgcgcaatggtattcaggcgaatattgtgcaggagattggacatccggcgacgctgttcccgatggtagccgcaggcatcggcatcagtattcttcctgcactggcgctaccattgcctgaaggtagcccactggtggttaagcgcattacgccggtggttgaacgccagttgatgctggtgcgcaggaagaaccgttcactttccaccgccgctgaagcgttatgggacgtggtacgagactag

SEQ ID NO: 478008 - DNA, 1725 bp, Shigella flexneri
atggataacgttgaactttcaccggcaacacgctgggggatgattgctaccggattacttcaggggctggtttgctacctgcttatcgcctggcttgccggaaaaaatcacagttggattgtttatggcgtgcctgcgaccgtcgcgttttcatccgttttactcttctccgtgatctcttttaaacagaagcgcctttggggatggctggcgctggtgtttattgccacgacagggatgagcggttggctgaagtggcaaactgatggcatgaacccctggagagctgaaaaggcgatttgggattttggctgctatctgctgttgatggcaatgttgttgctaccgtggatacaacaaagccttcgtatccgcaatggcagtagccgctatagctacttttaccagtcagtatggcataacgtacttatattactggtgatttttctctccaatggcctgacgtggctggtgcttttactgtggggtgagttgtttaaacttgttggcatcacgtttttcaatacgctcttttttgcaaccgactggtttatgtatcttacatttggtctggttaccgcactggcggtgatcctcgcgcgtacacagtcacgtttaatcgactctattcaaaagttgttcacgctaatcgccacggggttgctgccgttagtatcattgctaaccctgatgtttatcatcaccctgccgtttacgggcctgagcgcgatttctcaccacatctccgccgccgggttgctgttaacgctggcctttttgcaattgatcttaatggctattgtccgcgatccgcaaaaagcgtcacttccctggacggggccgttgcgttgcctgattaaaaccgctttgctggttgctccgctgtatgtgttcgtcgccacctgggggttatggctgcgggtcgctcagtacggctggactgtcgaccgcttgcagggcgcgctggcggagctggtgttactggtgtggtcgctggggtattttgtcagtatcgtctggcgtaatgggcaaaatccccttgttcttcagggcaaagtgaaccttgcggtttcgttattggtgttggtgatactggtgcttcttaattcgccggtgctggacagtatgcgtattagcgtgaacagtcatatggcgcgttatcagagcggcaaaaacacgccagaccaggtaactatctacatgctcgaacagagcggtcgctatggacgtgcggcgcttgagtcgctgaaaagcgatgccgggtttatgaaagacccgaaacgcgcgcgggatctgctgatggcgttagatggagggcaacatcttcaggaacaggtatcggaaaaagtattagccgaaaatgtgttaattgcccctggttctgttaaaccggatgcgacattctggtcggccttaatccaggatcgctataacgtgatgacctgtattgaaaaagacgcctgcgtactggtcgagcaagatctgaatagtgatggtcaggcggagcggatcctgtttgcttttaatgatgacagagtcattgtctatggctttgactcagacagaaaagaatgggacgcgcttgatatgagtttacttccgaacgaaataacgaaagaaaaattactcacagctgcgaaggatggaaaactggggacgaggccgaaagcgtggcgcgatctgacggtagatggtgaaacgctggaaataaacttaagtaagtga

SEQ ID NO: 478009 - DNA, 381 bp, Shigella flexneri
ttgcgtggtctggtgttcgcgccagtgatgcatgcggtgcaggcgggagtatccgaacggttgctggctttgcttaacggcggcgcggtggcggaagtgaaaagcgccgtcattgccaatgcgcagtcgaaggtgttgattgtcgagtttcatcagctgattgccgccagggtgctggaagaagcgcaaaagcgtggcgcgttgccttacccggtcggtgcagagtcgaaatatgaaatcccgccgctcttctatcgactttcaggaacgtttcgccaggcgaatccacaactcgaacattgtgcgattcgcattaacccgaatcgcagcggtgaagagacggtgctgcggattttgcgtgagagtattgcgagtatttaa

SEQ ID NO: 478010 - DNA, 450 bp, Shigella flexneri
gtgaaagcgaagaagcaggaaactgccgcgaccatgaaagacgttgccctcaaggcaaaagtctctacagcgactgtctcccgagcattaatgaatcccgataaagtctcccaggccacccgtaatcgggttgaaaaagcggcccgggaagtgggttatttaccgcagcctatggggcgcaacgtcaagcgtaatgaatcccgcaccattctggtgattgtcccggatatctgcgatcccttctttagcgaaattattcgcggtatcgaagttacggcggcaaatcacggatatctggtgctgattggcgactgtgcgcatcaaaatcagcaggaaaaaacctttatcgatttgatcatcaccaagcaaattgatggcatgttgctgctgggttcaaggctgccgtttgatgccagcattgaggaacagcgtaatctgccgccgtggtga

SEQ ID NO: 478011 - DNA, 966 bp, Shigella flexneri
atgctggtgaccgacctgacgcacagggatatggggccgaaatctcgctacatcgggccggaagtgccgaaagaagatctgatctggcaagatccgctgccgcagccgatctacaacccgaccgagcaggacattatcgatctgaaattcgcgattgcggattctggtctgtctgttagtgagctggtatcggtggcctgggcatctgcttctaccttccgtggtggcgacaaacgcggtggtgccaacggtacgcgtctggcattaatgccgcagcgcgactgggatgtgaacgccgcagccgttcgtgctctgcctgttctggagaaaatccagaaagagtctggtaaagcctcgctggcggatatcatcgtgctggctggtgtggttggtgttgagaaagccgcaagcgccgcaggtttgagcattcatgtaccgtttgcgccgggtcgcgttgatgcgcgtcaggatcagactgacattgagatgtttgagctgctggagccaattgctgacggtttccgtaactatcgcgctcgtctggacgtttccaccaccgagtcactgctgatcgacaaagcacagcaactgacgctgaccgcgccggaaatgactgcgctggtgggcgggatgcgtgtactgggtgccaacttcgatggcagcaaaaacggcgtcttcactgaccgcgttggcgtattgagcaatgacttcttcgtgaacttgctggatatgcgttacgagtggaaagcgactgacgaatcgaaagagctgttcgaaggacgtgaccgcgaaaccggcgaagtgaaatacacagccagccgtgcggatctggtatttggttctaactctgtcctgcgtgcagtagcggaagtttacgccagcagcgatgcccacgagaagtttgttaaagacttcgtagcggcatgggtgaaagtgatgaacctcgaccgtttcgacctgctgtaa

SEQ ID NO: 478012 - DNA, 417 bp, Shigella flexneri
gtggcctgcttctttatgccgctgaccaccattacgctgtctgatttgccaccggaacgactggcggcggcatcgagcctctctaactttacgcgaacgctggcggggtctatcggcacgtcgataaccacgaccatgtggaccaaccgcgagtcgatgcaccatgcgcagttgactgagtcggtaaacccgttcaacccgaatgcccaggcgatgtacagtcaactggaagggcttgggatgacgcaacagcaggcatcaggctggattgcccagcagataaccaatcaggggctgattatttccgccaatgagatcttctggatgtcagccgggatattcctcgtactgctggggctggtgtggtttgctaaaccgccatttggcgcaggtggcggcggaggcggtgcgcactaa

SEQ ID NO: 478013 - DNA, 144 bp, Shigella flexneri; identical to SEQ ID NO: 244907

SEQ ID NO: 478014 - DNA, 2721 bp, Shigella flexneri
atgaatgccatcattccgaaaaaaagacgtgacggaaagtcttcctttgaagacctgattgcgtacacctcagtgcgggatgatgtgccggaagatgaactcagaccagacacggaagtgaaaggtgaggttccgcaccggaatcgcttcagacgtcttgttgattatgcaacacgtctgcgtaatgaaaaatttgtttccctgattgatgtgatgaaagacggcagtcagtgggtgaatttctatggtgtgacctgctttcataactgtttatctcttgaatctgcggctgaagaaatgcagaaagcagcagaccttgctcatttttccaaagatgatacagatcctgtttttcactatattctctcctggcctgcgcacgaaagtccgcgttctgagcagctttttgactgtgtgcgtcacaccctgaaatcccttgagctgtcaaaacatcagtatgtggcagccgttcatacagacacggataacctgcatgtacatgttgcagtgaatcgtgtccaccctgaaaccggctatatcaattgccttccgtggagccaggaaaaactcagtcgtgcatgccgtgaacttgaacttaagcacggattcgcgccggataatggttgctttgtacatgcaccgggcaatcgtattgtgcgcaaaacagcgctggtacgtgagcgccgtaatgcctggcgacgcgggaaaaagcagacgttcagggaatatattgctcagatgtcgattgccgggctgcgtgaagagccagctcaggactggttatctttgcataaacggctggccagtgatggtctgtatatcacgatgcaggaaggggaactggtggtgaaggatggctgggacagagcgcgggaaggtattgcactcagttcgttcggcccgtcatggacagctgaaaaactggggcggaaactgggggaatatcagcctgtaccgacagatattttcagtcaggtggaggcacccggtcgttatgatccggaagccataaacgttgatatccggccggaaaaagtggctgaaacggagagcctgaagcagtatgccagtcgtcattttgccgaacgcttaccggcaatggcgcgcaatggtgaactgaaaagctgcctggctgtacaccgtactctggcagaggcgggattatggatggggattcaacacgggcatctggtactgcatgatggatttgataaacaacagacaccagtacgtgcagacagtgtgtggccgttaatgacgctggattatatgcaggatctggatggtggatggcagcctgtaccgaaggatatttttactcaggtcgttcccggagaacgattccggggacacagtattggctctcagcctgtcagtgattacgaatggtatcgtatgcggatgggcacaggtccgcagggggctataaagcgtgaactgttttctgataaggaaagtctgtggggatacggccttattcagtgcaggagcctgattgaagagatgatagctgacggggatttcagctggcaggcatgtcatgagatgtttgcgcgtaaagggcttatgctgcagaaacagcatcatggtcttgtgattgtggatgcgtttaatcatgagctgacaccggtgaaggccagcagtatccatcctgatttgacgttatcccgtgccgagcctcaggccgggccatttgaaattgcggctgcagatattttcgaacgggtgaagcctgaatgtcgttacaatccggaacttgctgccagtgatgaagtggaacccggcttccggcgcgatcctgagattcgtcgtgagcgccgtgaagcccgtgcagctgcgcgggaagatttgcgtgcgcgttatcttgcatggaaggagcactggcgtaaacccgacttacgttacggagaacggttacgggaaattcatgctgcctgccgtcggcgcaaggcgtatatccgtgtgcagttccgggatccacaattgcgtaagctgcattaccatattgcggaagtgcagcgtatgcaggcgctgatcaggctgaaggagagtgtgaaggaagagcggttgtcactgattgcggagggtaagtggtatcctttgtcctaccggcagtgggtggaacaacaggcggctcagggagacagggctgcagtatcgcagttacgtggctgggattatcgtgatcgtcgctcgcgtaataaggataaaagacgcacaactaatgttgatcgttgtgtcgtactctgcgaacccggaggaacgccactttttaataatgttgcaaaacttgaagctcgtcttcagaaaaatggaagtgttcatttcagggatacgcggacaggaaaaaatgtctgtacggattacggagatcgggttgtgttctaccatcacacggaccgaaatgaactggcagagaagcttaatttaattgcgccagttctgttcagccgcaacggaaagcttggttttgagccggaaggttcataccagcagtttaatgatgtgtttgcagaaatggtggcctggcacaatgcagcgggaataaccggaaacggacacttcaccattactcgtccggacgtggatttgcaccgtcaacgcagtgagcagtattaccgggaatatatcagacagcagacccgtttatcggagagccatgatgataattatacgttacggcaggagaaaacatgggagccaccatcacctggaatgtaa

SEQ ID NO: 478015 - DNA, 333 bp, Shigella flexneri; identical to SEQ ID NO: 399312

SEQ ID NO: 478016 - DNA, 522 bp, Shigella flexneri
atgaacccggttgatcgtccactattagatattggcttaacgcgattagaattcttgcgtatatcaggaaaaggccttgctggtctaacaattgcccctgcgttactgtcacttttgggttgcaaacaggaagatattgatagcggcacagtagggacattcttctcccgtatcaaaatccatcgcaattatttctttggcgacaacggggttggctctggcggcggcctgtatggcgatctcaactataccgcggacacctgccgtcaatgcaaagagccgcaatgcatgaacgtctgcccgattggtgcgattacctggcagcagaaagaaggctgtattaccgtcgatcataaacgttgtattggctgtagcgcctgtactacggcatgcccgtggatgatggccaccgtaaataccgaaagtaaaaaatcctcgaaatgtatgttatgcggtgaatgcgcaaacgcctgcccaacaggggcgttaaaaattatcgagtggaaagatattactgtgtga

SEQ ID NO: 478017 - DNA, 969 bp, Shigella flexneri
atgaaaaaaagacatctgcttagcttactggcgctgggcattagcacagcttgctacggcgaaacatatcctgcgcccattggtccgtcgcagtcggatttcggtggcgtaggattattacaaactcccaccgcgcgtatggcacgggaaggggagttgagtctgaactatcgcgataacgatcagtaccgttattactcagcttcagtgcaactcttcccgtggctggaaacaacgctgcgctacaccgacgtgcgcacccggcagtacagcagcgtcgaagcgttctctggcgatcaaacgtataaagataaagccttcgatctcaaactgcgtttgtgggaagagagttactggctgccgcaagtggcggttggtgcgcgggatatcggcggtacggggctgtttgatgcggaatatcttgttgccagcaaagcctgggggccgttcgattttacgctcggcctgggctggggatatctgggcaccagcggtaatgtaaaaaatccgctctgttcagccagtgataaatattgctatcgcgataacagctacaaacaggcgggatctatcgacggtagccagatgttccacggtcctgcctcactgtttggcggtgtggaataccagacgccctggcaaccgctgcgtctgaaactggagtatgaaggtaataattatcagcaggattttgccgggaagctggagcaaaaaagtaagtttaacgtcggggcgatttatcgcgttaccgattgggccgacgttaaccttagctatgaacgtggcaacacctttatgtttggcgtcacgctgcgcaccaactttaacgatctgcgcccgtcctacatcgataacgcccgcccgcaatatcaaccgcagccgcaggatgccattttgcagcattcggtggtggcgaatcagttaacgttgctgaaatacaacgccggacttgccgatccgcagatctag

SEQ ID NO: 478018 - DNA, 426 bp, Shigella flexneri
atggcattcctcacttcatctgataaagcactctggcatctcgccttacccatgattttctccaatatcaccgttccgttgctgggactggtcgatacggcggtaattggtcatcttgatagtccggtttatttgggcggcgtggcggttggtgcaacggcgaccagctttctctttatgctgttgctgtttttacgcatgagcaccaccgggctgactgcgcaggcttatggtgccaaaaatcctcaggcattagcccgtgcgctggtgcaaccgttgctgttggcgttgggggccggggcgttaattgcgctgttgcgtacgccgattatcgatctggcgctgcatattgttggcggtagtgaagcggtcctggaacaggcgcggcgctggcgacggttattgcggaatatgcaacattgctga

SEQ ID NO: 478019 - DNA, 168 bp, Shigella flexneri
ttggagattatcgtcactgcaatgcttcgcaatatggcgcaaaatgaccaacagcggttgattgatcaggtagagggggcgctgtacgaggtaaagcccgatgccagcattcctgacgacgatacggagctgctgcgcgattacgtggtaatgactccaacttactga

SEQ ID NO: 478020 - DNA, 1077 bp, Shigella flexneri
atggttgatggcaatcagaacgtggaagaacgcaagatagggatttataccggtcaggtctggcacagtgatttaacgctaaaagctgatttcgatgtttcgcgtcttagcgagctcaacgcgccaaatatcatcttaggcaagccctttattgtgattagcgtcggggatgcgcgtggtattggtgtggtgaaagcgcctgaagttaacggaacggcactgaccattgaacccggtaccgggttagagcaaggcgggcagggcgtgcatatccctttacccgaaggggactggcggaagcagaacctgcagctgaatatggcactgaatttaagcggtaccggcgatctttctgtggtgcctgccgggcgtaatagcgaaatgaccttaaccagcaactggccgcatcccagttttttaggtgattttctaccagccaaacgggaagctagcgagtcaggttttcaggcgcaatggcaaagcagctggtttgctaataatctcggtgagcgttttgcttcaggcaatgataccggctgggaaaacttccccgcgtttagcgtcgcagtgacgacgccagccgatcaataccaattaacggaccgggcgactaagtacgccattctgctgattgcactgacttttatggcgttctttgtttttgaaacgctcaccgcgcaacgtttacacccaatgcaatatttgctggtggggctttcattggtgatgttttatttgctcttgctggcgctttctgaacatatcggttttaccgtggcatggataatcgccagtctgattggggcgttaatgaacggtatttatttgcaggcggtattgaaaggctggcgcaatagcatgttgtttaccctcgcgctgttgttgctggatggagtgatgtggggactgctcaactctgccgatagcgcgctgttgttgggaaccagtgtgctggtggtggcgctggccggcatgatgtttgtgactcgtaatatcgactggtatgcgttttcactgccgaaaatgaaagccagtaaagaagttacaacggacgatgaattacgtatctggaaataa

SEQ ID NO: 478021 - DNA, 348 bp, Shigella flexneri
atgaaaacaattggtttgctgggaggaatgagctgggaatccaccattccttactatcgtctgataaatgaaggcattaaacagcggcttggtgggcttcactctgcgcaaatgctgctacatagcgtcgattttcatgaaatagaagagtgccagcgtcgcggggaatgggataaaaccggggacattctggctgaggcggcgcttggcttacagcgggcgcagaaggtattgtgttatgtaccaatacgatgcataaagtggcggatgccattgagtcacgttgcactctgcctttcttacacattgcggatgccaccggacgtgcaattaccggggccggaatga

SEQ ID NO: 478022 - DNA, 471 bp, Shigella flexneri
atgaaaacacaacgtggttatacgctgattgaaacgctggtcgcgatgctgattttggtcatgctaagcgcaagtggactctatggctggcaatactggcagcagtcgcaacggctttggcaaaccgccagccaggcgcgggactatttgctctatttacgtgaagatgccaactggcataaccgcgaccacagtatcagcgttatcagggaggggacgttatggtgccttgtgagttccgctgctggggccaatacctgtcatggcagttcaccattggtctttgtgccacgctggcccgaagtcgaaatgagcgacctgacaccttcgcttgctttctttggcctgcgcaataccgcatgggccgggcatattcgcttcaaaaactcaacgggcgagtggtggctggtggtttcgccgtggggaagactccggctttatcagcaaggagaaacagaaggatgcctgtaa

SEQ ID NO: 478023 - DNA, 441 bp, Shigella flexneri
atgaaaaaaatcagcttaccgaaaattggtatccgcccggttattgacggtcgtcgcatgggtgttcgtgagtcgcttgaagaacaaacaatgaatatggcgaaagctacggccgcactgctgaccgagaaactgcgccatgcctgcggagctgccgtcgagtgtgtcatttccgatacctgtatcgcgggtatggctgaagccgctgcttgcgaagaaaaattcagcagccagaatgtaggcctcaccattacggtaacgccttgctggtgctatggcagtgaaaccatcgacatggatccaacccgcccgaaagccatttggggctttaacggcactgaacgccccggcgctgtttacctggcagcggctctggcagctcacagccagaaaggcatcccggcattctccatttacggtcatgacgttcaggatgcctga

SEQ ID NO: 478024 - DNA, 378 bp, Shigella flexneri
atgttaagcatcattgagtacgctccggtgtggatcatcatggcggtagcactggcgctcggcattggcaccatgattggctggcgtcgtgtagcgatgaccatcggtgagaagattggtaagcgcggcatgacgtatgcgcaaggcatggcggcacaaatgacggcggcagtgtctatcggccttgccagttatattgggatgcctgtctccacaacacacgtcctctcgtctgcggtagcagggacgatggtggtggacggcggtgggttacagcgtaaaacggtaaccagcatcctgatggcgtgggtgtttactttaccggcggcaatttttctttctggtgggctgtactggatagcattgcagttgatttaa

SEQ ID NO: 478025 - DNA, 828 bp, Shigella flexneri; identical to SEQ ID NO: 470760

SEQ ID NO: 478026 - DNA, 1971 bp, Shigella flexneri
atgagctctatctccctgatccaaccggatcgcgacctgttctcctggccgcagtactgggccgcctgttttggaccggcaccgtttttgccgatgtctcgtgaagagatggatcaacttggctgggatagctgcgacatcattttggttactggcgacgcgtatgtcgatcacccaagcttcgggatggcgatttgcggtcgtatgctggaagcgcagggctttcgcgtcgggatcatcgcccagccggactggagcagcaaagacgactttatgcgtctgggtaaaccgaatctgttttttggtgttactgctggcaacatggattcgatgatcaaccgctataccgccgatcgccgtttacgtcatgatgatgcctacacgccagataatgtcgcgggtaagcgaccggatcgcgccacgctggtttatacccagcgttgtaaagaggcgtggaaagatgtgccggtgatcctcggcggtattgaggctagcctgcgccgtaccgcgcattatgattactggtccgataccgtgcgccgttccgttctggtagattcgaaagccgacatgctgatgtttggtaacggtgaacgtccgctggtggaagtagcgcatcgtctggcgatgggcgagccgattagtgaaatccgcgatgtgcgtaataccgcaattatcgtaaaagaggcgctgcctggctggagcggtgtggattccacccgtcttgataccccagggaaaatcgacccaatcccgcatccgtatggcgaagatttgccgtgtgcggataacaaacctgttgcgccgaaaaagcaggaagcgaaagctgtaatcgtgcagccaccgcgccagaaaccgtgggaaaaaacctacgtattactgccttctttcgagaaagtgaagggcgataaagtgctgtacgcccatgcttcgcgcattctgcaccacgaaaccaacccaggctgcgcccgcgcattgatgcaaaaacacggtgaccgctatgtgtggatcaacccgcctgctatcccgctttctaccgaagagatggacagcgtttttgcgctgccgtacaagcgcgtgccacatccggcctatggcaatgcccgtattccggcttacgaaatgatccgtttttcggtcaacattatgcgcggctgctttggcggctgttctttctgttctattaccgagcacgaagggcgcattattcagagccgttcggaagattcgatcattaatgagatcgaagcgatccgcgacaccgttccaggttttacgggcgtgatttccgatctcggtgggccaactgccaacatgtatatgttgcgctgcaaatcgccacgcgctgaacaaacttgtcgccgtttgtcgtgcgtttatccggatatttgtccgcacatggacactaaccacgaaccgacgatcaacctctatcgccgtgcgcgtgatctgaaaggcattaaaaaaatcctcatcgcctcaggcgtacgttatgacatcgccgtggaagatccgcgctatatcaaagagttggcgacccatcacgtcggcggttatctgaagattgctccggaacataccgaagaagggccgttgtcgaagatgatgaagccgggcatgggcagctatgaccgctttaaagagctgttcgatacctactcgaaacaggcaggtaaagagcagtatctgatcccgtatttcatctctgcgcaccccggtacgcgtgatgaagatatggtgaatttggcgctgtggctgaaaaagcatcgtttccgtctcgaccaggtacagaacttctacccatcgccgctggcgaactcaaccaccatgtattacaccgggaaaaacccgctggcgaagattggttataagagcgaagacgtcttcgtaccgaagggcgacaaacagcgtcgtttgcataaagcgttgttgcgttaccacgatccggcaaactggccgttaatccgctag

SEQ ID NO: 478027 - DNA, 453 bp, Shigella flexneri
atgatcaatcgtcaactttcacgtctgctgttgtgcagcattctcggcagcacgacgctgatttccggctgtgccctggtacgtaaggattctgcgcctcatcaacagctcaaaccggaacaaatcaaactggccgatgatattcatcttgccagctccggctggccgcaggcgcagtggtggaaacaactcaatgacccgcagttggatgccctgatccaacggacgctaagtggttcacacaccctcgccgaagcgaaactgcgggaagaaaaagcgcaatcgcaggccgatttgttagatgccggttcacagttgcaggtggcagcgttagggatgcttaaccgccaacgtgtctcggcgaacggcttttttggatgcgcccgcactggggatggacgggccgtactatacggaagccacagtaggtttgtttgccggactggatcttga

SEQ ID NO: 478028 - DNA, 1293 bp, Shigella flexneri
atgcgctataatggtttaaataatatgtttttccctctttgccagattaacgataaccactctatcacaagttcatcacatacaaagaaaacaaaatcagataattacagcaaacatcataaaaacacgttaattgacaataaagccctctctcttttcaaaatagatgatcatgaaaaagtgataggcttgattcagaaaatgaaaagaatttatgatagtttaccatcaggaaaaatcacgaaagaaacggacaggaaaatacataaatattttatagatatagcgttatatgcaaataataaatgtgacgatagaattacgagaagagtttaccttagtaaagaaaaggatgtatccattaaggtggtatattttataaataatgtcgccgtccataataatactatcgaaattccacagatagtaaatggtggttacgatttttcacaccttagcctgaagggtatcgtgattaaagatgaagatttatccaattcgaattttgcaggttgcagactacaaaacgctattttccaggactgtaatatgtataaaacgaatttttattacgccataatggaaaaaatactttttgataattgtattctcgatgactcaaatttcgctcagataaaaatggccgacggaactctaaatgcatgctccgctatgcatgttcaattctacaatgcagcaatgaatagagccaatattaaaaataccttccttgactattcaaatttttatatggcgtacatggctgaggtaaatctttataaagtaatagcgccatatgttaatttatttaaagccgaccttagtttctctaaactcgatttaattaactttgaacatgctgatctgtctcgcgtcaatctgaacaaagcaatcctccagaatataaacttaattgatagcaaactcttttgtacgtggctgacaaatacattcctcgaaatggttatatgtaccggctctaatatggctaatgttaattttaataatgccaatttaaacaactgccatttcaactgttctattttaacaaaagcctgtatgtttaatacccgtctctatcgggttaatttcgatgaggctagcgtccagggaatgggcatttccattctccgtggggaggaaaatatccccattgatagtgataccctggtaacactacagaaattctttgaagaagattgtacctctcatactggcatgtcacaaactgaggataatattaatgcagtcgctatgaagattactgcagatattatgcaacacgcagattga

SEQ ID NO: 478029 - DNA, 366 bp, Shigella flexneri
atgcgctttcaaaaccgggctaacttcgaagcaatgattgatgcgaatatgcgaccttgtgggatcaatcccaccattatttatcgtccctacagttttatggccaaaatcagcgccgtggagcgcggacattttctgacggtgatcccgcattttgcctggcgactggtgaatccggcaacgctgaaatattttgatgcgccgcacaggccgatgtatatgcaggaatatctttattcaatcagaaatcatcgttataccgccacgatcttcagcatattgctgaagatcgtgacgggacaaaccattaacccagcatcgagccggttgcaattaaattacggtgtaagtcgaagacgtggctaa

SEQ ID NO: 478030 - DNA, 288 bp, Shigella flexneri
atgttctctacacctgaagagatcgcccgcctggccgtagaaaacgacgttcacgtagtgggcgcatcctcactggctgccggtcataaaacgctgatcccggaactggtcgaagcgctgaaaaaatggggacgcgaagatatctgcgtggtcgcgggtggcgtcattccgccgcaggattacgccttcctgcaagagcgcggcgtggcggcgatttatggtccaggtacacctatgctcgacagtgtgcgcgacgtactgaatctgataagccagcatcatgattaa

SEQ ID NO: 478031 - DNA, 318 bp, Shigella flexneri
atgattgcacgttggttctggcgcgaatggcgttcgccgtcgctattaattgtctggctggcgctaagcctggcggtggcctgcgtgctggcgctgggcaatatcagcgatcgcatggagaagggcttaagccagcaaagccgtgagtttatggcgggcgatcgggcgttgcgcagttcacgcgaagtgccgcaagcgtggctggaggaagcgcaaaagcgcggcctgaaagtcggcaagcagctgactttcgccacaatgacctttgcaggcgacacaccgcagctggcgaacgtcaaagcggtggatgatatctag

SEQ ID NO: 478032 - DNA, 372 bp, Shigella flexneri
atgaatactcacccaaaagacatgatatcgcacagcttaagtttctctgtgaaacccatgtatcatgactgtcttgcaaaccttgaagaaagcaatcatggctgggttaacgacccaacctcggcgatcaacctccagttgaatgaactgattgagcatattgcgaccttcgcacttaattacaaaattaagtataatgaagacaataagctcattgagcagatcgacgaatatctggatgacacctttatgttgttcagcagttatggtattaatatgcaggctcttcagaaatggcggaagtcaggtaatcgactattccgttgttttgtcaatgcgacgaaagagaatcctgcgagtttatcttgttag

SEQ ID NO: 478033 - DNA, 573 bp, Shigella flexneri
gtgaagctgaaaaccagcccgcaggcacgaaaaaagtggccgggactgggaaatgaagtgacagcccgcctgctgaccgtgacgcgcaaaggaaaagtctgccatctgctgacgtcgatgacggacgccatgcgcttccccggaggagaaatggcggatctgtacagtcatcgctgggaaatcgaactgggatacagggagataaaacagacgatgcaactgagcaggctgacgctgagaagtaaaaagccggagcttgtggagcaagagctgtggggtgtcttactggcttataatctggtgagatatcagatgattaaaatggcggaacatctgaaaggttactggccgaatcaactgagtttctcagaatcatgcggaatggtgatgagaatgctgatgacattgcagggcgcttcaccgggacgtataccggagctgatgcgcgatcttgcaagtatgggacaacttgtgaaattaccgacgagaaggggaagggccttcccgagagtggtaaaggagaggccctggaaataccccacagccccgaaaaagagccagtcagttgcttaa

SEQ ID NO: 478034 - DNA, 573 bp, Shigella flexneri
gtgaagctgaaaaccagcccgcagacacgaaaaaagtggccgggactgggaaatgaagtgacagcccgcctgctgaccgtgacgcgcaaaggaaaagtctgccatctgctgacgtcgatgacggacgccatgcgcttccccggaggagaaatggcggatctgtacagtcatcgctgggaaatcgaactgggatacagggagataaaacagacgatgcaactgagcaggctgacgctgagaagtaaaaagccggagcttgtggagcaagagctgtggggtgtcttactggcttataatctggtgagatatcagatgattaaaatggcggaacatctgaaaggttactggccgaatcaactgagtttctcagaatcatgcggaatggtgatgagaatgctgatgacattgcagggcgcttcaccgggacgtataccggagctgatgcgcgatcttgcaagtatgggacaacttgtgaaattaccgacgagaagggaaagggccttcccgagagtggtaaaggagaggccctggaaataccccacagccccgaaaaagagccagtcagttgcttaa

SEQ ID NO: 478035 - DNA, 330 bp, Shigella flexneri
gtgcttgattcgccggggctggtgcatccactgaaagtcgacgcggatgcctcggtggtcgataacgtgccggtacatgtggcgctgcgcccggaaaaaatcatgctttgcgaagagccgcccgccaatggttgtaacttcgcggtgggggaggtgatacacattgcctatctcggcgatctttcggtgtatcacgttcgtctgaaaagtgggcagatgattagcgcccagctacaaaacgcccatcgtcatcgtaaagggttaccgacctggggcgacgaagtgcgtttgtgctgggaagtggacagctgtgtggtgctgacggtttaa

SEQ ID NO: 478036 - DNA, 219 bp, Shigella flexneri; identical to SEQ ID NO: 10578

SEQ ID NO: 478037 - DNA, 1101 bp, Shigella flexneri
gtgaatttcagctctgaactgcttaacaaaggcaacaaaactcctgcattcagcatcagtattgagggcagggatatcactactgtgctggataaccgcctgatgagtctgacgctgacggacaatcggggatttgaagcggaccagcttgatctggagctggacgacgccgacggaaaaatcgtgctgccgcgccgtggtgcggtcattacgctggcgctggggtggaaggggcagccgcttttcccgaaaggggcattcacggtggacgagattgaacacactggcgcaccggaccgcctgactatccgggcgcgaagtgctgattttcgtgaaacgctgaatacccgccgtgaaaaatcgtggcacaagaccaccgttggggaagtcgtgaaggaaatatctgcgcggcacaaactgaagatggcattgggtgaagacctgtcggataaacccgtggagcatatagaccagaccaatgagagtgacggcagttttctgatgcggctggcgcgccagtacggtgctattgcgtcggtgaaaaatggcaatctggtattcatccggcagggacagggtaaaagcgccagcggtaaaccactaccggttatcactatcacacgtaaggacggcgacagtcaccgctttaccctggcagatcgcggagcctacacgggcgtaattgccagctggttgcatacccgcgaacccgcgaagaaagaaagcaccacggtgaagcgtaagcgcaggactaagaagcagaagaaagagccggaagcgaagcagggcgattacctggtgggtacggatgaaaacgtgctggtacttaatcgcacttatgccaaccggagcaacaccgaacgagcggcgaaaatgcagtgggaacgcctgcaacgcggcgttgcgtcattctcgttacaactggcggaagggcgggcagatctctacacggaaatgccagtgaaagtcagtggctttaaacagccgatagatgatgcggaatggaccattacgactctgacgcataccgtaagcccggataatggttttacgaccagtctggagcttgaagtgaggattgatgatttcgaaatggaatga

SEQ ID NO: 478038 - DNA, 486 bp, Shigella flexneri
atgatgatggtgctgggattgtacgtgtttatgctgcgcaccgtgccgtatcaggaactgcagtatcaacgcagctggcgacatgcggctaacagccgggtaaatcgtcgtccgtccacgcagtttctgggaccggacaacgacatgctgacgctttccggtgttcttatgccggagataacaggcggcaggctgtcgttgctggcacttgagcagatggcagaacaggggaaagcatggcccctgattgaaggcagcggcacgatttacggcatgtatgtgattgagggactgaatcagactaaaacggagtttttccgcgacggtatgccgcgccggattgagttcaccctgtcgctcaaacgggtggatgaatccctgtccgatatgttcggtgatctcagtgcgcagctgaataatctgcaggacacggcaacatctgcattaagcgatatcagtaaaacggtgggagggctgctgtcgtga

SEQ ID NO: 478039 - DNA, 1044 bp, Shigella flexneri
atgtttatgaatccactggcagcactacgcggtggactggctgccgcaggcgcggtgctgcgtgtgctggcatccggtccgctggcgatgctgcgcgttgccctgtatgccgtatctggtctgttaggtgctctgctcagtccgataggtcttgtggttactgcactggcgggcgtggcgctggttgtctggaaatactggcaacccatcaccgcatttctcggtggcgtggtggaaggattcaaagcggcggcaggtcccatcagtgctgcattcgaaccgcttaagcccgtgtttcagtggattggcgacaaagtacaggcgctgtggggctggtttactgatctgctgacgcccgttaagtcgacctctgccgaactgcagagtgcagcggcaatggggcggcgattcggggaggcactggcggaagggctgaatatggtcatgcatccgctggactccctgaaatccggcgtttcctggttgctggagaaactcggcattgtcagtaaagaggccgcaaaggcaaaactaccggaaagcgtgacgagtcagcaacctgcgacggtgaatgcagacggtaaagtgatgatgccatcgggtgattttccgtcatggggatatggctttgcgggtatgtatgacagcggcggctatatcccgcgtgggcagtttggcatcgtcggtgaaaacgggccggaaattgttaacggcccggcaaacgtgaccagccggagaaatacagctgcactggctgccgttgtcgccggaatgatgggcgttgctgccgcgccagcagagcttccaccgttgcatcctttggcgcttcccgcgaaaggcggtgaagcgatggtgagtcgtgcagctactgtgccgcccatttaccggattgaagcaccgacgcagatcatcatccagacacagccaggacaaagtgcgcaggatattgcgcgggaggtggcccgccagcttgatgaacgtgaacgcaggttgaaggcaaaagccaggagtaactacagcgatcaggggggatacgacgcatga

SEQ ID NO: 478040 - DNA, 1947 bp, Shigella flexneri
atgagtgataataacctgcgcctgcaggtcattcttaatgcggttgacaaactcacccgcccattccgtgctgcacaggccagttcgaaagagctggctggcgcaatcagaaactcccgtgacgcattaaagcaactcaatcaggcgggtaacagcctggaaaaatttcgcaagctgcaggccgataacaaaaagttaggcgacaggctgaactatgccagacagaaggcaaatttgcttagttctgagctggaagcgatggaacaaccatcacaacggcaccttgtggctttaggtcggcaaacgctggcagtccaacgcctggaagaacaacaaaaatatttgcagaagcaaacggcgcttgtgcgtgcagaactgtaccgggcgggaatttctgcgaaagatgatgcgggagcaactgcccgtttagcccgtgaaacatcacgttataaccaggaactgtcgaaacaggaggcgcggctgaagcgactgggggaagctcagcgcaggatgaatgcagcgcgtgccagttatgcccgttcgctggaggtgcgcgatcgcatcgcaggagccggagccaccaccacggcggcagggctggcaatggggacgccagtgatggcggcagtaaaaagctataccagcatggaagatgccatgaaaggtgtgacaaagcaggtcaatggtctgcgtgacgataatggcaaccgcactgcacgtttttatgaaatgcaggatgccatcaaagctgccagcgaacagttgccgatggaaaacggtgcggtggacttcgctgcactggttgaaggtggtgcgcgtatgaacgttgcaaaccctgacgacagctgggaggaccagaaacgtgacctgctggccttcgccagtacggcagcaaaggcggcaacagcctttgagctgccagcggatgaactgtcagaaagtctggggaaaatcgcccagctctacaaaatccctacccgcaatattgaacagctcggtgatgcgctgaactatctggatgataacgccatgtcgaaaggggtagacatcattgatgtcatgcaacgcctgggcggtgtggctgatcgtctggattatcgtaaagcggcggcgctgggttccaccttcctgacactgggcgctgcgccagaggttgcagccagtgcagcaaacgcgatggtgcgtgaattgtccattgccaccatgcagagcaagagtttctttgaagggatgaatctgctgaaactcaatcctgaagtgattgaaaagcagatgacgaaggatgcgatgggaaccatccagcgcgtgctggagaaggtgaacgcactgccgcaggataagcgcctgtctgccatgaccatgttgtttggtaaagagtttggcgatgacgcagcgaaactggcaaacaaccttccggaactgcagcgccagctaaaactgacaacgggcaatgatgcgctcggttccatgcagaaagaatccgacatcaacaaggactcactttctgctcagtggttgctggtcaaaaccggagcgcagaacaccttcagcagcctgggcgaaacgctgcgccagccgctgatggatattctgttcacggtgaaaagcgtcacaggggcgttgcgtcgctgggtggaagctaacccggaactgacaggcacactgatgaaagtagccgctgtggtggctgccgttaccgtgggcctcggcaccttagcggtggcgctggctgcagtgctggggccgctggcagtgatccgtctgggattctctgtgctgggtatcaaaatgttaccttccgttacggcagcagtaactcgaaccagcagtgcgttgtcctggctggcgcaccacaggcactgctgcgacgcgggcttgcttcatcgggcaacgccgcaggtttacttactgcgccgttgtcgtctttgcgccgcacggcatcactga

SEQ ID NO: 478041 - DNA, 303 bp, Shigella flexneri
atgagcgataagcagactgaaaagaccattcaactggatacccccatcatgcgcggtaaaacagaaattaccgaaattgtgctgcgtaaaccgcagtccggtgcgctgcgcggtatacgcctgcaggccattatggatatggatgtgaacgcgatgatgaccgtgatcccctgcatttccagtccggcactgaccgcacaagaaattgcagagatggactcggcagatctcaccgctatgtcggttgaggttgtcacttttttgttgaagaagtcggtgcttgccggtttaccgacagcctga

SEQ ID NO: 478042 - DNA, 516 bp, Shigella flexneri
atggctttaccacgcaaattaaaacacctgaacctgtttaacgacgggaacaactggcaggggatcgttgagtcgctgacgctgccgaaattcacccgcaaatatgagaagtatcgcggcggcggaatgccgggggcggtggatgtggatctggggcttgatgacagtgctctggacacagaattttccattggtggtactgaactgctgctgtttaagcagatgggcaaagccactgtggatggcatccagctgcgctttactggctctatccagcgtgacgataccggggaagtgcaggctgtggagcttgtggtgcgaggacgtcacaaagaagtggattccggcgagtggaagacgggcgaaagcaacaccaccaaagtgaccagtaccaacagctacgcgaagctgaccatcaatggtgaggtgctctatgaagtggaccttatcaacatggtggaaattgtggacggtgtggacctgatggaagcgcaccgcaacgccctcggcctctga

SEQ ID NO: 478043 - DNA, 1173 bp, Shigella flexneri
atggctcaggattaccaccacggggtgcgcgttgttgaagtcaacgaaggcacccgatccattaccacggtgagcaccgccatcgtgggtatggtctgcacgggcgatgatgccgatgcaaaaatgtttcctcttaataaacccgtgctgatcactgatgtgctgactgccagcggtaaagcgggtgagtccggtactctggcccgttcgctggatgccatcgctgaccaggcaaaacccgtgaccgttgttgtgcgtgtgccgcagggtgaaacggaagacgaaaccacgaccaatatcatcggcgcagtgactgctgaaggtaaaaaaacaggtatgaaagccctgttatctgcccagtcacagctcggcgttaaaccgcgcattctcggcgtgccaggccacgataacaaagccgttgcgactgagttgctgagcgtggcgcaaagcctgcgtgggtttgcttacctgtcagcgtatggctgcaagacggtacaggaggcgatcacttaccgtgaaaacttcagccagcgcgaagggatgctgatctggcctgactttacgggctgggacacggtgctgaatgccgaagcaacggcatatgccaccgcccgtgcgctcggtctgcgcgccaaaattgatgagcagaccggatggcacaaaagcctgtccaacgtgggcgtgaacggtgtcaccggaatttctgctgatgtgttctgggatctgcaggacccggcaaccgatgcaggtctgcttaaccagaacgacgttaccacgcttatccgcaaagacggtttccgcttctggggttcccgctgtctgagcgatgacccgctctttgccttcgaaaactacacccgcacggcgcaggtactgatggacacgatggcagaagcgcacatgtgggcagtggacaaaccgctgaatccgtcgctggcccgcgacattatcgaaggtatccgcgccaaaatgcgcagcctggtcagtcaggggtatctcattggtggtgattgctggctggacgagtcggtgaacgacaaagacactctgaaagccgggaaactcactatcgactacgactacacgccagtgccgccacttgaaaacctgatgctgcgtcagcgcatcaccgatcagtacctggtgaatttcgccagccaggtcagcgcgtaa

SEQ ID NO: 478044 - DNA, 567 bp, Shigella flexneri
atgcttattggctatgtacgcgtgtcaacaaatgaccagaacaccgatttgcaacgtaatgcactgaactgcgcgggatgtgagcggatttttgaggacaaaatcagtggcactaagtccgacagaccgggactgaaaaaactgctcaggacattatcggcaggtgacactctggttgtctggaagctggacaggttggggcgcagtatgcggcatctcgttacgctgatagaagagctgcgccagcgtggcgtgaatttccgaagcctgactgacagtattgataccagtaccccaatgggccgtttcttttttcatgtcatgggggccctggctgaaatggagcgcgaactgatagttgaacgtaccaaggcggggctggctgcagctcgcgccaaaggcagagtaggtggacgccgtcctaagttgatcaccgaacagtgggcacagattggacgtttactcgaggccggagaatcaagacagcgtattgcactgatttttgatgtaggtgtttccacaatttatagaaaatttccggcaaataagagcaatgaatccccctga

SEQ ID NO: 478045 - DNA, 315 bp, Shigella flexneri
atgccagttagccgttatctctgcattttcataaacgttggtttgggagaagcggctaaaagaaatgtagggacaggggcgaatcagatacctgatatgggtagttttatgctttctgcttcagttcctggatatcaaaaattgccatccggtttaattattcaatgggggccaattgatgttccgctgacgtctcaggacacagtaacctattttccgattgcatttccgaatagatgtctgcgggtatttgcgactcaggattacactcccggcagtgcaaatgttggtaatgctgccaacttactgatttag

SEQ ID NO: 478046 - DNA, 921 bp, Shigella flexneri
atgaaaagagcgcctcttataacaggacttttgttgatatccacatcctgcgcttatgcctcctcaggagggtgtggagccgacagcactagcggtgcgacaaattacagcagtgtggttgatgatgttacggtgaaccagacagataacgtgacaggacgggagtttacctctgcaacgctaagtagcactaactggcaatacgcctgttcctgctctgcgggtaaggcagttaaacttgtctatatggtcagccccgtacttaccaccactggacatcagacaggatattacaaactcaatgacagcctggatattaaaaccacattacaggcaaacgacattccaggactcacaaccgaccaggttgtctctgttaacacccgattcacacagataaaaagcagcaccgtatattctgctgcaacccaaacgggtgtttgccagggtgacacgtctcgttatggacccgttaatattggtgcaaataccacctttaccctgtatgtcaccaagccatttctcggctcgatgaccattccgaaaacggatattgccgtcattaaaggcgcgtgggtcgatggaatgggaagcccgtctacaggtgacttccatgatttagtcaagttatcgattcagggaaatctcacagccccacagtcgtgcaaaattaatcagggcgatgttattaaagttaattttggattcatcaatggtcagaagtttaccacccgcaatgccatgccagacggttttactccagtagactttgatatcacttatgactgtggtgatacttcaaagattaaaaatctcgttgcaaatgcgcatcgacggtacaactggggtagtagaccagtacaacctggtcgccaggcgaagaagttcagacaatgtgcccgatgtcggtattcgtattga

SEQ ID NO: 478047 - DNA, 519 bp, Shigella flexneri
ttgatctttaatctgtcgcgttatctgcgctataacattgaattaaaagacgatgagcaaatcgatatcaaaaaagagctgtatcaaattaaagactatattgccattgagcaggcccgctttggcgacaagctgacggttatctatgatattgatgaagaggtgaattgctgcattcccagcctgctgatccagccgttggtggagaacgccattgtccacggtattcagccttgcaaaggtaaaggcgttgtcaccatcagcgttgcagagtgcggaaatcgggtacgcattgcggtgcgagataccgggcacggcatcgatccaaaggtgattgagcgggtcgaagcgaatgaaatgccgggcaataaaattggcctgctgaatgtccatcatcgcgtgaagttattgtatggcgaggggctgcatatccgctgcctggagccggggacggaaattgcgttttacatacctaaccaacgcaccccagtcgcctcacaggctacgttattgctttga

SEQ ID NO: 478048 - DNA, 279 bp, Shigella flexneri
atggatttatcgctattaaaagcgttgagcgaggcagatgcgatcgcctcctcggaacaggaagtgcggcagatcctgctggaagaagcggctcgcctgcaaaaagaagtgcgatttgatggtctgggatcggtgctgatccgcctcaatgaatcgacaggtccgaaggtgatgatctgcgcccatatggacgaagtgggatttatggtgcgcagcatctcccgcgaagacgctattgacgtgctgccggttggcaacgtgcgcatggctgcccgctag

SEQ ID NO: 478049 - DNA, 189 bp, Shigella flexneri
gtgcatggcgacattgctattaatagtgcacaggataattactctgccaaagtgataaacaatgatgaaatccaaaatgaaattgatgccattattggtgtcagtaaccttgataagcggttgcacagtacttccgggcagcaatatgtcgacgatgggcaaagacgtcatcaaacagcaggacgctga

SEQ ID NO: 478050 - DNA, 360 bp, Shigella flexneri; identical to SEQ ID NO: 459099

SEQ ID NO: 478051 - DNA, 543 bp, Shigella flexneri
atgtaccagctaaagataaccatccgagacagcaaaccacctatatggcggcgtgtgctggttccagagcaaatcccctttagtgaacttcacgcggtgatccagttggcttttggctggaatgacgaacacctgtatatgttcgagaaagggcgtaaaggtgatcccggtagcgagtatcgcgtatggggtgaggatgaaagcatgggtaatgcggcaatcacaccactatgggcagcgctccagaatgatggtgacaagctggtttacacgtatgactttggcgactggtgggattgcgtcattgtgctggagaagcaaacacacgatacgagcaatcagcccattagctgcctgcgtgggaaaggcaccaccccggtggaaaactcaggcggcttgcatggttacaatgaattgctattacaggccagagagtctgataatcctgagcaggccgagatccacaatttcctgatgctggatattgagcgccgggtttacgacctgagcagcatcaacgacagattgcaggctcttaactga

SEQ ID NO: 478052 - DNA, 186 bp, Shigella flexneri; identical to SEQ ID NO: 459101

SEQ ID NO: 478053 - DNA, 612 bp, Shigella flexneri
gtgagagacagaacgcgcagctataccaccgacctgccccgtatagggttgccattccttgcgaacatgcgtagcaggctggcggatgctgaaccgggtacgcagctttatacccagaccgaaagcggaacgttgtatgccttccggcaagccgacagctacgccatgacaatcaacggcgtgacgcgggctattcgcaccacaaccacgaaggccgggtatggcgtccgggaatggtacgcttgcccccactgtatgaagcgagttgcaaagctgtatatcggcaagaaagacattggctgccgggcgtgctggaaacttcactataaaagccagagtgccgacatactggacaggatgcgcatgaagatacgccagcagcgatgcgcgatatggggcagcaatgaccttgccaataatctgtttaatgacattcgcatgttcccaaaaccaaaggggatgcgctgggctacgtttgacaggaagcgggcagagttatcagccatggagatggcttactggcaggcattcagcccggtagtggacagaatcacgggcgttattgagcgtaaagcaggaaaagcagccagaggcattggcctgactctataa

SEQ ID NO: 478054 - DNA, 432 bp, Shigella flexneri
atgagtacgcaccccatcattattgagttcggcagctatcgctggcccagacatcttgcaatacatgaagcaggtcatgcgatagccgcatggtttttcggcatacaggaggtagaaattgcgttatcgggtaataaccgagtggcaaaaacctaccttagcggcgatgttgatgaatgtggagctgtcgcggtatggcacgccaactatccacggaatgtggctgaggttaagtcttacaccctctcgaatgatgacaccaggttacgtctgatagaccaggtatgccgggctatggttatctctctggctggtatcgtcgcgcaatcacgctatacgggggatgatattaacgcactgatggaaacgtccgggaaagcagacatgaaaaatgttcgtgatttatcagaggtctggtggggaggatgctaa

SEQ ID NO: 478055 - DNA, 435 bp, Shigella flexneri
atgacagcacaaatttcagcatacgggcggctggtggcagatccccagacccgcaccacaacgaacggtaacaacatggctatggcgcggctggcggtgtcgctcccctgtaatgcggcagaggcgggagagtcaaccttctggctgggcgttattgcttttgggaagcaggccgatgcgctggcgaagcaccagaaaggcgaccttgttagcgtggcgggcaatatgcaggttaaccagtggacagggcaggacggtggcatacagaccgggtatcaggtgattgcagacagtgtgatcagcgccagaacggtacgccccggcgggaaggcaggacagcagggacaggcaacggacgcgctgagacgtgcgcagcagccatcccgtgatgaatacgaccaacgcccaccattcgacgatgaaacgccattctga

SEQ ID NO: 478056 - DNA, 2760 bp, Shigella flexneri
atgcgtaatatcgaccttatccgcgaagtgaccagtgccgccgccgggcgctggccttatgtgctggctggattgtctatcgacgtgcctgattcatcgcgccgccattctccatgccctgcatgtggtggaaaagaccgtttcagattcgacgacaacgggcgcggtagctttatctgcaaccagtgtggcgctggtgacgggctggatttaatcaagcgggttaacaactgcgacactacggaggcggcacagcttgccgctgacgtgctgggtattgattaccgggcagcggaaaccgacccggtggcagcgagccatagaagagagcaactggaagctgaccgccagcagcgtgagcaggagcgccagaaacaggcagcagaggatgcagagcagcgaagggctacgtttgcccgtctgtatgccggaatgcgccagagtgccacacagggagaatctgattacctgcaatcaaaagggctgaccgggtttaaatatccggtaatgccggatggttcgttattgctggagctggtggacgaatccggcgcagtggcagcagcgcaaaccattacaccgcagggagagaagcgactcctgacaggttcagcaaagcgcggggcatatcacgccgttaacgcaccggaacagccgcaggcggtgattattgccgaggggctggcaaccactttatcagtccacctgatgcgcccggacgcgcttacagtggcggcaattgacgccgggaacctgatccacgttgccggagtaatgcgccggaaacacccgcagtcgcaaattatcattgccgcagataacgaccaccagcaggacgaccaggcgaacacgggcaaagatgccgcagagaaagccgccttatccgtggctggctgggtggcgctgccgccgacagactacaaagccgactgggacgactaccgccagcaaaacgggctggaagtcgctacggctgcgtttaacgattcgatgtaccagattcaaggggaagccgtgaaaccgcgattgcaagccattgagggcggtaaaactgaccatccagagaaagatccactaaaaccccacattgagagccgcaaagatggcgttttctgggtaacgccgaaggtggacaaggaaagcggggagatcgtcaacgctgaaagctggttatgttccccgttggaggttatcggcacgggacgcgacgacaaagatcagtatcttattatctcatggctggcattcggtgcaggcataccgacaacagcggctatcccgctggctgatattggcgagcgtgaaggctggcgcaccctgaaagctggtggggttaacgtcacgaccaaaagcagtttacgggcgatccttgccgactggctacagcggagcggctcgcgtgaattgtggcgcgttgctcatgctacaggctggcagtgcggggcatacatcatgccggacggggaaatcatcggcacacctgagcggcctgttttgttcagcgggcgcagttcagccgctgccgggtataccgtagcaggaacgccggaaagctggcgcaacagtgtcgcgcggctggcatacggcaactacgcgatgatgacaggcattgccgcagcactggcagcgccattaatcggggtggcagagcgtgacggattcgggattcatttttatgagcaatcgagcgccgggaaaacaaccacgcagaacgtggctagcagtctatacgggaaccctgatgccttgcgcctgacgtggtacgggacggcgctggggctgataaacgaggccgccgcccacaatgacggactgatgccgctggatgaagtcggacagggcgcagacccgataagcgtttctcagtctgcctatgccctgtttaacggcgtggggaaattgcagggcgcgaaagaaggcggaaaccgggatctaaaacgctggcgtaccgtggcaatcagcaccggggaaatggatttagaaacgttcattgccaccgcaggacgcaagacaaaagcggggcaactggtgcgcctgctgaatatcccgttaagtaaggcggtgcgctttcatgagcaccagacagggaaagaccatgcagacgcattaaaatccgcgtggcagagcaatcacggcgctgccgggcgggagtggatcagatggcttgcaggccaccagcagcaggccattgataccgttcgtgactgtgaagctcgctggcgcagtcttattcctgccgactatggggaacaggttcaccgtgtaggggcaaggttcgccattctggaggctgctttactgctgggtggcgtggttactggctgggatgatcaaacgtgccgtgatgcgatacagcacagctacaatgcgtggttgcgtgagttcggcacggggaacaaagagcaccagcagattattgagcagacggaggcgtttttgaatgcctatgggctgagtcgattcgcgccgctgggttatgacccgcgcgatttacccatccgtgatttagccgggtacaggaagaaggggaaccacgacggcgacccgataattttctacaccttcccggcagcgtttgagcaggagattgcaaagggcttcaataccaaacagtttgccgaagttctaaagaatgcaggaatgcttacaccaccaacgagcgggcgaggctatcaggggcgagtaagggaggatgggcgacagattcgcgtctatgtactcaatttcatggcggaggaaagcagccagccagaaaaataa

SEQ ID NO: 478057 - DNA, 342 bp, Shigella flexneri
atgattactaaaaatttccgactgaatgcgctggcgaataagtatgcatcggcactgtataaccacattacctccaccagcggcggggactatttcatggttgatgcggacggcctcgccgtccgtgtggaaatcgtcaatggagtaaaaggcgttcgcagcctgatcgatagctacacactggcagccatgaaagtatcctacccgcagtgggaaaccgtgggggtcgagcttcttgagcgttgcgtcactaaggacggattgactgacgtcgggcgcgagatatggcaaagcatggttaaagacatgggcgcgaccgtggcagggggcaaccatgcgtaa

SEQ ID NO: 478058 - DNA, 627 bp, Shigella flexneri
atgagcaacgcaccgaccattaaatcgggaaatgccgacttattacacgccgaagccacaccgcacggcgtcaatatcatgacccgcaatgatgccgggggatatgagcaggttgctcttatcagctacgagagcgccgtgaacggccttgacgccggagagtacgacgataagccagatatcggatacgccattcattttgccgttgctgatggcggggcgcgtggctggttcgacttcaccgcgcagcataacgtcactatgtggcgctggctgattgctgcgacgttcatttctgagatgaagcgcgaaaacggcacaaccacggtaactgagtctgacggcacttcatcgcaggtggcgatttactccaatggcacggcggggattgtggtttacccgttcgcggaacgtctggcgatggctaacaacatggagggcgcaatggttgagcgctacggcattgagcagggaacagcgaacgccattgttttttatcaggccatgatcgacacggagcgcggcgagttgaccccgttcgggcgtgaaacgcttgctgaacttcacaacagctttatagctgaactggatgaaaacggctggcctgaaatgccgctggcgcactga

SEQ ID NO: 478059 - DNA, 264 bp, Shigella flexneri
atgaacataaataccatctatcgccacccggcagatctggaagccgaatcgatgctatctcgtaaagaagcatgcccggatgattttacgctggcagaccgaacagcagaacgcatgacccgcgcccgcaatgggctggctcacgttatgaccgatttattaccactcctcgaagttgagcaagcagccatcgcgtattgctggctgagtaaagtcctgatgattgtcgatatagccagaattgatgcggagggcagcgcatga

SEQ ID NO: 478060 - DNA, 315 bp, Shigella flexneri
atgagcatgtatgacgatttagtgtcctgcaaatttgatggttgtacacctgatgatctgaacggaattgagagccgcgccagtgatgccgtggatgatttaatgctgggcgtaagtgccattggtagcctcatgttctgggcggctggtagcgatggctacccggaggaaagcgctaaggctgatatgtacagattaggcgcaatgctgggacatatcggagaagttgcgcgggcgctgaacgatagcgctgcaaacgccgcattcttgcgctcaatcagtgaaaaagaagccaaagggagggcgggcaaatga

SEQ ID NO: 478061 - DNA, 180 bp, Shigella flexneri
atgcttaattacttccgtgttgcaggatgcgccaccgcccagagcggcgaattagtcgagttcgtttatatcgttgacgcccgcagcgcgatcagcgccaaagctgaggcgctaaatcaggccagaaatgaacgcctttcccacatccagattacccgcgttcgtgaggtggcggcatga

SEQ ID NO: 478062 - DNA, 705 bp, Shigella flexneri
gtgatactgaatgaacctgccgcccagaaagaagcctttaatctggctggcatgttgtcaaaagttgacatctgcaaccttacaaaacctgatattgataccgcagcgcccggagttccgttaccagtacgcgaggcgcttaccctcaacaaaaagatggtgagccgtgcacagggaaaactcttaaagggttacggttttatctggtatgaccacctagcagagaaaagctgttatagtccaagcgttgctgcaaaatcagcaaccgggattgagaccccgaacacactaagggcgacacagacgccgaaagcgtctttttttgtgtccgatcaccacgcacatcaaatcagcggccttgcccgtactgtatctatggtggcgtcagtggggctatcttcggataggccggtttcctttgtgtccggtagtctcaaccccgctgacgtcaccgccaatcatgacattgagacgtcaggcggtgactccttaaacacaaaggaggctgccataatggctactacccctacccaaaaaccgcaatttatctggattatcgcagcagttcgccgcgatatgccgacaattaccgccaaaattcaccatatcgccgcagagactgagcaggaagcccgccgcattctggcgcgggatcacgtttgcttttttgccggacgtattcgcacagggggcgcacatgcttaa

SEQ ID NO: 478063 - DNA, 183 bp, Shigella flexneri
atgcgtaaccataatccgatgccgggaagccgttacaaggacagtcacggggctgtagtgaccgtacagcgcgtcgagcataaccgagtgaccttttaccgcgagggctatcagtcgccatgtgttcagcctttggagagattcgttaatgagttcgtggaggtgcgccgtgatactgaatga

SEQ ID NO: 478064 - DNA, 834 bp, Shigella flexneri
atgaacatcgaaaaaagcagattaatttctgaggccgcccctcatctgaacgcctatcagggcacaattaacggtaatgaatttgccacaattgtcccggttattcctggtcatatcggtgggcgtgaaaccaatattgttagcgccaaagcgttacacaaagcgttgggcgtgggaaaagacttctctacatggatcactgatcgcatctctgaatatgacttcaccattgggcacgattactcagtccataaaacaatttccccaaatctggggaaaagcccgaatggcgtggcttacagcaagattaaacagtctggcagacccggcaaagactatctgttaagtgtcggaatggcgaaagaactggcgatggtcgaacgcaccgaacagggccgcgctatccgccgttatttcatccagtgcgaggaagaattacagcgtagcgtgcctgaaatcgccgcccgctatcgtcgccagctaaaagcccgtatcagtgccgcaaacaattttaagccaatgtgcgatgcgctgaatatggcccgtgccgagctgggtaaaacgacgcagcagcgccactacagcaacgagagcaacatgatcgcccgtatcgtgctgggtggcatgacggcgaagcagtgggcgcaggcaaatggcattactggcgaaccacgggacagcatgaacgcagcacagcttgaacacctcgcctatctcgaaagcaccaatatcacgttaattgatatgggcatggaatatgagcagcgcaaaggagaactcacccgcctgtcgcaacgctggctcgctaagcgtctggaggtaaaccatgcgtaa

SEQ ID NO: 478065 - DNA, 432 bp, Shigella flexneri
atgaaaaagaaaaaccgcccattacaggcggctaactcagatattcgcacgtctgatattacgccgaccaccagcccggtacaagtacctaggcgtaccccaaagaaacaccgcgcccgcgtctatatgctgcgtactggtatagagggatggacagaaaacgatattctgcgttattgccgcctttcgtctggaaggaactacgccagcgagttagagcgcaggcttgatattcagcttgagcgtatagacgaaaagaaccccgacgggatagggtcacatttacgctatcgctttaccgggcgcggtgacgttctaaaagttattcggcttgtgaaccataacgccgacgctggcggctatcagggactttctcagcctgaaattgccgacattctcaatctatacccggacaatctcaccgccgcctaa

SEQ ID NO: 478066 - DNA, 210 bp, Shigella flexneri
atgacagaacaccaatcaccacttcccacaagcggctatattcgccgcttccgcctggctcaagcgctgggcgtccatgtagcaaccattgatcgttgggttcgagataagcgactgccgcgcccggtaaagctgggcgagaagattaccgcctttgatgcggtagagattaacaactggctggcagaacgtcggggaaaggtggcttga

SEQ ID NO: 478067 - DNA, 591 bp, Shigella flexneri
atgatttgcgcttttgttaacagctgcctgagtgatgggcgtatgacgataacggataatggcagaattgaagcaagagcagacatagaaaattgcgatatatacaaccagtcgatgctatatgataccgatgatccaaggtcagaaggtaaaacggggatatttgtcgatatcgggcttgatttgatggacgatgacgaaatgatagctggatttaaaacattgctaaaaaggtggagggttcagaccggtatacctgaaagtgccgtcaaagaaaaaaagaggttcggggcgtcaacaattgccaagatccatcattaccggataatcccatatcttgatatatcaagatgggcgaggattaacggcattatggtgtccaatgagctttatgcgcgtctactgttccctgagccactacctgacggaacggttaagggtggcgctcacatccgtgacactgtgaaaccatttgcagagtctgtgagagatgtgcttagtcgagtggaattaaaaaaatactacgcagataacccccacataaaaaacatgaggttttcagattttctgaaattgatagattttcaataa

SEQ ID NO: 478068 - DNA, 186 bp, Shigella flexneri
atgagtgagcgtggcgttcagcaaaaatcactggcggccacacttgaagaattacagcggatttgcgacagccttgcccgtcatcatcaacctgccgcccgtgagctggcggcaattgtctggcggctgtactgctcgctttcgcaacttgagcaagcaccaccgcaaggtacgctggcctcgtaa

SEQ ID NO: 478069 - DNA, 129 bp, Shigella flexneri
atgactgatattgatgatgttttcaacactattaacgctttgattaacgagggcgacaagtctcaggaagatattgctgatgaagccggaatgtctccggcaacactctcggctctgcgtaaaggatag

SEQ ID NO: 478070 - DNA, 498 bp, Shigella flexneri
atggtctgccagatggaactgaccagccatctgctgacgtcgatgacggacgccatgcgcttccccggaggagaaatggcggatctgtacagtcatcgctgggaaatcgaactgggatacagggagataaaacagacgatgcaactgagcaggctgacgctgagaagtaaaaagccggagcttgtggagcaagagctgtggggtgtcttactggcttataatctggtgagatatcagatgattaaaatggcggaacatctgaaaggttactggccgaatcaactgagtttctcagaatcatgcggaatggtgatgagaatgctgatgacattgcagggcgcttcaccgggacgtataccggagctgatgcgcgatcttgcaagtatgggacaacttgtgaaattaccgacgagaaggggaagggccttcccgagagtggtaaaggagaggcccaggaaataccccacagccccgaaaaagagccagtcagttgcttaa

SEQ ID NO: 478071 - DNA, 675 bp, Shigella flexneri
atgaattcccagacaacaaaagatattccctgcttccgttcttatttgcctgatgccctgcgtttaagatttgaagataaactgaccatccgggccatcgctcagcgtctgggtctcagtcattccacaatacatacgctttttcagcgatttcttgcatccggtatcgcatggccattgcccgattcagtttcattcgctcaacttgacgccatcctttatgccaacagaaagaaggaattaacagagcctcaaatcagagaaggctcatggcgaaaagaacggcgaaccagctatagccgtgaatttaaggtccgtctggctaagcaggcgttacagcctggggctgttgttgcccggatcgccagagaacacgatatcaataataacctgctgtttaaatggaaaagccagtacgaggacggcttactgagcgatgatgacatacaggaatgcatgcctgtcccggtggctctgactgatacgccggagccgaccagaccagttacaaatcccttctggcgtaacaagcatgatgagcgccctgagggggggcccggaaacgtcccacggtgcgagctgcatcttaaatcaggtgtggtaaaactgtttgaccctctcactccggaactgttacgggcgctaatccgcgaaatgaaagggggtatccgatga

SEQ ID NO: 478072 - DNA, 834 bp, Shigella flexneri
ttggcggaagagtacgatatttactggtatgctggtgaagatgacgcgagcaaaagctatgcttgtctgacaccggaactggtagcgcagtttggtttaaaagaagacgtggcgaaaaatctgcaatggagccacgatgctaaatgcctgaaatccggtcaactggaaggcatggaaattaaggctgatttaagccagtccgcattagtcatttcactgcaacaggcttacctcgaatatacttatcccgactgggatccgccttcacgttgggatgacggcatctccgggatcgtcgcggactacagcatcaacgcacaaacccggcacgaagaaaatggcggtgatgatagtaacgagatcagcggcaacgggacggtcggggttaacctagggccgtggcgtatgcgtgctgactggcagactaactatcaacatactcgcagtaatgatgacgatgaattcagcggcgatgaaactcaaaaaaaatgggagtggagtcgctactatgccaggcgggcgttaccatcattaaaagccaaactggcgctgggcgaggattacctcagatccgatatttttgatggttttaactatgttggtggcagtgtcagtactgacgatcaaatgttgcctcccaatctgcgcggctacgcgccagacatttccggcgtggcacacaccacagcaaaagtgaccgtcagccagatggggcgtgtgatttacgaaacgcaggttccggctggaccgtttcgtattcaggatcttggtgattctgtctccggtacgttgcatattcgcattgaagaacagaacggccaggtgcaggaatag

SEQ ID NO: 478073 - DNA, 642 bp, Shigella flexneri
atgttgccatgggaactacgcggctacgccccacaaattagcggtattgcacagaccaatgccacggtgacgatcagtcaatcaggccgcgtcatttaccagaaaaaagtcccaccaggcccatttatcattgacgaccttaatcagtctgttcagggcacactggatgtcaaagtgacggaagaagatggtcgggtgaacaatttccaggtttcagcagcatcgacgcccttcctgactcgtcagggacaggttcgctataaactggccgcgggtcagccacggccctccatgtcacatcaaactgaaaatgaaaccttttttagcaatgaagtttcctgggggatgctgtcaaacacctcgctgtacagcggcctgctgctttctggtgatgactaccattctgccgcaatgggtattgggcaaaatatgctgtggcttggtgcgctgtcgtttgatgtcacgtgggccagtagccattttgatactcagcaggacgagcggggcttaagctaccgttttaattacagcaaacaagtggatgccactaacagcacgatttccctcgccgcttatcgtttctccgatcgtcattttcacagctacgccaactatctggatcacaaatacaacgacagctga

SEQ ID NO: 478074 - DNA, 627 bp, Shigella flexneri
atgtacggaatgcgtgactgcctcgcgtttggcgagccgatgaaaataggttatttacccgattcctttggcatgtccgggcaactgccgcatatctacaatggatttggcattacctgcaccatgttctggcgtggatgttctgagcgccacggtacggataaaaccgagtttttgtggcaaagcagtgacggtagcgaagtgacggcgcaggtgatgccgttgggttatgccatcggtaagtacttacctgcggacgaaaacggattacgcaaacgcctcgacagttattttgacgtgctggaaaaagcgtctgtaaccaaagagattttgctgccgaatgggcatgatcagatgccattgcagcaaaatatcttcgaagtgatggagaaactgcgcgaaatttatcctcaacgaaagtttgtgatgagccgctttgaagaggtatttgagaagatcgaagcgcagcgagataatctggcaaccctgaaaggggaatttattgatggcaaatatatgcgcgtgcatcgcaccatcggttccacgcgcatggatatcaaagttgcccacgcacgtattgaaaataagattgttaatctgctggaaccgctggcaacgctggcctag

SEQ ID NO: 478075 - DNA, 333 bp, Shigella flexneri
atgtgtctggcgggggaaggctgcatcgttctctggtgtatccggtgtgcgccagaacacaccatcgatggccagcagggtcaggccgcaccagtgcggatgcggcgtggtgttatgccagagctgcgctgttttcgtgaacacgcggcggacagcctcacttcccaggcgctggcgggcctgaataacggcactgggggcaacgaaggggcgattgcccggcagcatgatgtccaggcgattcacaatctggtgaagaggttctttacgctcaagcgccatgccaacaatacaccagaccatcatttcgaggggaagacggcgcttgcgtag

SEQ ID NO: 478076 - DNA, 2397 bp, Shigella flexneri
atgaaggctgaaatcagccgtagaagtctgatgaaaacctccgcacttggcagtctcgcgctggcaagcagtgctttcactctgccattttcccaaatggtccgggcggcagaggctccggtagaagagaaaacggtctggagttcctgcaccgttaactgcgggagccgctgtctgctacgtttgcatgtgaaagatgacaccgtgtactgggtggagtctgatacgacaggtgacgacgtttacggtaatcatcaggttcgggcatgtttacgcgggcgctctatccgccgacggatgaatcatcctgacaggttgaaatatcccatgaagcgcgtcggcgagcgcggtgaaggtaaatttgaacggataagttgggacgaagccctggataccatcagtgataatcttcggcggatcctgaaagattacggcaatgaggctgtacatgtcctgtacggaacaggcgtagatggcggaaatatcaccaactcgaacgtcccgtaccgtctgatgaactcttgcgggggttttctcagtcgctatggcagctacagtaccgcacagatcagtgccgcaatgagttatatgttcggtgccaatgatggcaacagcccggatgatatcgccaatacgaaactggtcgttatgttcggaaataacccggcagaaacgcggatgagcggcggtggtgtcacttactacgtcgagcaagcccgcgaacgttcaaacgcacgcatgatcgtcatcgatccacgctataacgacacagctgccgggcgtgaagatgaatggctgcccattcgccctggcaccgatggcgcactggcctgtgcgattgcctgggtactgattactgaaaacatggtcgatcagccatttctcgacaaatattgtgttggttacgatgaaaaaacgctgcccgccaacgcaccacgtaacgcgcattataaagcctatattctgggcgaagggcctgacggcatagctaaaacgccggaatgggcagcaaaaatcaccagcatcccggcagaaaaaattatcctgttggcacgagagatcggttcagcaaaacctgcttatatttgtcagggttgggggccacaacgacactccaacggcgaacaaacgtcccgcgctattgccatgctttccgttcttaccggtaacgtcggcataaacggcggcaactcaggtgtacgcgaaggtagctgggatctgggggtagaatggttcccgatgctcgagaatcctgttaaaacgcagatttccgtttttacatggacagatgccatcgaccatggtacgaaaatgaccgcgacccgtgatggtgttcgtggaaaagaaaaactggatgtccccatcaagtttttatggtgctacgccagtaacacattgatcaatcaacatggcgacatcaatcacacccatgaggtgcttcaggatgacagcaagtgcgagatgattgttggcattgaccacttcatgacggcctcggctaagtattgcgatatcctgttgcctgacctgatgccaacagagcaagaagaccttatctctcatgaatctgcagggaatatgggctatgtgatcctcgcccaacccgcaacctcagcaaaatttgaacgcaaacccatctactggatgctgagtgaagtcgccaaacgcttaggaccagacgtttatcaaacctttactgaaggtcgcagtcagcatgaatggatcaaatatctccatgcgaaaacgaaggaacgtacccctgagatgcccgactacgaggagatgaaaacgaccgggatctttaagaaaaaatgcccggaagaacactacgtcgctttccgcgcattccgtgaagatccacaggcaaacccgttgaaaacaccttcggggaaaatcgaaatttattctgaacgactggcgaagattgcagatacctgggaattgaaaaaagatgaaattattcatcccattcctgcgtatacctcaggttttgatggctgggacgatcccctgcggaaaacctatccactgcagttaacgggcttccactacaaagcgcgtacccactccagctacggcaatattgatgtgttacagcaggcctgcccacaagaggtgtggatcaaccccattgatgctcaggcacgcggtatccgtcatggcgataccgtgcgggtatttaacaataatggagaaatgctgattgccgcaaaagtgactctgcgtattctgcctggcgttaccgccatcgggcaaggtgcgtggcttaaagcggatatgtttggtgaccgggtcgatcacggcggcagtatcaatattctgacctctcaccgcccttcaccgctggcaaagggaaacccgtcgcacagcaatcttgtccagatcgaaaaggtttaa

SEQ ID NO: 478077 - DNA, 699 bp, Shigella flexneri
atggttaatgtcagtcatatcaggaccttaagtagcgttgagtcaactacttcaagtccgtccatccgtctgacagtggagtccatctggaactacgcgggaaataccctcgttaatcagcattctgacatcaacaaaacgcatgaaattctgcaggacgaatcgaaatgcgaaatgattgtggtcatcgaaaactttatgacctcatcggcaaaatatgccgacattctgctggcagacctgatgaccgttgagcaggaagatattattcctaacgactacgccggtaacatgggatatctcattttcctccagccagtcaccagcgaaaaattcgaacgtaaaccgatttactggatcctgagtgaagtcgcgaaacgtcttggacctgacgtctatcaaaagttcacagaaggtcgcacgcaggaacaatggttacaacatctgtacgccaaaatgcttgccaaagatccggcgttaccgtcttacgacgaactaaaaaaaatgggtatctataagcgtaaagatcccaatggccattttgtcgcctacaaagcatttcgtgacgaccccgaggcaaatccacttaaaacgccttccggtaagattgaaatttattccagcaagctggcggaaattgcccgtacctgggaactggaaaaagatgaagtgataaccacgcattctccctggagttag

SEQ ID NO: 478078 - DNA, 834 bp, Shigella flexneri
atggtctgccagatggaactgaccagccatctgctgacggctgcagccttcggcacgatgaagaacagcgaaaatgagcttgctgagcaacttatagaacaaaccggcgataacactctgacgttaatggataaaggttattactcactgggactgttaaatgcctggagcctggcgggagaacaccgccactggatgatacctctcagaaagggagcgcaatatgaagagctcagaaaactgggtaaaggcgatcatctggtgaagctgaaaaccagcccgcaggcacgaaaaaagtggccgggactgggaaatgaagtgacagcccgcctgctgaccgtgacgcgcaaaggaaaagtctgccatctgctgacgtcgatgacggacgccatgcgcttccccggaggagaaatggcggatctgtacagtcatcgctgggaaatcgaactgggatacagggagataaaacagacgatgcaactgagcaggctgacgctgagaagtaaaaagccggagcttgtggagcaagagctgtggggtgtcttactggcttataatctggtgagataccagatgattaaaatggcggaacatctgaaaggttactggccgaatcaactgagtttctcagaatcatgcggaatggtgatgagaatgctgatgacattgcagggcgcttcaccgggacgtataccggagctgatgcgcgatcttgcaagtatgggacaacttgtgaaattaccgacgagaaggggaagggccttcccgagagtggtaaaggagaggccctggaaataccccacagccccgaaaaagagccagtcagttgcttaa

SEQ ID NO: 478079 - DNA, 1086 bp, Shigella flexneri
atggatctattgattgttttaacttacgtggcgctggcgacggcggcgctgggaggcgtgtttctggtgagtggtttgattttgttgatgaactacaaccacccttacacttttaccgcgcaaaaggcagtgatagcgatccctatcacgccacaggtgacgggaattgttactgaagtcactgacaagaataatcagcttattcaaaagggcgaggtgctttttaagctcgacccggttcgttaccaggcgcgagttgacagacttcaggctgacctgatgacggcgacgcataatataaagacgctgcgtgcgcagctcactgaagcgcaggccaacaccacccaggtttcagcggagcgcgaccgtctgtttaaaaattatcaacgttacctgaaaggcagccaggcggcggtgaatccgttctcggaacgtgacatcgacgatgcgcggcaaaatttcctcgcgcaggatgcgttagtgaaaggctcggtggcggagcaggcgcagatccagagtcagctcgacagtatggtcaacggcgagcaatcgcagattgtgagcttaagagcgcaacttactgaagcaaaatataatcttgagcagactgttattcgcgcaccaagcaatggctacgtcactcaggtactgatccgcccaggtacatacgcagctgccttgccgctgcgtccggtgatggtcttcatccccgagcaaaaacggcaaattgtcgcccaatttcggcaaaactcgctgttacgtctgaaacctggcgatgatgcggaagtggtgtttaacgcgctacctgggcaggtgttccacggcaaattgaccagtattttacctgtcgtgccaggcggttcttatcaggcgcagggggtattgcaatcattaacggtcgttcccggcacggacggtgtgctgggaaccattgaactggaccctaacgatgatatcgatgccttacccgacggcatctacgcccaggtggcggtttactccgaccatttcagccatgtttcggtgatgcggaaagtgctgctaagaatgaccagttggatgcattatctttatttggatcattga

SEQ ID NO: 478080 - DNA, 366 bp, Shigella flexneri
atgatttttacgtcaagttgctgcgataatttatcaatagatgagattatcgaacgtgctgaaaaaggcgattgcgaggctcaatatattgttgggttttattataatcgcgatagcgcaattgactctccggacgacgaaaaggccttttactggctgaagctggccgctgagcaaggtcattgtgaagcacagtattccttagggcaaaagtataccgaggataaaagccgtcataaagataatgagcaagccatcttctggctgaaaaaagctgccctacaaggccatactttcgcttccaacgcccttggctggatactggatcgtggagaagaccccaactataaagaagcggttacctag

SEQ ID NO: 478081 - DNA, 441 bp, Shigella flexneri
ttgtacctcgctggcatcaaagatgtttatacgtgtgaaattgtcggctacgccatgggagagcgcatgacaaaagagctgacaggtaaagccctgtttatggcgctcaggagccagcgcccacctgccgggctaatccaccactctgatcgaggttcacagtactgcgcatacgattaccgggtcatacaggagcagtctggtctgaaaacatcaatgtcgcgtaaaggtaactgttacgacaacgctccgatggaaagcttctggggaacgctgaaaaatgagagcctgagccactatcgttttaataaccgggatgaagccatctcagtaatacgggaatacattgagattttctacaatcgtcagcgtcgtcactctcgtctggggaatatctccccggcagccttcagggaaaaatatcatcagatggctgcttaa

SEQ ID NO: 478082 - DNA, 246 bp, Shigella flexneri
atggctggtcagttccatctggcagaccattttgacctgcgggtagagcgccgggttcccggcatgtgtctgggcgcggggcgttttccgacgctcaccactgaggcggtggcattaagcagcggcggcagcaacggtattctcgccgcccaggctttatggcaactgttgttaccgcttattatttttgccctgaccgcgttagtcgcaaaatgggtaggttatgtcagacaaggaatccgctaa

SEQ ID NO: 478083 - DNA, 342 bp, Shigella flexneri
atgctctgcgtgaaaaatgtttcgctacgtttaccagaaagccgcttgctgacaaacgttaactttacggttgataaaggtgacatcgtcacgttaatggggccgtctggctgtggaaaatccactctgttttcatggatgattggtgcactggccggacagttttcttgtacaggtgagctatggctcaatgagcaacggattgacatgctacccaccgcacagcgtcagattggcattctttttcaggtgcactgttatttgaccagttcagcgtcgggcaaaatttactgctggcgctaccggcgacacttaaggggaatgcccgacgtaatgccgtga

SEQ ID NO: 478084 - DNA, 678 bp, Shigella flexneri
atggatcagacatattctctggagtcattcctcaaccatgtccaaaagcgcgacccgaatcaaaccgagttcgcgcaagccgttcgtgaagtaatgaccacactctggccttttcttgaacaaaatccaaaatatcgccagatgtcattactggagcgtctggttgaaccggagcgcgtgatccagtttcgcgtggtatgggttgatgatcgcaaccagatacaggtcaaccgtgcatggcgtgtgcagttcagctctgccatcggcccgtacaaaggcggtatgcgcttccatccgtcagttaacctttccattctcaaattcctcggctttgaacaaaccttcaaaaatgccctgactaccctgccgatgggcggtggtaaaggcggcagcgatttcgatccgaaaggaaaaagcgaaggtaaagtgatgcgtttttgccaggcgctgatgactgaactgtatcgccacctgggcgcggataccgacgttccggcaggtgatatcggcgttggtggtcgtgaagtcggctttatggcggggatgatgaagaagctctccaacaataccgcctgcgtcttcaccggtaagggcctttcatttggcggtagtcttattcgcccggaagctaccggctacggtctggtttattttaaaacgccacggtatgggttttga

SEQ ID NO: 478085 - DNA, 1428 bp, Shigella flexneri
gtgggcgattacatttttggcctgaaggcgcagggacgttataacggtgaaccgctcacgggtacgggaaaaataggcggtatgctggcgctgcgtggcgaagggacgccgtttccggtacaggctgatttccgttcaggtaatacccgtgttgcttttgatggcgtcgtgaatgacccaatgaagatgggcggtgtcgatttacggcttaaattttctggcgattcactgggtgatctctatgaactgacgggcgttctgctgcccgataccccgccgtttgaaacggatggtcggctggtagcgaaaatcgacactgaaaaatcgtcggtctttgattatcgcggttttaatgggcgaattggcgatagcgatatccacggttctctggtctacaccaccggaaagccacgaccaaaactggaaggtgatgtcgagtcgcggcaattgcggctggcggacctgggaccgttgattggcgttgattccgggaaaggggcagaaaagtcgacacggtctgaacagaagaagggcgaaaaaagcgttcagcctgcgggcaaagtgctgccttatgaccgcttcgaaaccgataaatgggacgttatggatgccgatgttcgcttcaaagggcggcgcattgagcatggcagtagcctgccgattagcgatctttctactcatatcatcctcaaaaatgctgacctgcgcctgcaaccgctgaaatttggcatggcgggcggcagcattgcggcgaatattcatctggaaggcgataaaaagccgatgcaggggcgggcagatactcaggctcgtcgactgaaactgaaagaactgatgcccgatgtggaactgatgcagaagacgctgggggaaatgaacggtgacgcggaactacgcggtagcggtaactcggtggcggcgcttttaggcaacagtaacggcaacctgaaactgttgatgaatgacgggctggtgagccgcaacctgatggagattgttgggctgaatgtcggcaactacattgtcggtgcgatatttggtgacgatgaggtgcgggtgaactgcgcggcggcgaatctgaatattgccaacggcgtggcgcgcccgcagatttttgctttcgatactgagaacgcgttgattaatgttaccggcacggcaagttttgcttcggaacagctggatttgactattgatccggagagtaaagggattcggattatcacactgcgttcgccgctgtatgtgcgtgggacgtttaaaaatccgcaggctggggtgaaagccggaccgctgattgcccgtggtgctgttgctgcggcactggcaacgctggtaacaccggcggcggcgttactggcactgatctcaccttccgaaggggaggctaatcagtgtcggacgatattgtcgcagatgaagaagtga

SEQ ID NO: 478086 - DNA, 888 bp, Shigella flexneri
atggggatgagtgcgttcccctctttcatgacgcaggcgacgccagcaacgcaaccactgatcaatgctgagccagctgtagtcgcccagacggaacaaaatccgcaggtggggcaagtgatgtcaggcgagcagggagctgatgcccccatcgtggcgcagaacggtccttcgcgtgatgtgaagctgacctttgcgcaaatcgcgccgccgccgggcagcatggtgctacgtggtattaacccgaacggcagcattgagtttggtatgcgcagcgatgaagtggtgacgaaggcgatgctcaacctcgaatacacgccatcgccatcgttactgcctgtccagtcgcagttaaaggtttatctcaatgatgagctgatgggcgtgctgccagtgaccaaagaacagttgggtaaaaaaacgctggcgcaaatgcccattaatccactgtttattaccgacttcaaccgtgtgcggctggagtctgtcggccattatcaggacgtgtgcgaaaacccggccagcaccacgctttggctggatgttgggcggagcagtagactggatctgacctatcagaccctgaatgtgaagaatgacctgtcacacttcccggtgccattctttgacccgcgcgataaccgtactaacaccttgccgatggtctttgcgggtgcgccggatgttgggctgcaacaagcatctgccattgtcgcctcgtggtttggttcgcgttctggctggcgtgggcagaacttcccggtgctctataaccaattgccggatcgcaatgccattgtctttgcaaccaacgacaaacggccggacttcctgcgcgatcatccggcggtaaaagccccggtgattgagatgattaaccatccgtag

SEQ ID NO: 478087 - DNA, 1638 bp, Shigella flexneri
gtgaaatatatcgcccgcaccactcatgaacatgcgaaagcgggcaacatcaacaatgcgctgaaatatgccaaaggcgagttcgtgtcgattttcgactgcgaccacgtaccaacgcgatcgttcctgcaaatgaccatgggctggttcctgaaagagaaacagctggcgatgatgcagactccacaccacttcttctcgccggacccgtttgaacgcaacctgggacgttttcgtaaaacgccgaacgaaggcacgctgttctatggtctggtgcaggatggcaacgatatgtgggacgccactttcttctgcggttcctgtgcggtgattcgtcgtaagccgctggatgaaattggcggcattgctgtcgaaaccgtgactgaagatgcgcatacttctctgcgtttgcaccgtcgtggctatacctccgcgtatatgcgtattccgcaggcggcggggctggcgaccgaaagtctgtcggcgcatatcggtcagcgtattcgctgggcgcgcgggatggtacaaatcttccgtctcgataacccgctcaccggtaaaggactgaagtttgctcagcggctgtgctacgtcaacgccatgttccacttcttgtcgggcattccacggctgatcttcctgactgcgccgctggcgttcctgctgcttcatgcctacatcatctatgcgccagcgttgatgatcgccctattcgtgctgccgcatatgatccatgccagcctgaccaactcgaagatccagggcaaatatcgccactctttctggagtgaaatctacgaaacggtgctggcgtggtatatcgcaccaccgacgctggtggcgctgattaacccgcacaaaggcaaatttaacgtcaccgccaaaggtggactggtggaagaagagtacgtcgactgggtgatctcgcggccctacatcttccttgttctactcaacctggtgggcgttgcggtaggcatctggcgctacttctatggcccgccaaccgagatgctcaccgtggtcgtcagtatggtgtgggtgttctacaacctgattgttcttggcggcgcagttgcggtatcggtagaaagcaaacaggtacgccgatcgcaccgcgtggagatgacgatgcccgcggcaattgcccgcgaagatggtcacctcttctcgtgtaccgttcaggatttctccgacggtggtttggggatcaagatcaacggtcaggcgcagattctggaagggcagaaagtgaatctgttgcttaaacgcggtcagcaggaatacgtcttcccgacccaggtggcgcgcgtgatgggtaatgaagttgggctgaaattaatgccgctcaccacccagcaacatatcgattttgtgcagtgtacgtttgcccgtgcggatacatgggcgctctggcaggacagctacccggaagataagccgctggaaagtctgctggatattctgaagctcggcttccgtggctaccgccatctggcggagtttgcgccttcttcggtgaagggcatattccgtgtgctgacttctctggtttcctgggttgtatcgtttattccgcgccgcccggagcggagcgaaacggcacaaccatcggatcaggctttggctcaacaatga

SEQ ID NO: 478088 - DNA, 1320 bp, Shigella flexneri
atgaggtttgggtacattgctttgggtacaccccctattcaaagtttggatattcgcaaaatgccaaaactaacagacatgcagatccgcgcatggattaagagcggagagcgattcgaggggcgggcagacggtaacggtttatacctacgttaccgtgaagccgacaaaacccccacatggagattccgctataaactcgcagggaagtcccgcgccatgctaattggttcgtatagcgagctatcactatcaaaggccagagagacagccaaagagctatcggctcgcgttgcgctgggctatgacgttgcaggagagaagcagaagcgcaaaaccgaagcactggcgaagatggaagcagagaagaacgctatgcgcgtttcagagcttgccgctgaatactttgagcgtcagatcctcccgcgctggaagcaccccgatatactccgccgccgtatcgacaaagatataaacccctgcattggcagcatgaaggtagaggacgtgaaaccgcgccatatcgatgacatgctgaaaggtattgttgaccgtggagcgtcgaccatagcaacggacgtgctgagatggacgcgccgcatattcgactacggaatcaaacggcacgcgctagagattaacccctgttcagcctttgaggtggcagacgccggagggaaagaagttgcccgtgaccgctggttaacccgcgatgagttaatccagctattcaaagccatgcgcacggctaagggattcagtcgccagaacgaaatcacgttcaaattactgttagcgttatgcgtccgcaaaatggaattatgcgccgcacgatgggaagagtttgatttagatggtgcggtatggcatttgccggaagaacgcagcaaaaacggagaccctattgatatacctctaccttccccagccgtcgaatggctgagagagcttaaaacgttctcatgcaacagcgcatgggtactgccagccagaaagatgcaaaaccgcatgatcccccatattcaggaaagcaccctgcccgtagcactggctaaggttcgcgccgaaatgccggatgtgcctaatttcacgattcacgacttccgacgcacggcccgcacccatttagcagcgctgggcgttgatccggtagtggcggaacgatgcctcaatcatcgcattaagggcgtagaggggatttataaccgtcaccaatactttgacgagcgacgggctgcgttaacacagtgggcgggcttgctggtggctctggagaagggcgaagattacaacgtgacgcctctcagaagggcgaactaa

SEQ ID NO: 478089 - DNA, 315 bp, Shigella flexneri
atgaaacgggctaaatacggcgatgtgatggaatggttttcactggacaggtacgactacgtgttggatctaagtgtcaaccatgtggtaagcgagatgttcatgatgagttatcactctgatagtcttgagttacgaaaagatgaggttttctcaattattccattcccccttataacggatgttaccctctgggatgaggatttgccggagggtagtctatcctttgatgacagaggaattatgcctctacctttttcgatgatagactggccccctgaatctccagacaaccagtatcacttatttaagtga

SEQ ID NO: 478090 - DNA, 597 bp, Shigella flexneri
atggtgatttttggtgtcttcacaatctacgccattctgagttactccaccaactatctgaccgaaatgtacggcatgtcgctggtggcagcgagctacatggggattgtgatcaacaaaatcttccgcgcgctgtgcggcccacttggaggcattatcaccacctacagtaaagtgaaatcccctacccgcgtgattcaaatcctttccatcatcggtttgctggcgttgacagccctgctcgtcacgaactctaacccgcaatcggtcgcgatggggattggcctgattttactgctgggattcacctgttacgcctcacgcgggctgtactgggcctgccccggcgaagcgagaacaccgtcttacattatgggcaccacggtaggtatttgttcggtgattggattcctgccggatgtcttcgtttacccgattatcggccactggcaagacaccctgcccgctgcagaagcctaccgcaatatgtggctgatgggcatggcggcgcttgccatggtgattgtctttacctttttgctgttccaaaaaattcgtactgctgatagcgcccccgcaatggctagcagcaagtaa

SEQ ID NO: 478091 - DNA, 1479 bp, Shigella flexneri
atgtcgaaaaaatacatcatagggattgatggcggaagtcagagcacaaaagtggtgatatacgatctggaaggtaatgtggtttgcgaagggaaaggcttattgcagccgatgcacacgccagatgccgatactgcagaacatcctgacgacgatttatgggcatcattatgttttgccggtcacgatttgatgagtcagtttgccgggaataaagaagatattgtcggtattggtctgggatccatccgttgctgccgtgcgttattgaaagccgatggcacgcccgctgcgccgttgattagctggcaggatgcacgcgtaacgcgtccctacgaacacactaatcctgacgtggcatatgtcacctctttttcgggttatctgacgcatcgcttaaccggcgagtttaaagataatatcgccaactattttggtcagtggccggtggattataagagctgggcatggagcgaagatgctgcggtaatggagaagtttaatatcccccgtcatatactgtttgatgtgcaaatgccaggcactgttcttgggcatatcacaccacaagccgcgctggcgacacatttcccagctgggctgccggttgtttgtaccaccagtgataaaccggtagaagctctgggggccggattactggatgatgaaacggcggtgatttcactcggtacttatatcgcgctgatgatgaacggcaaagccttgccgaaagatccggtggcgtactggccgattatgtcttctattccgcaaacattgctgtatgaaggttacggtattcgcaaaggtatgtggacggtgagctggctgcgcgacatgttaggcgagtcgttaattcaggatgccagggcgcaggatctttcaccggaagatttactcaacaagaaagcctctagtgtgccacctggctgtaatgggctgatgacggtgctggattggctgaccaattcgtgggaaccatacaaacgcgggattatgatcggctttgattccagcatggattacgcatggatatatcgttcgatactggaaagcgtggcgctgacgctgaagaacaattacgacaatatgtgtaatgaaatgaatcactttgcgaagcatgtgatcattactggcggcggttcgaacagcgatctgtttatgcagatttttgccgacgtgttcaaccttccggcacgacgtaacgccattaacggttgtgcaagcctgggggcagcgattaatacagcggtaggtctggggctatacccggattacgcaacggctgtcgacaaaatggttcgcgtgaaagatatctttatgcctgttgagagcaatgccaaacgctacgacgcgatgaataaaggtattttcaaagacctaaccaaacatactgatgtgatcctgaaaaaatcgtatgaagtgatgcatggggaattggggaatgcggattcgatccagagctggtcgaatgcgtaa

SEQ ID NO: 478092 - DNA, 669 bp, Shigella flexneri
atgaataagaaggtgttaaccctgtctgctgtgatggccagcatgttattcggtgccgctgcacacgctgctgatactcgcattggtgtaacaatctataagtacgacgataactttatgtctgtagtgcgcaaggctattgagcaagatgcgaaagccgcgccagatgttcagctgctgatgaatgatgctcagaatgaccagtccaagcagaacgatcagatcgacgtattgctggcgaaaggggtgaaggcactggcaatcaacctggttgacccggcagctgcgggtacggtgattgagaaagcgcgtgggcaaaacgtgccggtggttttcttcaacaaagaaccgtctcgtaaggcgctggatagctacgacaaagcctactacgttggcactgactccaaagagtccggcattattcagggcgatttgattgctaaacactgggcggcgaatcagggttgggatctgaacaaagacggtcagattcagttcgtactgctgaaaggtgaaccgggccatccggatgcagaagcacgtaccacttacgtgattaaagaattgaacgataaaggcatcaaaactggtaatgactccaacttactgatagtgttttatgttcagataatgcccgatgaccttgtcatgcagctccaccgattttga

SEQ ID NO: 478093 - DNA, 210 bp, Shigella flexneri
atgacggatggctgtccgctgtatgaatcacgcctgaagggaaagctgcacgttatcagcaagtgttacactcagcgcattgagcgacataatctgaatctgagacaacatctggcaaggctgggacggaagtcactgtcgttctcaaaatcggtggagctgcatgacaaggtcatcgggcattatctgaacataaaacactatcagtaa

SEQ ID NO: 478094 - DNA, 294 bp, Shigella flexneri; identical to SEQ ID NO: 13522

SEQ ID NO: 478095 - DNA, 705 bp, Shigella flexneri
gtgctgtacccgccggtactgaagtctggtgatcaggtgccgcgctgggcagagacggaactgcaggcaatgggcccgctctgttcgcgtgaaaaacggatgctggggctgatggtaggcgcgctggtgctgtggattttcggcggtgattatatcgatgccgcgatggtcggttacagcgtggtggcgctgatgctgcttctgcgcattatcagttgggacgacattgtcagtaataaagcggcatggaacgttttcttctggctggcctcgcttatcaccctcgcgaccggactcaacaataccggttttattagttggtttggcaaactgttagcaggcagcttaagtggttattcgccgacgatggtgatggtgatggtgacgttgattgtggtgttttatctactgcgctactttttcgccagcgccacggcgtatacctccgccctcgcaccgatgatgatcgccgccgcgctggcgatgccggaaatcccgctgccggtgttctgcctgatggttggcgcggcaattggtctggggagcattcttacaccatacgccaccggacccagtccgatttactacggtagtggttatctgccaacggcggattactggcgactgggggcgatttttgggctgatattcctcgtgttgctggtgattaccggcttactgtggatgcccgtggtgttgctttaa

SEQ ID NO: 478096 - DNA, 396 bp, Shigella flexneri
atggctggtcagttccatctggcagaccattttgacctgcgggtagagcgccgggttcccggcatgtgtctggcgggggaaggctgcatcgttctctggtgtatccggtgtgcgccagaacacaccatcgatggccagcagggtcaggccgcaccagtgcggatgcggcgtggtgttatgccagagctgcgctgttttcgtgaacacgcggcggacagcctcacttcccaggcgctggcgggcctgaataacggcactgggggcaacgaaggggcgattgcccggcagcatgatgtccaggcgattcacaatctggtgaagaggttctttacgctcaagcgccatgccaacaatacaccagaccatcatttcgaggggaagacggctcttgcgtag

SEQ ID NO: 478097 - DNA, 312 bp, Shigella flexneri
atgagtcaggcgctaaaaaatttactgacattgttaaatctggaaaaaattgaggaaggactctttcgcggccagagtgaagatttaggtttacgccaggtgtttggcggccaggtcgtgggtcaggccttgtatgctgcaaaagagaccgtcccggaagagcggctggtacattcgtttcacagctactttcttcgcccaggcgatagtaagaaaccgattatttatgatgtcgaaacgctgcgtgacggtaacagcttcagcgcccgccgggttgctgctattcaaaacggcaaaccgatttttatatga

SEQ ID NO: 478098 - DNA, 303 bp, Shigella flexneri
atgagctatagcaatattcttgtcgctgttgcggttacaccggaaagtcagcaactgctggcaaaagcggtatctatcgccaggccagtaaagggacacatcagtttaattactctcgcttccgacccggaaatgtacaatcaattagccgcgccgatgcttgaagatttacgcagcgtgatgcaagaagaaacgcaaagctttcttgataagttaattcaggatgcggggtatcccgttgacaagacgtttattgcctcaagtgaggtcgatgtgctgttagttccacttacgggagattaa

SEQ ID NO: 478099 - DNA, 435 bp, Shigella flexneri; identical to SEQ ID NO: 10324

SEQ ID NO: 478100 - DNA, 351 bp, Shigella flexneri; identical to SEQ ID NO: 10325

SEQ ID NO: 478101 - DNA, 276 bp, Shigella flexneri; identical to SEQ ID NO: 10326

SEQ ID NO: 478102 - DNA, 423 bp, Shigella flexneri; identical to SEQ ID NO: 10327

SEQ ID NO: 478103 - DNA, 1695 bp, Shigella flexneri; identical to SEQ ID NO: 31949

SEQ ID NO: 478104 - DNA, 363 bp, Shigella flexneri; identical to SEQ ID NO: 39670

SEQ ID NO: 478105 - DNA, 237 bp, Shigella flexneri; identical to SEQ ID NO: 10330

SEQ ID NO: 478106 - DNA, 708 bp, Shigella flexneri; identical to SEQ ID NO: 10331

SEQ ID NO: 478107 - DNA, 1680 bp, Shigella flexneri; identical to SEQ ID NO: 10332

SEQ ID NO: 478108 - DNA, 861 bp, Shigella flexneri; identical to SEQ ID NO: 19455

SEQ ID NO: 478109 - DNA, 1545 bp, Shigella flexneri; identical to SEQ ID NO: 23311

SEQ ID NO: 478110 - DNA, 1515 bp, Shigella flexneri; identical to SEQ ID NO: 52478

SEQ ID NO: 478111 - DNA, 786 bp, Shigella flexneri; identical to SEQ ID NO: 16905

SEQ ID NO: 478112 - DNA, 501 bp, Shigella flexneri; identical to SEQ ID NO: 83644

SEQ ID NO: 478113 - DNA, 840 bp, Shigella flexneri; identical to SEQ ID NO: 6027

SEQ ID NO: 478114 - DNA, 348 bp, Shigella flexneri; identical to SEQ ID NO: 6026

SEQ ID NO: 478115 - DNA, 1053 bp, Shigella flexneri
atgacagatattgcgcagttgcttggcaaagacgccgacaaccttttacagcaccgttgtatgactattccttctgaccagctttatctccccggacatgactacgtagaccgcgtgatgattgacaataatcgcccgccagcggtgttacgtaatatgcagacgttgtacaacaccgggcgtctggctagcacaggatatctttctattctgccggttgaccagggcgttgagcactctgccggagcttcatttgctgctaacccgctctactttgacccgaaaaacattgttgaactggcgatcgaagcgggctgtaactgtgtggcatcaacttacggcgtgttggtgtcggtatcgcggcgctatgcgcatcgcattccatttctcgtcaaacttaatcacaacgagacgctaagttacccgaatacctacgatcaaacgctgtatgccagcgtggagcaggccttcaacatgggcgcggtggcggttggtgcgactatctattttggctcggaagagtcacgtcgccagattgaagaaatttctgcggcctttgaacgcgcgcacgagctgggcatggtgacagtgctgtgggcctatttgcgaaactccgcctttaagaaagatggcgttgattaccatgtttccgccgacctgactggtcaggcgaaccatctggcggcaaccataggtgcagatatcgtcaaacaaaaaatggcggaaaataacggtggctataaagcgattaattacggttataccgacgatcgcgtgtacagcaagttaaccagcgaaaacccgattgatctggtgcgttatcagttagctaactgctatatgggccgggctgggttgataaactccggcggtgctgcaggcggtgaaactgacctcagcgatgcagtgcgtactgcggttatcaacaaacgcgcaggcggaatggggctgattcttggacgtaaggcgttcaagaaatcgatggctgacggcgtgaaactgattaatgccgtgcaggacgtttatctcgatagcaaaattactattgcctga

SEQ ID NO: 478116 - DNA, 462 bp, Shigella flexneri
atgaatgcgccaggaattaaagatgcttatgtcaatgggcaaaaatatcgcacaacaaaccgtaatggagtggtggtatacgacggaatgacaccttatcgggaaaatcacctgatgctggatgtgtcgcaaagcgatagcgaagcagaattacgtggcaaccggaaaattgccgccccttatcgcggcgcggttgtactggttaattttgataccgatcagcgcaagcgctggtttataaaagcgttaagagcggatggtcaaccattaacgtttggttatgaagtcaatgatatccatggtcataatattggcgttgtcggccagggaagccagttatttattcgcaccaatgaaataccgccatcggttaatgtagcaattgataagcaacaaggactttcatgcacaatcaccttcggtaaagagattgatgaaagtagaaattatatttgccagtaa

SEQ ID NO: 478117 - DNA, 747 bp, Shigella flexneri
atgtcatatctgaatttaagactttaccagcgaaacacacaatgcttgcatattcgtaagcatcgtttggctggtttttttgtccgactcgttgtcgcctgtgcttttgccgcacaggcacctttgtcatctgccgacctctattttaatctgcgctttttagcggatgatccccaggctgtggccgatttatcgcgttttgaaaatgggcaagaattaccgccagggacgtatcgcgtcgatatctatttgaataatggttatatggcaacgcgtgatgtcacatttaatacgggcgacagtgaacaagggattgttccctgcctgacacgcgcgcaactcgccagtatggggctgaatacggcttctgtcgccggtatgaatctgctggcggatgatgcctgtgtgccattaaccacaatggtccaggacgctactgcgcatctggatgttggtcagcagcgactgaacctgacgatccctcaggcatttatgagtaatcgcgcgcgtggttatattcctcctgagttatgggatcccggtattaatgccggattgctcaattataatttcagcggaaatagtgtacagaatcggattgggggtaacagccattatgcatatttcaacctacagagtgggttaaatattggtgcgtggcgtttacgcgacaataccacctggagttataacagtagcgacagttcatcaggtagcaaaaataaatggcagcatatcattacctag

SEQ ID NO: 478118 - DNA, 933 bp, Shigella flexneri
atgcgcaccaatgtgtttcgccggatgcatcgcaaaattgtggtgatcgacgcgcgtatcgcctttattggcgggctgaattactccgccgagcatatgtccagctacggtccagaggctaaacaggattacgcggtacgccttgaagggccgattgtcgaagatattctccagtttgagctggaaaacctgcctggacagagcgcggcacgacgctggtggcgacgtcatcacaaagcggaagagaaccgccagccgggagaagcgcaggtattgctggtctggcgcgataacgaagaacatcgcgatgatattgaacgccattatctgaaaatgctcactcaggcgcggcgggaagtgattatcgccaacgcctacttcttccccggctatcgatttttacacgccttgcgtaaagcggcacggcgcggggtgcggatcaaactgatcattcagggcgaaccggatatgccgattgtcagagtcggtgcgcgcttgctgtataactatctggttaaaggcggcgttcaggtttttgagtaccgccgccgcccgctccacggcaaagtggcattgatggacgatcactgggcgacagtagggtccagtaatctcgatccgctcagtttgtcactgaatctcgaagcaaatgtcatcatccacgatcgtcattttaaccagacgctgcgcgataatctgaacggcattattgccgcagattgtcagcaggtggatgaaaccatgctgcccaaacgcacctggtggaacctgaccaaaagcgtgctggcgttccactttttacgccacttcccggcgctggttggctggcttccggcacacacaccacgtctgacgcaggttgatccccccgcacaaccgacaatggaaacgcaggatcgggtagaaactgaaaacacgggggtaaaaccctga

SEQ ID NO: 478119 - DNA, 441 bp, Shigella flexneri; identical to SEQ ID NO: 478081

SEQ ID NO: 478120 - DNA, 645 bp, Shigella flexneri
ttgaacccactgcgtggcttgcttccagaaagcgaaatattagcgctggtcgaggcattacagcaggaaggtgcattagtaaactggaaaaataatcccgacggcacgcgcagtccctatgagatgaatgtcacctatatggatgcgttaagccgccgcgagagtagcgatgaagaacgttgcgccaggtttatccttgcccatgcgattttgttaagtttccccggtgtacccgcgatatatattcaaagtattcttggctcgcgtaatgattacgcaggtgtcgaaaaactcggatataaccgtaaaaaatatcacagtgaagagataacacgagaactgaacgatgaagctacattaaggcatgcggtatatcatgagttgtcgcgtttaattacacttcgtcgcagccataacgagtttcatccggataataattttaccatcgatacggttaattcatccgtaatgcgtattcaaagaagtaacgctgatggtaattgtctgactggattgtttaatgtcagtaaaaatattcagcatgtaaatattactgatctgcatggtcgggatctgattagtgaagttgatatattgggtaatgaaataacgctgcgcccctggcaggttatgtggattaaataa

SEQ ID NO: 478121 - DNA, 399 bp, Shigella flexneri
atgaccgaacataccagcagttactacgccgccagtgcgaataaatatgcaccattcgacacactgaatgagtcaatcacctgcgacgtttgcgtggttggcggcggctataccgggctctcctccgcgctgcatctggcggaagcgggctttgacgtagtggttctcgaagcctcacgcatcggctttggcgcaagcgggcgcaatggcgggcagcttgtgaactcctacagccgcgacatcgacgtgatcgaaaaaagctacggcatggacaccgcccgtatgctcggcagcatgatgttcgagggtggcgagatcatccgcgaacgtatcaaacgttatcagattgactgcgactaccgccccggcggtctgtttgtggcgatgaatgataaataa

SEQ ID NO: 478122 - DNA, 135 bp, Shigella flexneri
atgaaagtgtttgccacccttccaatacttattgtcacattttctatggcaaaacctcaactggcagattctgttcctcaactgccaacacttgcaaccggaaacgggtcaaggtattttgtaaatattctttaa

SEQ ID NO: 478123 - DNA, 1290 bp, Shigella flexneri
atgactctgaaagatttcagtaagtttgtgaaagatgaaattggctttagttacaacggctattaccgttctggttgggggaccgcctctcatggttcacctaaatcatgggcgattggttctctgggccgctttggtaacgaatactccggctggtttgatttgcagttaaaacaacgtgtctacaacgaaaacggcaaacgggttgatgccgttgtgatgatggatggtaacgttggtcagcagtactctaccggctggtttggcgataacgccggtggcgagaactttatgcagttctccgatatgtacgttaccaccaaaggtttcctgccctttgcgccagaggctgatttctgggtgggtaaacacggtgcgccgaaaattgaaatccagatgctggactggaaaacgcagcgtactgatgccgcagcgggtgtaggtctggaaaactggaaagtcggtccgggtaaaattgatatcgcgctggttcgcgaagatgtcgatgattacgatcgcagcctgcaaaacaaacagcagattaatacccatactattgatttacgctataaagatatcccgttatgggataaagcgaccttaatggtgagtggtcgttatgtcacggcaaacgaaagcgcatcggaaaaagataatcaggataataacgggtattatgactggaaagatacctggatgttcggcacatctttaacgcagaaatttgataaaggtggcttcaacgaattctccttcctggttgtgaataactctatcgccaggaactttggccgttatgctggcgcaagtccatttaccacctttaatggtcgttattatggtgatcacaccggcggaacagcagttcgtctgacctcgcagggcgaagcctatatcggcgatcattttattgtggctaacgcgattgtttactccttcggtaacgatatttatagctacgaaacaggcgcacactctgatttcgaatctattcgtgcggttgttcgcccggcctatatttgggaccaatataaccagacaggtgttgaactgggctatttcacccagcaaaacaaagatgcgaatagtaataaatttaatgagtctggttataaaaccacgctcttccatacctttaaagtcaataccagtatgttgacctcgcgtctggaaattcgtttctacgccacgtatatcaaagccctggaaaacgaactggatggcttcaccttcgaagacaataaagacgaccagtttgctgtcggtgcccaggctgaaatctggtggtaa

SEQ ID NO: 478124 - DNA, 285 bp, Shigella flexneri
atgatggataacgataattctcttaataagcgccccacgtttaaaagagcattacgcaacatcagtatgaccagcatatttatcactatgatgctgatctggttgctgctttccgtgacctcggtgctgaccctgaaacagtacgcgcaaaaaaacctggcactggcagcgctgggccagcaagggcattttcaactgcagaagtacgtgataagcagcaaaatattctggcatcctggcattacccccgtaaggatccaggcgatactttcagcaatttcataa

SEQ ID NO: 478125 - DNA, 675 bp, Shigella flexneri
atgatgaaagtattaattgttgaaagcgagtttctccatcaagacacctgggtcggtaacgccgttgagcgtctggcagatgctttaagccagcaaaatgttaccgtgattaaatccacctcctttgatgatggttttgccattctctcttcaaacgaagccattgactgcctgatgttcagctatcaaatggaacatccggacgaacatcaaaacgtcagacaattgatcggtaagcttcatgagagccaacaaaacgtgccggtcttcctgttgggcgatcgggaaaaagccctcgccgcaatggaccgggatctgctggagcttgtcgatgaattcgcctggattctggaagataccgccgactttatcgccggacgcgccgttgccgcgatgacccgctaccgccagcagctgttgccgccactgttcagcgcgctgatgaaatatagtgacatccatgaatattcctgggcagcgccaggccaccagggcggcgttggttttaccaaaacacccgccggacgtttctaccatgactactatggtgaaaatctgttccgcaccgacatgggcatcgaacgaacttccctcggttctttgcttgaccatactggcgcatttggcgaaagcgaaaaatatgccgcacgcgtatttggtgccgatcgctcctag

SEQ ID NO: 478126 - DNA, 381 bp, Shigella flexneri; identical to SEQ ID NO: 458903

SEQ ID NO: 478127 - DNA, 282 bp, Shigella flexneri
atgtcgatgataaaaagctatgccgcaaaagaagcgggcggcgaactggaagtttatgagtacgatcccggtgagctgaagccacaagatgttgaagtgcaggtggattactgcgggatttgtcattccgatctgtcgatgatcgataacgaatggggattttcacaatatccgctggttgccgggcatgaggtgattgggcgcgtagctgtggtcactgcgacgcctgtattagcggtaatcagatcaactgcgagcaaggtgcggtgccgacaattatga

SEQ ID NO: 478128 - DNA, 1368 bp, Shigella flexneri
atgaaaaaacaaacccagctgttgagtgcattagcgttaagtgccgggttaactctctcggcgtcatttcaggccgtcgcgtcgattccaggccaggttgccgatcaggcccctctccccagtctggctccaatgctggaaaaagtgcttccggcagtggtgagcgtacgggtggaaggaacggccagtcagggacagaaaatcccggaagaattcaaaaagttttttggtgatgatttaccggatcaacctgcacaacccttcgaaggtttaggttccggtgtcatcatcaacgccagtaaaggctatgtgctgaccaacaaccatgtgattaatcaggcacagaaaatcagtattcagctcaatgatgggcgcgagtttgatgcaaaactgattggtagcgatgaccagagcgatatcgccctgttacaaattcaaaacccgagcaaattaacgcaaatcgctattgccgactccgataaattgcgcgtcggtgattttgccgtagcggtcggtaacccatttggccttgggcaaaccgccacctctggcattgtttccgcattaggccgcagcgggttgaatcttgaaggtctggaaaactttatccagacagatgcttccattaaccgcggtaactccggcggtgcactattaaaccttaatggtgagttaattggcatcaacactgcaatccttgcgcctggcggcgggagcgtcgggattggatttgccatccccagtaatatggcgcgaacactggcgcagcagcttatcgactttggtgaaatcaaacgcggtttgttaggcatcaaaggcatcgagatgagtgccgatatcgccaaagccttcaaccttgacgtgcagcgtggcgcgtttgtcagcgaagtgttgccaagttctggctcagcgaaagcgggcgtcaaagcgggcgatattattaccagcctcaacggcaaaccgctgaatagctttgctgagttgcgctctcgtatcgcgactacagagccgggcacgaaagtgaagcttggcctgctgcgtaacggcaaaccactggaagtagaagtgacgcttgataccagcacctcttcgtcggccagcgctgaaatgatcacgccagcgctggaaggtgcaacgttgagcgatggtcagctaaaagatggcggcaaaggtattaagatagatgaagttgtcaaaggaagcccagctgctcaggctggcttgcaaaaagacgatgtgatcattggcgtcaaccgcgatcgggtgaactcgattgctgaaatgcgtaaagtgctggcggcaaaaccggccatcatcgccctgcaaattgtacgcggcaatgaaagcatctatctgctgatgcgttaa

SEQ ID NO: 478129 - DNA, 210 bp, Shigella flexneri; identical to SEQ ID NO: 477941

SEQ ID NO: 478130 - DNA, 249 bp, Shigella flexneri
atgtttttagttgctcccaacaatatattaactcggggttctgaggtaagcagaaacctgtcgtgttacgaatttgatcagttatcgcataaaatttttgaaacttttcaattagatcaatgggataataaagcatttctgcaagataaagacctgcttctggataattcacaatataaaattcatatccacagggaaataatattatctgattattatcaacagttagactatgcgtctcccaattga

SEQ ID NO: 478131 - DNA, 684 bp, Shigella flexneri
atgccaattcgctatctcggtattgatatcgggcaaatccagacgctggatctgattaccgcacgcaatgaagtacaggcaaaggcggtgctctatccggaatatgtccagacctttgctcgcggtggtacgcgcttctcagtggtcacaccgcaaatctcggcagctggcgttgagcatctagatactatcctccagtcgtatatcaacgtcgaaccaggccgtggcaatcctcgtcgcgactttgaattagaagaggccaccattactgattcgcgttacctagatggtttaagcattattgttgaagcgccggaagccggttcgttaggcatcggtacgcctgtgctgttccgtggtctggaagtaggtacggttacaggaatgacgctggggacattgtcagatcgcgtgatgattgcgatgcgcatcagtaaacgctatcaacacctggtgcgtaacaattccgtcttctggttggcatcgggttacagtctggactttggtctgacgggcggcgtagtgaaaaccggcacctttaaccaatttatccgtggcggcatcgccttcgccacgcctccgggtacgccacttgcaccgaaagcccaggaaggcaaacacttcctgttgcaggaaagtgaaccgaaagagtggcgtgaatggggaactgcgcttcccaaataa

SEQ ID NO: 478132 - DNA, 408 bp, Shigella flexneri
atgagtcaaaacgatatcattatcagaactcattataagtctcctcatagattgcacatcgatagcgacataccaacaccttcatcagagcctattaataaatttgcgcgccagctcatcaccctacttgatacctctgacttaagttcgatgctgtcatactgtgttactcaggaatttaccgcaaactgtcgaaaaatatcacaaaattgttattccactgccctttttaccattaactttgccacttcacccatccatgcagaaaatatactcattacattacactataaaaaagaaatcatttccttattactggaaaccacgcctattaaagctaaccatttgcgaagcatactggattatattgaacaggaacagggtaatgctgccaacttactgatttag

SEQ ID NO: 478133 - DNA, 210 bp, Shigella flexneri
atgcctgaccattctctttttcgattacggattcttccgtggtgcattgcgctggcaatgtcagggagttatagcagtgtctgggctgaagacgacattcagtttgattcccgttttctggaattaaaaggcgacacaaaaattgatctgaagcgtttttccagccagggatatgttgagcccggaaaatacaatttacaggttcggtaa

SEQ ID NO: 478134 - DNA, 1266 bp, Shigella flexneri
atgagaaaaatagtggccatggccgttatttgcctgacggctgcctctggccttacctctgcttacgcggcgcaactggctgacgatgaagcgggactacgcatcagactgaaaaacgaattgcgcagggctgataagcccagtgctggcgcgggaagagatatttacgcatgggtacagggaggattgctcgatttcaatagtggttattattccaatattattggcgttgaaggcggagcgtattatgtttataaattaggtgctcgtgctgatatgagtacccggtggtatcttgatggtgataaaagttttggctttgccctgggggcagtaaaaataaaacccagtgaaaatagcctgcttaaattaggtcgcttcgggacggattatagttatggtagcttaccttatcgtattccgttaatggctggcagttcgcaacgtacattaccgacagtttctgaaggagcattaggttattgggctttaacgccaaatattgatctgtggggaatgtggcgttcacgagtatttttatggactgattcaacaaccggtattcgtgatgaaggggtgtataacagccagacgggaaaatacgataaacatcgcgcacgttcttttttagccgccagttggcatgatgataccagtcgctattctctgggggcatcggtacagaaagatgtttccaatcagatacaaagtattctcgagaaaagcataccgctcgacccgaattatacgttgaaaggggagttgctcggcttttacgcgcagctcgaaggtttaagtcgtaataccagccagcccaatgaaacggcgttggttagtggacaattgacctggaatgcgccgtggggaagcgtatttggcagtggtggttatttgcgccatgcaatgaatggtgccgtggtggataccgatattggctatcccttttcattaagtcttgatcgtaaccgtgaaggaatgcagtcctggcaattaggtgtcaactaccgtgtaactccgcaatttacgctgacatttgcaccgattgtgactcgcggctatgaatccagtaaacgagatgtgcggattgaaggcgcgggtatcttaggtggtatgaactatcgggtcagcgaagggccgttacaagggatgaatttctttcttgctgccgataaagggcgggaaaagcgcgatggcagtacgctgggcgatcgcctgaattactgggatgtgaaaatgagtattcagtatgactttatgctgaagtaa

SEQ ID NO: 478135 - DNA, 210 bp, Shigella flexneri; identical to SEQ ID NO: 477941

SEQ ID NO: 478136 - DNA, 861 bp, Shigella flexneri
atggaacatcagagaaaactattccagcaacgcggctatagcgaagatctattgccgaaaacgcaaagccagcagacctggaaaacatttaactattttaccttatggatgggttcggttcataacgttcccaattatgtgatggtcggcggcttttttattctcggcttgtctacctttagtattatgctggcaattatcctcagcgcctttttcattgccgcggtaatggtattaaactgcgctgcgggcagtaaatacggcgtaccgtttgccatgatcctgtgtgcttcttacggcgtacgtggcgcactgtttcccggattattaagaggcggtattgctgccattatgtggtttggcctgcaatgttacgcggggtcactggcctgcttgattctgattggcaaaatctggccgggatttttaactctcggtggtgatttcacgctgttagggctttctctaccgggcttaattactttcttactcttctggctggtcaacgttggtataggttttggcggtggcaaagttttaaataaattcactgccattcttaacccgtgcatctatatcgttttcggcggtatggcgatttgggcgatttcgctggtcgggctcggtccaatctttgactacattccgagcggtattcagaaagcagaaaacagtggcttcctgttcctggtggtgataaacgcggtagttgcggtctgggcggcaccggcggtgagcgcatccgactttacgcaaaacgcccactcgtttcgtgagcaagcgctggggcaaacgctgggtttagttgtggcctatattctgtttgcggtcgcgggtaatgctgccaacttactgatttag

SEQ ID NO: 478137 - DNA, 846 bp, Shigella flexneri
gtgtccggatctcgcattgtctctgatgctaaagcggcgctgacactgctggttgaagtggcgcaggagatgcaaaaagcgggtcgtctgccgtgtcgtaaagaatgggtcgccgactgccagcagcgtaaacgcactttgctgcgcaaaacccacttcgacaacgtgccggtgaaaccgcagcgcgtgtatgaagagatgaacaaagcctttggtcgcgatgtttgttatgtcaccactattggtctgtcacaaatcgctgcggcacaaatgctgcatgtctttaaagaacgccactggatcaactgtggtcaggctggtccgttaggctggacgattccggcggcgctgggggtttgtgccgctgatccgaaacgcaatgtggtggcgatttctggcgactttgacttccagttcctgattgaagagttagccgttggcgcgcagttcaacattccgtacatccatgtgctggtgaataacgcctatctcggcctgattcgtcagtcacaacgcgcttttgacatggactactgcgtgcaactcgctttcgagaatatcaactccagtgaagtgaatggctacggtgttgaccacgtaaaagtagcggaaggtttaggttgtaaagctattcgggtcttcaaaccggaagatattgcgccagcctttgaacaggcgaaagccttaatggcgcaatatcgggtaccggtagtcgtggaagttattctcgagcgtgtgaccaatatttcgatgggcagcgaactggataacgtcatggaatttgaagatatcgccgataacgcagcggatgcaccgactgaaacctgcttcatgcactatgaataa

SEQ ID NO: 478138 - DNA, 162 bp, Shigella flexneri
atgaccattgctgacagattacgtgaagaaggcgcaatgcagggcaaacacgaagaagccctgcgtattgctcaggagatgctggatagaggtttagacagagagttagttatgatggtgacccgactttcaccagacgatcttatcgcgcaaagccactaa

SEQ ID NO: 478139 - DNA, 306 bp, Shigella flexneri
atgcccatccgcgaagagcgtccgacggatgttgtctttgcgggggcgaaaaaagcgccactaacggccgagggaaaagccagtgcagagaaactgttcgcgatggcagaacatttgttagcactgggtcagccgaatttatttggtgaatggtgcattgctgatactgatctggcgctaatgattaaccgcctggtactacatggcgatgaggtgccagaacgcctggtggattatgcgacattccagtggcagcgagcgtctgtccagcgttttattgcactttcggcgaagcaatctggctga

SEQ ID NO: 478140 - DNA, 153 bp, Shigella flexneri
atggtttcgctgtttgctggcaccgtgctgaaccagacggggcaagccatcgagacgatagccatgaccatgtcggtctatctgattatcagcctgactatctcgctgctgatgaatatctataaccgccgcatcgcgatcgttgaacgctaa

SEQ ID NO: 478141 - DNA, 249 bp, Shigella flexneri
atgacattgcctgtttttataacggtaattgcagaccatgacaagccgcagccgtcaggctgcctactcgagatgggctgggaaaaaaatataagcgattatttaaaaaatatgtgtagttatcttggtattgaagatgccgatgtcactttcttgtgtaatacagtggtattcgatggggaagaacttcacgcgagctattatcagtcgttattatctcaggtacgggatatgttagatgcactataa

SEQ ID NO: 478142 - DNA, 303 bp, Shigella flexneri
atgtcagactatcaaatgtttgaagtacaggtgagccaggttgaaccccttaccgaacaggtgaaacgcttcacgctggtggcaaccgatggcaaaccgctgcctgcgttcaccggaggaagtcacatcctagtgcagatgagcgatggtgataaccagtacagcaatgcgtattcactactgagttcaccgcataacacctctagttatcagattgccgttcgactggaagaaaactcgcgcggcggttcccgctttttgcatcagcaggtaaaagtgggcgatcggttaacgatcgcctaa

SEQ ID NO: 478143 - DNA, 351 bp, Shigella flexneri
gtgtttgaatcgctggcgcgactggagcagattttaggccagcatcgttacctgaccggcaaccagctaaccgaagccgatattcgcctgtggactacgctggtgcgttttgatccagtgtatgtgacccacttcaagtgtgataagcaccgcatcagcgattacctgaatctgtatggcttcctgcgcgatatctaccagatgccggggatcgccgaaactgtcaatttcgatcacatccgtaatcattacttccgcagccataagaccatcaaccctacggggattatttcaattggtccgtggcaggatctcgatgaaccgcatggacgagatgttcgcttcggttaa

SEQ ID NO: 478144 - DNA, 1089 bp, Shigella flexneri; identical to SEQ ID NO: 7431

SEQ ID NO: 478145 - DNA, 1182 bp, Shigella flexneri
atgctattagttggttatccacttaattgttttatcaatttatttgatgacaatttacaccatgtgttcaaggtattgattatggaattacagacaaggctagtttttatcgatacaagcgcttttgaaaagaaaaactatcaatttgggcaacacgctcttggtcgtcttcaagaactaattgaggatgagaaaatccacttgctcattactgatgtgacaaggaaagagatcgactcccatctcaaacacaaatctgaagaagcagcttctatgataaagaagatgcaaagagatgcgatgttcctaagaaacacccccgaccttgattgtcatggcatcttcaccaagattaaaggtgatgatatttatgctgttatcagtgaaaaatttgatgatttcgtcgaaaacggctacgtcgaaacaattgatgtaagcactgttaaccctcaagttgtatttgatgcttacttcaacaaccttcctccttttggcaaagaatcaaaaaagcacgagtttcctgatgcatttgcgctagaagctattaaacaggtgagcttggctagaggatattcagcctatatcgttagtgacgacggcgatatgaaatcattctgtgagaaagaagataacttcattcatcttgaaaatgtcgatgacctaattgacttgattgttcgaagcgacaaagcgtacgaagaaccagccaaatttgctgatgaaatattcgaacaactcctagaacaaatcaaagcggatgccctgcaagctctcgaagatggcgagttcaactatgaaaacgcagatcctttcgatgagactatcaattctatagaaatcaactcggtgaatgttgggaagaaaaacttacagaatgtcgatgccgagtgggctgaatacgaagtagaatttgaggtggttgttacggcagattatcgattctcagattatgaccgttcaccttgggaccctgaagacaagcaatatgtattcgtcttgagtaatgagtcaacagtaaaacacaaagaaacatacactgcccacataacacttgcctataccgatggattaaaagctaacgcatacattgaagagttttacttccaagatacatattttgagctgactgataatgactccgaagtcattagcttcaaagaactagatatcaacggtgaatga

SEQ ID NO: 478146 - DNA, 960 bp, Shigella flexneri
atgaagctatatgtaataggtaatggctttgatgttcatcatggccttgacactaggtatacatcttttgggctttatctcaaaaataactactgggaaacttatgagctattgctcgactattacgggtttgctgacttagacccagattttccaacaacaatgtcagaccctttatggtctgaatttgaaacgagtatgtcactgcttgataaagattcagttttggaagcaaacatggatgcaatgccaaactattcttcagatgactttcgagacagagaccgatacacgcttgaaattgagatggagcgaatacttggccttctaaccactgaactgtataaagcattcaaagagttcattttggctgtacagtttcctcagtttgatcacagccgatcagtaaacattgatagagacgctgtttacctcacattcaactacacagatacgctttctcaatactacgcaatccccgataagaacgtgctattcattcacgggaaagccgatgaacatattgatgagttaattctcggtcatggtgttgatcctgaaaatttcaaagagaaacctgccgaaccaccatcaggattgagtgatgaagatttagaacgttggatggaatatcaatctgatcaatatgactactcattcgagcgtggtaaggatgcggtcaatcagtatttctcagcaactttcaagggaacagaccagatcataaaaaacaatgaaaacttctttgcaaagctcggcaatattgatgaagtatatgttctcggtcactcattagctgacgtagatttaccctacttcaagaagttggagcaatcagtcagacctgatgctaaatgggttgtaactttttatgaccctgatgatgagaaagtacacggtgaaactctaacaggacttggaatagccaacgttgcagttgtcagaatggaacagatctaa

SEQ ID NO: 478147 - DNA, 441 bp, Shigella flexneri; identical to SEQ ID NO: 7434

SEQ ID NO: 478148 - DNA, 1992 bp, Shigella flexneri
atgatctcagtattaaaacataatttagcttcagtaccagattatgacgaaaacataccagtaagtagttacagtgatggcagtgttgaaagctacatttttgataaaaagtggaagtttagcggcgctattcaagtaggcgttggtggtctaacagatatctctttttcacggattgacatgaaataccgcaagtacattcagtccacactcgcatacatcatggatgaatataaacaaaagaacaaaacgcatccaactatcggacaacttcaacactggaagaatgggctgaaatatattgttcaaagccttggcgagtgtaactggaaccttctatcagacgacagaatattcaagcaattcaagaaatctttcagtgagctagcaattaaaaggagcctttctcaaacactaatcaacaatgtagtaaccacttttggtctgctaaatagcctgaacctgtgccataggattgtaacgataaaaagcttaaacatacaaagtataaagccaaccaagcaatacattgcaattccaacgaatatctaccaacaaatacttaatgatgctatctcaacagtagagtcactgcacccccatcgtcatgaaatatcggctcttatgaaccgaattcagactatatacgacgaagaaaaaaatcgaaaagacagatcgtcttctctaggccagataaacgacaggactcgtaatagaattcggaagataggtcataacattcctgattttaagcttactcgtgacggcacaaacatttctaatattctgactccctgtgcgatagttttactggcatttagcggtgtaagagttggagagttaaatagctttactaaagatagttacgaagaaagggaaggagaacacggcgataacatatgctttttgaaaggtgaaactactaaaacagtcaatggtattcctaaaaaagaagtatggcaaacacaccgcatatctaaagatgcacttgagttagcctatgactgcacagcatatcttcgcacaacctacatagatgatgtgaacaagcaatacactgaacaaaagatcaatttagatgagtacaaaaaaaccttacgggtgctagagtctgtatttctgccagtaacactaggaggctctaaaaagaccaactacagctcaacggctgcacgctcaaaaaacctcaagtcttatttggaacaactaaatattaaagcaacaaaagaagatgttgattcattcaatacccttaacccttcatggcacggagaactcaaagaaggtcaattcttacctaagatcagtgctcatgactttagacgaacattcgcagtattctttaagcgttatggatttggaacaacgtcaacaatcaagtttcaatataaacacagaaatataaacatgtccgaatattacggcaaaaacgcccaacttcagtacttcgaagatgtcttgttagactctgacttaatccaactattgcatgaagaaggggttaacattgcagtcgatatgtttgatgaaatatacaacgattcagaaacgctaagtgggctaggtggagaacgaatagccaaggataagtttgaaaaactacgctctggagacaaggtatatatgacgcggaccgaaattgagtccctagttcgcaatggcacgctttctattgtcaagctacctacaggcggatactgcactaattcgtcttgcagtagagtgtgtggtattggcgagttctccgctgaaattaaaccatgcgaacatcagataatcacagacaaggaggccaaaagaactcaacgtcaaaataagcggctaataaatacatttcgagatttgaataatggcgaccctatgatgaaaagtatacttatcggagttaagcaaaagataaaaataaatgagtcattgattatcaaccatggaattaaagtcacagcctttgaggataatatcaaaggcataatcgcaaccagtagaggttaa

SEQ ID NO: 478149 - DNA, 1851 bp, Shigella flexneri
atgccaaaacataataccagaaagagaaaatatctacttccaggtaaaaacttaataaaaggcaaggccgaagttaaaaccttacatttagccgatatggttatatgtgtaaacggcagtattcttcgttttgaaaggtttgcttttaaatcctgtccagtattgtttcgaggtttcagaaaggttgaaactagtcagttcactgacatgaaacgaagcagttttgtgcgtcaaatatactctttgctaagtgagaacgtcacctctaccacagcctctagatatgaaacgctaataaaatacgttaggtgggtggatgatagtaacgacactgaattaatcgataaagacatgtttcactgggaactaattgatggattcatgacatggtgtgggaggcaaaacagtaagggattactttctcgacctgtctgggggaggcacagaacaaatatttcatggcttttaaagcaattaaataggacgcaggataccaaaagacttcctaaaatatcaaatgtttcaggacacacgacaccccacaaaagtcttgatattgagagagaattaaaaccgatcacaaaaaggttgtttaactcgtactttaagcttttagaacactataatgctggcacaatgcctgaaaaacatccgctttatgataaagaattgctagaactaatagcccaaaaaaaagggataaaaggcagtgacagagttgcccattttgctgcgttttcaagagcagtacaacccagctcagggcataaaaacaaccccatcacaaaaatagcaatgatgctgtgctatttgtttacgggaatgaatacaacgcctttagctaagatgaaaatttcagacgttaatttcaaagaggtgcagggtggaaagtacattctggattccgtgaaaggtagagctcaacaccaagagcaagatagcgcacttggtttcagtaaacacgcaaaggacttcattgaaagctggttaaatgtagctaaaagcatggcaaatggtgatagcaacagccctctcttcccctactatagtaaagatggtcagataaagctttactctgaaataggtagttccccccatgcaagcatcaacaaactattgaccagactggacttccctaaaataaccccttcaatactcagaaaaaccaaaatggacactctgtttcaagcaacagagtctgtttatcttgttgcaatgtcggcaaacaacagcattaaagttgtttcatcacagtatttacatgggacatctggagagcacgaaaaaaaattaaatgcggcaatggatgctaaattttccaacgctaaaggcgttgatatcaacaccgcagttgaagaggctaaatacaaacattcaaacattcttgatcattatgagtatgaagcactgagagagggctctaacaggtctcatgaagcaagaacccctacagggatacgttgtaatgataataaacaaggtgctgtaaaaaccataaataaaatgctagagcgtatcggagttgaaatgaactctgatgaagaagcttgcaccagctttcttgattgctttgagtgtgagcaccattcattggtctctgatgtaacagatatatggctaatgatgtcattcaaggaaacattacaagagcttgaagtaacacctgcaattaactcaatgccacctaagaaaatgaatacactattaaacaccattgaaactattctaggaggatttagagataaatctccagaaaattataagcaagcctatgagctacaaaaacaaacatcacaccccttgtattcgaatatctacagtctaaatgatctgcatgaggtgttttcatga

SEQ ID NO: 478150 - DNA, 1530 bp, Shigella flexneri
atggcaatcgtatacgagatcaaaacaacagaaataaaaccattcacgtatagaacccctctaattacgcctgatgaaaatggtgaactatctattaaatactctcgacaacaacctaagcatattaaaaaggttgttttgttgaatttggttggtagaaacactaatggcgatatagtctcatacgaaccaatggaacaagttaatcgctttttactagcacaccacctaaatgacaataagcaagagtcagaacaatacagtaaaggcttagttcactacttttcattcttattagaattacagcgcttgtgggactctgaatacgacgaagacctttacgaagaatttattgatctgcctagacctagctgggataaattcccatttagaaaaagtgataaagctacgtaccaataccgagaggctctaataaaggctgtacttgagcctgacaccccaaaccatgcgatagccagaactacagcaattgcatatatgggtgctgtagttaagttttactctttccacatcagaaatggctacaagtttaacaatcctccctttgagcacgaggttgtttctatacaatatcagggaggcagtacaagcatcggtgcctacttgagtaaaaatatacacacaacagatctgcggttgaatttaggaaaatctaaacgtaatgacggtggcgcactatcatcagctagacgagatttaaaacccctaacaaataaagaatggcttgccgtagaggatattctcaccaatacacgtcgagttatcaaaaaagttgctggtgaaacaactacttccaacttatcaattgaatattgcctgttctttcttgtcgcacgatacacagggcttagaaaggaagaagtggctagccttcacaaaggtcaagtggcaaagcctggtgaagataagaaagcaatgaagcttggtgttggcggtcaatacggctcattaacaaaaaccgctggatcaggtaataaatctaggcaaacaatcatccccacccgaattatgcaccttttgtacgaatacactagaagtgatagatataagaagcgtatctcgaaattcaaagaacattgtgaacttaagcgtcaaaaaggcgaactaggatactttgatggggaggatggagtagatgatacaaaagagtatttattcattagccaaactggtgtcccacttttcactaaacttcccgaggccaacgccagatggaatgaaattagagccactgtaaatatattgtctgggtttaacctaacagcaactatacacaatcttagagctacatttgcggtatcactttttaggctccttttgaggcgtgtaactcctgacaaagcacttgctttagtgagtgagtgccttgggcacggtgaagagtccgtaacgttaatataccttaaaatcgctcacgacgaacctacaggcgatgaaatttatgaagatatccttgaatttataggtgcatttgaagatgctgatataagtggtatggagagccaataa

SEQ ID NO: 478151 - DNA, 435 bp, Shigella flexneri
atgcgtttccgccagttgttaccgctttttggcgcgctgtttgcgttgtatatcatttggggctcaacctattttgtcattcggattggcgtggaaagctggcctccgttaatgatggcgggcattcgattcctggcagccggtattttattgctggcatttttgctactgcgcggacacaaacttcccccgctacgtccgctgctcaatgccgcgctgattggcctgttattgctggctgtcggtaatggcatggtgacggttgccgaacatcaaaatgttccttccggcatcgccgccgtagtgattgcaaccgtgccctctttaccctgtgcttcagtcgcctgtttggcattaaaacgcgcaaactggaatgggtgggtattgccattgggcttgccggaatcatcatgctcaatagcggtggaaatttaa

SEQ ID NO: 478152 - DNA, 396 bp, Shigella flexneri
atgtctggaaatataggggcaaatccaagtataaagtatgatgccaacaacatctactttgcagctaattacgctgaaacattaaacatgaccacctatggggatggttatatctctaacaaagcacaaagttttgaagtggtggcgcaatatcaattcgacttcggcttgcgcccatcactcgcttacctgaaatcgaaaggcagagatctgggccgctacggcgaccaggacatgattgagtatatcgacgttggtgcgacgtatttcttcaacaaaaatatgtcgacctatgttgattataaaatcaacctgattgatgaaagcgactttacccgtgccgtagatattcgcaccgataatatcgtcgctacgggcattacctatcagttctaa

SEQ ID NO: 478153 - DNA, 381 bp, Shigella flexneri; identical to SEQ ID NO: 458903

SEQ ID NO: 478154 - DNA, 570 bp, Shigella flexneri
atgcgtacattcctttatgctcgtgtatcagttaatgacctcaccacacaaaaccaagtagaagctgttaaacgtgctggttatgaagtcaaaccttcacgagtaattgaggaagttattagtggggctacaccagctatggacagaccacaatttgtaaagctggtggataagctggaagaaggtgattgtcttgtagtgaccaagattgaccgcttaggaagggataacattgatgtacagaagaccgtcacaatgttacttggtatgggtgtgaagctaatttgcttagatttgcctgtcaaagacctttcaagtgctgaaggtaaacttatccttcaactattcagtacctttgcagagtttgaacttaaccgcatcagagagcgaaccagagagggcttagaacgagctaaagcacaaggtaaggtgttaggtcgtcctgtagctgtgaacactacagaagccgttttagagcataaggcaaagggattatcacaaagtcaggttgcaaagcttctgaatctctctgtaagaacggttagccgtcactggacaaagacactgtaa

SEQ ID NO: 478155 - DNA, 189 bp, Shigella flexneri; identical to SEQ ID NO: 463227

SEQ ID NO: 478156 - DNA, 1275 bp, Shigella flexneri
atgcaggcactgtggctgctggctctggaacccgtatccgagaccactgctgaccataacagctatggtttcagaccaatgcgcagcacgcatgacgccattgagtccatttttctgcggatgagccagaaagtatcgcccaaatggatactggagggcgatattaaagggtgtttcgataacatcagccatgactggctgctttcccatattccgatggacaggagactgcttaaaaaatggttgaaagcaggttacatggaaagaggcgtgtttaaccatacaaacagcgggacaccgcagggaggcatcatatcccctgttctcgccaacatggctctggacggactggagaaggaactgatgcaaacgttcaggaaaagtggttatcacagtgcaaagcaccaggtaaattatgtgagatatgctgatgatttcatctgttcaggcagctcccgtgaattgctggaaaatgaggtcagaccactgattgcagctttcatgcgcgaacgagggctggaactgtcggaagaaaaaacagcgatcacacatatagataaaggcttcgactttttagggcagaacgtcaggaagtacaacggtaaaatgctgattaaaccgtcgaagaaaaacctgaagaacttcctctgtaaagtcagagaaataattaaacgcaatccgacgctcccggcatggaaactgataggccagctaaacccggtgatccggggatgggctacctatcaccgacacgtcgtggcgaaagaaacatttaattatgtcgacacccaaatctggcgagctatatggcgatggtgtgtaagacggcatccccggaaaggattgcggtggatcgccggacgatacttctcctttgaaggcaggcgctggatctttaaagccataaccccggaagggaaaattctgacactcttccgggcaatggaaacaccgataaagcgccatataaaaatcaaaggcgaagcaacaccatacacccccggaatggaaatctactttgaacgtcgtctggatctaatctggaaaggcaaatcaaagaagatgaagacagtagttcaactctggaagaggcaggggaaacactgtccgcagtgcggacaactcataaccaaccagaccggatggaatatacatcaccggatcaggaaagttatgggcggcagtgacgaactgaccaatctcgagttgttacatccgaactgccaccgacagttacacagcagggaagccggtgctcaccgaaagcacttataa

SEQ ID NO: 478157 - DNA, 1071 bp, Shigella flexneri
atgttttcagaagtcatgcgttatattctcgacctcggccctacagtgatgctgccggttgtcatcattattttttctaaaatattaggcatgaaggcaggcgattgctttaaagcgggtctgcatatcgggattggctttgttggcattggccttgtgattggcttaatgctggattccattggtccggcggcgaaagcgatggcggaaaatttcgacctgaatctgcatgtggtcgatgtcggctggccgggctcttcaccaatgacctgggcgtcgcaaattgcgctggtggcgattccgattgcgatattggttaacgtggcgatgttactgacccgtatgacgcgggtggtaaatgttgatatctggaatatctggcatatgaccttcaccggcgcgttgctgcacctggcaaccggttcatggatgatagggatggcgggtgtggtaattcacgcggcgtttgtttataagctcggcgactggtttgcccgcgatacccgaaatttctttgagctggaaggtattgctattccgcacggtacgtcggcgtatatggggccgattgcggtgctggtcgatgctatcatcgagaaaatcccaggcgttaaccgaattaaatttagcgccgacgatattcagcgcaaatttggcccttttggcgaacctgtcaccgtgggttttgtgatggggctgattatcggcatcctcgcgggttacgatgtcaaaggtgtattgcagctggcggtaaaaacggcggcagttatgctgctgatgccacggatgattaaacccatcatggatggtttaacgcccatcgctaagcaggcccgtagtcgtttacaggcgaagttcggcggtcaggagttcctgattggcctggatcccgcattactgctggggcatacggcggtggtatcggcaagcctgatttttattccgctcaccattttaattgctgtttgtgttccgggtaatcaggtactgccgtttggcgtcttgccactatcggcttcttcgtggcgatggcggtcgcggtgcatcgtggaaatctgttccgcaccttaa

SEQ ID NO: 478158 - DNA, 1500 bp, Shigella flexneri
gtgaagttttttgccctcttcatttaccgcccggtggcgacgattttactgtcggtcgccattaccctgtgcggcatactgggtttccgtatgctgccggtcgccccgctgccgcaggtcgattttccggtgattatggtcagcgcctctctgcccggtgcgtcgccggagacaatggcgtcttccgttgccacgccgctggagcgctcacttgggcgcattgccggggttagtgaaatgacctccagcagttcgctcggcagcacgcgcattattttgcagtttgattttgaccgggatatcaacggcgcagcgcgtgatgtgcaggcggcgatcaacgctgcacaaagtttgctgcccagcgggatgcccagccgcccgacctatcgcaaagcgaacccgtcggatgcgccaattatgatcctcacgctgacatccgatacttattcgcagggtgaactgtacgatttcgcctcgacgcagctggctccgacgatttcgcaaatcgacggtgtcggtgatgtcgatgtcggtggcagctcgctgcccgccgtgcgcgtcgggctgaacccgcaggcgctgtttaatcagggcgtgtcgctggacgacgtacgcactgccatcagcaatgccaacgtgcgtaaaccgcagggggcgctggaagatggcactcaccgctggcagatccagaccaacgatgaactgaaaaccgccgctgaatatcagccgctgattattcactacaacaacggcggcgcggttcgtctgggcgatgtggcgacggtgactgactcagtgcaggatgtgcgcaacgccgggatgaccaacgccaaaccggctattttactgatgatccgcaaactgccggaagccaatattatccagacggtagacagcatccgggcaaaattaccagagttgcaggagaccattccggcggcgattgatctgcaaattgcccaggatcgctcccccaccattcgcgcctcgctggaagaagtcgagcaaacgctgattatctcggtggcgctggtgattctggtggtctttttattcctgcgctcgggtcgcgccactattattcccgccgttgcggtgccggtttcgctgattggtacgtttgcggcgatgtacctgtgcggattcagtctcaataatctttcgctgatggcgctcaccattgctactggtttcgtggtggatgacgccattgtggtgctggaaaacattgcccgtcatctggaagcggggatgaaaccactacaggccgcgctgcaaggtactcgcgaagtcggctttacggtgctgtcgatgagtctgtcactggtggcggtgttcctgccgctgctgttgatgggcggattgccgggccgactgttacgcgagtttgccgtgacgctttctgtcgccattggtatttcgttgctggtttccctgacgctaacgccaatgatgtgcggctggatgctaaaagccagcaagccgcgtgagcaaaagtga

SEQ ID NO: 478159 - DNA, 534 bp, Shigella flexneri
atgttttgcctgatggacgtttccggttcaatggatcaatccactaaagatatggctaagcgtttttatattctgctgtatctgttcctcagcagaacgtataagaacgtggaagtcgtatacatccgccatcatacccaggcgaaagaagtcgatgaacatgagtttttctactcgcaggaaacaggcggcaccattgtttccagcgccctgaaactgatggatgaggtagtgaaagagcgttataacccggcacagtggaatatttacgctgcacaagcatcggacggcgataactgggccgatgactctccgctttgccatgaaatcctggcgaaaaaattattacctgttgttcgttattacagctatatcgaaattacccgtcgtgcacatcagacattgtggcgagaatatgagcatctgcaatctactttcgacaactttgcgatgcagcacatccgcgaccaggatgatatttatccggtgttccgtgaactgtttcataaacaaaatgcaacagctaaagactaa

SEQ ID NO: 478160 - DNA, 864 bp, Shigella flexneri
ttgcttgcactttccgaagagatcaaaatctacgagaaattgcttaatcacagtgaattgactcacgccccatgcgcccctggcacgctcgaaacactgtcacgtttttccattctttcgcgcctgaaagagccagaaaactccagcatttattcaaagatgcgggtttatgatggcgaaagtctgaaagacaccaatccgaaagccaagtcgtatcaggaatatcgtgactacgccggtgtcgatgaagggatgaacggtctgtcgacgcgttttgcgtttaagatcctctcccgcgtgttcaacttcgatcatgtagaagtggcggcaaacccggtccatctgttctacgtcctggaacagcagatcgagcgcgagcagttcccgcaagagcaggcagaacgctatctggagttcctgaaaggttatctgatcccgaaatatgccgagtttatcggcaaagagatccagacggcctaccttgaatcctattcagaatatgggcagctgtttgaccgcgagtctcttaacgccgagctggagaaaatcgagaaaccggcggggatcagtaatccaaaagatttccgcaacgagattgttaacttcgtactgcgcgccagagcgaataacagcggacgcaatccgaactggaccagctatgaaaaactgcgcacggttatcgagaagaaaatgttctccaataccgaggagctgttgccggttatctcgtttaacgccaaaacgtcaaccgacgagcagaagaaacacgacgactttgtcgaccgtatgatggaaaaaggctacacccgtaaacaggtgcgtttactgtgcgaatggtatttgcgcgtacgtaaatcgtcttaa

SEQ ID NO: 478161 - DNA, 1053 bp, Shigella flexneri
atgaatatattcgatcactatcgccagcgatatgaagctgccaaggacgaagagttcacactgcaggagtttcttaccacttgtcggcaagatcgcagtgcttatgccaacgcggctgagcggctattgatggctatcggtgagcctgtcatggtcgatacagcccaggaacccagactttctcgactcttttctaaccgggtcattgcacgttatccggcatttgaagagttttacggcatggaagacgcgattgaacagattgtctcttatctgaaacacgcggctcaggggctggaagagaagaaacaaatcctgtatctgctggggcctgtgggtgggggtaaatcatcgcttgctgagcgactgaaatcattaatgcagctcgtaccgatttatgtattgagcgccaacggtgagcgtagcccggtcaacgatcatccgttctgtcttttcaatccgcaggaagatgctcagattctggaaaaagagtatggcattcctcgccgttatctcggcaccatcatgtcgccatgggcggcaaaacgcctgcatgaatttggtggcgatatcactaagttccgggtagtgaaggtctggccgtcaattctgcaacaaattgctatcgccaaaacggaacccggtgatgagaacaaccaggacatctccgcgctggttgggaaagtcgatattcgtaaactcgaacactacgcgcagaatgacccggacgcctacggctattccggtgcgctgtgccgcgccaatcaggggatcatggaattcgttgagatgtttaaagcaccgataaaagtgctgcatcccttgttaaccgccactcaggaaggtaactacaacgggacggaaggtatctccgccctgccgttcaacgggattattctcgcccactcgaacgagtccgaatgggtcactttccgtaataacaaaaacaacgaagccttcctcgaccgtgtttacatcgtgaaggtgccgtattgcttgcactttccgaagagatcaaaatctacgagaaattgcttaatcacagtgaattga

SEQ ID NO: 478162 - DNA, 390 bp, Shigella flexneri
atgcaacataagttactgattaacggagaactggttagcggcgaaggggaaaaacagcctgtctataatccggcaacgggggacgttttactggagattgccgaggcatccgcagagcaggtcgatgctgctgtgcgtgcggcagatgcagcatttgctgaatgggggcaaaccacaccgaaagcgcgtgcggaatgcctgctgaaactggcggatgttatcgaagaaaatggtcaggtttttgccgaactggaatcccgtaattgtggcaaaccgctgcatagtgcgttcaatgatgaaatcccggcgattgtcgatgtttttcgctttttcgctttttcgctttttcgcgggtgcggcgcgctgtctgaatggtctggcggcaggtga

SEQ ID NO: 478163 - DNA, 522 bp, Shigella flexneri
gtgccacggaaaggcttcaaaatcaatgaagaaatcaacataactgttctcgacaataatcacaatgagaatgaaagtgttgagagtgaagagaatggcacccacactgaaaatataaataaaaatcacgttgcaaaaggtatatttaccacaaagaatacattacttatagtttttttttgcggcatgggggattgtttatatgtcttcttattttttcgatatggcttttcaaagcaaatctcacactataaaaaaatagatgctttctcaaattatgctcaacaccctactcaggaaggatgcagttatttctatgataataattactttaattccgtagacatgctatcaccaattattgaaaaattgcagaaaatggaagtcaactacaaaatacatccttacatttacattgcaacaaatgatagcatgagcgggttttatgctttcacctgtagtcaaatgttaaactctgaatcaccaaataattgcaactctctctattataaagcggagtaa

SEQ ID NO: 478164 - DNA, 792 bp, Shigella flexneri
gtgcaggatcgttattatcaactcggagtaacttacaatggcgttgattatgacgccaaccagggaaaaagccgcatcgacactaaccagtgtatcgacagtaagaacattgacatttatacccctgagcagatcatcgcgatgggatggcagaacaaaatttgctcgggtgatcccgctaatattcacatgtcgcgtacctttctcgctcgcatgcggttatacgtcaaaatacgagaaatgccgccgcatgattatcaaagtacgcttagcgactatatcgtcgtgcaatttgacggtgccggtagcgttaacgaagaccctactgcccaaaacctgaaatatcatattactggtctggaaaacattcgcgtgctggattgcagcgtcaatttttccatttcaccggaaacacaggtgattgattttggtaaatttaatttgctggatattcgtcgccacacaatgtcgaaaacattcagtattaagacgacaaaatcacaaaatgaccaatgcaccgacggatttaaagtcagttcctccttttataccgaagaaacgttggttgaagaagataaagcattgttgattggtaatggtctgaagctacgtttgctggatgaaaacgcctcgccttataccttcaataaatatgctgaatacgccgatttcaccagcgacatgttggtctacgaaaaaacctatacagctgaactttcgtccattgcaggtacccccatcgaggctgggcccttcgatacagtggtgctttttaaaattaactataactga

SEQ ID NO: 478165 - DNA, 381 bp, Shigella flexneri; identical to SEQ ID NO: 458903

SEQ ID NO: 478166 - DNA, 600 bp, Shigella flexneri
gtgcttaaaatcagcgaacatataagtattattgttttatatcgtcgtaaatatgtctttcagacatgtatcatttattttttactaacaggtcaaaaatatcgcgggttatttatgaaagcaattgacaatatatttaagtacatcccttcaaaccataaagataagcattcagataaagttaataatcatcaacaccatagcaaggttgataaaacacatcgttcaaagatagttgaaattgataaactggataatgattcgcaaatagataacgattttggcatgcatatcatctatttcctgcaacatggtcactggagggtaaatgaacatagtcttcagatggagaaaatatggttttacaatagtgagccatctatagatattcaagaatataatagttttgccgataatactactaacacgtttatctttacaattataccagacaataaccatgtgataaaattatcgtctcccattacagttaagattgagtgtaaggatggttattattttattaatttctccggagataaatcagacataatttataaagttaatgggctttctatcatacctgaaaatttctggtaa

SEQ ID NO: 478167 - DNA, 273 bp, Shigella flexneri
atgtcacacaacctggagcaccagaaagtccacaccagaatggtgaaagaggttctgaaagccgtcgccagagccaataatcccccttataagtccgtatttgcagactttatcaccggacatccctcctgcacggtctgtttctgggaaaccttccacaaaatgtacccggattcaccgtacgaatacgtcacgttctgccatacctgccgtcgttttgatttatacgaaacagaagcggagatgaaggcggatgacccgaagtggtggtga

SEQ ID NO: 478168 - DNA, 555 bp, Shigella flexneri
gtgacgtccgatgtcgggcagcaccagatgtttgctgcgctttattatccattcgacaaaccgcgtcgctggatcaattccggcggtctcggcacgatgggttttggtttacctgcggcactgggcgtcaaaatggcgttgccagaagaaaccgtggtttgcgtcactggcgacggcagtattcagatgaacatccaggaactgtctaccgcgttgcaatacgagttgcccgtactggtggtgaatctcaataaccgctatctggggatggtgaaacagtggcaggacatgatctattccggccgtcattcacaatcttatatgcaatcactacccgatttcgtccgtctggcggaagcctatggtcacgtcgggatccagatctctcatccgcatgagctggaaagcaaacttagcgaggcgctggaacaggtgcgcaataatcgcctggtgtttgttgatgttaccgtcgatggcagtgagcacgtctacccgatgcagattcgcgggggcggaatggatgaaatgtggttaagcaaaacggagagaacctga

SEQ ID NO: 478169 - DNA, 255 bp, Shigella flexneri
atggttaatgcgagtgagaagttatcgtggaaaaagcagggtgataaaattgtcgcggtcaatcagtcgccgttctacatcaacctttcttctttacaggttggcggtagcaagattgagaaactagattatattgcgccgttttcgcaacatgagtttgttatgccaaaaactagcggccaggatattaaatggtctgtgattactgatgaaggtggtgagagtcgtttgtttacatctcatttgcaatcataa

SEQ ID NO: 478170 - DNA, 390 bp, Shigella flexneri
atgaatgaatttccggttgttttggttattaactgtggttcgtcttcgattaagttttccgtactcgatgccagcgactgtgaagtattaatgtcaggtattgccgacggtattaactcggaaaatgcattcttatccgtaaatgggggagagccagcaccgctggctctccacagctacgaaggtgcattgaaggcaattgcatttgaactggaaaaacggaatttaaatgacagcgtggccttaattggccaccgcatcgctcacggcggcagtatttttaccgagtccgccattattaccgatgaagtcattgataatatccgtcgcgtttctccactggcacccctgcataattacgcaaatttaagtggtattgaatcggggtaa

SEQ ID NO: 478171 - DNA, 921 bp, Shigella flexneri
atgcgtctgaacgaccgtgcgggtgaaacgcgctacatcgatcctgtaactgaacaggagcgttcaagccgactttggctacgtcaaattggcgggcataatgcctggcgtgacagcaacggacagttgagaacgacctcgcatcgctacgtctcgcagttagggggcgatctgttaaccggtggttttaccgatagtgacagttggcgtttgggagtgatggctggttatgcccgcgactacaacttaactcattccagcgtgtcggattatcgttcgaaagggagtgtcagaggctatagcgcagggctgtatgccacttggtttgccgatgacatcagtaaaaaaggcgcatacattgactcctgggcgcaatatagctggtttaaaaactccgtgaaaggggatgaattagcctatgaatcctatagcgcgaaaggtgcaaccgtctcgctggaagcgggttacggttttgccctgaataaatcctttggtctggaagcggcgaaatatacgtggatcttccagccacaggcacaggctatctggatgggcgtcgatcataatgcgcacacggaagccaatggctcacgtattgagaatgacgcaaataacaacatccagacccgactcggcttccgcacctttattcgtactcaggagaaaaacagcggtccgcacggtgacgactttgaaccttttgttgaaatgaactggatccataacagtaaagattttgctgtctcaatgaacggtgtgaaagtcgaacaagatgggctgagtaatttgggggaaattaaacttggcgtaaatggcaacctgaatccagcggccagcgtctgggggaatgtgggcgtgcagctgggtgataatggctacaatgacaccgcagtgatggtgggcctgaaatataagttctga

SEQ ID NO: 478172 - DNA, 1275 bp, Shigella flexneri
ttgcagggtaaaaacacgattgtcacaacgggggattactcaattggtttgctaagtcaaacgagtggaaacctgaatactgacaccataataagagtcaactctgacggttcggttaccccctctttttctgacggagatgatacatttattgttactgcgggtaatcacgcagtcggcgttcttgcgtgtgcatctcccggaagcgcgcgtgcgtgtgtatcttctcttgatgaagaaagtactgccgatacaggaagtaatgaaaataatgccatagcaaaactggatatggcaaaaggggagatcacaacccacggaacagaaagttatgccgcgtacgctaatggcactgtcgtcaaggctggtgacacgcttgattataccaatgccagcgttacattaaccgatgttgatatcaccacgcatggggacaatgctcatgccatcgctgcccgccaggggacagtttcatttaaccagggagaaatttatacaacgggtcctgacgccgcgattgctaaaatttataatggcggcacggtgacgctgaaaaatacatctgcagtcgcgcatcaggggtctggaattgtgctggagtcttccataaatggtcaggaagcaacggtagatattttatctggtagctcactacggtcagcaaatgaaatcctctaccataaaaatgagacgagtaacgtgaccattacggatagtgaggtatcatcggctgcagatgtttttatcaataatattaaaggtcatttgaccgtcgatgcaactaattcaaaaataacgggttcagctaatatttcaacagatgataacactcatacctatctgtcgctttcagataatagtacctgggatattaaagctgactcaacggtgagcaacctcacggttgataatagtacggtctatatttcctgggcagatggacgggatgtcgaaccaacaagattaacaataactgaaaattacgttggtaataatggcgtattgcatctcagaactgaattggatgatgataattcagctacggataaagtcgttattaatggaaatacctctggaacaacccgagttaaagttaccaatgcaggaggcagcggagcttacacgttaaatgggatagagattatcagcgttgagggggaatcaaatggggaatttattaaggattcgaggattttcgccggtgcctacgaatattcattaacccgaggtaataccgaagcgaccaataaaaactggtatctgactaacttctag

SEQ ID NO: 478173 - DNA, 1053 bp, Shigella flexneri
atggcagtacgaaaactcaccacaggaaaatggctttgcgaatgttaccccgccggacgtagtggacgtcgtgtgcgtaaacaattcgccaccaaaggcgaagctctggcttttgagcgtcacacgatggaagaaaccgaagcaaagccctggctgggtgaatcagtggatcgtcgaacactgaaagacgtggttgaactatggttcaaactacatggtaaatctctgacagctgggcagcatgtctatgacaaattgctgttgatggttgacgctctgggcaatcctcttgcaaccgatctcacctctaaaatgtttgcccactatcgagataaacgcctgacaggcgagatctacttcagcgagaaatggaagaaaggagcaagcccggtcaccattaacctggagcaaagctatctaagtagtatttttagcgaactatcccgtctgggcgaatggtcgtatccgaacccactggagaacatgcgaaaattcaccatcgcagaaaaagagatggcatggcttacccatgagcagattgttgaattgctggctgattgcaaacgtcaggacccaattctggcactggtagttaagatatgcttaagcacaggcgcacgctggcgtgaagccgtaaatcttactcgctcacaggtgaccaaataccgaattacctttgtcagaacgaaggggaagaaaaacagaagcatccctatcagtaaagagctttacgaagagatcatggcgcttgatgggttcaatttcttcacagactgctattttcaatttttatccgtgatggaaaaaacgtctatcgtgctccctcgcggtcaactcacacacgttctgcgccatacgtttgcggcgcacttcatgatgtcgggtggaaacattctggccttacaaaaaattctcggacaccacgatataaaaatgactatgcgttacgcacatctggcaccggatcatctggaaacggcgctccgtttcaatcctctggcaacgctgccaagtggcgacaaagtggcggcagcggttggcattaccccgtaa

SEQ ID NO: 478174 - DNA, 258 bp, Shigella flexneri
atgatttatagtgatgatgcaccatcattagaaaatcatctgcataaagtcttcaacgaaaaacaggtcaataaaattaactcacgaaaagagtttttcaacgtaaatattaaagaaattaagtctgttattgaagatatgaacatcaacgcacaatggacaatgtttgcggaagcgaaagaatatagagagtcactggcgattgagcaagagcgcaaagcagcaacttccgccaacgatgaactgcatgttgcttag

SEQ ID NO: 478175 - DNA, 426 bp, Shigella flexneri
atgcactgcaagggggcgtgtatgaaaccactgctggatgtgttgatgatcctcgatgccatagaaaaagagggcagttttgcggcggcgtcagccaaactctacaagacgccgtccgctctgagttacaccgttcacaagctggaaagcgacctaaatattcaattgcttgatcgtagcggacaccgcgctaaattcaccctcaccggaaaaatgttattagagaaagggcgggaagttctgcataccgtgcgagaactggaaaagcaggccatcaaactgcatgaaggctgggaaaacgagctggtgattggcgtggacgacacgtttcctttttctctgcttgcgcctctcattgaagctttttatcaacatcatagcgtgacgcgcctgaagtttatcaatggcgtactcggtggttcctag

SEQ ID NO: 478176 - DNA, 420 bp, Shigella flexneri
atgaggtatgagaacaccgagccttctttcggttctgaggtgtctgactacggtattatcgcccatgagagccaactgaaagcactgtcccgtctggctgctaaacagggcttctctggtgaagacgctatcgtggatatgctgggtaccgacatcgcgtattacaacggtgaggacaaaggtgtgttcatgttggctaaacgcttcacggccctgagcttcggctgcttccgtcacgacggtgagaatattacggtcgtcctttcacgtgatggcgactctcagtcccacgacttggaaatcctcggtaaagtgttcgttgtcgctgaagctgctacgatcgtcaagatgggcactggctcagctactgccgtcctgcctgtagtcaaacgcctgaagttcaccaagaccgaagcgtaa

SEQ ID NO: 478177 - DNA, 423 bp, Shigella flexneri
ttgcctggtctattctctcttctcataatacgtccggaaatatggataaacttaaaattaagtttgattcattcctctcacgatattacctttgttggtattgtacagaccgctaaagcgtccggaatggaacgtttcccgctgccgtatgtgctgaccaactgccataactcactctgcgccgtcggcggcaccattaacggtgatgaccatgtttttggtttatcggcagctcagcgttatggcggtatttttgtgcctccgcatattgcggtcatccatcaatatatgcgtgagatgatggctggcgggggcaaaatgatcctcgggtcagacagccacacccgttacggtgcattagggacaatggcagtcggtgagggtggcggtgagttggtaaaacagctgcttaatgacacctag

SEQ ID NO: 478178 - DNA, 351 bp, Shigella flexneri
atgagcatgggacacgcggcggaaagttatacgctattgaccattggcgacggtctggtggcacaaattccggcgctggtgatttctaccgccgcggggggcatcgttacgcgtgtcagcaccgatcaggatgttggcgagcagatggtgaatcagcttttcagtaacccaagcgttatgttgttaagcgccgccgtgctcggtttactcggcctggtgcctggtgcctggaatgccgaacctggtatttttgctgttcactgccggattgctggggctggcctggtggatacgcggacgcgaacaaaaagcgcctgccgaacccaaaccggtaaaaatggcagagaataa

SEQ ID NO: 478179 - DNA, 396 bp, Shigella flexneri
atgaaaagaaaagtactggcacttttaattcctgccctgctcgccgcaggtgctgcacatgcagccgaagtttataataaagacggcaacaaattagatctgtatggcaaagttgatggcctgcattatttttctgataattcagcgaaagatggcgaccagagctatgcgcgtctgggttttaaaggcgaaacccaaattaacgatcaacttactggctacggtcaatgggaatacaatattcaggcaaacaacactgaatcttcaaaaaaccagtcatggacccgtctggcatttgccggactgaaatttgcagattacggttctttcgattacggacgtaattatggcgtaatgtacgacatcgaaggctgggtaatgctgccaacttactga

SEQ ID NO: 478180 - DNA, 381 bp, Shigella flexneri
atgctgggagcggtggaacgccgcttcggcaacgatcttccgtcgtctccagtggagtggctgacggataatggttcatgctgccgggctaatgaaacacgccagttcgcccggatgttgggacttgaaccgaagaacacggcggtgcggagtccggagagtaacggaatagcagagagcttcgtgaaaacgataaagcgtgactacatcagtatcatgcccaaaccagacgggttaacggcagcaaagaaccttgcagaggcgttcgagcattataacgaatggcatccgcatagtgcgctgggttatcgctcgccacgggaatatctgcggcagcgggcttgtaatgggttaagtgataacagatgtctggaaatatag

SEQ ID NO: 478181 - DNA, 954 bp, Shigella flexneri
gtggggtataccagcagctgggttggcatcagttattcactctcattttcgtggaatgaatctgtagggatccccgataacgaacgtattgtcggacttaatgtttcagtgcctttcaatgttctgaccaaacgtcgctacacccgggaaaatgcgctcgaccgcgcttatgcctcctttaacgccaaccgtaacagcaacgggcaaaatagctggctggcaggtgtaggtgggaccttactggaaggccacaacctgagttatcacgtaagccagggtgatacctcgaataatgggtatacgggcagcgccacggcaaactggcaggccgcttacggtacgctgggggtcgggtataactacgaccgcgatcaacatgacgttaactggcagctgtctggcggtgtggtcgggcacgaaaatggcataacgctgagccagcctttaggggataccaatgttttgattaaagcgcctggcgcaggcggtgtacgcattgaaaatcaaactggcattttaaccgactggcgcggctatgcggtgatgccgtatgccacggtttatcggtataaccgtatcgcgcttgataccaatacgatggggaattccatcgatgttgaaaaaaatattagcagcgttgtgccgacgcaaggcgcgttggttcgtgccaattttgatacccgcataggcgtgcgggcgctcattaccgttacccaaggcggaaaaccggtgccgtttggatcactggtacgggaaaacagtaccggaataaccagtatggtgggtgatgacgggcaagtttatttaagtggtgcgccattgtctggtgaattactggttcagtggggagacggcgcgaactcacgctgcattgcgcactatgtattgccgaagcaaagcttacagcaagccgtcactgttatttcggcagtttgcacacatcctggctcataa

SEQ ID NO: 478182 - DNA, 1011 bp, Shigella flexneri
atgaagactgcagttgttacgaaggatcatcatgttgacgttacggataaaacactgcgctcactgaaacatggcgaagccctgctgaaaatggagtgttgtggtgtatgtcataccgatcttcatgttaagaatggcgattttggtgacaaaaccggcgtaattctgggccatgaaggcatcggtgtggtggcagaagttggcccaggtgtcacctcattaaaaccaggcgatcgtgccagcgtggcgtggttttacgaaggatgcggtcattgcgaatactgtaacagtggtaacgaaacgctctgccgttcagttaaaaatgccggatacagcgttgatggcgggatggcggaagagtgcatcgtggtcgccgattacgcggcaaaagtgccagatggtctggactcggcggcgcccagcagcattacctgtgcgggggtcaccacctacaaagccgttaaactgtcaaaaattcgtcccggtcagtggattgctatctacggtcttggcggtctgggtaacctcgccctgcaatacgcaaagaatgtctttaacgccaaagtgatcgccattgatgtcaatgatgagcagttaaaactggcaaccgaaatgggtgcagatttagcgattaactcacgcaccgaagacgccgccaaaattgtgcaggagaaaaccggtggcgctcacgctgcggtggtaacagcagtagctaaagctgcgtttaactcggcagttgatgctgtccgtgcaggcggtcgtgttgtggctgtcggtctgccgccggagtctatgagcctggatatcccacgtcttgtgctggatggcattgaagtggtcggttcgctggtcggcacgcgccaggatctaaccgaagccttccagtttgccgccgaaggcaaagtggtgccgaaagtcgccctgcgtccgttagcggacatcaacaccatctttaccgagatggaagaaggcaaaatccgtggccgtatggtgattgatttccgtcactaa

SEQ ID NO: 478183 - DNA, 381 bp, Shigella flexneri; identical to SEQ ID NO: 458903

SEQ ID NO: 478184 - DNA, 834 bp, Shigella flexneri
atggtctgccagatggaactgaccagccatctgctgacggctgcagccttcggcacgatgaagaacagcgaaaatgagcttgctgagcaacttatagaacaaaccggcgataacactctgacgttaatggataaaggttattactcactgggactgttaaatgcctggagcctggcgggagaacaccgccactggatgatacctctcagaaagggagcgcaatatgaagagctcagaaaactgggtaaaggcgatcatctggtgaagctgaaaaccagcccgcaggcacgaaaaaagtggccgggactgggaaatgaagtgacagcccgcctgctgaccgtgacgcgcaaaggaaaagtctgccatctgctgacgtcgatgacggacgccatgcgcttccccggaggagaaatggcggatctgtacagtcatcgctgggaaatcgaactgggatacagggagataaaacagacgatgcaactgagcaggctgacgctgagaagtaaaaagccggagcttgtggagcaagagctgtggggtgtcttactggcttataatctggtgagatatcagatgataaaaatggcggaacatctgaaaggttactggccgaatcaactgagtttctcagaatcatgcggaatggtgatgagaatgctgatgacattgcagggcgcttcaccgggacgtataccggagctgatgcgcgatcttgcaagtatgggacaacttgtgaaattaccgacgagaaggggaagggccttcccgagagtggtaaaggagaggcccaggaaataccccacagccccgaaaaagagccagtcagttgcttaa

SEQ ID NO: 478185 - DNA, 999 bp, Shigella flexneri
atgaaaaatcctgaacttaagaatctgacggattactctccagcagataaaccgtgggatgaacaccgaagcttttccgacgatgtgggcggtatttatctgcgtgctgccggatttgagcactacggcgaacgtgtcggggcttgtagtggtattttgcggtttgggtggtcaacaaacacagagaccggagaaacgcgcctgcggttgcgtgatgcacggttctgtcgcgtccggcactgtccgatctgtcagtggaggcgttccatgatgtggcaagcccgtttctatcagtccctgccaaagattgtgacggaacatcccggcgcgcgctggttgtttctcacactgacagtgcgcaactgttccattgacgcgcttggtgagacgctgaccgcgatgaatgcggggtttaagcggttgaaagagcgtaaggaatttcgccatgtgttaggctgggttcgtactacggaagtaacgcgcggcaaggatggtagcgcacatccccattttcacactctgctgatggttcccccttcgatgttgtccggccgtgagtatgtgaaacatgcccgttgggtggaactgtggcgtgattgtctgcgggtggcgtatgacccgaatgtggatatcagagtggtgaagtcacggaaaccaaaagacgatgaatctttaccttgtgttgttgcggaacagctgcgcagcgcggtggttgaaactctgaaatattccacaaagcctgctgatatgctggctgatcctgaatggttcctcgaattaacacggcaggtacacaagcgtcgttttgttgctacggggggagcgcttaagaatgttctgcaactggagcgggaaacgaacgaggatttaatcatggcggatggcatggcagagggtacagatgacggttcccgcctggcgttttcgtgggtgccggttgttaaaaaataccagcgcgatcgggcgaaagataaacgtcagctaagtggcgaggattga

SEQ ID NO: 478186 - DNA, 303 bp, Shigella flexneri
atggcaagggatagaggcgattcaaaaaatcgcatttatcccttaagtataaatacaaggaacgcgcgcgatacttgctcaaaatctgagctgattttcggacagcaaaaacaacaaccacaaaagcgttttccccgcaaaacactcacaggttgttccaccgattttgtgaaaaacaaaaaccgtcttgcaggtggttggcctcactacgtgacaccaaccaccatccccagtgtttttttccgtgccgtcgtcaatcacaaaatcggaaccccggaggggcccccgcgattttctgtttga

SEQ ID NO: 478187 - DNA, 999 bp, Shigella flexneri; identical to SEQ ID NO: 478185

SEQ ID NO: 478188 - DNA, 303 bp, Shigella flexneri; identical to SEQ ID NO: 478186

SEQ ID NO: 478189 - DNA, 2511 bp, Shigella flexneri
atgcaggtgttacccccgagcagcacaggcggcccgtcgcgcctgtttattatgcgtcctgtcgccaccacgctgctgatggtggcgatcttactcgccgggattatcggttatcgcgccctgcccgtttcggcgctgccggaagtggactatccgaccattcaggtggtcacgctctacccaggtgccagcccggatgtcatgacctctgccgttaccgcgccgctcgaacgccagttcgggcagatgtctggcctgaaacagatgtcgtcgcaaagttccggcggtgcgtcagttatcactttgcagttccagctaacattaccgctcaatgtcgccgagcaggaagtgcaggccgcgattaacgctgcgaccaacttgttgccgagcgatctgcctaacccgccggtttacagcaaagtgaacccggcagatccgccgatcatgacgctcgccgtcacctcaaccgccatgccgatgacgcaagtggaagatatggtggaaacccgcgtcgcgcagaaaatctcgcagatttccggcggtcagcgtccggctgttcgcgtcaaacttaacgctcaggcgattgccgccctcggcctgaccagcgaaaccgtgcgcaccaccattaccggcgctaacgttaactcggcaaaaggtagcctcgacggcccttcccgtgcggtcacgctttccgcgaacgaccagatgcaatccgccgaagagtatcgccagctaatcatcgcctaccagaacggcgcgccaattcgtctgggcgatgtcgcaactgtagagcaaggtgcagaaaacagctggctcggcgcgtgggcgaacaaagaacaggccattgtgatgaatgttcagcgccagcccggtgctaacattatctccaccgccgacagcattcggcagatgctgccacagctcactgagagtctgccgaaatcggtgaaggtgacagtgctttccgatcgcaccaccaatatccgcgcatccgtcgatgatactcagtttgaattgatgatggctatcgcgctggtagtcatgattatctacctgtttttgcgcaatattccggcgaccatcattcccggtgttgctgtaccgctgtcgttaatcggcactttcgcggttatggtgtttctcgatttttcaatcaataacctgacactgatggcgttaactatcgccaccggattcgtggtcgatgacgccatcgtggtgatcgaaaacatttcccgctatatcgaaaaaggcgaaaaaccgttggcggcggcgctcaagggcgcaggtgaaatcggctttaccattatctcgctgaccttctcactgattgcggtgttgatcccactgctgtttatgggcgatatcgtcgggcgactgttccgcgaatttgctattaccctggcggtagcgattttgatctcagcggtggtgtcgctgaccctgacaccgatgatgtgcgcgcggatgctcagccaggagtcgttgcgtaaacagaaccgcttctcccgtgcctcggaaaaaatgttcgacaggataatcgccgcctatggtcgtggactggcgaaagtgctgaatcatccgtggctgaccttaagcgtggcactcagcacgctgctgcttagcgtgctgctgtgggtgttcattccgaaaggtttcttcccggtacaggacaacggcattattcagggcactttgcaggcaccgcaatccagctcctttgccaatatggcccagcgacaacgccaggtcgcggacgtgattttgcaggatccggcagtgcaaagcctgacctcatttgttggcgttgatggcactaacccgtcgctgaatagtgcacgtttacaaatcaacctcaaaccgttggatgaacgtgatgatcgggtgcaaaaagtcatcgcccgtctgcaaacggcggtagataaagtgccgggcgtcgatctcttcctgcaaccaacgcaggacctgaccatctatactcaggtcagccgcacccagtaccagtttaccttgcaggccacgtcactggatgcgctcagtacctgggtgccacagttgatggaaaaactccagcaactgccacagctttctgatgtctccagcgactggcaggacaaagggctggtggcgtatgtcaatgttgatcgcgacagcgccagccgtctggggatcagcatggcggacgtcgataacgccctgtacaacgcgtttggtcagcgactgatttccactatttatactcaggctaaccagtatcgcgtggtgctggagcacaataccgaaaataccccaggcctcgcggcgctggataccattcgcctgaccagcagcgacggtggcgtggtgccgttaagctcaattgccaaaattgagcagcgttttgcgccgctttccatcaaccatctggatcagttcccggtaacaaccatctcctttaacgtgccggataactattcgctgggcgatgcggtgcaggcgattatgggtaatgctgccaacttactgatttag

SEQ ID NO: 478190 - DNA, 381 bp, Shigella flexneri; identical to SEQ ID NO: 458903

SEQ ID NO: 478191 - DNA, 132 bp, Shigella flexneri
atgaagttgattatttttattctcattgttctgattattgcagcgctacttatccggattatcactcagaagtgtaaatcagcattctcctttgctgatgcaattgcatgcggcaggtatacggactggtga

SEQ ID NO: 478192 - DNA, 237 bp, Shigella flexneri
atgaaattcaataaggatgaatatttaacccgttgtaatcaagatcagaaaacccgagaaacacagggtgatactttaccttacatcacgttaaaacattacgagacctatggctttaacgcaaatgaaaaacccaaaatatgcgatgtcagtattgaaattaatgcagataaaattagtagtataactaatttgcagttgacgcttgagctaaaaggggggggagggagtgagtaa

SEQ ID NO: 478193 - DNA, 417 bp, Shigella flexneri
atgattgacagaaaaacggttgaggatacgttacccgtgatcacggttacccgttctgggatgcgggataattttttagataaaggtttttcctgcatggatagcctcttcgccaccaccaataaattaggcgaagtggccaatcttcgcgtgacattcagcattcgtcgcccatccggtaaggagattaaccaaacggttggcttcgcgcctttcggtttaaaccggctgaatattagctttactgattacctatttggttcatttaccagtaattcgtctcttattctttataaaccggaatttgagcgaaaatcttgtgcaactgtaaggaccacaatcgttgccgcaacggcaactattaacggcaaggatgtggagttgctgaaagcgggggcaattgaacaaaagtggtaa

SEQ ID NO: 478194 - DNA, 201 bp, Shigella flexneri
atgactgccgcagcattgctggcggaaatgcctgaatcgagcagcctctcgagacgtgaaatcagcgcacttgtcggtgttgctcaggtaaaccgggactcgggaactctgcgcggtcgacgaaccattttcggtgattgtgctggggaagaacagctctgtacatggcggcgcttgaggccccccggtttaatctggtga

SEQ ID NO: 478195 - DNA, 174 bp, Shigella flexneri
atggcggcgcttgaggccccccggtttaatctggtgataaaggcgttttacatgcgcctacttgcagccggaaacgccaaaaaagtggcactggttgcctgtatgcgtaagttgctgaccattatgaacgcaatgctcagaaaaaacgaagaatggaatgaatcgtatttatga

SEQ ID NO: 478196 - DNA, 1911 bp, Shigella flexneri
gtgccgctgggattgttatttaaaccacactatctgctgcgccatcgcaacccacggttgctttttgagtcgctgctcacgttagccatcacactgacgttaagctggctttcgatgctgtatctgccgtggccttttactttcattattgtgctgttgatgtggagcgccgtgcgcctgccacgaatggaagcctttttgatcttccttaccacggtgatgatggtgtcgctgatgatggccgcggatccctccctgcttgctacgccgcgtacgtacctgatgagccatatgccgtggctaccgtttttgctgatcctgctgcccgccaacatcatgaccatggtgatatatgcctttcgtgcggaacgcaaacacatttccgaaagcgaaacccgctttcggaacgcgatggaatattccgctatcggtatggcgttagtgggcaccgagggacaatggctgcaatccaacaaagcactctgccagtttctcggttacagtcaggaagagctgcgcggactcacctttcagcaactgacctggccggaggatctcaataaagatctccaacaggttgaaaagctgataagcggtgaaataaacacctattcaatggaaaaacgctactacaaccgcaatggcgatgttgtctgggcgttgcttgccgtctcactggtgcgccacacggatggcacgccgctctattttatcgctcagattgaagacattaacgagctaaaacgcaccgaacaggtgaatcagcaactgatggagcgcatcacgctggctaacgaagcgggcgggattggcatctgggagtgggagctgaagccggatatttttagctgggataagcggatgttcgagctgtatgaaattcctccgcatatcaaaccgaactggcaggtgtggtacgagtgcgtgctgccggaagatcgccagcatgccgaaaaagtgattcgtgattcgttgcaatcacgctcgccctttaagctggaatttcgcattgccgtgaaagatggcatccgccatatccgcgccctcgccaaccgggtactgaataaagaaggcgaagtcgaacgcttgctcggcattaatatggatatgaccgaggttaaacagcttaacgaggcattgtttcaggaaaaagagcgcctgcacattacgctggattccatcggtgaagccgtggtctgtattgatatggcgatgaaaattacctttatgaatccagcggcggagaagatgagcggctggacgcaggaagaagcattaggtgttccgctcctgacggtgttgcatattacttttggcgacaacggaccattaatggagaacatttacagtgccgacacctcacgttccgcgattgaacaagatgtggtgttgcactgccggaacggcggcagttacgacgtgcattacagtattacgccgttaagtactctggacggcagcaatataggctcggtactggtgattcaggacgtcaccgaatcacgcaaaatgctgcgccagctgagctacagcgcctcccatgatgcactgacgcatctcgccaatcgcgccagttttgagaagcaactgcgtatcctgctgcaaacggtaaacagtacacatcagcgacatgccctggtgtttatcgatcttgatcgctttaaagcggtgaatgacagcgccgggcatgcggcgggtgacgctttactgcgcgaactggcgtcgttgatgctgagtatgctgcgctccagcgacgtgctggcgcgactcggtggtgatgaatttggtctactgttgccagactgtaatatcgaaagtgcgcgttttatcgctacacgcattatcagtgccgtgaatgattatcactttatatgggaaggccgtgtgcatcgggtagattaccttgattga

SEQ ID NO: 478197 - DNA, 774 bp, Shigella flexneri
atgtcgcaggctgatatcgcctgttatgcctccaaaaatggtggacggggccgggtgacggtttacgaaccacagcaagctgccgcacatagcgaacgggcggcgatgtcgcttgatgaacagtggcggatgattaaagagaatcagttgatgatgatcgcccacggtgtcgcttcgccgcggatcccggaagcgcgtaatttgtggctgatttcacttaagctctggagttgcgaaggcgagattattgatgaacaaaaatttcgtcgtagcttcagcgatccggcacttagccatgctcttgaccgacgggtattccacgaatttttccagcaggccgcaaaagcggttgccagtaaaggcataagcatcgccctccccctttccgttgccggtttgagtagcgccacgctggtgaatgatctgcttgagcagctggaaaatagccctctaccaccacggttattacatctgattattccggctgaagcgattttagatcacgcagaaagcgtgcaaaaactgcggctggcgggatgtcggatagtgctcagccaggtgggccgcgatctgcaaatcttcaactcgctgaaagcgaatatggcagattacctgctacttgatggtgagttatgcgccaacgtgcagggtaatttgatggatgagatgctgattacgattattcagtggatttgcccctatatttccagacatctgttatcacttaacccattacaagcccgctgccgcagatattcccgtggcgagcgataa

SEQ ID NO: 478198 - DNA, 381 bp, Shigella flexneri; identical to SEQ ID NO: 458903

SEQ ID NO: 478199 - DNA, 423 bp, Shigella flexneri
atgaaatcaatgaatattgccgccagtagtgaactggtatcccgactttcttctcatcgccgcgtggtggcgttgggagatactgattttacggacgtcgcggcagtcgtcattaccgctgcggatagtcgcagtggcattcttgcgttgcttaagcgcaccggttttcatctaccggtgtttttgtattccgaacatgctgttgaattacctgcgggcgttacggcggtaatcaacggcaacgagcagcagtggctggagctggaatccgcagcctgtcagtatgaagagaatttgctgccaccgttttatgacacgctgacgcagtacgttgagatgggcaacagcacctttgcttgccctggacatcaacatggtgcgttctttaaaaagcatcctgccggactaatgccagtcagttaa

SEQ ID NO: 478200 - DNA, 525 bp, Shigella flexneri
atgacaagccgcagccgtcaggctgcctactcggaactggataaatatccgtcgaaaatgatcgccggattgccggatcacgtacacaacgcggcacgtattcgttatccgatggtacgcatggactggctgcgtaagcgccatctgagcgacacctcccagcgcggtgataaccgttttgtgcgcgtgagctgggatgaagccctcgacatgttctatgaagaactggaacgcgtacagaaaactcacgggccgagtgccttgctgaccgccagtggttggcaatcgacggggatgttccataacgcttcggggatgctggcgaaagctattgccttgcatggtaatagcgttggtacgggcggagattactctaccggtgctgcgcaggtgatcctgccgcgcgtagtcggttcaatggaagtgtatgaacagcaaacctcctggccgccggtgaagttgaggtcatcagcatcgatccggttgtcacatccacccatgagtatctggggcgcgagcatgtga

SEQ ID NO: 478201 - DNA, 486 bp, Shigella flexneri
gtgccacttcaagctgacgacgatgtggcggcaacgattaaatccgtgcgccagcagttactcaatctcaatatcactggtcgcttaccggtcaaactggaccctgattttgtacgagtggatgagaacagcaatcccccgttggtcggggactatacgctctataccgtacagcgtccggtgactattactctgctgggtgcggtttctggggctgggcaattgccctggcaggcaggccgtagcgttaccgattatctgcaagatcacccccgccttgcaggcgcggacaagaataacgttatggtgattacgcctgagggtgagactgtcgtcgcccctgttgccctgtggaataaaagacatgtggaaccaccgcctggcagccagctttggttgggcttttctgcgcatgtactgcccgaaaaatatgctgatttaaatgaccagattgtgtctgttttaacgcaacgtgttcctgactga

SEQ ID NO: 478202 - DNA, 330 bp, Shigella flexneri
atggtatacctgcaaacaatgaaaaaatacctagcatatctgcaacaagctgcaacactgggcagtagtaatgcccaggcggaaattggctatttatatctcatcggaaaagaactaccacagaatcttcctgatgctggtgtctggttcaaaaaagcagctgcacaaggtaattttgccgcacatttctatctgggaaggatgtatcagaatggtgacggcgttgagagaaatatggaaaaagccaggtttcatctatctaatgcggcagaaggtggaatagaacctgcgcttaaagcattaaatgaacttgaacatcaaacaaaataa

SEQ ID NO: 478203 - DNA, 210 bp, Shigella flexneri; identical to SEQ ID NO: 9340

SEQ ID NO: 478204 - DNA, 273 bp, Shigella flexneri
atgactaccgttactgttcattgtccgcgctgtaattccgatgaagtttatcgacatggccgtagttgttcccggcatgcgcgtttccgttgtcgctcatgtaaacgtgttttccagctcacttactcttatgaagccagaaaactcggcgttaaggagcagatcgttgaaatggcacataacggcgcagggggctgttataccgccagaacactgaaaatcggcatcaataccgtcatacggacattaaaaagctctcgccccggcggataa

SEQ ID NO: 478205 - DNA, 369 bp, Shigella flexneri
atgcgcaatacactcatacccatcctcgttgcgatatgcttgtttattaccggtgtcgctattttgaacatccagctctggtattccgcaaaagcagagtacctggcgggagcaagatatgccgccaacaatatcaatcatatacttgaagaagcgtcacaggcgactcaaacagcggttaacattgccgggaaggaatgcgacctcgaggagcaatatcagcttggcactgaagcagctctgaaacctcacctgcgcacaatcatcattctcaaacagggaatagtctggtgtacatccctgcctgggaatcgggtcctgctgtctcgtattcctgctgtctcgtattcctgttgtcccggacagtaa

SEQ ID NO: 478206 - DNA, 867 bp, Shigella flexneri
atgtataaaaaattaaaattaaccacaataagcgaattgattaaaaatatttattgttcattatccgttctcatcattggttgtgcgtcagcttatgccgttgaattcaacaaagatttaatcgaagccgaagatcgtgaaaacgttaacctttcccaatttgaaactgatggccaattacccgtaggtaaatactcattaaacgctcttattaataataaaaggacgccaatccatctggacctgcaatgggtattaattgataaccaaactgcagtttgtctgactccagagcaattaacattattaggctttactgatgagattattgaagaggctcagcaaaacctgatcgatggttgttaccctatcgaaaaagaaaaacaaattacaacttatctcgataaagggaaaatgcaattatccatatctgcacctcaggcatggttaaaatacaaagatgcaaactggacgcctcctgaactttgggatcatggtattgctggggcatttcttgactacaatttatatgcctctcattatgcaccacatcagggcgataattcacaaaatataagttcctatgggcaggctggggttaatcttggggcctggcgcctgcgtactgattaccagtacgatcagtcatttaacaatggcaaaagccaagcgaccaacctggattttccgcgtatttatttgtttcgcccaatcccagcaatgaatgcaaaactaactataggtcaatacgatactgaatcctctattttcgactctttccatttttctggcatttcgttgaaaagcgatgagaatatgttaccgccagacctacgtggttacgcaccgcaaattgaggtagcctga

SEQ ID NO: 478207 - DNA, 756 bp, Shigella flexneri
ttgagtgcgggacgcctgaataaaaaatctctgggtatcgtgatgttgttatcggttggactgctattggcgggctgttcgggtagcaaatcatccgatacaggaacgtattccggctccgtttacaccgtgaaacggggggatacgctatatcgtatttcgcgcaccacgggaaccagcgtaaaagagctggcgcgactgaacggcatttcccccccttacaccattgaagttggtcagaaactaaaactgggtggggcgaaaagtagcagtagtacacgtaaatcaaccgccaaatcaacgaccaaaaccgcatcggttacaccgtcatcagcggtaccgaaatcttcctggccgccagtagggcaacgttgttggttatggccaacgacagggaaagttatcatgccgtattcgacagcagatggcggcaataaagggattgatatctcagctccacggggtacacctatttacgccgcgggtgcaggaaaggtggtgtatgtgggcaaccagctgcgtggctacggtaatctcatcatgattaaacacagtgaagattacattacggcttacgcccataatgacacgatgctggtaaataatgggcaaagcgtgaagactgggcaaaaaatcgccactatggggagcacggatgcggcatctgttcgcctgcatttccagattcgttaccgtgcaacggcaattgatccgctacgttacttgccgccgcagggcagcaagccaaaatgctga

SEQ ID NO: 478208 - DNA, 465 bp, Shigella flexneri
atgcagcggaaaaaatacgatcccaatttgcctagaaacttaacatatcgaaggagagacaaagcatattactggcgcaaccctctgacgaaagaagaatttacactaggtaaaatttcaagaagagatgcagtagcgcaggcaattgaagcaaatcattatatatacaaaaactactctcctgctgccctaattgaaaagcttaaaggggtcgactcatttactatggcagactggattgaacgttacaaaacgattcttataaggagaaaagcgtccagaaatacttataaaactcgggtaaatcaactggagacaataaaagaaaaattaggaggggttttactgacagaaataaccactcgccatatcgccgagtttcttgatttgtggattgaaggagggaaaaacacgatggcaggatcaatgcgttctgtgttatctgatatgttccgcgaagcctga

SEQ ID NO: 478209 - DNA, 267 bp, Shigella flexneri
ttgcctgtagcctgtattaatccggagagaaagggacaggccgcacgtattgccgcgaccattcgacataaccgggccagggggaaacaccagatcactttaatgtctgatattgtcagggatctttcacgtctgggctggacgaatgaacgtattggtacagagctgggaatggaccaggatgaagtgctgaggctgaaacagattagcgggctgacagagttgtttcaggaagaggatttcagctcggcttggacggttcgttga

SEQ ID NO: 478210 - DNA, 543 bp, Shigella flexneri; identical to SEQ ID NO: 464540

SEQ ID NO: 478211 - DNA, 318 bp, Shigella flexneri; identical to SEQ ID NO: 463829

SEQ ID NO: 478212 - DNA, 381 bp, Shigella flexneri; identical to SEQ ID NO: 458903

SEQ ID NO: 478213 - DNA, 273 bp, Shigella flexneri; identical to SEQ ID NO: 478167

SEQ ID NO: 478214 - DNA, 303 bp, Shigella flexneri; identical to SEQ ID NO: 473532

SEQ ID NO: 478215 - DNA, 504 bp, Shigella flexneri
atgacattgcctgtttttataacggtaattgcagaccatgacaagccgcagccgtcaggctgcctactcgataatttaagttcagcagcagttaaaacagcaggtgtacttatcagctttcaggctgtactatccgcttatcagcgagtaatggaagttggccttcaacgtgcaagtgctgaacgttcaattgatttcgtattttctaaagatgcaaatcaagtaaaagatttcacaaagtcattagctcaaacaacgggtttagatatcgctgaactgcaatcacagtttgctggtttcggtgcttcagctagagagtctctaggcattcaaggttctgaagaactttttagaaatatgattggctattctcgtctgatggggcgaagtgaagaagagattaagcgagcactgacagcattatcacagatggctggtaagggtcagattatggctgaagagcttaaggggcaactagctgaagctgttcctggtatggtttga

SEQ ID NO: 478216 - DNA, 927 bp, Shigella flexneri
atgccaaactggtgctcgaatcgtatgtattttcctggtgaaccggcacagatcgctgagattaaacgactggccagcggtgcagtcacaccgctttatcgccgcgccacaaatgaaggtattcagctgtttctggccggaagtgccggacttctgcagatcactgaaaatatccgctctgaacagtgccccggagtgacggctgccggacgtggtgctgtatcgacggaaaatatcgcgttcacccgctggctgacacacctgcagaacggtgtgttgctggatgaacaaaactgcctgatgctgcatgaactctggttacagagcggtactggccagcgtcgctgggaaggattaccggatgatgccagggaaaccatcactgtgcatttcaccgcaaaaagaggtgactggtgtgacatatggggtaacgaggatgtatcggtgtggtggaaccgtctgtgtgacaacgtagtgccggaaaaaaccatgccgtttgacctgctgacggttctgccgacccgcctggatgttgaagtgaacggctttaatggtggtgttctgaacggtgttccttctgcatatcactggtatacggaacggtatggcgtgaagtggccttgtggatatgacctgaatatcagcagtcagggagaaaacttcattcaggtggatttcgacacgccgtggtgtcagcaggaaagcgacgttattgcagaattaagccgccgtttcagctgcacgctggagcactggtatgccgaacagggctgtgatttctgtggctggcagttgtatgagcgtggagagctcgtcgatgtgctgtggggggaacttgaatggtcttccccgacagatgacgatgagcagccggaagtcaccggacctgcgtggatagtcgacaatgtggcgcattatggcggatga

SEQ ID NO: 478217 - DNA, 675 bp, Shigella flexneri
atgaattcccagacaacaaaagatattccctgcttccgttcttatttgcctgatgccctgcgtttaagatttgaagataaactgaccatccgggccatcgctcagcgtctgggtctcagtcattccacaatacatacgctttttcagcgatttcttgcatccggtatcgcatggccattgcccgattcagtttcattcgctcaacttgacgccatcctttatgccaacagaaagaaggaattaacagagcctcaaatcagagaaggctcatggcgaaaagaacggcgaaccagctatagccgtgaatttaaggtccgtctggctaagcaggcgttacagcctggggctgttgttgcccggatcgccagagaacacgatatcaataataacctgctgtttaaatggaaaagccagtacgaggacggcttactgagcgatgatgacatacaggaatgcatgcctgtcccggtggcactgactgatacgccggagccgaccagaccagttacaaatcccttctggcgtaacaagcatgatgagcgccctgagggggctcccggaaacgtcccacggtgcgagctgcatcttaaatcaggtgtggtaaaactgtttgaccctctcactccggaactgttacgggcgctaatccgcgaaatgaaagggggtatccgatga

SEQ ID NO: 478218 - DNA, 348 bp, Shigella flexneri
atgataacgctgccgaccggtaccaaaatctggatcatcgctggcatcacagatatgcgttgtggcttcaatggcctggcttcgaaggtgcagaacatgctgaaagatgacccgttctccgggcatatcttcgtcttccggggccgcagtggcaaaatggtgaaaatactgtgggccgatcgtgacgggttatgcctgttcgccaaacgcctggaacggggccgcttcgtctggccggtgacccgggaagggaaagtgcacctgacgccagctcagttatccatgctactggaggggatcgcgtggcaacatcccaaacggacagaacggcctggcatccggatataa

SEQ ID NO: 478219 - DNA, 129 bp, Shigella flexneri
atgtttgccctctgtgatgtaaacgcgttttatgccagctgtgagacggtgtttcgccctgatttatggggtaaaccggtggttgtgctatcgaataatcacccatacacttttacttccactctctaa

SEQ ID NO: 478220 - DNA, 303 bp, Shigella flexneri; identical to SEQ ID NO: 473532

SEQ ID NO: 478221 - DNA, 375 bp, Shigella flexneri
atgacaaaagagctgacaggtaaagccctgtttatggcgctcaggagccagcgcccacctgccgggctaatccaccactctgatcgaggttcacagtactgtgcatacgattaccgggtcatacaggagcagtttggtctgaaaacatcaatgtcgcgtaaaggtaactgttacgacaacgctccgatggaaagcttctggggaacgctgaaaaatgagagcctgagccactatcgttttaataaccgggatgaagccatctcagtaatacgggaatacattgagattttctacaatcgtcagcgtcgtcactctcgtctggggaatatctccccggcagccttcagggaaaaatatcatcagatggctgcttaa

SEQ ID NO: 478222 - DNA, 675 bp, Shigella flexneri
atgaattcccagacaacaaaagatattccctgcttccgttcttatttgcctgatgccctgcgtttaagatttgaagataaactgaccatccgggccatcgctcagcgtctgggtctcagtcattccacaatacatacgctttttcagcgatttcttgcatccggtatcgcatggccattgcccgattcagtttcattcgctcaacttgacgccatcctttatgccaacagaaagaaggaattaacagagcctcaaatcagagaaggctcatggcgaaaagaacggcgaaccagctatagccgtgaatttaaggtccgtctggctaagcaggcgttacagcctggggctgttgttgcccggatcgccagagaacacgatatcaataataacctgctgtttaaatggaaaagccagtacgaggacggcttactgagcgatgatgacatacaggaatgcatgcctgtcccggtggctctgactgatacgccggagccgaccagaccagttacaaatcccttctggcgtaacaagcatgatgagcgccctgagggggctcccggaaacgtcccacggtgcgagctgcatcttaaatcaggtgtggtaaaactgtttgaccctctcactccggaactgttacgggcgctaatccgcgaaatgaaagggggtatccgatga

SEQ ID NO: 478223 - DNA, 399 bp, Shigella flexneri
atgtcatggagctttctgttttttaaaaaacaattcattgatagttgcttgaatgacaaaaaatgcatactgcatttacccgagtttatatttaatgataacaagaatttgcttgctttagataccgacacgtcggataggattaaagcggtgaagaattttcttgctgttctttcagatagcatttgctcattatttattgttaatagtaatgttgcatcaatctccttgggaaatgaatccttttcaacagatgaagatcttgagtatggttatttaataaacactggcaatcattatgatgtttacctccctcctgaacttttttctcaggcttataagttaaaaaataaggaaatgaatgcgcaacttgactatttaaatcgttatgcaacttaa

SEQ ID NO: 478224 - DNA, 381 bp, Shigella flexneri; identical to SEQ ID NO: 458903

SEQ ID NO: 478225 - DNA, 642 bp, Shigella flexneri
atgcgttggccggtaaaactcaaaggatttaaaacagccattgtaagtagcgatgaagcgccgctaggatgcaaggggggcaaagggcttcagacgaatcttaaggattctaatagatcttcatgtacagaagatggtcaacattattatatatacgatacaaagtttcttacgctctaccttgagcagacagagatgaagaatttgccgattggtggcgtctggaaggggaaagttaaattacattcgaacagcccggcccaggactatttcgcaaatattaccctgaatacgctcgaccccaaccatattgacgtgttcttcccggagttcgcccacgccacgccaagggtgcagttagacttgcatccaacaggaagcgttaacggcagcaactacgcgcaagatctgaccatgttggacatgtgcctgtacgatggttttaacggtaatgccatcagttatgaaatcatgctcaaagatgaagggcgaccagctgcagggcgcagagacggttacttctctatctatcgtcagggagggaccaccaccgacgagggagaacgcattgattaccgggtcaaaatgtacaacccggaaaccggtgggcaaagtaagcgccccgagaagtacgtagcgtaa

SEQ ID NO: 478226 - DNA, 237 bp, Shigella flexneri
atgtacggtgaatctcacaacatgaattccgacgacggtgatgttgtgaacaaaacacaaaacttcgaagctgttctgcaatatcagttcgactttggtctgcgtccatccatcggttactcctattctaaagcactggacgtagcaggttggatttgcccctatatttccagacacctgttatcacttaacccattactggcttgctgccgtagatattcccgtggcgagcgataa

SEQ ID NO: 478227 - DNA, 381 bp, Shigella flexneri; identical to SEQ ID NO: 458903

SEQ ID NO: 478228 - DNA, 510 bp, Shigella flexneri
gtggtggtcagtgatattaacgccgacgcagctaaccatgttgtagacgaaattcaacaactgggtggtcaggcatttgcctggcgttgtgatattacttccgaacaggaactctctgcactggcagactttgccgtcagtaaactgggtaaagttgatatcctggttaacaacgccggtggcggtggtcctaaaccgtttgatatgccaatggcagattttcgccgtgcttatgaactgaatgtgttttcttttttccatctgtcacaacttgttgcgccagaaatggaaaaaaatggcggtggcgttattctgaccatcacttctatggcggcagaaaataaaaatataaacatgacttcctatgcatcatctaaagctgcggccagtcatctggtcagaaatatggcatttgacctgggtgaaaaaaatattcgggtgaatggcattgcgccgggggcaatattaaccgatgccctgaaatccgttattacaccagaaattgggtaa

SEQ ID NO: 478229 - DNA, 672 bp, Shigella flexneri
atgagccgcattgcagcggatgtgatactggaaatctgccatcaggcagatgtggagccggggatattcacggtgatccacacatgggggcgtgaccagcagtggcatccgcatatccatttatcgacaactgccggtggtgtgacgtcgggccacacctggaaaaatcttcatttttacgcccgtaaggtgatgagcatgtggcgctaccggataacacggttgctgtcacggaaataccctgacctggtgatgccggatgcgctggcagcagaaggaagcagtaaacgggaatggaatcgcttcctggacacgcattaccgccgtggctggaatgtcaacgtatcccgggtaatggataatgccacccatgtggcggtgtactttggctcttacctgaaaaagccaccggtgctgatgagtcttctggagcattatgccggtcaggatgaaatcggtctgcgttacaacagtcaccgaacaaaacgggaagaatacctgttgatgagtggagatgagttcatggaaaggttctcctggcatgtggcggataaggggttccgtatggtgaggtactacggttttttgagtccggcgaaacggcggttactggaagaagtggtgtacatcataacggagacagtgagaaaaacggcgatgcaaatcacctag

SEQ ID NO: 478230 - DNA, 777 bp, Shigella flexneri
ttgtctggagattcagggggccagtctaaacgcacccgtctgcgtaagaaaaatttattttctaatcagcagcgccatcgtactaaaaatatccccttcctggcggtggataacccggcggattctgctgtggaagccgtacgtgcgctacgaaccagtctgcatttcgctatgatggagactgagaataacattctgatgatcaccggtgcgacgccagacagtggtaaaacgtttgtcagttcaactctggcagcggtgatcgcccagtccgatcaaaaagtgttatttattgatgccgacttacgccgtggttattcgcataacctgtttaccgtgagtaatgaacatggcttgtcggaatatctggcaggtaaagatgagctcaacaaagtgatccagcattttggcaaaggaggctttgatgtgattactcgcggtcaggtgccacctaacccgtctgaactgctgatgcgcgatcggatgcgtcaattactggaatgggcgaacgaccattacgatctggtgattgtcgatacgccgccgatgctggcggtgagcgatgctgcggtcgtgggacgctctgtcggcaccagcctgctggttgcgcgttttggcttgaacaccgccaaagaggtgagcttgtcaatgcagcgtctggaacaggctggcgttaatattaaaggcgcaatcctcaatggtgtgattaaacgcgccagcaccgcttacagttacggctataactattacggttatagttactccgagaaagagtaa

SEQ ID NO: 478231 - DNA, 705 bp, Shigella flexneri
atgagccgcattgcagcggatgtgatactggaaatctgccatcaggcagatgtggagccggggatattcacggtgatccacacatgggggcgtgaccagcagtggcatccgcatatctatttatcgacaactgccggtggtgtgacgtcgggccacacctggaaaaatcttcatttttacgcccgtaaggtgatgagcatgtggcgctaccggataacacggttgctgtcacggaaataccctgacctggtgatgccggatgcgctggcagcagaaggaagcagtaaacgggaatggaatcgcttcctggacacgcattaccgccgtggctggaatgtcaacgtatcccgggtgatggataatgccacccatgtggcggtgtactttggctcttacctgaaaaagccaccggtgccgatgagtcgtctggagcattatgccggtcaggatgaaatcggtctgcgttacaacagtcaccgaacaaaacgggaagaatacctgttgatgagtggagatgagttcatggaaaggttctcctggcatgtggcggataaggggttccgtatggtgaggtactacggttttttgagtccggcgaaacggcggttactggaagaagtggtgtacatcataacggagacagtgagaaaaacggcgatgcaaatcacctggagagggatgtatcagaggttactgaaggtttga

SEQ ID NO: 478232 - DNA, 627 bp, Shigella flexneri
ttgccgtctgcggggattgtgtggcgaagggctgcgccaactctgcgtatccgtgacccgcataaagatgaaaagatggcagcaatccataaagcactggacgaatgcagcgcagagcatccggtcttttatgaagatgaagtggatatccatcttcatcccaaaatcggtgcggactggcaactgcgcggacagcaaaaacgggtggtcacaccgggacagaatgaaaaatattatctggccggagcgctgcacagcgggacaggtaaagtcagctatgtgggcggcaacagcaaaagttcggcgctgttcatcagcctgctgaagcggcttaaagcgacataccgtcgggcgaaaaccatcacgctgatcgtggacaactacattatccacaaaagccgggaaacacagagctggctgaaggagaacccgaagttcaggggcatttatcagccggtttactcgccatgggtgaatcatgttgaacggctatggcaggcacttcacgacacaataacgcgtaatcatcagtgccgctcaatgtggcaactgttgaaaaaagttcgccattttatggaaaccgtcagcccattccccggaggcaaacatgggctggcaaaagtgtag

SEQ ID NO: 478233 - DNA, 627 bp, Shigella flexneri
atgctgcatgaactctggttacagagcggtactggccagcgtcgctgggaaggattaccggatgatgccagggaaaccatcactgtgcatttcaccgcaaaaagaggtgactggtgtgacatatggggtaacgaggatgtatcggtgtggtggaaccgtctgtgtgacaacgtagtgccggaaaaaaccatgccgtttgacctgctgacggttctgccgacccgcctggatgttgaagtgaacggctttaatggtggtgttctgaacggtgttccttctgcatatcactggtatacggaacggtatggcgtgaagtggccttgtggatatgacctgaatatcagcagtcagggagaaaacttcattcaggtgtatttcgacacgccgtggtgtcagcaggaaagcgacgttattgcagaattaagccgccgtttcagctgcacgctggagcactggtatgccgaacagggctgtgatttctgtggctggcagttgtatgagcgtggagagctcgtcgatgtgctgtggggggaacttgaatggtcttccccgacagatgacgatgagcagccggaagtcaccggacctgcgtggatagtcgacaatgtggcgcattatggcggatga

SEQ ID NO: 478234 - DNA, 627 bp, Shigella flexneri
atgctgcatgaactctggttacagagcggtactggccagcgtcgctgggaaggattaccggatgatgccagggaaaccatcactgtgcatttcaccgcaaaaagaggtgactggtgtgacatatggggtaacgaggatgtatcggtgtggtggaaccgtctgtgtgacaacgtagtgccggaaaaaaccatgccgtttgacctgctgacggttctgccgacccgcctggatgttgaagtgaacggctttaatggtggtgttctgaacggtgttccttctgcatatcactggtatacggaacggtatggcgtgaagtggccttgtggatatgacctgaatatcagcagtcagggagaaaacttcattcaggtggatttcgacacgccgtggtgtcagcaggaaagcgacgttattgcagaattaagccgccgtttcagctgcacgctggagcactggtatgccgaacagggctgtgatttctgtggctggcagttgtatgagcgtggagagctcgtcgatgtgctgtggggggaacttgaatggtcttccccgacagatgacgatgagcagccggaagtcaccggacctgcgtggatagtcgacaatgtggcgcattatggcggatga

SEQ ID NO: 478235 - DNA, 378 bp, Shigella flexneri
atggcgaatggtgatgccgacatgctgaaaattgttttggtcgcgttacctttgttaattcgcacatgtcatttgactaaagaacaggtactcgatctcctgaaggcaaaggatttttatggttgcccaagactatacctggcgatgcaaaatggacatagcgatatcgtgaaagttattctcgaagcattgccctgtctggcccaggaaattaacatttcagcttccgatattgtagatcttctgaccgctaaaagtcttgcgcgcgacacgggtttgtttatggccatgcagcgcggacatatgaacgttattaatactatttttaacgcattacccactctttttaatacgtttaaattcgataaaaaaatatga

SEQ ID NO: 478236 - DNA, 288 bp, Shigella flexneri; identical to SEQ ID NO: 468183

SEQ ID NO: 478237 - DNA, 573 bp, Shigella flexneri
gtgaagctgaaaagcagcccgcaggcacgaaaaaagtggccgggactgggaaatgaagtgacagcccgcctgctgaccgtgacgcgcaaaggaaaagtctgccatctgctgacgtcgatgacggacgccatgcgcttccccggaggagaaatggcggatctgtacagtcatcgctgggaaatcgaactgggatacagggagataaaacagacgatgcaactgagcaggctgacgctgagaagtaaaaagccggagcttgtggagcaagagctgtggggtgtcttactggcttataatctggtgagatatcagatgattaaaatggcggaacatctgaaaggttactggccgaatcaactgagtttctcagaatcatgcggaatggtgatgagaatgctgatgacattgcagggcgcttcaccgggacgtataccggagctgatgcgcgatcttgcaagtatgggacaacttgtgaaattaccgacgagaaggggaagggccttcccgagagtggtaaaggagaggccctggaaataccccacagccccgaaaaagagccagtcagttgcttaa

SEQ ID NO: 478238 - DNA, 393 bp, Shigella flexneri
atgtctctggcgcaatgcccgggctttttattcgcacatcgtgaggaatgcaccgtggaaattaaaaaaatcattaatccccgttataccgaaagtggcgcagtagactgtgacgttttttttgacgacagggaccaggcagtcccctacacagccaccgctgatgatgtcgcttcgacgggtcagcaaatctggcaggaactgcaaagtggcaaatggggtgagatagccccattcactgtgacaccagaaatgctggaagcggccagagaggccagacgtcagggaattgaagcatggcgccagaacaggaggcgaagccgttcacgtttgaatggaacggtcgtatctggaatgctggccccgactcactgggccgcctgtccccggtag

SEQ ID NO: 478239 - DNA, 381 bp, Shigella flexneri; identical to SEQ ID NO: 458903

SEQ ID NO: 478240 - DNA, 627 bp, Shigella flexneri
atgctgcatgaactctggctgcagagcggtactggacagcgtcgctgggaagagttaccggatgatgtcagggaaactatcactgtgcatttcaccgcaaaaagaggtgactggtgtgacatctggggtaacgaggatgtatcggtgtggtggaaccgtctgtgtgacaacgtactgccggaaaaaaccatgccgtttgacctgctgacggttttgccgacccgcctggatattgaagtgaatggctttaacggcggtgttctgaacggtgttccttctgcatatcactggtatacagaacggtatggcgtgaagtggccttgtgggtatgacctgaatatcagcagtcagggggaaaacttcattcaggtagatttcgacacgccgtggtgtcagccggaaagcgacgttgttgcagaattaagccgccgtttcggctgcacgctggagcactggtacgccgaacagggctgcaatttctgtggctggcagttgtatgagcgcggagagctcgttgatgtgctgtggggggaactggaatggtcttccccgacagatgatgatgagctgccggaagtcaccggacctgcgtggataatcgacaatgtggcgcattatggcggatga

SEQ ID NO: 478241 - DNA, 381 bp, Shigella flexneri; identical to SEQ ID NO: 458903

SEQ ID NO: 478242 - DNA, 189 bp, Shigella flexneri; identical to SEQ ID NO: 469030

SEQ ID NO: 478243 - DNA, 300 bp, Shigella flexneri; identical to SEQ ID NO: 84330

SEQ ID NO: 478244 - DNA, 489 bp, Shigella flexneri
atgtcgaaaaaaacggccggcgggaggaatacggcgcgctacctgggtcgttatctgaagaagccgccgatagcggcctcccggctggcacattacaacggaggggcgagcctgagcttccgttacctggaccacaaaacgggagaaacggcgacggaaacgctgacacagcgtgagctggtcgcgaggctgaaacagcacatcccggagaagttttttaagatggtgaggtacttcgggttccttgccaaccgggtgtgtggagagaagctgccgcaggtgtaccgtgctctggggatggataaaccggaaccagtggcgaaagtgtgctatgcacaaatggtgaaacagttcctgagtcgtgacccgttcgaatgcgtgctgtgtggcggccggatggtataccgccgggccatcgcgggactgaatgtggaggggctgaagaaaaacgcgcgggatatcagtctgctgaggtatatgccggcctga

SEQ ID NO: 478245 - DNA, 432 bp, Shigella flexneri
atgtctttaacgatagaggatggaacaggaaatagtcagtcaaattacaattataataatgaaaatacatctgtccttccagaagttggaaggaccaaaatcagtacaatagcgagagttccacaaggcaaaagtttgttgataggtggttatacgcatgaaacgaactctaacgaaatagtatctattccttttctctcctctattcctgtaatcggtaatgtgttcaagtataaaacaagtaatatcagtaatattgtaagggtttttctgattcaaccccgtgagataaaggagtcaagttattataatactgcagaatataaaagcctcatatctgaaagagaaatacaaaagactacacaaataatcccatctgaaactactttgctggaagacgaaaaatcattggtttcatacttaaattactaa

SEQ ID NO: 478246 - DNA, 381 bp, Shigella flexneri; identical to SEQ ID NO: 458903

SEQ ID NO: 478247 - DNA, 483 bp, Shigella flexneri
gtgtggtggaaccgtctgtgtgacaacgtagtgccggaaaaaaccatgccgtttgacctgctgacggttctgccgacccgcctggatgttgaagtgaacggctttaatggtggtgttctgaacggtgttccttctgcatatcactggtatacggaacggtatggcgtgaagtggccttgtggatatgacctgaatatcagcagtcagggagaaaacttcattcaggtggatttcgacacgccgtggtgtcagcaggaaagcgacgttattgcagaattaagccgccgtttcagctgcacgctggagcactggtatgccgaacagggctgtgatttctgtggctggcagttgtatgagcgtggagagctcgtcgatgtgctgtggggggaacttgaatggtcttccccgacagatgacgatgagcagccggaagtcaccggacctgcgtggatagtcgacaatgtggcgcattatggcggatga

SEQ ID NO: 478248 - DNA, 432 bp, Shigella flexneri
atggcgatattggtcccctgcgcccgttcaccattaatttgcggacgggtgaaatatccatgtcgcataaagtgtctgttggcggtggttcgcaggtcaatggtgcgctgggtatcggcgttcagaacgccctgggggggaattcaattgttcttggtgataatgacaccggatttaaacagaatggagacggtattctggatgtttatgctaatagtcagcgtgtattccgctttcagaatggagtggctattgcttttaagaatattcaggccggaactgtcagaaaattcacgttatccagcgccaacaactccacgaaaaatgcagcgttttatttgtggggtaatccatccaggcctgttgttgcagagcttggcgatgattcaggctggcattttttcagccagagaaacccggataacagcatag

SEQ ID NO: 478249 - DNA, 219 bp, Shigella flexneri
atgcctgtcccggtggctctgactgatacgccggagccgaccagaccagttacaaatcccttctggcgtaacaagcatgatgagcgccctgagggggctcccggaaacgtcccacggtgcgagctgcatcttaaatcaggtgtggtaaaactgtttgaccctctcactccggaactgttacgggcgctaatccgcgaaatgaaagggggtatccgatga

SEQ ID NO: 478250 - DNA, 333 bp, Shigella flexneri; identical to SEQ ID NO: 475379

SEQ ID NO: 478251 - DNA, 252 bp, Shigella flexneri
atggcggaacatctgaaaggttactggccgaatcaactgagtttctcagaatcatgcggaatggtgatgagaatgctgatgacattgcagggcgcttcaccgggacgtataccggagctgatgcgcgatcttgcaagtatgggacaacttgtgaaattaccgacgagaagggaaagggccttcccgagagtggtaaaggagaggccctggaaataccccacagccccgaaaaagagccagtcagttgcttaa

SEQ ID NO: 478252 - DNA, 198 bp, Shigella flexneri
gtgcgcgaaaaccgccaggtgaccgtccctgctgaactgctggcgtccctgattcagaccgccgaacaggcactgtggaaacgtgagtgggccgcccgtgataacggcctcgccgtcccggaatgcgtcacccgccgacaggcggtggttaatcaggcccgcgccctgctgaaaaacaacacacgcgaaaacgactga

SEQ ID NO: 478253 - DNA, 255 bp, Shigella flexneri
atgtacggaacatgcgaaacgctctgccgggcgctggcagcaaagtatccgggagatacgccgctgatgctggttatctggtccccggaagagattcaggccctcgctgacggaatggatccctgtccgatcatgaaatcaggaccgtcttggcgcacctggaggacatcccggaagactagcggattgagtccggtatttcttccgccgcggcgatggagattatcagcaacgtgcgcgaaaaccgccaggtga

SEQ ID NO: 478254 - DNA, 225 bp, Shigella flexneri; identical to SEQ ID NO: 133446

SEQ ID NO: 478255 - DNA, 207 bp, Shigella flexneri; identical to SEQ ID NO: 24440

SEQ ID NO: 478256 - DNA, 417 bp, Shigella flexneri; identical to SEQ ID NO: 478007

SEQ ID NO: 478257 - DNA, 441 bp, Shigella flexneri
ttgtacctcgctggcatcaaagatgtttatacgtgtgaaattgtcggctacgccatgggagagcgcatgacaaaagagctgacaggtaaagccctgtttatggcgctcaggagccagcgcccacctgccgggctaatccaccactctgatcgaggttcacagtactgcgcatacgattaccgggtcatacaggagcagtttggtctgaaaacatcaatgtcgcgtaaaggtaactgttacgacaacgctccgatggaaagcttctggggaacgctgaaaaatgagagcctgagccactatcgttttaataaccgggatgaagccatctcagtaatacgggaatacattgagattttctacaatcgtcagcgtcgtcactctcgtctggggaatatctccccggcagccttcagggaaaaatatcatcagatggctgcttaa

SEQ ID NO: 478258 - DNA, 210 bp, Shigella flexneri; identical to SEQ ID NO: 477941

SEQ ID NO: 478259 - DNA, 366 bp, Shigella flexneri; identical to SEQ ID NO: 478029

SEQ ID NO: 478260 - DNA, 288 bp, Shigella flexneri; identical to SEQ ID NO: 478030

SEQ ID NO: 478261 - DNA, 306 bp, Shigella flexneri
ttgtatcgggtagcggaacaggtagtacttgaagcgtttccgaaacaagagatgctggcccgtcttaatacaaggctggaaggcggagatgctcatccattagaggccattatcacccggatgctgttgacgaaagtaaaactcgagccggaggatgaagatgtcgatgagccaacacctgaaaaccatgaagaaaaaaatgatgagggtgaaaaaccacagagcattaccagcattatcaaaatcagtttaacggtgctggttataggttatgctctcggcaaaatcgcgatgttgtttagttga

SEQ ID NO: 478262 - DNA, 519 bp, Shigella flexneri; identical to SEQ ID NO: 478047

SEQ ID NO: 478263 - DNA, 279 bp, Shigella flexneri; identical to SEQ ID NO: 478048

SEQ ID NO: 478264 - DNA, 363 bp, Shigella flexneri
atgtttctaatctgtttgccggtgataatcataggcttgttatattcagggcttgtattgaaaatatggtttggtgagaattaccaaattaattcctttaatatattaaatgtgttattgatcggttttttcttcaatgcgctggcaatgataccattctctgcaatccaggcattaggaaaatctaaaattactgctttgattcattgtgctgaattggttccttatttagcccttttgtattttatggtcgaaaaatatgggttactgggtgccgcaatatcctggagcatacgtgtaattttagatgctctgttattacaatggctttatactagaatgtgttctgtatatgaaaactaa

SEQ ID NO: 478265 - DNA, 441 bp, Shigella flexneri
ttgtacctcgctggcatcaaagatgtttatacgtgtgaaattgtcggctacgccatgggagagcgcatgacaaaagagctgacaggtaaagccctgtttatggcgctcaggagccagcgcccacctgccgggctaatccaccactctgatcgaggttcacagtactgcgcatacgattaccgggtcatacaggagcagtttggtctgaaaacatcaatgtcgcgtaaaggtaactgttacgacaacgctccgatggaaagcttttggggaacgctgaaaaatgagagcctgagccactatcgttttaataaccgggatgaagccatctcagtaatacgggaatacattgagattttctacaatcgtcagcgtcgtcactctcgtctggggaatatctccccggcagccttcagggaaaaatatcatcagatggctgcttaa

SEQ ID NO: 478266 - DNA, 342 bp, Shigella flexneri; identical to SEQ ID NO: 478083

SEQ ID NO: 478267 - DNA, 537 bp, Shigella flexneri
atgagcaaggcaggcaaaataaccgctgcgatttcaggggctttcttgttgttgattgtcgtggcgatcattttgattgcaacttttgactggaatcgactcaaaccgaccatcaaccagaaagtctctgcggagttgaatcgtccgttcgctatccgtggcgatctgggcgtggtgtgggagcggcaaaaacaagaaactggctggcgcagctgggtgccgtggcctcatgtacatgcagaagacatcattcttggtaatccaccggatattcccgaagtcacgatggtgcatttgccgcgagtagaggcaacgctggcaccgctggcgctgctgaccaaaacggtctggctgccgtggatcaagctcgaaaagcccgacgcgcgcctgattcgcctctctgaaaagaacaataactggacgtttaatcttgccaacgatgacaacaaagacgcgaatgcaaagccgtcggcatggtcgtttcggctggataatattcttttcgatcagggcggatcgccattgatgacaaagtaa

SEQ ID NO: 478268 - DNA, 312 bp, Shigella flexneri; identical to SEQ ID NO: 478097

SEQ ID NO: 478269 - DNA, 705 bp, Shigella flexneri; identical to SEQ ID NO: 478095

SEQ ID NO: 478270 - DNA, 747 bp, Shigella flexneri; identical to SEQ ID NO: 478117

SEQ ID NO: 478271 - DNA, 399 bp, Shigella flexneri; identical to SEQ ID NO: 478121

SEQ ID NO: 478272 - DNA, 135 bp, Shigella flexneri; identical to SEQ ID NO: 478122

SEQ ID NO: 478273 - DNA, 282 bp, Shigella flexneri; identical to SEQ ID NO: 478127

SEQ ID NO: 478274 - DNA, 441 bp, Shigella flexneri; identical to SEQ ID NO: 478257

SEQ ID NO: 478275 - DNA, 972 bp, Shigella flexneri
atggaccagatagccaacctggtcattgatttggggattgatgcggcagagtttaaaaatgaaattccccgtatcaaaaaccttctgaatggtgcagccagcgatgcagaacggtcttctgcccgtatgcagcgttttatggagcgtcagactcaggcggcccggcagacaatgcaggcggcttcttcggctgcaacagcagcatcagcccatgcgcagacggtggagaagaatgcacgggctcatgaacgcatggcccgtgaggtggaacaaacccgtctgcgcgtggatgccctgaatcagaaaatgcgcgaggaacaggcgcaggccagggcactggcggaggcgcaggataaagcggctgccgccttttatcgccagattgacagtgtgaaacaggctggtgcggggcttcaggaattacagcgtattcagcagcagatccgacaggccagaaacagtggcggggttggtcagcaggattatctggcgctgatttcggagatcacggcgaaaacccgtgccctgacgcaggcagaggaacaggccacccggcagaaagcggcgtttatccgccagcttaaagagcaggcaacccgccagaatctgtcgtcttctgagttgcttcgcgccagggcggctcagctgggggtaagcagtgctgcagaagtgtatatccgcaaaatggagcgggcaggaaaagccacacattcgctggggctgaaaagtgcggcagcccggcgggagctgggggtgttaatcagtcagatggcgcgcggcaattttggtgcgctgaggggatccgggataacgctggctaaccgtgccggatggacaggcgcacagatgtcgccgaaaggcatgatgactggcggcgttattggcggacttgtcgcggcggtcctgggtctgggtaaagcctggcatgacggcggaaggagggcgaggaatttaaccgtcagctggcgctga

SEQ ID NO: 478276 - DNA, 153 bp, Shigella flexneri; identical to SEQ ID NO: 478140

SEQ ID NO: 478277 - DNA, 351 bp, Shigella flexneri; identical to SEQ ID NO: 478143

SEQ ID NO: 478278 - DNA, 303 bp, Shigella flexneri; identical to SEQ ID NO: 478142

SEQ ID NO: 478279 - DNA, 249 bp, Shigella flexneri; identical to SEQ ID NO: 478141

SEQ ID NO: 478280 - DNA, 150 bp, Shigella flexneri
atggaaattcaaaacacaaaatcaacccagattttatatacagatatatccacaaaacaaactcaaagttcttccgaaacacaaaaatcacaaaattatcagcagattgcagcgcatattcacttaatgtcggtaaaaatcccgtattaa

SEQ ID NO: 478281 - DNA, 1482 bp, Shigella flexneri
atgatgaagaaagcgcccacctctacgaaagactccttacccaacaaggagatgaatgatttgccccggttggcgagcgcggtgctgccactgtgttcgcaacatcccggtcagtgtggtcttttccctctggagaaaagtctggatgcgtttgccgcccggtatcgtctggccgaaatggcagagcatacgctggatgttcagtattacatctggcaggacgatatgtcggggcggttactgttttccgccctgttagccgcagcaaagcgtggcgttcgcgtccgtttgttgctggacgacaacaatacgcccggacttgacgacattttacgcttgcttgacagtcatccacgcattgaagtccggctttttaatcctttctcgtttcgcttgctacgtccgcttggatatatcaccgacttttcccgtctctatcgccggatgcacaataaaagtttcactgtcgatggcgtggttaccctagtgggaggacgaaatattggtgatgcctattttggtgcaggggaagagccacttttttcggatttagatgtcatggcaataggccccgtggtagaggacgttgccgatgatttcgcccgctactggtattgcaaatcggtttcacccttacagcaggtgctggatgtcccggaaggtgaaatggcggatcgcatcgagttacccgcctcctggcataacgatgccatgacgcatcgttatttacgcaaaatggaatccagtccatttataaatcatctggttgatggaacgttgccgcttatctgggcgaagacacgtttattaagtgatgatccggcgaaaggggagggcaaggcaaaacggcattcactgttaccgcagcgcctgttcgatatcatgggctcacccagtgaacgcatcgatattatctcttcctattttgtaccgacacgcgcaggtgtggcgcaactcttacggatggtgagaaaaggggtaaagattgcgatcctaaccaattctcttgccgctaacgatgttgctgtcgtccatgccggatacgcgcgctggcgcaaaaaattgctccgctatggcgtggaattatatgaactcaagccgacgcgtgaacaaagcagtacgttacacgatcgcggcataaccggtaattccggtgccagcctgcatgctaaaacttttagcatcgatggtaaaacggtgtttatcggctctttcaatttcgatccgcgttcaacattgctcaatactgaaatgggcttcgtgatagagagcgaaacgctggcacagttaattgataaatgctttattcagagccagtacgatgcggcctggcagctccgtctggacaggtggggacggatcaactgggttgatcgtcatgcaaagaaagaggttattctcaaaaaagaacccgccaccagtttctggaagcgggttatggtcagactggcgtcgatattgcccgtggaatggttattgtaa

SEQ ID NO: 478282 - DNA, 441 bp, Shigella flexneri
ttgtacctcgctggcatcaaagatgtttatacgtgcgaaattgtcggctacgccatgggagagcgcatgacaaaagagctgacaggtaaagccctgtttatggcgctcaggagccagcgcccacctgccgggctaatccaccactctgatcgaggttcacagtactgcgcatacgattaccgggtcatacaggagcagtttggtctgaaaacatcaatgtcgcgtaaaggtaactgttacgacaacgctccgatggaaagcttctggggaacgctgaaaaatgagagcctgagccactatcgttttaataaccgggatgaagccatctcagtaatacgggaatacattgagattttctacaatcgtcagcgtcgtcactctcgtctggggaatatctccctggcagccttcagggaaaaatatcatcagatggctgcttaa

SEQ ID NO: 478283 - DNA, 441 bp, Shigella flexneri
ttgtacctcgctggcatcaaagatgtttatacgtgcgaaattgtcggctacgccatgggagagcgcatgacaaaagagctgacaggtaaagccctgtttatggcgctcaggagccagcgcccacctgccgggctaatccaccactctgatcgaggttcacagtactgcgcatacgattaccgggtcatacaggagcagtttggtctgaaaacatcaatgtcgcgtaaaggtaactgttacgacaacgctccgatggaaagcttctggggaacgctgaaaaatgagagcctgagccactatcgttttaataaccgggatgaagccatctcagtaatacgggaatacattgagattttctacaatcgtcagcgtcgtcactctcgtctggggaatatctccccggcagccttcagggaaaaatatcatcagatggctgcttaa

SEQ ID NO: 478284 - DNA, 441 bp, Shigella flexneri; identical to SEQ ID NO: 478283

SEQ ID NO: 478285 - DNA, 651 bp, Shigella flexneri
gtgaataatggcgatattggtcccctgcgcccgttcaccattaatttgcggacgggtgaaatatccatgtcgcataaagtgtctgttggcggtggttcgcaggtcaatggtgcgctgggtatcggcgttcagaacgccctgggggggaattcaattgttcttggtgataatgacaccggatttaaacagaatggagacggtattctggatgtttatgctaatagtcagcgtgtattccgctttcagaatggagtggctattgcttttaagaatattcaggccggaactgtcagaaaattcacgttatccagcgccaacaactccacgaaaaatgcagcgttttatttgtggggtaatccatccaggcctgttgttgcagagcttggcgatgattcaggctggcattttttcagccagagaaacccggataacagcatagtgttcactgttaacggacaggtaattccgttaaattacggaaacttcgatgcccgctataaatatcgaacagagggggtacaggatgtacggtatggccatgaaatgtattacagccccggccgtaactcagcggataacgttgacggtgtgtattaccgaccactgcaaaaactgattaatggcacctggtataacgtagcgagtatttaa

SEQ ID NO: 478286 - DNA, 210 bp, Shigella flexneri; identical to SEQ ID NO: 9340

SEQ ID NO: 478287 - DNA, 1500 bp, Shigella flexneri; identical to SEQ ID NO: 478158

SEQ ID NO: 478288 - DNA, 534 bp, Shigella flexneri; identical to SEQ ID NO: 478159

SEQ ID NO: 478289 - DNA, 864 bp, Shigella flexneri; identical to SEQ ID NO: 478160

SEQ ID NO: 478290 - DNA, 441 bp, Shigella flexneri; identical to SEQ ID NO: 478283

SEQ ID NO: 478291 - DNA, 288 bp, Shigella flexneri
gtgccgatttatggcctgatggaagatgcggcgacggctgaaatttcccgtacctcgatctggcagtggatccatcatcaaaaaacgttgagcaatggcaaaccggtgaccaaagccttgttccgccagatgctgggcgaagagatgaaagtcattgccagcgaactgggcgaagaacgtttctcccagggccgttttgacgatgccgcacgcttgatggaacagatcaccacttccgatgagttaattgatttcctgaccctgccaggctaccgcctgttagcgtaa

SEQ ID NO: 478292 - DNA, 300 bp, Shigella flexneri; identical to SEQ ID NO: 84330

SEQ ID NO: 478293 - DNA, 252 bp, Shigella flexneri
atggcggaacatctgaaaggttactggccgaatcaactgagtttctcagaatcatgcggaatggtgatgagaatgctgatgacattgcagggcgcttcaccgggacgtataccggagctgatgcgcgatcttgcaagtatgggacaacttgtgaaattaccgacgagaaggggaagggccttcccgagagtggtaaaggagaggccctggaaataccccacagccccgaaaaagagccagtcagttgcttaa

SEQ ID NO: 478294 - DNA, 792 bp, Shigella flexneri; identical to SEQ ID NO: 478164

SEQ ID NO: 478295 - DNA, 252 bp, Shigella flexneri; identical to SEQ ID NO: 478293

SEQ ID NO: 478296 - DNA, 168 bp, Shigella flexneri
atgactgaaaacgggtatggtctagcagggctggggatgggtaaggtgaaatctatcaatccgtaccggcttgcgccgggcttcggcggttttacacctgtgctacatgtaaccaccgtatgccgccttatatgcgctgactcgcattatttgccttgttccgtctga

SEQ ID NO: 478297 - DNA, 189 bp, Shigella flexneri
atggaaagcttctggggaacgctgaaaaatgagagcctgagccactatcgttttaataaccgggatgaagccatctcagtaatacgggaatacattgagattttctacaatcgtcagcgtcgtcactctcgtctggggaatatctccccggcagccttcagggaaaaatatcatcagatggctgcttga

SEQ ID NO: 478298 - DNA, 189 bp, Shigella flexneri; identical to SEQ ID NO: 463227

SEQ ID NO: 478299 - DNA, 1056 bp, Shigella flexneri
atggagatgttgtctggagccgagatggtcgtccgatcgcttatcgatcagggcgttaaacaagtattcggttatcccggaggcgcagtccttgatatttacgatgcattgcataccgtgggtggtattgatcatgtattagttcgtcatgagcaggcggcggtgcatatggccgatggcctggcgcgtgcgaccggggaagtcggcgtcgtgctggtaacgtcgggtccaggggcgaccaatgcgattaccggcatcgccaccgcttatatggattccattccattagttgtcctttccgggcaggtagcgacctcgttgataggttacgatgcctttcaggagtgcgacatggtggggatttcgcgaccggtggttaaacacagttttctggttaagcaaacggaagacattccgcaggtgctgaaaaaggctttctggctggcggcaagtggtcgcccaggaccagtggtcgttgatttaccgaaagatattcttaatccggcgaacaaattaccctatgtctgccctgagtcggtcagtatgcgttcttacaatcccactactaccggacataaagggcaaattaagcgtgctctgcaaacgctggtagcggcaaaaaaaccggttgtctacgtaggcggtggggcaatcatggcgggctgccatcagcagttgaaagaaacggtggaggcgttgaatctgcccgttgtttcctcattgatggggctgggggcgtttccggcaacgcatcgtcaggcactgggcatgctgggaatgcacggtacctacgaagccaatatgacgatgcataacgcggatgtgattttcgccgtcggggtacgatttgatgaccgaacgacgaacaatctggcaaagtactgcccaaatgccactgttctgcatatcgatattgatcctacttccatttctaaaaccgtgactgcggatatcccgattgtgggggatgctcgccaggtcctcgaacaaatgcttgaactcctgtcgcaagaatccgcccatcaaccgctggatgagatccgcgactggtggtag

SEQ ID NO: 478300 - DNA, 555 bp, Shigella flexneri; identical to SEQ ID NO: 478168

SEQ ID NO: 478301 - DNA, 255 bp, Shigella flexneri; identical to SEQ ID NO: 478169

SEQ ID NO: 478302 - DNA, 420 bp, Shigella flexneri; identical to SEQ ID NO: 478176

SEQ ID NO: 478303 - DNA, 921 bp, Shigella flexneri; identical to SEQ ID NO: 478171

SEQ ID NO: 478304 - DNA, 351 bp, Shigella flexneri; identical to SEQ ID NO: 478178

SEQ ID NO: 478305 - DNA, 423 bp, Shigella flexneri; identical to SEQ ID NO: 478177

SEQ ID NO: 478306 - DNA, 426 bp, Shigella flexneri; identical to SEQ ID NO: 478175

SEQ ID NO: 478307 - DNA, 954 bp, Shigella flexneri; identical to SEQ ID NO: 478181

SEQ ID NO: 478308 - DNA, 162 bp, Shigella flexneri
atgcgttatccctggaacgggagcgtcagccggaaatacaggaacgcacgctggatggtccttcgctgggatggtgaaaccatgaaaaatggcagcttcagtggattaggaggggttaatgtggcctgtaccatctggttgcataggtattcatgcggttaa

SEQ ID NO: 478309 - DNA, 417 bp, Shigella flexneri; identical to SEQ ID NO: 478193

SEQ ID NO: 478310 - DNA, 441 bp, Shigella flexneri; identical to SEQ ID NO: 478283

SEQ ID NO: 478311 - DNA, 609 bp, Shigella flexneri
atgccacaacgacaccaccagggacataaacgcacaccgaaacagttggcgctcattatcaaacgttgtttgccgatggtgctcactggcagcggcatgctttgcactaccgctaacgccgaagagtattatttcgaccccattatgctggaaactacaaaaagtggtatgcaaacaaccgatctgtcacgtttttcaaaaaaatacgcacaactaccaggaacttatcaggttgatatctggctgaataaaaagaaggtttcacagaaaaaaattacatttaccgccaatacagagcaacttctgcagacacagtttacggtagaacaactacgtgagctgggtattaaggtggatgaaatcccggcgctggctgaaaaagatgacgatagcgtgatcaactcacttgaacaaatcattcccggtacagctgctgaatttgatttcaatcatcagcgacttaatttgagcattccccaaattgcactgtaccgtgatgcaagaggttacgtctccccttctcgttgggacgatggtataccaacgctgtttaccaactactcgtttacaggttctgataaccgttaccgccagggcaatcgtagctaa

SEQ ID NO: 478312 - DNA, 153 bp, Shigella flexneri
atgctgacgaaatatgcccttgtggcagtcatagtgctgtgtttgacggtgctgggatttacgcttctggtcggagactcgctgtgtgagttcaccgtaaaggaacgtaatattgagtttaaggctgttctcgcttacgaaccgaagaagtag

SEQ ID NO: 478313 - DNA, 774 bp, Shigella flexneri; identical to SEQ ID NO: 478197

SEQ ID NO: 478314 - DNA, 357 bp, Shigella flexneri; identical to SEQ ID NO: 462732

SEQ ID NO: 478315 - DNA, 366 bp, Shigella flexneri
atggcccgttcagctaaaccacgcaaacgaaaacctgcacctcaaagaagcaaactcctccgctatgtcgtaaaacttcacgaagatgatttttttgacgaagaagaagctgaggttctgcgctttgataattttgacgatgccgttgagtgttgcgcagacctgaatattccgttctttgtggataccggaaacaaaaaactggtcttctggtttgtacgtgttgatgacgaagggtatccggaaattgcccgctgcatggagcgggaatttgcgacaattcctgccggtatcagcgccgacggcatgtattgccctgaatgcggtacggttcactggccggatggcgttattccgcctttctga

SEQ ID NO: 478316 - DNA, 441 bp, Shigella flexneri
ttgtacctcgctggcatcaaagatgtttatacgtgcgaaattgtcggctacgccatgggagagcgcatgacaaaagagctgacaggtaaagccctgtttatggcgctcaggagccagcgcccacctgccgggctaatccaccactctgatcgaggttcacagtactgcgcatacgattaccgggtcatacaggagcagtttggtctgaaaacatcaatgtcgcgtaaaggtaactgttacgacaacgctccgatggaaagcttctggggaacgctgaaaaatgagagcctgagccactatcgttttaataaccgggatgaagccatctcagtaatacgggaatacattgagattttctacaatcgtcagcgtcgtcactctcgtctggggaatatctccccggcagccttcagggaaaaatatcatcagatgactgcttaa

SEQ ID NO: 478317 - DNA, 465 bp, Shigella flexneri; identical to SEQ ID NO: 478208

SEQ ID NO: 478318 - DNA, 252 bp, Shigella flexneri
atggcggaacatctgaaaggttactggccgaatcaactgagtttctcagaatcatgcggaatggtgatgagaatgctgatgacattgcagggcgcttcaccgggacgtataccggagctgatgcgcgatcttgcaagtatgggacaacttgtgaaattaccgacgagaaggggaagggccttcccgagagtggtaaaggagaggccttggaaataccccacagccccgaaaaagagccagtcagttgcttaa

SEQ ID NO: 478319 - DNA, 369 bp, Shigella flexneri; identical to SEQ ID NO: 478205

SEQ ID NO: 478320 - DNA, 1134 bp, Shigella flexneri
ttggctccggcaatcgacaccgttaatagattacctatcctgctctatcagagccaatttgcagatacgcgcattttggttacgataagtgatcaacatattcgcggggcgcttaatgtacccttgaaaggggtaaggtatgtattacgcgtggcggatgacattattggaccaacgggtgatgtgatgacgcttaatggacattatccctataccgagaaggttcactccacaaaatatcatttcactattatctttaacccgccgccactctttagcttctacagacttatcgataaaggctttgggattttaatatttattctgttaatcgcctgcgccgctgccttcctgcttgatagatatttcaataaaagcgcaacgcctgaagagatcctgcgacgggcaataaataacggggagatcgtccctttttaccaacctgtggtaaatggtcgggaagggacattgcggggagttgaggtgttagcccgctggaaacaacctcacggtggatatatttcacccgcggcatttattccacttgctgaaaaatccggattaatcgttccgcttacacaaagcctgatgaatcaggttgccagacagatgaacgctatcgcgagtaaactgccggaaggttttcatattggaattaattttagcgcttcgcatattatttcgccgacgtttgtcgacgagtgtttaaatttccgtgacagttttacccgccgcgatttaaaccttgttctggaagtcaccgagcgtgagccattgaatgttgatgaaagtctggttcagcggttgaacattctgcatgaaaatggttttgtcatcgcgctggatgatttcggtactggctactcagggctttcttatcttcatgacctgcatattgattatatcaaaattgatcacagtttcgttggccgcgtaaacgcagacccagaattaacccgaattctggattgtgtattggatctggcgcgtaaactttcgatcagtatcgtcgctgaaggtgtcgaaacgaaagaacaacttggctattggatttgcccctatatttccagacatctgttatcacttaacccattacaagcccgctgccgcagatattcccgtggcgagcgataa

SEQ ID NO: 478321 - DNA, 600 bp, Shigella flexneri; identical to SEQ ID NO: 474547

SEQ ID NO: 478322 - DNA, 180 bp, Shigella flexneri; identical to SEQ ID NO: 474761

SEQ ID NO: 478323 - DNA, 441 bp, Shigella flexneri
ttgtacctcgctggcatcaaagatgtttatacgtgtgaaattgtcggctacgccatgggagagcgcatgacaaaagagctgacaggtaaagccctgtttatggcgctcaggatccagcgcccacctgccgggctaatccaccactctgatcgaggttcacagtactgcgcatacgattaccgggtcatacaggagcagtctggtctgaaaacatcaatgtcgcgtaaaggtaactgttacgacaacgctccgatggaaagcttctggggaacgctgaaaaatgagagcctgagccactatcgttttaataaccgggatgaagccatctcagtaatacgggaatacattgagattttctacaatcgtcagcgtcgtcactctcgtctggggaatatctccccggcagccttcagggaaaaatatcatcagatggctgcttaa

SEQ ID NO: 478324 - DNA, 189 bp, Shigella flexneri; identical to SEQ ID NO: 463227

SEQ ID NO: 478325 - DNA, 441 bp, Shigella flexneri
ttgtacctcgctggcatcaaagatgtttatacgtgcgaaattgtcggctacgccatgggagagcgcatgacaaaagagctgacaggtaaagccctgtttatggcgctcaggagccagcgcccacctgccgggctaatccaccactctgatcgaggttcacagtactgcgcatacgattaccgggtcatacaggagcagtctggtctgaaaacatcaatgtcgcgtaaaggtaactgttacgacaacgctccgatggaaagcttctggggaacgctgaaaaatgagagcctgagccactatcgttttaataaccgggatgaagccatctcagtaatacgggaatacattgagattttctacaatcgtcagcgtcgtcactctcgtctggggaatatctccccggcagccttcagggaaaaatatcatcagatggctgcttaa

SEQ ID NO: 478326 - DNA, 717 bp, Shigella flexneri
atgacggtcgcccagtgtctcgactactggttcgacaactacgtctctacaactctcagagaaaagacccaggcactttatcgatcaacggttatgaagcgcatgcatgacgccttccctaatcgtccggcatcttctatcacggttaagcaatgggttgacctgcttaccgaagaagaaaaagataatccacgccgagcaaggcaggtgctaagtcaactaagatcagcaattagttggtgcatgcggcgtcagttgatagatagttgcgcaattatgagcatccagccaagggacttcggctcccgcgctgaggtaggggatcgggtactgtcgtatcacgaactggctaagatttggcttgctattgaaagaagccgtgcgtctacgtcaaataagctccttcatcagatgcttatgctgtggggggcgaggctctcagagcttaggctggcaacaaagacagaatttgacctgctggacaacgtatggaccgtaccgaaagagcatagcaagatgggtaatgttatccgccgtccaatcttcgaacaaattaagccttttctcgaaaaggccatgacaacgtacaatgatgttcttttccctggagaagacataaacaaaccgatcagcatcgctgcagccaaccgattcgtaaatagaataaggggagggatggatctaggttactgggtaagcgccccgagaagtacgtag

SEQ ID NO: 478327 - DNA, 420 bp, Shigella flexneri
atgactgaaatcgttgcagataaaacggtagaagtagttaaaaacgcaatcgaaaccgcagatggagcattagatctttataataaatatctcgatcaggtcatcccctggcagacctttgatgaaaccataaaagagttaagtcgctttaaacaggagtattcacaggcagcctccgttttagtcggcgatattaaaaccttacttatggatagccaggataagtattttgaagcaacccaaacagtgtatgaatggtgtggtgttgcgacgcaattgctcgcagcgtatattttgctatttgatgagtacaatgagaagaaagcatccgcccctcatggtaatgactccaacttactgatagtgttttatgttcagataatgcccgatgaccttgtcatgcagctccaccgattttga

SEQ ID NO: 478328 - DNA, 504 bp, Shigella flexneri; identical to SEQ ID NO: 478215

SEQ ID NO: 478329 - DNA, 345 bp, Shigella flexneri
atgtgcggcagaggcgaaggcgcggcaggcgacctcggtgaggagtctggctgcggtcctgacaccgactccgggcatactggtcaggaccgggtaaagagggtgagcaagaactcgctgttctacctcaagcgccacctcgtctctttgcttacgcagcgtgatgagctggagtgccagacgtggcagtactacggcagcggcattcgtgccgggaacgacgacggtttgttcggccagtgcctgagctatgtctgctgcaaggcgtttacccagacgaggcgcaagtttgcagagctgggctgccagcttcttctcacccagcgaagcgagtttttctggtga

SEQ ID NO: 478330 - DNA, 303 bp, Shigella flexneri; identical to SEQ ID NO: 473532

SEQ ID NO: 478331 - DNA, 252 bp, Shigella flexneri
atggcggaacatctgaaaggttactggccgaatcaactgagtttctcagaatcatgcggaatggcgatgagaatgctgatgacattgcagggcgcttcaccgggacgtataccggagctgatgcgcgatcttgcaagtatgggacaacttgtgaaattaccgacgagaaggggaagggccttcccaagagtggtaaaggagaggccctggaaataccccacagccccgaaaaagagccagtcagttgcttaa

SEQ ID NO: 478332 - DNA, 276 bp, Shigella flexneri
atgaattcccagacaacaaaagatattccctgcttccgttcttatttgcctgatgccctgcgtttaagatttgaagataaactgaccatccgggccattggatttgcccctatatttccagacatctgttatcacttaacccattacaagcccgctgccgcagatattcccgtggcgagcgataacccagcgcactatgcggatgccattcgttataatgctcgaacgcctctgcaaggttctttgctgccgttaacccgtctggtttgggcatga

SEQ ID NO: 478333 - DNA, 621 bp, Shigella flexneri
atggcggttatgggacttgccggtgttctccggggtaaaaaggtccgtacgaccatcagccggaaagccgttgccgcaggcgaccgcgtaaaccgtcagttcgtggcagaacgacctgaccagctgtgggtggctgattttacttacgtcagcacatggcggggcttcgtctatgtggcgttcatcattgatgtgtttgccggatacatcgtggggtggcgggtctcatcgtccatggaaacgacattcgtgctggatgcactggagcaggcgttatgggcccgtcgaccgtccggcacggtccatcacagtgataaaggttctcagtatgtatcgctggcctgcacacagcggcttaaggaagccggattactggcatcaacaggaagtacaggcgactcgtatgacaacgcgatggcggagagcatcaatggtctttacaaagcggaggtaatacaccgtaagagctggaaaaaccgtgcagaagtggaactggccacactcacgtgggtggactggtataacaatcgacgattgctggaaaggctgggccatactcctccggcagaagcagaaaaagcttattatgcttccatcggaaacgatgatctggcagcctga

SEQ ID NO: 478334 - DNA, 264 bp, Shigella flexneri
atggccttttttctttccgatagcacaggtctgtcgggggggcgggatatgtatcagatggaaaaaatatcaacaggcattgcctacggcacctacgccggcagtgccggctactggtttttgcagtggttggatcaggtcagtccatcacagtgggctgcgattggtgtgctgggaagtctgcttctggggcttctgacttatctgacgaatctgtatttcaaaataagagaagataagcgtaaggctgcgagaggtgaataa

SEQ ID NO: 478335 - DNA, 543 bp, Shigella flexneri; identical to SEQ ID NO: 464540

SEQ ID NO: 478336 - DNA, 627 bp, Shigella flexneri; identical to SEQ ID NO: 478234

SEQ ID NO: 478337 - DNA, 627 bp, Shigella flexneri
atgctgcatgaactctggctgcagagcggtactggacagcgtcgctgggaagagttaccggatgatgtcagggaaactatcactgtgcatttcaccgcaaaaagaggtgactggtgtgacatctggggtaacgaggatgtatcggtgtggtggaaccgtctgtgtgacaacgtactgccggaaaaaaccatgccgtttgacctgctgacggttttgccgacccgcctggatattgaagtgaatggctttaacggcggtgttctgaacggtgttccttctgcatatcactggtatacagaacggtatggcgtgaagtggccttgtgggtatgacctgaatatcagcagtcagggagaaaacttcattcaggtggatttcgacacgccgtggtgtcagcaggaaagcgacgttattgcagaattaagccgccgtttcagctgcacgctggagcactggtatgccgaacagggctgtgatttctgtggctggcagttgtatgagcgtggagagctcgtcgatgtgctgtggggggaacttgaatggtcttccccgacagatgacgatgagcagccggaagtcaccggacctgcgtggataatcgacaatgtggcgcattatggcggatga

SEQ ID NO: 478338 - DNA, 219 bp, Shigella flexneri
gtggcgcacgtcttcggtgaacgcactctggccacactggagcgtcttctgagcctgctgtcggcctttgaggtcgtggtatggatgacggatggctgtccgctgtatgaatcacgcctgaagggaaagctgcacgttatcagcaagcgttacactcagcgcattgagcgacataatctgaatctgagacaacatctggctgaggtgtactggcaatag

SEQ ID NO: 478339 - DNA, 732 bp, Shigella flexneri
gtgacggctgccggacgtggtgctgtatcaccggaaaatatcgcgttcacccgctggctgacacacctgcagaacggtgtactgctggatgagcaaaactgcctgatgctgcatgaactctggctgcagagcggtactggacagcgtcgctgggaagagttaccggatgatgtcagggaaactatcactgtgcatttcaccgcaaaaagaggtgactggtgtgacatctggggtaacgaggatgtatcggtgtggtggaaccgtctgtgtgacaacgtactgccggaaaaaaccatgccgtttgacctgctgacggttttgccgacccgcctggatattgaagtgaatggctttaacggcggtgttctgaacggtgttccttctgcatatcactggtatacagaacggtatggcgtgaagtggccttgtgggtatgacctgaatatcagcagtcagggggaaaacttcattcaggtagatttcgacacgccgtggtgtcagccggaaagcgacgttgttgcagaattaagccgccgtttcggctgcacgctggagcactggtacgccgaacagggctgcaatttctgtggctggcagttgtatgagcgcggagagctcgttgatgtgctgtggggggaactggaatggtcttccccgacagatgatgatgagctgccggaagtcaccggacctgcgtggataatcgacaatgtggcgcattatggcggatga

SEQ ID NO: 478340 - DNA, 375 bp, Shigella flexneri
atgcgtttctatggcgtgtcgggagtgacagcaaatgacctccgcactgccgaagccatggtcagaagccgtgaagagaatgaatttacagactggttctccctctggggaccatggcaagctgtactgaagcgtacggaagctgaccgctgggcgctggcagaagagcagaaatatgagatgctggagaatgagtaccctcagagggtggctgaccggctgaaagcatcaggtctgagcggtgatgcggatgcggagagggaagccggtgcacaggtgatgcgagagactgaacagcagatttaccgtcagctgactgacgaggtactggccctgcgattgtctgaaaacgactcacaactgcaccattcataa

SEQ ID NO: 478341 - DNA, 441 bp, Shigella flexneri; identical to SEQ ID NO: 478257

SEQ ID NO: 478342 - DNA, 318 bp, Shigella flexneri
gtgaagtggccttgtggatatgacctgaatatcagcagtcagggagaaaacttcattcaggtggatttcgacacgccgtggtgtcagcaggaaagcgacgttattgcagaattaagccgccgtttcagctgcacgctggagcactggtatgccgaacagggctgtgatttctgtggctggcagttgtatgagcgtggagagctcgtcgatgtgctgtggggggaacttgaatggtcttccccgacagatgacgatgagcagccggaagtcaccggacctgcgtggatagtcgacaatgtggcgcattatggcggatga

SEQ ID NO: 478343 - DNA, 294 bp, Shigella flexneri
atgcgttgtggcttcaatggcctggcttcgaaggtgcagaacacgctgaaagatgacccgttctccgggcatatcttcgtcttccggggccgcagtggcaaaatggtgaaaatactgtgggccgatcgtgacgggttatgcctgttcgccaaacgcctggaacggggccgcttcgtctggccggtgacccgggaagggaaagtgcacctgacgccagctcagttatccatgctactggaggggatcgcgtggcaacatcccaaacggacagaacggcctggcatccggatataa

SEQ ID NO: 478344 - DNA, 1917 bp, Shigella flexneri; identical to SEQ ID NO: 476688

SEQ ID NO: 478345 - DNA, 543 bp, Shigella flexneri; identical to SEQ ID NO: 464540

SEQ ID NO: 478346 - DNA, 501 bp, Shigella flexneri; identical to SEQ ID NO: 470842

SEQ ID NO: 478347 - DNA, 543 bp, Shigella flexneri; identical to SEQ ID NO: 464540

SEQ ID NO: 478348 - DNA, 2190 bp, Shigella flexneri; identical to SEQ ID NO: 476963

SEQ ID NO: 478349 - DNA, 1140 bp, Shigella flexneri; identical to SEQ ID NO: 476755

SEQ ID NO: 478350 - DNA, 312 bp, Shigella flexneri; identical to SEQ ID NO: 472254

SEQ ID NO: 478351 - DNA, 393 bp, Shigella flexneri; identical to SEQ ID NO: 472257

SEQ ID NO: 478352 - DNA, 543 bp, Shigella flexneri
gtgaaagaaagcaatcagcgatggtgctctgacgggttcgagttctgctgtgataacggagagagactgcgtgtcacgttcgcgctggactgctgtgatcgtgaggcactgcactgggcggtgactaccggcggcttcaacagtgaaacagtacaggacgtcatgctgggagcggtggaacgccgcttcggcaacgatcttccgtcgtctccagtggagtggctgacggataatggttcatgctaccgggctaatgaaacacgccagttcgcccggatgttgggacttgaaccgaagaacacggcggtgcggagtccggagagtaacggaatagcagagagcttcgtgaaaacgataaagcgtgactacatcagtatcatgcccaaaccagacgggttaacggcagcaaagaaccttgcagaggcgttcgagcattataacgaatggcatccgcatagtgcgctgagttatcgctcgccacgggaatatctgcggcagcgggcttgtaatgggttaagtgataacagatgtctggaaatatag

SEQ ID NO: 478353 - DNA, 543 bp, Shigella flexneri; identical to SEQ ID NO: 464540

SEQ ID NO: 478354 - DNA, 543 bp, Shigella flexneri; identical to SEQ ID NO: 464540

SEQ ID NO: 478355 - DNA, 198 bp, Shigella flexneri
atggtctgccagatggaactgaccagccatctgctgacggctgcagccttcggcacgatgaagaacagcgaaaatgagcttgctgagcaacttatagaacaaaccggcgataacactctgacgttaatggataaaggttattactcactgggactgttaaatgcctggagcctggcgggagaacaccgcactggatga

SEQ ID NO: 478356 - DNA, 516 bp, Shigella flexneri
  misc_feature (473)..(482): n is a, c, g, or t
atgaactttaccaaactgactgaccacctgaaacttgccaccgatcgtctcattggatttaagccagaaccatatgagttgcatgaaggtcatggtgtagctactgaaagtatttacaagatggtcgatcagtttcatgaactcttccagcatccgagacgcgttatgccgacaccagagctgcttcgtctccgtgcaagcctgattcatgaagaagctgtagtggaaggtattccagccgcaatgaatggggatattgagcaactgctggatgcaatggccgactttttatacgttggtgttggtacgatggtcgccatcaaaggtggtatttctaccggcatgacctattacacgcaggaacagagcattgatcgctttatgcagacaatttttgtgcccggtaacactgttttcgatgatatggcaatgccatttcaggaagctcgtgaggcgtcatgtatgctcgaagnnnnnnnnnncttgagaagaagactgttaaggattctgagctga

SEQ ID NO: 478357 - DNA, 825 bp, Shigella flexneri
atgttgtccgcttttactccccgcccgctgaaacgtctgttcacggccaaccagtgctggacatccttcctggatgcgggcggtctgcgcgatatcgaggttgaggctgtcacaaaaatgctggcctgcggcacgcggatactgggcgtgaaggaatacatctgcgataaacctgagtgcccccacgtcagatacgtcactaactcatgcggcagccgtgcctgcccgtcctgcggaaaaaaggccacagacctgtggatagcgacacagctgaatcgtcttcctgactgcgactgggtacacctggtcttcaccctgccggacacgcagtggccggtgttcgaaagcaaccggtggctgctgaatgacgtgtgccgtctggcggtggagaatctgctgtatgccgcccggaaacgggggcaggaacccggtatcttctgcgccatccacacgtatggccgtcgtctcaactggcatccgcatgtacatgtgtctgtaacctgtggaggtctgaataagcatggtcagtggaaaaagctgagcttcctgaaagacgcgatgcgttcgcggtggatgtggaatatgcggcaacggcttctgaaagcgtggtcagaggggctggcgatgccggagtcgttgtcacatatcacgacggaatcacagaggagaagcctggtgctgaaagccggaggaaaatactggcatgtgtacatgtcgaaaaaaacggccggcgggaggaatacggcgcgctacctgggtcgttatctgaagaagccgccgatagcggcctcccggctggcacattacaacggagggggagcctga

SEQ ID NO: 478358 - DNA, 543 bp, Shigella flexneri; identical to SEQ ID NO: 464540

SEQ ID NO: 478359 - DNA, 543 bp, Shigella flexneri; identical to SEQ ID NO: 464540

SEQ ID NO: 478360 - DNA, 543 bp, Shigella flexneri
gtgaaagaaagcaatcagcgatggtgctctgacgggttcgagttctgctgtgataacggagagagactgcgtgtcacgttcgcgctggactgctgtgatcgtgaggcactgcactgggcggtgactaccggcggcttcaacagtgaaacagtacaggacgtcatgctgggagcggtggaacgccgcttcggcaacgatcttccgtcgtctccagtggagtggctgacggataatggttcatgttaccgggctaatgaaacacgccagttcgcccggatgttgggacttgaaccgaagaacacggcggtgcggagtccggagagtaacggaatagcagagagcttcgtgaaaacgataaagcgtgactacatcagtatcatgcccaaaccagacgggttaacggcagcaaagaaccttgcagaggcgttcgagcattataacgaatggcatccgcatagtgcgctgggttatcgctcgccacgggaatatctgcggcagcgggcttgtaatgggttaagtgataacagatgtctggaaatatag

SEQ ID NO: 478361 - DNA, 492 bp, Shigella flexneri
gtgataacggagagactgcgtgtcacgttcgcgctggactgctgtgatcgtgaggcactgcactgggcggtgactaccggcggcttcaacagtgaaacagtacaggacgtcatgctgggagcagtggaacgccgcttcggcaacgatcttccgtcgtctccagtggagtggctgacggataatggttcatgctaccgggctaatgaaacacgccagttcgcccggatgttgggacttgaaccgaagaacacggcggtgcggagtccggagagtaacggaatagcagagagcttcgtgaaaacgataaagcgtgactacatcagtatcatgcccaaaccagacgggttaacggcagcaaagaaccttgcagaggcgttcgagcattataacgaatggcatccgcatagtgcgctgggttatcgctcgccacgggaatatctgcggcagcgggcttgtaatgggttaagtgataacagatgtctggaaatatag

SEQ ID NO: 478362 - DNA, 474 bp, Shigella flexneri; identical to SEQ ID NO: 475593

SEQ ID NO: 478363 - DNA, 1401 bp, Shigella flexneri; identical to SEQ ID NO: 474418

SEQ ID NO: 478364 - DNA, 255 bp, Shigella flexneri
atgacgtcaaatcatcatgccccttatgacctgggctacacacgtgctacaatggacagaacaaagggcagcgaaaccgcgaggttaagccaatcccacaaatctgttctcagttcggatcgcagtctgcaactcgactgcgtgaagctggaatcgctagtaatcgcggatcagcatgccgcggtgaatacgttcccgggccttgtacacaccgcccgtcacaccacgagagtttgtaacacccgaagtcggtga

SEQ ID NO: 478365 - DNA, 834 bp, Shigella flexneri
atggtctgccagatggaactgaccagccatctgctgacggctgcagccttcggcacgatgaagaacagcgaaaatgagcttgctgagcaacttatagaacaaaccggcgataacactctgacgttaatggataaaggttattactcactgggagtgttaaatggctggagcctggcgggagaacaccgccactggatgatacctctcagaaagggagcgcaatatgaagagctcagaaaactgggtaaaggcgatcatctggtgaagctgaaaaccagcccgcaggcacgaaaaaagtggccgggactgggaaatgaagtgacagcccgcctgctgaccgtgacgcgcaaaggaaaagtctgccatctgctgacgtcgatgacggacgccatgcgcttccccggaggagaaatggcggatctgtacagtaatcgctgggaaatcgaactgggatacagggagataaaacagacgatgcaactgagcaggctgacgctgagaagtaaaaagccggagcttgtggagcaagagctgtggggtgtcttactggcttataatctggtgagatatcagatgattaaaatggcggaacatctgaaaggttactggccgaatcaactgagtttctcagaatcatgcggaatggtgatgagaatgctgatgacattgcagggcgcttcaccgggacgtataccggagctgatgcgcgatcttgcaagtatgggacaacttgtgaaattaccgacgagaaggggaagggccttcccgagagtggtaaaggagaggccctggaaataccccacagccccgaaaaagagccagtcagttgcttaa

SEQ ID NO: 478366 - DNA, 225 bp, Shigella flexneri; identical to SEQ ID NO: 476353

SEQ ID NO: 478367 - DNA, 1188 bp, Shigella flexneri
atgctcccccgttttgccgatatttttcagcagggaaaccgctggcttaactggctggagaaacaaccggaaggggcagtccgtccggtggtaattgaatcagtgacaaaaatcatggcctgcgggaccacactgatgggctacacgcagtggtgttgttcatcaccggactgttgccatacaaaaaaggtctgcttccggtgtaaaagccgctcctgcccgcactgcggggtgaaggctggcgcacagtggatacagtatctgctgagcctggtcccctactgcccgtggcagcatattgtgttcacacttccctgccagtactggtccctggtgttccacaaccggtggttactggcagagatgagccgcattgcagcggatgtgatactggaaatctgccatcaggcagatgtggagccggggacattcacggtgatccacacatgggggcgtgaccagcagtggcatccgcatatccatttatcgacaactgccggtggtgtgacgtcgggccacacctggaaaaatcttcatttttacgcccgtaaggtgatgagcatgtggcgctaccggataacacggttgctgtcacggaaatacccttacctggtgatgccggatgcgctggcagcagaaggaagcagtaaacgggaatggaatcgcttcctggacacgcattaccgccgtggctggaatgtcaacgtatcccgggtaatggataatgccacccatgtggcggtgtactttggctcttacctgaaaaagccaccggtgccgatgagtcgtctggagcattatgccggtcaggatgaaatcggtctgcgttacaacagtcaccgaacaaaacgggaagaatacctgttgatgagtggagatgagttcatggaaaggttctcctggcatgtggcggataaggggttccgtatggtgaggtactacggttttttgagtccggcgaaacggcggttactggaagaagtggtgtacatcataacggagacagtgagaaaaacggcgatgcaaatcacctggagagggatgtatcagaggttactgaaggttgacccgctgaagtgcgtgctgtgcgggagtcagatgcgttttacggggctgaagcggggctaccgtctggcagagcaggtcctgatgcatgagccgctggcccggatgcggtggtgcggctga

SEQ ID NO: 478368 - DNA, 366 bp, Shigella flexneri; identical to SEQ ID NO: 476838

SEQ ID NO: 478369 - DNA, 378 bp, Shigella flexneri; identical to SEQ ID NO: 474621

SEQ ID NO: 478370 - DNA, 645 bp, Shigella flexneri; identical to SEQ ID NO: 474660

SEQ ID NO: 478371 - DNA, 543 bp, Shigella flexneri; identical to SEQ ID NO: 464540

SEQ ID NO: 478372 - DNA, 543 bp, Shigella flexneri
gtgaaagaaagcaatcagcgatggtgctctgacgggttcgagttctgctgtgataacggagagagactgcgtgtcacgttcgcgctggactgctgtgatcgtgaggcactgcactgggcggtgactaccggcggcttcaacagtgaaacagtacaggacgtcatgctgggagcagtggaacgccgcttcggcaacgatcttccgtcgtctccagtggagtggctgacggataatggttcatgctaccgggataatgaaacacgccagttcgcccggatgttgggacttgaaccgaagaacacggcggtgcggagtccggagagtaacggaatagcagagagcttcgtgaaaacgataaagcgtgactacatcagtatcatgcccaaaccagacgggttaacggcagcaaagaaccttgcagaggcgttcgagcattataacgaatggcatccgcatagtgcgctgggttatcgctcgccacgggaatatctgcggcagcgggcttgtaatgggttaagtgataacagatgtctggaaatatag

SEQ ID NO: 478373 - DNA, 291 bp, Shigella flexneri; identical to SEQ ID NO: 477906

SEQ ID NO: 478374 - DNA, 132 bp, Shigella flexneri; identical to SEQ ID NO: 476846

SEQ ID NO: 478375 - DNA, 255 bp, Shigella flexneri; identical to SEQ ID NO: 28072

SEQ ID NO: 478376 - DNA, 456 bp, Shigella flexneri
atgattcagttcaaaccaacgcgaaacatcgacctgatcgaagcagtcggaaatcaccctgacattattgccgggagcaacaacggtgatggatacgactacaagcctgaatgccgttactttgaggttaacgtgcacggtcagtttggcggcattgtttactatcaggagattcagccgctgacattagattgccacgccatgtacctgccagagattcgcggcttcagcaaggaaatcgggctggcgttctggcgatacattctgactaacaccaccgttcagtgcgtcacatcgttcgctgcacgcaaattccgccacgggcagatgtactgcgcaatgattggccttaagcgtgtagggaccatcaagaaatacttcaaaggcgtggatgacgtgacgttttacagcgccacacgcgaagaactaatcgacttcctgaatcacgggagatag

SEQ ID NO: 478377 - DNA, 372 bp, Shigella flexneri; identical to SEQ ID NO: 471761

SEQ ID NO: 478378 - DNA, 162 bp, Shigella flexneri
atgactaccccacctcatattgctctcggttttgatatatgtgacatcattggtaacggctacacaccttctcgttgtaacgtgattgagttaggcctcatcgttaagcagtttctagataaaggacatgagaaatttaaggaacattatctgaaggaataa

SEQ ID NO: 478379 - DNA, 321 bp, Shigella flexneri; identical to SEQ ID NO: 230482

SEQ ID NO: 478380 - DNA, 225 bp, Shigella flexneri; identical to SEQ ID NO: 476353

SEQ ID NO: 478381 - DNA, 249 bp, Shigella flexneri
gtgttcgaccttgaggttgaatcgtcaactggcgttgctcagtacgctgaccgcctttttctctctgcaaccactgacggcataaattacggtcgtgagcagatgattgagcagaatgaaccgttcgtttacgacaaacgtgttttgtggaagcgagtcgggcgcatcaggaaaaatgtcggcttcaaattgcgcattatcacgaagtcaccagtcactctgtctggcgctcagataaggattgagtaa

SEQ ID NO: 478382 - DNA, 660 bp, Shigella flexneri
gtggaagcgcaggccgcattcggcaatggtgcggaaggcgttggtttgttccgcactgaaatgctctatatggatcgcaccagtgcaccgggcgaaagcgagctgtacaacattttttgtcaggcgctggagtctgccaacggacgcagcattattgtgcgcactatggacattggcggcgacaaacccgttgattatctaaacattcccgcagaggcaaacccgttcctcggttatcgcgccgtgcgtatttatgaagaatacgcgtcgttatttaccacacaactacgctcgatcctgcgcgcctccgctcacggcagcctgaaaatcatgatcccgatgatctcctcaatggaagagatcttatgggtgaaagaaaaactggcagaagccaaacagcaactacgtaacgaacacattccgtttgatgagaagatccagctcggcattatgctggaagtgccgtcggtgatgttcatcatcgatcaatgctgcgaagagattgatttctttagtattggtagtaatgacctgacgcaatatctgctggcagtggatcgcgataacgctaaggttactcgtcactacaacagcctgaatccggcattcttgcgggcgctcgattacgacgtgcaggcggtgcatcgccagggtaaatga

SEQ ID NO: 478383 - DNA, 267 bp, Shigella flexneri; identical to SEQ ID NO: 476365

SEQ ID NO: 478384 - DNA, 834 bp, Shigella flexneri
atggtctgccagatggaactgaccagccatctgctgacggctgcagccttcggcacgatgaagaacagcgaaaatgagcttgctgagcaacttatagaacaaaccggcgataacactctgacgttaatggataaaggttattactcacagggactgttaaatggctggagcctggcgggagaacaccgccactggatgatacctctcagaaagggagcgcaatatgaagagctcagaaaactgggtaaaggcgatcatctggtgaagctgaaaaccagcccgcaggcacgaaaaaagtggccgggactgggaaatgaagtgacagcccgcctgctgaccgtgacgcgcaaaggaaaagtctgccatctgctgacgtcgatgacggacgccatgcgcttccccggaggagaaatggcggatctgtacagtaatcgctgggaaatcgaactgggatacagggagataaaacagacgatgcaactgagcaggctgacgctgagaagtaaaaagccggagcttgtggagcaagagctgtggggtgtcttactggcttataatctggtgagatatcagatgattaaaatggcggaacatctgaaaggttactggccgaatcaactgagtttctcagaatcatgcggaatggtgatgagaatgctgatgacattgcagggcgcttcaccgggacgtataccggagctgatgcgcgatcttgcaagtatgggacaacttgtgaaattaccgacgagaaggggaagggccttcccgagagtggtaaaggagaggccctggaaataccccacagccccgaaaaagagccagtcagttgcttaa

SEQ ID NO: 478385 - DNA, 273 bp, Shigella flexneri
gtgtactgcagtaatggctgggtggaaatcgacaacaacatcgctgaaaatgccctgcgggcggtcagtctgggtcgtaaaaacttcctgttcttcggctctgaccatggtggtgagcggggcgcgctactgtacagcctgatcgggacgtgcaaactgaatgacgtggatccagaaagctaccttcgccatgtgcttggcgtcatagcagactggccggtcaaccgggtcagcgaactgcttccgtggcgcatagcactgccagctgaataa

SEQ ID NO: 478386 - DNA, 1161 bp, Shigella flexneri
atgacaaataaccctctgattccacaaagcaaacttccacaacttggcaccactattttcacccagatgagcgcgctggcgcagcaacaccaggcgattaacctgtcgcaaggctttcctgattttgatggtccgcgctatttacaggagcggctggcgtaccacgttgcccagggggcaaaccaatacgcgcccatgaccggcgtgcaggccttgcgcgaggcgattgctcagaaaacggaacgtttgtatggctatcaaccagatgccgatagcgatatcaccgtaacggcaggggcgacggaagcgttatacgcggcgattaccgcactggtgcgcaatggcgatgaagtgatttgttttgatcccagctatgacagttacgcccccgccatcgcgctttctgggggaatagtgaaacgtatggcactgcaaccaccgcattttcgcgttgactggcaggaatttgccgcattattaagcgagcgcaccagactggtgatcctcaacactccgcataaccccagtgcaactgtctggcagcaggctgatttcgccgctttgtggcaggcgatcgccgggcacgagatttttgtcattagcgatgaagtctacgagcacatcaacttttcacaacagggccatgccagtgtgctggcgcatccgcagctgcgtgagcgggcagtggcggtttcttcatttggcaagacctatcatatgaccggctggaaagtgggttattgtgttgcgccagcgcccatcagcgccgaaattcgcaaggtacatcagtatctgaccttttcggtgaataccccggcacagctggcgcttgctgatatgctacgtgcagaacctgagcattatcttgcgttaccggacttttatcgccagaagcgcgatattctggtgaatgctttaaatgaaagccggctggagattttaccgtgtgaaggtacatactttttgctggtggattacagcgcggtttctaccctggatgatgttgagttttgccagtggctgacgcaggagcacggcgtagcggcgattccgctgtcggtgttttgcgccgatcccttcccacataaactgattcgtctctgttttgccaagaaggaatcgacgttgctggcagcagctgaacgcctgcgccagctttag

SEQ ID NO: 478387 - DNA, 210 bp, Shigella flexneri; identical to SEQ ID NO: 475253

SEQ ID NO: 478388 - DNA, 1197 bp, Shigella flexneri; identical to SEQ ID NO: 472606

SEQ ID NO: 478389 - DNA, 1596 bp, Shigella flexneri
atgaccaataatgccagcggtggggccgtatttttgcaacaaggagcggaattttcactattaccagaaaatgaaactggaatgactctgtttgccaataacaccgttacaggagaatataataacggcggggccatatttgctaaagaaaactcaacgctgaatcttactgatgttattttttccggtaacgtcgcaggcggctatggtggcgcaatctattcttctggtactaatgatactggtgccgtcgatttacgtgtcactaacgccatcaataatatcgctaatgatggcaaaggtggcgcaatttataccattaataatgacgtctatttaagtgatgatgtttttaacaataaccaggtatatacatcaacaagttacagtgatggcgatggcggggcaatcgatgttaccgataataatagcgacagcaagcatccttcaggttatacgataataaataacaccgcctttacaaataacacagccgaaggttatggcggggcgatatataccaatagcgcgacggctccctatcttattgatatttctgttgatgacagctacagccagaacggcggcgtgttagtcgatgagaacaatagcgcagcaggctatggagatggtccctccactgcggcgggtggctttatgtatctcggcttaagtgaagttacctttgatattgccgacggaaaaacgctggttatcggcaatacagagaatgacggagctgttgactctattgctggtaccgggttaatcaccaaaacaggttccggcgatctggtacttaatgcagataacaatgactttactggtgagatgcagattgaaaacggtgaagttaccctgggtcgcagcaactccctgatgaatgtcggcgatacgcattgccaggacgatccgcaagactgctacggtctgacgatagggagtattgatcagtatcagaatcaggctgagctaaacgttggctcgacccaacaaacttttgtgcacgcattgacgggctttcagaatggcactttaaatatcgatgctggtggcaacgttactgttaatcagggcagttttgctggcatcatcgaaggtgctggtcagctcaccattgcgcaaaacggcagctacgtgctggcaggggcgcagtcgatggcgctaaccggcgatatagtcgttgatgatggtgcggtgctttcgctggaaggcgacgcggcagatcttaccgctctccaggacgatccgcagtcgatcgtgttaaacggcggtgtgctcgatctctctgatttctccacttggcagagcggcacatcatacaatgatggccttgaagtcagtggcagcagcggaacggttatcggcagtcaggatgtggtagatcttgcaggtggcgacaatttgcatatcggcggcgacgggaaagatggcgtctacgtggtggtcgatgcgagcgacgggcaggtaagtctggcaaacaataatagttatttgggcacaacacaaatcgcctccggtacgctgatggtgagcgacaactcgcagcttggagatacccactataaccgccaggttatctttaccgataagtaa

SEQ ID NO: 478390 - DNA, 381 bp, Shigella flexneri; identical to SEQ ID NO: 458903

SEQ ID NO: 478391 - DNA, 159 bp, Shigella flexneri; identical to SEQ ID NO: 473686

SEQ ID NO: 478392 - DNA, 1836 bp, Shigella flexneri; identical to SEQ ID NO: 15968

SEQ ID NO: 478393 - DNA, 210 bp, Shigella flexneri; identical to SEQ ID NO: 477941

SEQ ID NO: 478394 - DNA, 789 bp, Shigella flexneri; identical to SEQ ID NO: 476477

SEQ ID NO: 478395 - DNA, 210 bp, Shigella flexneri; identical to SEQ ID NO: 475253

SEQ ID NO: 478396 - DNA, 306 bp, Shigella flexneri; identical to SEQ ID NO: 475868

SEQ ID NO: 478397 - DNA, 1524 bp, Shigella flexneri
atgaaacccactttatatactgctactggtgagtgcgttacgccaggccgtgaactgggcaaaggcggtgaaggcgcggtttatgatatcaatgagtttgtcgatagcgtcgccaagatttatcacacgccgccacccgccttaaaacaggacaaacttgcctttatggctgcgacagctgacgcgcaattgttgaattatgtcgcctggccgcaggcaacgcttcacggtggacgaggcggaaaagttatcggttttatgatgccaaaagtttctggtaaagaaccgattcatatgatctatagcccggcacatcgtcgtcaacgttaccctcattgtgcgtgggattttctactctatgttgcgcgcaatattgcttcatcttttgctacggttcacgagcacgggcatgtcgtgggtgacgtaaaccagaacagttttatggtaggtcgcgacagcaaagtggtgttgattgatagcgactcctttcagattaacgccaatggcacactgcatttatgcgaagtcggcgtgtcgcattttacgccgccagagctacaaaccttgtcgtcatttgtcggctttgaacgcacagaaaatcacggtaattttggccttgcgttgctgatttttcacgtcttgtttggtggccggcatccttattctggtgtgccgcttatctctgatgcgggtaatgcgctggagacggatattacccatttccgttatgcctacgcgtcagataatcagcgacgtggtttaaaaccgccgccacgatcgattccgctatcgatgttaccgagtgatgttgaagccatgtttcagcaggcattcacggaaagtggcgtggcaaccgggcgtccgacggctaaagcgtgggtagcggcacttgattctctgcgccaacagttaaagaaatgtcccgtttcggcaatgcatgtttatcccgctcatttgaccgactgcccgtggtgtacgctggataatcaaggcgttatctattttattgatctcggcgaagaggtcattaccaccggcggggattttgtgctggcaaaagtctgggcgatggtgatggcgtcagtagcaccgccagcattgcaactgtcattacccgatcatttccaaccgactggcaggccgcttcctttaggcctgttacggcgcgaatacatcattctgcttgagatcgcactgtcagcattatcgctgctgctttgcggccttcaggcagaaccgcgttatattattttggttcctgtgctggcggctatctggattattggcagtctgacaagcaaagcgtacaaagcagaagttcagcaacgccgtgaggcatttaatcgtgcgaaaatggactatgaccatttagtccgccagatccagcaggtaggcggcctggaaggttttatcgccaaacggacgatgctcgaaaaaatgaaggacgaaattctcgggttaccggaagaagagaaactcgctctggcagcacttcatgacactgcaagggaacggcagaagtag

SEQ ID NO: 478398 - DNA, 498 bp, Shigella flexneri
atggtcgccgaccgagagttccgtagcgatctctattaccgcctgaacgtattcccgattcacctgccgccactacgcgagcgtccggaagatattccgctgctggcgaaagcctttaccttcaaaattgcccgtcgtctggggcgcaatatcgacagcattcctgccgagacgctgcgcaccttgagcaacatggagtggccgggtaacgtacgcgaactggaaaacgtcattgagcgcgcagtattgctaacacgcggcaacgtgctgcagctgtcattgccagatattgctttaccggagcctgaaacgccgcctgccgcaacggttgtcgcccaggagggcgaagatgaatatcagttgattgtgcgcgtgctgaaagaaaccaacagcgtggttgccgggcctaaaggcgctgcgcaacgtctggggctgaaacgcacgaccctgctgtcacggatgaagcggctgggaattgataaatcggcattgatttaa

SEQ ID NO: 478399 - DNA, 207 bp, Shigella flexneri; identical to SEQ ID NO: 476087

SEQ ID NO: 478400 - DNA, 312 bp, Shigella flexneri
atgggagttgagcagaataatttcagggacatgttctccgtttatctctccggcccgccgcagacgcagcatgtgttttgtgtatccccggcggcccgggtcgcgcacacgggtctggcaggcgaaaaagggctggaagccttcccgctgcagactttccagtacggtgatggtggggatgtacgtatagttctggcttcgggacgtgtgtttctcttccccgaaaatccccggcacatggtgcatcagctcttcatgtgtcagcggacggtcacggcgtatctggttcgcataaccaaaacgactgactaa

SEQ ID NO: 478401 - DNA, 207 bp, Shigella flexneri; identical to SEQ ID NO: 476087

SEQ ID NO: 478402 - DNA, 639 bp, Shigella flexneri
gtgaagttcaggctggatagtgacaaagataagtggctggacataaaaatgtgcagggggagttcagaggcaaaatacctggggacgggaaccctggcccggaaaaaacgctcgcagtgtgaaggacatttttatctttataaacattcacctaaaggcagaaaaagcaggcgtgccagagggaggccgggcttaccaacaacggaaaaagaacaaaaagccgcaggcagagaaccatggttaatattcagcaatacagctgagtttaatgccaaaaaaatcatgaaactgtacagtcgaagaatgcagatagagcaaaactttcgggatgaaaaaagtgaacgctttggttttggccttcgggcgagcagaagtcggaggggagagcgttttctggtattaagtctactggttacactggccagtatcgtactctggctacttggttatcattttgaaaataaaggatttcatttaaagtatcaggctaatagtctcaaaaaacgaagagtattgtcttttctgacgctggctgaaaacgtcctgagatttaaccctgaacttctacgacgagcacaacctgaaaagatattgtgccggttggccagcacttaccgaagtatggtgctggcttactga

SEQ ID NO: 478403 - DNA, 552 bp, Shigella flexneri
atgcctgcccgtaaagtatgccagacttttttccgtaatgctttagcttccacgcatcagtatcgacaaaatgccattattgattctgctgctgctttagtcggtggcgcatctctttctcttaccagcattggccggcatttacccggtcctgctcgcgtgaaagataaaataaaacgcgttgactgtctgttgggtaataaacgacttcataatgatatccctctgatattcaaaaatattacatccatgatgacaaataaactgtcgtggtgtgttatcgctgttgactggagcggttacccttttcaggaatatcatgtccttcgtgccagcctcctctgcgacggtcgctctatccccctgatgagtcaggtcttcccgtcaaaaaaaataacgaggcggtggaaatcgcttttctggatgcgctttccggggccatttctccccggactcgtgttgttattgttactgatgctggttttcaaagtgcatggttccgtcatatcaaatcacagggatgggattttattggtcgtatcaggggggtag

SEQ ID NO: 478404 - DNA, 459 bp, Shigella flexneri
atggaatggcaacaattgcttaactgcaaccgtcggaaagataatctaaaaaaaaccaacatagcatttttacatccccttgctagcggaagacaagagatcgagcgggattacgaccgattactttttgctgcaccaactcgtcggcttgcggataaaacacaagttttcccgttagatcaaaatgacagcatacggacgaggctgactcattctcacgaagtagcaaactttgctcgcgggataggaatgaggctcgctttcgagatgaaggagcacatctttggcgaaatacccacggggattgtcgttgaacgcgacgttcctgctctgttagcagcgatcggactggcacacgatctcggtaatccaccatttgggcatctgaagtggtcaacaaaaactggccaccgagttagagtttttcctgtatcgattttccgattcgtttgggggtaa

SEQ ID NO: 478405 - DNA, 123 bp, Shigella flexneri; identical to SEQ ID NO: 474273

SEQ ID NO: 478406 - DNA, 195 bp, Shigella flexneri
atgactgccgcagcattgctggcggaaatgcctgaatcgagcagcctctcgagacgtgaaatcagcgcacttgtcggtgttgctcaggtaaaccgggactcgggaactctgcgcggtcgacgaaccattttcggtgattgtgctggggaagaacagctctgtacatggcggcgcttgaggccccccccggtttaa

SEQ ID NO: 478407 - DNA, 486 bp, Shigella flexneri
gtgttgctgtgggatatccagcggctttacccgaaagagttccagctaggggaagaagcgttaaccattattgataaacggttgggcgtgcagttaccgaaagatgaagtgggctttattgccatgcatctggtcagtgcccaaatgagcggaaatatggaggatgttgcaggtgtcacgcagttaatgcgcgaaatgctgcaattaataaaatttcagttcagccttaattaccaggaagaaagcttgagttatcagcgactggttacacatctgaagtttttatcctggcgtattcttgaacatgcttcaattaacgatagtgatgaatcattacaacaagcagtaaaacaaaattacccgcaagcatggcaatgtgcggaacggatcgccatttttattggtttgcagtatcaacgtaaaatttcacccgcagagattatgtttttagccataaatatagagcgcgtgcgcaaagaacactga

SEQ ID NO: 478408 - DNA, 429 bp, Shigella flexneri
gtgagtctggacggtcagtcctatccgttgtcgctcgctatcaagaccctcattccgggctacctgtcaggcttaccgtccaccagccgcgaggcgatggagttactggaagctctggctgaagctggcgtgaccattggtaacttcttcagtaatgacctgatgaccgcctaccaacgccgccagatgaacaaacgagctgaagctgagcgtatcgctaaagagctagcgtctcagaaagagcgtacccgcgaaatgttcatgaccgaagacgaatggcaaaaagagctacagcgccgcgaacaggtcaaagctgaacgccggacctatggtgaaaacctccgcagcgctactcattccgctggtcgctcacgtgccgctatcgtcgctgaccttgagtcaggcggtaactggatggacagcttgtaa

SEQ ID NO: 478409 - DNA, 216 bp, Shigella flexneri; identical to SEQ ID NO: 474400

SEQ ID NO: 478410 - DNA, 381 bp, Shigella flexneri; identical to SEQ ID NO: 458903

SEQ ID NO: 478411 - DNA, 1425 bp, Shigella flexneri; identical to SEQ ID NO: 474554

SEQ ID NO: 478412 - DNA, 303 bp, Shigella flexneri; identical to SEQ ID NO: 463444

SEQ ID NO: 478413 - DNA, 612 bp, Shigella flexneri; identical to SEQ ID NO: 15986

SEQ ID NO: 478414 - DNA, 213 bp, Shigella flexneri; identical to SEQ ID NO: 461425

SEQ ID NO: 478415 - DNA, 375 bp, Shigella flexneri; identical to SEQ ID NO: 476243

SEQ ID NO: 478416 - DNA, 198 bp, Shigella flexneri; identical to SEQ ID NO: 81716

SEQ ID NO: 478417 - DNA, 294 bp, Shigella flexneri
atgaagaaactggaatcctcaagcttgctaaaagatggcagtttaagtgcagagcagctattgctaactttattatatatttttcaatatccaagtgaaagtgagcaaattcttacttctgttatagaagtatcacgagccagtcatgaggattctgtagtgtatcaaacatatctatcttctgttaatgaaagtcctcatgatatatttaaaagtgaaagtgaaagagaaattgcgatcaatattctacgagagcttgtcacaagtgcatacaagaaagagctttctagataa

SEQ ID NO: 478418 - DNA, 1293 bp, Shigella flexneri
gtgatccagtcttttcttaagcaagtaagtactaagcctgaattaattatattagtgcttatggttatgatcattgctatgttgatcataccattacctacataccttgttgattttttaatagggcttaatattgtacttgctattctcgtttttatgggatcattttatattgaaagaatattgagtttttctacattcccttcggttttgttgataacgacattatttcgtctcgctttatcaataagtactagtcgactaattttagttgatgcggatgcgggtaaaattattactacatttggccagtttgtcattggtgatagtctggctgtaggttttgttattttttcaatagtaactgttgtgcagttcattgttataacaaaaggatctgaaagggttgcggaggtagctgctcgcttttctcttgacggtatgccggggaaacaaatgagcattgatgcggatttaaaggctggaattattgatgccgcaggagctaaagaaagacgcagtattctggaacgtgagagtcaattgtatggttcatttgatggagcaatgaagttcattaaaggtgatgcaattgctggcatcattattatttttgtcaatttaataggaggtatttctgttggtatgagtcaacatggaatgtccctatctggtgcattatctacttataccatactaactattggtgacggattggtctctcagattcctgctctgttaatttctataagtgcaggatttatcgttacaagagttaatggtgatagcgataatatgggacgtaacataatgtcccagatatttgggaatccttttgttctcattgttacatcagctcttgccttggcgatagggatgttgccaggttttccgttttttgcatttctcaattctctcaaagcatgtgctaaagtttccattacctcatccgaaacctctatatccatattcaagaaagagccaccagaggtttgccttatcccttttcttattgcatcctcaatatatccggaaagcatcacaactttaatctcaccagaaacagctattttactacaaatatacctagaaagtgatgcacggacatgttcaactaatgttatgacatctttttctctgggagcccaaagcgccaaagactccataataagttttaaattgcgaacagaaatattttctccaagcaatctttgtaatacctcagaaattctctgtatagtcacatgtcggaagacttcctttaatagatcaggataccgattttcaaactga

SEQ ID NO: 478419 - DNA, 849 bp, Shigella flexneri; identical to SEQ ID NO: 477085

SEQ ID NO: 478420 - DNA, 273 bp, Shigella flexneri; identical to SEQ ID NO: 474417

SEQ ID NO: 478421 - DNA, 834 bp, Shigella flexneri; identical to SEQ ID NO: 476228

SEQ ID NO: 478422 - DNA, 243 bp, Shigella flexneri; identical to SEQ ID NO: 462679

SEQ ID NO: 478423 - DNA, 750 bp, Shigella flexneri; identical to SEQ ID NO: 475425

SEQ ID NO: 478424 - DNA, 690 bp, Shigella flexneri
atgaataaccagtatttacagtttgttcgtgagcagctcattatcgccaccgctgatttgagtggggcgacaaaaggtcagcttgaagcctggcaggagaatgccatgttcgatacagggcgttacaggcgtaaaaaaatccggtaccgcgatgaagtgactggaaaaatgataacgcgggataatccaccaatcccgggaaagcaatcgctggcgaagggggcggcaattcctctggtcagtcaggttgcgttttcgacatcatcgtggcggcgggctgttctgtctcttgaagagcactataaagcctggttgttgtggtgttacagcggaagtatttgctgggagtatcagatcgcgataacacagtgggcgtggaatgaatttaatgctcaatccggtaccagaaaaattgcagggaaaacgcaggaacgcctgaaaaaattaatctggctggcggcgcaggcggtaaaagcagaactttttggtggggaaggttatgaatatcaggagctggcattactggcgggagtaacaaccaaaaactggtccaaaacatttactggtcactgggttgtaatgaaacacatttttcaccgactggatagtgaggctttattgtttgtgatgagaacacgttcagaacaaaaagcggcattttcaaagcaaagtattgcaaaagtagattaa

SEQ ID NO: 478425 - DNA, 342 bp, Shigella flexneri
atgagcacaaaaccactcttcctgttacggaaagcgaaaaaatcatccggtgaacctgacgtcgtcctgtgggcaagcgacgattttgaatcgaccagcaccactctggactatctgctcgttaagtcaggtaaaaaactgagcaactattttaaagctgttgccacaaattttcctgtcgttaatgaccttccccctgaaggtgagatcgattttacctggagtgaacgctatcaactcagcaaagactccatgacatgggaactaaaaccgggagcagcgccagacgacgttcaccaccaggataatgctcaagaaaccaaagaactggcgggaggctag

SEQ ID NO: 478426 - DNA, 198 bp, Shigella flexneri
atgaaattattaaccacagaaacggcgctggatattctgattgcgtggctgcaggacaatattgactgcgaatcagggattatcttcgacaacgatgaggataaaacggattcggcagcactgctgccctgtattgaacaggccagggaagatatccgtaccctgcgtcagctgcagtttctgcaacagaaccggtga

SEQ ID NO: 478427 - DNA, 834 bp, Shigella flexneri
atggtctgccagatggaactgaccagccatctgctgacggctgcagccttcggcacgatgaagaacagcgaaaatgagcttgctgagcaacttatagaacaaaccggcgataacactctgacgttaatggataagggttattactcactgggactgttaaatggctggagcctggcgggagaacaccgccactggatgatacctctcagaaagggagcgcaatatgaagagctcagaaaactgggtaaaggcgatcatctggtgaagctgaaaaccagcccgcaggcacgaaaaaagtggccgggactgggaaatgaagtgacagcccgcctgctgaccgtgacgcgcaaaggaaaagtctgccatctgctgacgtcgatgacggacgccatgcgcttccccggaggagaaatggcggatctgtacagtcatcgctgggaaatcgaactgggatacagggagataaaacagacgatgcaactgagcaggctgacgctgagaagtaaaaagccggagcttgtggagcaagagctgtggggtgtcttactggcttataatctggtgagatatcagatgattaaaatggcggaacatctgaaaggttactggccgaatcaactgagtttctcagaatcatgcggaatggtgatgagaatgctgatgacattgcagggcgcttcaccgggacgtataccggagctgatgcgcgatcttgcaagtatgggacaacttgtgaaattaccgacgagaaggggaagggccttcccgagagtggtaaaggagaggccctggaaataccccacagccccgaaaaagagccagtcagttgcttaa

SEQ ID NO: 478428 - DNA, 267 bp, Shigella flexneri; identical to SEQ ID NO: 474508

SEQ ID NO: 478429 - DNA, 315 bp, Shigella flexneri
atgagagttgagcagaataatttcagggacatgctgaccggttatctgtccggcccgccgcagacgcagcatgtgttttgtgtattcccggcgacccgggtcacgcacacgtgtctggcaggcgaagaatggctgaaagccttcccgctgcaggctttccagtacggtgatggtgggagtgtacgcatagcgtttactgcgggaagtatgccggtcttcaccgaaaatactgggaacatagtgcatcagttcttcgtgtgtcagcggacggtcacggcgtatctggtttgcagcataaccaaaacgactggctag

SEQ ID NO: 478430 - DNA, 303 bp, Shigella flexneri
atgaaaaaaagaaattttagcgcagagtttaaacgcgaatccgctcaactggttgttgaccagaaatacacggtggcagatgccgccaaagctatggatgttggcctttccacaatgacaagatgggtcaaacaactgcgtgatgagcgtcagggcaaaacaccaaaagcctcccccattaccccggaacaaattgaaatccgtgagctcaggaaaaagctacaacgcattgaaatggagaatgaaatattaaaaaaggctaccgcgctcttgatgtcagactccctgaacagttctcaataa

SEQ ID NO: 478431 - DNA, 840 bp, Shigella flexneri
atgtttcccccttcattcagagatcctgtcttggcaaaaatagggcgttgggcgggcagattgagcaaaaaagctcgtcgcagggcgacgattaatttatcgctttgtttcccagaaaagagtgatacagaacgggaaataattgtcgacaaaatgtttgtcacagcattgcaatccatagtgatgatggcagaactggcaattcgtggtccggaaaagttccagaaacgagtgttctggaaaggcctcgaaattcttgaggaaattcgacacaataatagaaatgtgatttttctggttccccatggctggagcgtggatattcctgcaatgttgctggcagctcagggaaaaaaaatggccgccatgtttcatcagcaacgaaatccagtgattgattatgtctggaattcagtacggcgtaaattcggggggcgcttacatgcccgggaggatgggataaaaccatttattcagtcagtacgccagggatactggggatattacctcccagatcaggatcatggtcctgaatacagtgaatttgctgatttttttgcgacctataaagcgacattaccaatcattggacgtctgatgaacatcagtcaggctatgattataccacttttcccggtttatgatgaaaaaaaacatctactgactattgaaattcggccaccaatggatgcttgcattgccagcgcggacaataaaacgattgcccgacaaatgaacaaaacagtggaaattttggtggggccacatccggaacagtatgtctgggttttaaaattgttaaaaacacgcaaatcaaacgaagcggacccgtacccttga

SEQ ID NO: 478432 - DNA, 381 bp, Shigella flexneri; identical to SEQ ID NO: 458903

SEQ ID NO: 478433 - DNA, 381 bp, Shigella flexneri; identical to SEQ ID NO: 458903

SEQ ID NO: 478434 - DNA, 300 bp, Shigella flexneri
atgacaaaaacagtatcaaccagtaaaaaaccccgtaaacagcattcgcctgaatttcgcagtgaagccctgaagcttgctgaacgcatcggtgttactgccgcagcccgtgaactcagcctgtatgaatcacagctctacaactggcgcagtaaacaacaaaatcagcagacgtcttctgaacgtgaactggagatgtctaccgagattgcacgtctcaaacgccagctggcagaacgggatgaagagctggctatcctccaaaaggccgcgacatacttcgcgaagcgcctgaaatga

SEQ ID NO: 478435 - DNA, 840 bp, Shigella flexneri
atgtttcccccttcattcagagatcctgtcttggccaaaatagggcgttgggtgggcagattgagcagaaaagctcgtcgcagggcgacgattaatttatcgctttgtttcccggaaaagagtgatacagaacgggaaataattgtcgacaatatgtttgccacagcattgcaatccatagtgatgatggcagaactggcaattcgtggtccggaaaagttccagaaacgagtgttctggaaaggcctcgaaattcttgaggaaattcggcacaataacagaaatgtgatttttctggttccccatggctggagcgtggatattcctgcaatgttgctggcagctcagggggaaaaaatggccgccatgtttcatcagcaacgaaatccagtgattgattatgtctggaattctgtacggcgtaaattcggggggcgcttacattcccgggaggatgggataaaaccatttattcagtcagtacgccagggatactgggggtattaccttccagatcaggatcatggtcctgaatacagtgaatttgctgatttttttgcgacctataaagcgacattaccaattattggacgtctgatgaacatcagtcaggctatgattataccgcttttcccggtttatgatgaaaaaaaacatttcctgactattgaagttcggccaccaatggatgcatgcattgccagcgcggacaataaaatgattgcccgacaaatgaacaaaacagtggaaattttggtggggtcacatccggaacagtatatctgggttttaaaattgttaaaaacgcgcaaatcaaacgaagcggacccgtacccttga

SEQ ID NO: 478436 - DNA, 360 bp, Shigella flexneri; identical to SEQ ID NO: 475478

SEQ ID NO: 478437 - DNA, 435 bp, Shigella flexneri; identical to SEQ ID NO: 476567

SEQ ID NO: 478438 - DNA, 189 bp, Shigella flexneri; identical to SEQ ID NO: 476052

SEQ ID NO: 478439 - DNA, 222 bp, Shigella flexneri; identical to SEQ ID NO: 6179

SEQ ID NO: 478440 - DNA, 381 bp, Shigella flexneri; identical to SEQ ID NO: 458903

SEQ ID NO: 478441 - DNA, 267 bp, Shigella flexneri; identical to SEQ ID NO: 474706

SEQ ID NO: 478442 - DNA, 381 bp, Shigella flexneri; identical to SEQ ID NO: 458903

SEQ ID NO: 478443 - DNA, 207 bp, Shigella flexneri; identical to SEQ ID NO: 476087

SEQ ID NO: 478444 - DNA, 591 bp, Shigella flexneri; identical to SEQ ID NO: 477108

SEQ ID NO: 478445 - DNA, 168 bp, Shigella flexneri; identical to SEQ ID NO: 474704

SEQ ID NO: 478446 - DNA, 279 bp, Shigella flexneri
atgacggtctcccttgttgcccggcaacacggtgtggcagccagccagttatttctctggcgcaagcaataccaggagggaagtcttactgctgtggccgcaggagaacaggtcgttcctgcctctgaacttgctgctgccatgaagcagattaaagaactccagcgcctgctcggcaagaaaacgatggaaaatgaactcctcaaagaagccgttgaatatggacgggcaaaaaagtggatagcgcacgcgcccttattgcccggggatggggagtaa

SEQ ID NO: 478447 - DNA, 279 bp, Shigella flexneri
atgacggtctcccttgttgcccggcaacacggtgtagcagccagccagttatttctctggcgcaagcaataccaggagggaagtcttactgctgtggccgcaggagaacaggtcgttcctgcctctgaacttgctgctgccatgaagcagattaaagaactccagcgcctgctcggcaagaaaacgatggaaaatgaactcctcaaagaagccgttgaatatggacgggcaaaaaagtggatagcgcacgcgcccttattgcccggggatggggagtaa

SEQ ID NO: 478448 - DNA, 279 bp, Shigella flexneri
atgacggtctccctcgttgcccggcaacatggtgtagcagccagccagttatttctctggcgtaagcaataccaggaaggaagtcttactgctgtggccgccggagaacaggtcgttcctgcctctgaacttgctgctgccatgaagcagattaaagaactccagcgcctgctcggcaagaaaacgatggaaaatgaactcctcaaagaagccgttgaatatggacgggcaaaaaagtggatagcgcacgcgcccttattgcccggggatggggagtaa

SEQ ID NO: 478449 - DNA, 279 bp, Shigella flexneri; identical to SEQ ID NO: 463003

SEQ ID NO: 478450 - DNA, 342 bp, Shigella flexneri
atgaaaaatattgcgacaggcggcgttctggaacgcatccgccgactgaccccgcaacatgtaaccgccccattcagaacggtagcggagtggcgcgagtggcaacttgctgaaggccagaaacgtagcgaggagatcaaccacctgaatcgccagttgcgggtggaaaaaattctgaatcgctcaggcatccagccgttgcaccgtaaatgctcgtttgcgaattaccaggtgcagaacgacggccagcgatacgcgttaagccaggcgaaatccatcgccgatgaactgatgaccgggtgtacaaattttgcgttcagcggaaaacctgataccgggtag

SEQ ID NO: 478451 - DNA, 372 bp, Shigella flexneri; identical to SEQ ID NO: 475842

SEQ ID NO: 478452 - DNA, 303 bp, Shigella flexneri; identical to SEQ ID NO: 473532

SEQ ID NO: 478453 - DNA, 216 bp, Shigella flexneri; identical to SEQ ID NO: 5123

SEQ ID NO: 478454 - DNA, 210 bp, Shigella flexneri; identical to SEQ ID NO: 477941

SEQ ID NO: 478455 - DNA, 333 bp, Shigella flexneri; identical to SEQ ID NO: 17838

SEQ ID NO: 478456 - DNA, 381 bp, Shigella flexneri; identical to SEQ ID NO: 458903

SEQ ID NO: 478457 - DNA, 303 bp, Shigella flexneri; identical to SEQ ID NO: 473532

SEQ ID NO: 478458 - DNA, 156 bp, Shigella flexneri; identical to SEQ ID NO: 474739

SEQ ID NO: 478459 - DNA, 285 bp, Shigella flexneri
atgcaatatttctcacagagtgaattaaattccatagataatgatgaactgcacaataagattgaacaattattcaattcacgttttccttatcttacagctgcacaaaaaagttcacttcttaataaactcatagatgcaaatcaatatgtcgatttgcatgagggattttatgcatcattgtccatatataacaatattgatttctatattaagactacaaccttcgattcattaattagtgtctttgaagcagggagagaggcagatgattcgacatggtag

SEQ ID NO: 478460 - DNA, 288 bp, Shigella flexneri; identical to SEQ ID NO: 474636

SEQ ID NO: 478461 - DNA, 207 bp, Shigella flexneri; identical to SEQ ID NO: 476087

SEQ ID NO: 478462 - DNA, 207 bp, Shigella flexneri; identical to SEQ ID NO: 24440

SEQ ID NO: 478463 - DNA, 186 bp, Shigella flexneri; identical to SEQ ID NO: 462789

SEQ ID NO: 478464 - DNA, 252 bp, Shigella flexneri
gtggaaatcgacaacaacatcgctgaaaatgccttgcgggcggtcagtctgggtcgtaaaaacttcctgttcttcggctctgaccatggtggtgagcggggagcgctactgtacagcctgatcgggacgtgcaaactgaatgacgtggatccagaaagctaccttcgccatgtgcttggcgtcatagcagactggccggtcaaccgggtcagcgaactgcttccgtggcgcatagcactgccagctgaataa

SEQ ID NO: 478465 - DNA, 252 bp, Shigella flexneri; identical to SEQ ID NO: 477240

SEQ ID NO: 478466 - DNA, 144 bp, Shigella flexneri
atgaaaaaaataacatggattattttattgcttcttgcagccattattcttgctgcatgtcaggcaaactatatccacgatgttcagggcgggactgtatccccgtcatcctcagctgaactgaccggattagcaacgcagtaa

SEQ ID NO: 478467 - DNA, 492 bp, Shigella flexneri; identical to SEQ ID NO: 474903

SEQ ID NO: 478468 - DNA, 441 bp, Shigella flexneri; identical to SEQ ID NO: 478283

SEQ ID NO: 478469 - DNA, 441 bp, Shigella flexneri
ttgtacctcgctggcatcaaagatgtttatacgtgcgaaattgtcggctacgccatgggagagcgcatgacaaaagagctgacaggtaaagccctgtttatggcgctcaggagccagcgcccacctgccgggctaatccaccactctgatcgaggttcacagtactgcgcatacgattaccgggtcatacaggagcagtttggtctgaaaacatcaatgtcgcgtaaaggtaactgttacgacaatgctccgatggaaagcttctggggaacgctgaaaaatgagagcctgagccactatcgttttaataaccgggatgaagccatctcagtaatacgggaatacattgagattttctacaatcgtcagcgtcgtcactctcgtctggggaatatctccccggcagccttcagggaaaaatatcatcagatggctgcttaa

SEQ ID NO: 478470 - DNA, 1821 bp, Shigella flexneri; identical to SEQ ID NO: 474838

SEQ ID NO: 478471 - DNA, 537 bp, Shigella flexneri; identical to SEQ ID NO: 474790

SEQ ID NO: 478472 - DNA, 783 bp, Shigella flexneri; identical to SEQ ID NO: 474887

SEQ ID NO: 478473 - DNA, 186 bp, Shigella flexneri; identical to SEQ ID NO: 474908

SEQ ID NO: 478474 - DNA, 441 bp, Shigella flexneri
ttgtacctcgctggcatcaaagatgtttatacgtgcgaaattgtcggctacgccatgggagagcgcatgacaaaagagctgacaggtaaagccctgtttatggcgctcaggagccagcgcccacctgccgggctaatccaccactctgatcgaggttcacagtactgcgcatacgattaccgggtcatacaggagcagtttggtctgaaaacatcaatgtcgcgtaaaggtaactgttacgacaacactccgatggaaagcttctggggaacgctgaaaaatgagagcctgagccactatcgttttaataaccgggatgaagccatctcagtaatacgggaatacattgagattttctacaatcgtcagcgtcgtcactctcgtctggggaatatctccccggcagccttcagggaaaaatatcatcagatggctgcttaa

SEQ ID NO: 478475 - DNA, 396 bp, Shigella flexneri; identical to SEQ ID NO: 474911

SEQ ID NO: 478476 - DNA, 591 bp, Shigella flexneri
atgtatatcgggatagatcttggcacctcgggcgtaaaagttattttgctcaacgagcagggtgaggtggttgcttcgcaaacggaaaagctgaccgtttcgcgcccgcatccactttggtcggaacaagacccggaacagtggtggcaggcaactgatcgcgcaatgaaagctctgggcgatcagcattctctgcaggacgttaaagcattgggtattgccggccagatgcatggagcaaccttactggatgctcaacaacgggtattgcgccctgccattttgtggaacgacgggcgctgtgcgcaagagtgcactttgctggaagcgagagttccgcaatcacgagtgattaccggcaacctgatgatgcccggatttactgcgcctaaattgctatgggttcagcggcatgagccggagatattccgtcaaatcgacaaagtattattaccgaaagattacttgcgtctgcgtatgacgggggagtttgccagcgatatgtctgacgcagctggcaccatgtggctggatgtcgcaaagcgtgactggagtgacggtcatgctgcaggcttgcgacttatctcgtga

SEQ ID NO: 478477 - DNA, 360 bp, Shigella flexneri
atgcaactgagcaggctgacgctgagaagtaaaaagccggagcttgtggagcaagagctgtggggtgtcttactggcttataatctggtgagatatcagatgattaaaatggcggaacatctgaaaggttactggccgaatcaactgagtttctcagaatcatgcggaatggtgatgagaatgctgatgacattgcagggcgcttcaccgggacgtataccggagctgatgcgcgatcttgcaagtatgggacaacttgtgaaattaccgacgagaaggggaagggccttcccgagagtggtaaaggagaggccctggaaataccccacagccccgaaaaagagccagtcagttgcttaa

SEQ ID NO: 478478 - DNA, 702 bp, Shigella flexneri; identical to SEQ ID NO: 474947

SEQ ID NO: 478479 - DNA, 834 bp, Shigella flexneri
ttgggttcagtcgtggccgcaagcgtggtgccaaaacataaacaggccagcgcagttgccactatgtttatggggttaaccctggcaaatatcggtggcgtgccggcggcgaccaggttgggtgaaaccatcggctggcggatgtcatttctggcaacggcggggctgggagtgatttcaatggtaagtctgttcttctcattacctaaaggtggtacaggggcacgacctgaagtgaaaaaagagctggcggtattaatgcgtccgcaggtgctgtctgcattgctgacgacggtactgggagctggtgcaatgtttaccctctacacctatatctctccggtactgcaaagtattacccacgcaacaccggtgttcgtcacggcaatgctggtgctgattggtgtcggattctctatcggtaactatctcggctgcaaactggcagatcgttcagttaacggcacgttgaaaggctttttgttgctgctgatggtgattatgctggcaatcccgttcctggcccgcaatgagttcggcgcagctattagcatggtggtgtggggcgcagcaacctttgcggttgtacctccgttacagatgcgcgtgatgcatgtcgccagtgaagcgccaggtctgtcttcatcagtcaatattggtgcctttaatcttggaaatgcgctgggagcagctgctggtggtgcggtaatttccgctgggctgggatacagctttgtgccggtgacgggggcgattgtcgcgggactggcattattgctggtgtttatgtcagccagaaaacaacctgaaacagtttgcgttgctaacagctaa

SEQ ID NO: 478480 - DNA, 441 bp, Shigella flexneri
ttgtacctcgctggcatcaaagatgtttatacgtgtgaaattgtcggctacgccatgggagagcgcatgacaaaagagctgacaggtaaagccctgtttatggcgctcaggagccagcgcccacctgccgggctaatccaccactctgatcgaggttcacagtactgcgcatacgattaccgggtcatacaggagcagtttggtctgaaaacatcaatgtcgcgtaaaggtaactgttacgacaacgctccgatggaaagcttctggggaacgctgaaaaatgagagcctgagctactatcgttttaataaccgggatgaagccatctcagtaatacgggaatacattgagattttctacaatcgtcagcgtcgtcactctcgtctggggaatatctccccggcagccttcagggaaaaatatcatcagatggctgcttaa

SEQ ID NO: 478481 - DNA, 405 bp, Shigella flexneri; identical to SEQ ID NO: 474969

SEQ ID NO: 478482 - DNA, 138 bp, Shigella flexneri; identical to SEQ ID NO: 474971

SEQ ID NO: 478483 - DNA, 366 bp, Shigella flexneri; identical to SEQ ID NO: 476838

SEQ ID NO: 478484 - DNA, 366 bp, Shigella flexneri; identical to SEQ ID NO: 476838

SEQ ID NO: 478485 - DNA, 1602 bp, Shigella flexneri
atgaccaataatgccagcggtggggccgtatttttgcaacaaggagcggaattttcactattaccagaaaatgaaactggaatgactctgtttgccaataacaccgttacaggagaatataataacggcggggccatatttgctaaagaaaactcaacgctgaatcttactgatgttattttttccggtaacgtcgcaggcggctatagtggcgcaatctattcttctggtactaatgatactggtgccgtcgatttacgtgtcactaacgccatgtttcgcaataatatcgctaatgatggcaaaggtggcgcaatttataccattaataatgacgtctatttaagtgatgatgtttttaacaataaccaggcatatacatcaacaagttacagtgatggcgatggcggggcaatcgatgttaccgataataatagcgacagcaagcatccttcaggttatacgataataaataacaccgcctttacaaataacacagccgaaggttatggcggggcgatatataccaatagcgtgagggctccctatcttattgatatttctgttgatgacagctacagccagaacggcggcgtgttagtcgatgagaacaatagcgcagcaggctatggagatggtccttccactgcggcgggtggctttatgtatctcggcttaagtgaagttacctttgatattgccgacggaaaaacgctggttatcggcaatacagagaatgacggagctgttgactctattgctggtaccgggttaatcaccaaaacaggttccggcgatctggtacttaatgcagataacaatgactttactggtgagatgcagattgaaaacggtgaagttaccctgggtcgcagcaactccctgatgaatgtcggcgatacgcattgccaggacgatccgcaagactgctacggtctgacgatagggagtattgatcagtatcagaatcaggctgagctaaacgttggctcgacccaacaaacttttgtgcacgcattgacgggctttcagaatggcactttaaatatcgatgctggtggcaacgttactgttaatcagggcagttttgctggcatcatcgaaggtgctggtcagctcaccattgcgcaaaacggcagctacgtgctggcaggggcgcagtcgatggcgctaaccggcgatatagtcgttgatgatggtgcggtgctttcgctggaaggcgacgcggcagatcttaccgctctccaggacgatccgcagtcgatcgtgttaaacggcggtgtgctcgatctctctgatttctccacttggcagagcggcacatcatacaatgatggccttgaagtcagtggcagcagcggaacggttatcggcagtcaggatgtggtagatcttgcaggtggcgacaatttgcatatcggcggtgacgggaaagatggcgtctacgtggtggtcgatgcgagcgacgggcaggtaagtctggcaaacaataatagttatttgggcacaacacaaatcgcctccggtacgctgatggtgagcgacaactcgcagcttggagatacccactataaccgccaggttatctttaccgataagtaa

SEQ ID NO: 478486 - DNA, 1914 bp, Shigella flexneri; identical to SEQ ID NO: 475016

SEQ ID NO: 478487 - DNA, 717 bp, Shigella flexneri; identical to SEQ ID NO: 475041

SEQ ID NO: 478488 - DNA, 285 bp, Shigella flexneri; identical to SEQ ID NO: 461629

SEQ ID NO: 478489 - DNA, 1119 bp, Shigella flexneri
atgccattacccgattttcatttttctgaaccttttaccctcggtattgaactggaaatgcaggtggttaatccgccgggctatgacttaagccaggactcttcaatgctgattgacgcggttaaaaataagatcacggccggagaggtaaagcacgatatcaccgaaagtatgctggagctggcgacggatgtttgccgtgatatcaaccaggctgccgggcagttttcagcgatgcagaaagtcgtattgcaggcagccgcagaccatcatctggaaatttgcggcggtggcacgcccccgtttcagaaatggcagcgtcaggaggtatgcgacaacgaacgctatcaacgaacgctggaaaactttggctatctcatccagcaggcgaccgtttttggtcagcatgtccatgttggctgtgccagtggcgatgacgccatttatttgctgcacggcttgtcacggtttgtgccgcattttattgccctttccgccgcgtcgccatatatgcagggaacggatacgcgttttgccccctcacgaccgaatattttttccgcctttcctgataatggcccgatgccgtgggtcagtaactggcaacaatttgaagccctgtttcgctgtctgagttacaccacgatgatcgacagcattaaagatctgcactgggatattcgccccagtcctcattttggcacggtggaggttcgggtgatggataccccgttaacccttagccacgcggtgaatatggcgggattaattcaggccaccgcccactggttactgacggaacgcccgttcaaacatcaggagaaagattacctgctgtataaattcaaccgtttccaggcctgtcgctatggtctggaaggcgtcattaccgatccgcacactggcgatcgtcgaccgctaacggaagataccttgcgattgctggaaaaaatcgccccttcagcacataaaattggcgcatcgagcgcaattgaagcactgcatcgccaggtcgtcagcggtctgaatgaagcgcagctgatgcgcgatttcgtcgccgatggcggctcgctgattgggctggtgaaaaagcattgtgagatctgggccggtgactaa

SEQ ID NO: 478490 - DNA, 933 bp, Shigella flexneri; identical to SEQ ID NO: 475060

SEQ ID NO: 478491 - DNA, 441 bp, Shigella flexneri
ttgtacctcgctggcatcaaagatgtttatacgtgcgaaattgtcggctacgccatgggagagcgtatggcaaaagagctgacaggtaaagccctgtttatggcgctcaggagccagcgcccacctgccgggctaatccaccactctgatcgaggttcacagtactgcgcatacgattaccgggtcatacaggagcagtttggtctgaaaacatcaatgtcgcgtaaaggtaactgttacgacaacgctccgatggaaagcttctggggaacgctgaaaaatgagagcctgagccactatcgttttaataaccgggatgaagccatctcagtaatacgggaatacattgagattttctacaatcgtcagcgtcgtcactctcgtctggggaatatctccccggcagccttcagggaaaaatatcatcagatggctgcttaa

SEQ ID NO: 478492 - DNA, 219 bp, Shigella flexneri
atgatgaagaaaacgcccacctctacgaaagactccttacccaacaaggagatgaatgatttgccccggctggcgagcgcggtgctgccactgtgttcgcaacatcccggtcagtgtggtcttttccctctggagaaaagtctggatgcgtttgccgcccggtatcgtctggccgaaatggcagagcatacgctggatgttcagtattacatctggtag

SEQ ID NO: 478493 - DNA, 285 bp, Shigella flexneri
atgaccacacaatatggattttttatcgattccagccgctgtactggctgtaaaacctgcgaactggcgtgcaaagattttaaagatcttggcccggaagtcagtttccgccgtatttatgaatatgctggcggcgactggcaggaagataatggcatctggcaccagaacgtgttcgcttattatctctccatctcctgtaaccattgcgataaccccgcatgtacaaaagtctgccccagcggcgcaatgcataagcgtgaaagatggctttgtggtggttga

SEQ ID NO: 478494 - DNA, 420 bp, Shigella flexneri
atgatgagtatcgcgcaggtcagatcggccggaagtgccggtaattattataccgacaaggataattactatgtgctgggcagcatgggagaacgctgggccggccagggggctgaacaactggggctgcagggcagtgtcgataaggatgtctttacccgccttctggagggcaggctgccggacggggcggatttaagccgcatgcaggatggcagtaacaggcatcgtcccggctacgacctgaccttctccgctcccaaaagtatctccatgatggccatgctcgggggggacaaacgtcttattgaagcacataaccaggccgtggattttgctgtccgtcatcacccgtgtggaggcactggcctccacacgggtgatgacggacggacagtcagaaacggtgctgaccggtaa

SEQ ID NO: 478495 - DNA, 1794 bp, Shigella flexneri; identical to SEQ ID NO: 475076

SEQ ID NO: 478496 - DNA, 162 bp, Shigella flexneri
atgcagattggcgatggcggcgtggtggtggattttggtcacggtctgcaattgccgcttacgccgatggtgggtgaatatgccaatatgacgcacttcattaccgatgaagatgccgtttccagactggaaactttcaccagcactgagcgtgtgcattaa

SEQ ID NO: 478497 - DNA, 327 bp, Shigella flexneri
atggccttatcaggtagcaaatcttacaccctcactgtagagaccatacattccgcctctggtcttgatgcgtcaagttatgcggaagctctcccgacattaagtctttctccgaagacatcccaaggcaagacagcctctgtcagacctccagcccctagaagttcttctcctcttgaagtctatcagcttctagcatctggtcgtcctgacacgctgtcgaaccttcatatctatggtcatcgcagaccacatcacaattacctcaagtctttctgtatgtctcctgttgcctgtgagtctccctatcgttgggggcttgagtag

SEQ ID NO: 478498 - DNA, 387 bp, Shigella flexneri; identical to SEQ ID NO: 475097

SEQ ID NO: 478499 - DNA, 291 bp, Shigella flexneri
atgcagaacctgttgaccgctcatccggatgttcaggctgtattcgcgcagaatgatgaaatggcgctgggcgcgctgcaaactgccggtaaatcggatgtgatggtcgtcggatttgacggtacaccggatggcgaaaaagcggtgaatgatggcaaactagcagcgactatcgctcagctacccgatcagattggcgcgaaaggcgttgaaaccgcagataaagtgctgaaaggcgagaaagttcaggctaagtatccggttgatctgaaactggttgttaagcagtag

SEQ ID NO: 478500 - DNA, 1854 bp, Shigella flexneri
atgttacattttggactcaaaggtttacctggtttagttaactcaattacacgctatccgcaggaagccttgcccatcacgaattacttcgcagcgagtgagctggctcctgccgtcgcccgtgccttcaacaaactcaaaacgctacgcgaaaacgcccgcacctggctgttgaaatacccggaacatgcccttaccggcctgctgcctgcggcgctcggcaaagccggtgaagcacaagataacgcccgcgctgccttgcgtatgcttaccgaaaacggtcatcagccattactgcaagaaatcgcccggcgttataaccagtcggaagtaacagacgcggtgaacgctctgcttgcgctcgatcccttagataatcacccgacaaaaatccccactcttccgaccttttatcagccatcgatctggacgcgcccggtattaaaagcaaacgcccaatcactgccagataacgccctcctccacctcggcgaaatgctccgcttccctcaggaagaggctctgtatccgggattattgcaggtgaaagacgcctgtaccgctgactctctggctgaatttgcctgggatctgtttaccgcctggcagaccgctggcgcgccgtcgaaagagagttgggcgttcactgcgttaggcgttctcggtaacgatgacaccgcccgcaaactgacgccattaatacgcgcctggcctggtgaatcccagcataaacgcgccaccgttgggttggatattctcgccgctatcggtagtgatatcgccctgatgcagcttaacggcattgctcagaaactgaaattcaaagcattacaggagcgggcaaaagaaaagattgccgacattgccgagagccgcgaactcacggtagcggagcttgaagatcggttagcaccggatctcggtctggatgataacggttcgttgctgctggattttggcccacgccagttcaccgtcagctttgatgaaaccttaaaaccgtttgtgcgtgatgtttccggcagccgcctgaaagacctgccaaaaccaaacaaaagcgatgatgagtcacaggcgaacgatgctgttaaccgctacaaattgctgaaaaaagatgcgcgtaccgtcgccgcccagcaggtagcaaggcttgaatccgccatgtgcctgcgtcgccgctggtcgccggaaaacttccaactcttcctggttgtgcatccgctggttcgccacttaacccgccgtctgatttggggcgtttatagcgccgacaaccagctactggcctgtttccgggtagcggaagataacagctacagcaccgctgacgatgatcttttcaccctgccggaaggcgatatctctatcggcattcctcacgttctggaaatatcaccgacggatgctgtcgcctttggtcagctttttgccgactacgaactgctaccaccgttccgtcagcttgaccgtaacagttacgccctgacagaagccgagcgcaacgccagcgaactgacccgctgggcaggcagaaaatgcccgagcggccgggtcatggggctggcaaataaaggctggataaagggcgaaccacaggatggaggctggatcggctggatgatcaaacctctcggtcgctggtcgttaatcatggaaatcgacgaaggttttgcggtgggtatgtcaccagccgaacttagcgctgagcagctcttaagcaagctgtggctatgggaaggcaaagcggaaagctatggctgggggagtaattcaacacaggaagcgcagttctccgtactcgatgccatcaccgccagcgagctaattaacgatattgaagccctgtttgaataa

SEQ ID NO: 478501 - DNA, 441 bp, Shigella flexneri
ttgtacctcgctggcatcaaagatgtttatacgtgtgaaattgtcggctacgccatgggagagcgcatgacaaaagagctgacaggtaaagccctgtttatggcgctcaggagccagcgcccacctgccgggctaatccaccactctgatcgaggttcacagtactgcgcatacgattaccgggtcatacaggagcagtctggtctgaaaacatcaatgtcgcgtaaaggtaactgttacgacaacactccgatggaaagcttctggggaacgctgaaaaatgagagcctgagccactatcgttttaataaccgggatgaagccatctcagtaatacgggaatacattgagattttctacaatcgtcagcgtcgtcactctcgtctggggaatatctccccggcagccttcagggaaaaatatcatcagatggctgcttaa

SEQ ID NO: 478502 - DNA, 363 bp, Shigella flexneri; identical to SEQ ID NO: 475116

SEQ ID NO: 478503 - DNA, 441 bp, Shigella flexneri; identical to SEQ ID NO: 478257

SEQ ID NO: 478504 - DNA, 1419 bp, Shigella flexneri
atgcatgtacaccccatttcaactttccgtttgttccaggaaggtcatctgctacgtaatagcatcgctatttttgcgctaaccacgctgttctattttattggtgcagagttacggctggttcacgaactttctcttttctggccgctgaatggcgtaatggcgggggtgtttgcccgctatgtctggcttaatcgactgcattactatgcgatcagttatgtggcgatgctggtttatgatgccataaccaccgaatggggactggtttcactggttatcaatttctccaatatgatgtttattgttaccgtcgccttactggtcgtgcgggataagcgtctggggaaaaataagtatgagccagtaagtgccttacggctatttaattactgtctgattgccgcattattatgcgctattgtcggggcgattggttcggtcagtattgatagtctggatttctggcctttgcttgcggactggttcagtgagcaattctcaacgggcgtgttgatcgtgccttgtatgctgacgttggctattcctggagtgctgccgcgctttaaagcagaacagatgatgcccgccatcgcgcttattgtgtcggttattgcctcggtagtcattggcggagcggggagtctggcgttcccgctgcctgcattaatctggtgtgcagtgcgctatacgccgcaggtaacatgtctgttgacctttgtcaccggtgcggtggaaatcgtactggtggcaaattcggtgattgatatctcggtcggttcgccgttctccattccggaaatgttctccgcacgtctcggtattgccacgatggcgatatgcccaattatggtttcttttagcgtggcagcgatcaatttgctaatgaagcaagttgcgctgcgagccgactttgattttctgactcaggtttactcacggtccggtctttatgaggcgctgaaaagtccatcgctgaaacagacacaacatctgacggtcatgctgcttgatatcgactatttcaaaagcattaacgataactatggacatgaatgtggcgataaagtgttaagcgtgtttgcccggcatattcagaagattgtcggtgataaggggctggtggcgcgcatgggcggcgaagaatttgctgttgcagtgccgtcggtgaatcctgtcgatggtctgctaatggcggaaaaaatccgtaaaggcgttgaactgcaaccattcacctggcaacaaaaaacgctttatctcacggtaagtattggcgtcggtagtggtcgcgcatcgtaccgaacgctgaccgatgattttaataaattgatggtcgaagccgatacgtgtctgtatcgctcgaagaaagatgggcgcaaccgtaccagcactatgcgttacggtgaggaagttgtctga

SEQ ID NO: 478505 - DNA, 228 bp, Shigella flexneri; identical to SEQ ID NO: 475118

SEQ ID NO: 478506 - DNA, 1554 bp, Shigella flexneri
atgatagttaagtttcatgcccggggaaaaggtggtggcagtggtccggttgattacctgctgggaagggagcgtaaccgggaaggggcaacggtgcttcagggtaatccggaagaagtccgggaactcatcgatgccacgccatttgcgaagaaatacacgtccggtgttctgtcgttcgcggagaaggagctgacgccgggaggacgtgaaaaagtgatggcgagctttgagcgtgtactgatgcccggtctcgaaaaaaatcagtacagcatcctgtgggtggagcaccaggacaagggacggcttgagctgaattttgtcattccgaacatggagctacagaccggaaaacgcctccagccgtactacgaccgcgcagacaggcctagaattgatgcctggcagacgctggttaatcaccattacgggctgcatgacccgaacgccccggagaaccgcaggacgctgacactccctgataatctgccggaaacgaaacaggcgcttgcagagagcgtcacacgcgggatagacgctctttatcatgtcggggagataaaaggccgtcaggatgtgattcaggcgctcacagaggcagggattgacgtggtcagggtgacgcgaagcagtatcagcattgcagacccgaacggcgggaagaatgtcagactgaaaggagcgttttatgagcaatcttttacagacgggtgcggagttcgagaaaaagctgaaagagagagccgaatctacagagaaaatgctgaacgacgagttcaggaagctcgaagaatctgtaagcaaggctgtgacatcaaacgagacgaaaatcaaagacgctatagccctgttcacagcttcgacagaggaatcactgaaaaaacaccgggaaggggtgaaagaggcgatgatgcagcacaggaaggacgtgttaaagctggcagggaatacgggcatgatgttactggggatggtcattttcctgtttaccgtgagtggcgggacgctctggtatcttggcgggatgatacaggcgaacctggaagaaatcaggaagcagaacgagagtctggagaagctgaacgcgaagacatggggcgtggagtttgtgcaggacgggaacaggaaatttctggtccttccttacgggaagtcagcagaggtgatttcctttcaggggaaggaatgggtacatctgaaggagtgacacagagtgacagagctggaaacacatttgctgaacgccttagagcagctgcaacaggactatatgcagcggctgagcgaatgggagagcgccttcgtggaattgcagaaaatgttttcgcttacgcaacgggacaacgcgatgctgaacgagcgggtcatgcagttgagtcagcaggtgtagcacttgagcgagcagacagaacgcttgagccagttatacagcgagaactggagataagagacgaacggctgatacaggaatgcgaacatgcgttatccctggagcgtgagcgacagctggaaatacaggaacggacactggatggcccttcgctgggatggtaa

SEQ ID NO: 478507 - DNA, 441 bp, Shigella flexneri; identical to SEQ ID NO: 478283

SEQ ID NO: 478508 - DNA, 606 bp, Shigella flexneri
atgacaaacaataacgcgcaccatcaatgtgaaaagtggtttattgccttaatggggttgcctttagtcattcatatgatgaccgaatatcctctctatacgtctgttccccatttgatgctgttgctgctccttttccgcatcggaatgccggaaaacgtgatgaatcaggtacgtatacctaaaacagtccggttgggtattctgcctgtcattgtgctcattatgaccgccgcgctggtcatcctggtagcgggatttgatgcacagcgggaactgaccagagctgaagctgatatgaacgaaggatttatccctcgccttccggaacatagctggaaatacctgacgcaggcagaacgtcttgagcgcgatcagcatctgcttattgcgaataaaccggggttcgttcgcgatacggaaagcatgtctcttttcactgtgtggggaaataaatggttggcaatccacaatgatgcagacgtaagtgctgcaatgatattcattgcgcacaggcgcggtgattatctgacagctgaaaaaataagaaaacgcgcagctcgggtatttgtaaatgacgaacgttttactcgcgggggaaactaa

SEQ ID NO: 478509 - DNA, 201 bp, Shigella flexneri
atgaccacacgcgtgattgctctcgacttagacggcaccttattgaccccgaaaaagaccttgcttccatcatcgatagaagccctggcccgcgctcgcgaagcaggctatcaattaatcatcgtcacaggtcgccatcacgtcgctattcatccttttttatcaggcgctggcgctggatacacctgctatttgctgtaa

SEQ ID NO: 478510 - DNA, 384 bp, Shigella flexneri
gtgcttaaaatcagcgaacatataagtattattgttttatatcgtcgtaaatatgtctttcagacatgtatcatttattttttactaacaggtcaaaaatatcgcgggttatttatgaaagcaattgacaatatatttaagtacatcccttcaaaccataaagataagcattcagataaagttaataatcatcaacaccatagcaaggttgatagaacacatcgttcaaagatagttgaaattgataaactggataatgattcgcaaatagataacgattttggcatgcatatcatctatttcctgcaacatggtcactggagggtaaatgaacatagcttcagatggagaaaatatggttttacaatagtgagccatctatag

SEQ ID NO: 478511 - DNA, 441 bp, Shigella flexneri; identical to SEQ ID NO: 478283

SEQ ID NO: 478512 - DNA, 234 bp, Shigella flexneri
atgtcattattactgattgttatgatgccaagcgatgtttttttcaatgccgcgatttggataacaggatcattcaactatctgtggccaagtgctattgcatttattggttattctctacttataaaaaaaatcaatatggaaaaccacgagaaaactcaatctctaatttgctatttgttatttgttatttgttatttgttattttttattttttttatcatcattcaatga

SEQ ID NO: 478513 - DNA, 243 bp, Shigella flexneri
atgctgacagatatctttaacagtaattaccggtgttatggctatcgtcgcctgcatgcgatgctcaggcatgaggggggtcggctatcagaaaaggttgtacgcagacttatggtggaggaacagcttgtcgtcagtcgtaaccgtcgtcgtcgctacagctcatattgcggagaaatcggaccggctccggataaccttatcgccagagattttaaggcggagcaacctaatcagaaatag

SEQ ID NO: 478514 - DNA, 1116 bp, Shigella flexneri
atggctgacgttgccgacaggcgggaacttcgccagttcaggcagacaccggaacagcgcttcacgcaggaacaggagcatctgcagccgctgctgggtacggacttcgatatccgtcatgtctcctgggatggctatatcgaggttggcgggaaccgttacagtgtgccggaaagcctgtgtggtcagctggtatcaatacggatctcgctggatgatgaactgcggatctacagtaatgagcaacaggtagcatcgcaccgtctctgttcggctgcatacggctggcagaccgtgccggagcatcacgctccactctggcagcaggcttcggagcgcatggccgaacggctgggggagatacagaaacgggtaatcactgtctgtgaccgggaagcggatatctggcattacctgtattataaagtcagccacggacagcgtggtgcgtgctgcacagaatcgccggctggaagaggcacccggcaagctcttcgaactgccggaagtcctggcaaccgcaggaagccacacgctgaatgtgatgcaaaaaggcgggcgggcagcccgtcaggcccggatgttcatcagttacagcgaagtcagcataaaaaatcccgacaacagcggccaggcgctcccgctcacgtatgtctgttgccgggagcaggcagaggacggtgcctgctggcatctgctgacgtcaggaaaagcggcgagtgccgccgatgcacgacgtattgtcagccattacgagcgacgctggctgacagaggaataccacaaggcgtggaaaagtggtggtacatggaatcgctgcgaatgcagacccgggataaccttgagcgcatggtggttatccaggcgtttatagcggtacgggtgctgggcctgcggcagggaggtgtcagtgaagaaacacaaaatgacagctgtgagaaaatactgacgccgacagagtggaaactactgtgggttaagctggaaggaaagccgcttccggtgcaggcaccgaccctgaaatgggcctggggcgatggcatgacagcaaacgcacaggtcgtcccggttggggcgtcatgtgggatggctggtcagacttcaggatatggttga

SEQ ID NO: 478515 - DNA, 762 bp, Shigella flexneri
atgaataagaaatcgttatggaagctaattctgatattagcgatcccatgtattattggttttatgccagctccggcaggattaagcgaactggcgtgggtgctttttggtatttacctggcggccattgtgggtctggttatcaagcctttcccggaacctgtcgtactgttaattgccgttgctgcctcaatggtggtggtcggtaacttatccgacggtgcgtttaagaccaccgccgtattaagcggttactcttcaggtactacctggctggtgttctcggcgtttaccttaagcaccgcatttgtgaccaccggtttaggtaaacgtattgcctatctgctgattggtaaaatcggtaacaccatgctgggtctgggttacgttacggtattcctcgatctggtactggctccggcaacaccgtctaacaccgcgcgtgcgggcggcattgtgttaccgatcatcaacagcgtggcggtggctttggggtccgaaccggaaaaaagtccgcgtcgtgtcggacattacctgatgatgtccatttacatggtcaccaaaaccaccagctatatgttctttaccgcaatggcggggaacattctggcgctgaaaatgatcaacgacattctgcacctgcaaattagctggggtggatgggcgctggccgccggattgccggattgccggattgccgggcatcattatgctgctggtcaccccgctggtaatttacaccatgtatccaccagaaattaa

SEQ ID NO: 478516 - DNA, 603 bp, Shigella flexneri; identical to SEQ ID NO: 475189

SEQ ID NO: 478517 - DNA, 1617 bp, Shigella flexneri
gtgatttatcagtcagccgttccacaaggtgcttttgagatcaccgatctcaacaccgcaagtacaggtggcgatttggacgtaaccatcaaagaagaagacggtagcgaacaacgattcacccaaccttatgcttcattggcgattcttaaacgtgaaggtctgacagatgttgatgtcagcgtgggtgaattgcgcgatgaagacggatttacaccggacgtccttcaggcgcaaatacttcatggtttttcccacgggatcactttatatggaggtatgcaggctgctgaaaattatggttctgcagctctgggtgtcggtaaagatcttggcgctttgggcgcaatttctttcgatgtgacacatgctcgtgcgaattttagccatgatgatacagaaacgggtcagtcatatcgctttctctattcaaaactatttgacgacacagacactagcttgcgcctggttggctatcgttactccaccgagggctactataccctcaatgagtgggcatcgcggcgcaacagccctgaagacttttgggaaacaggtaaccgacgtagtcgcgtggagggaacgctaacgcagtcgttggggagagattatggcaatttatacctgacattaagccggcaacaatactggcataccgatgatgtcgaacgattaatgcaatttggctacagcagtagctggaagcgtctctcgtggaacgtctcctggagttattccaatactgccagacaggggacggggaacaaccatgccagtgataacaccagtgagcagatctacatgctctctttatctgttcctttatcgggctggtggggtaatagttacgccacctattctgtttcgcaaaacgataattccggtagctcacatcaactcggactcagcggtacggcgctggaaagaaataacctttcatggaatttaatgcagtcctataacagtcatgatgatgaggttggcggtaatatgtccctgacctatgatggctcttatggcacggtgaacggcagctataactacagccaaaattcccagaggctgaattatggtatcagagggggaattctggcacacagcgaaggggtaacgttaagtcaggagttaggtgaaactattgctcttgttaaagcacctggggccgccgggttagaaatagataatatgcgcggtgctgcgacggactggcgcggctatacggtcaagacacagctaaacccttatgatgaaaatcgggtagcaatcagcgataactatttctcgaagtcgaatatagaacttgataataccgtcgttacgatggttcccacgcgtggtgcagtggttaaagcggagtttgtgactcatgtgggttatcgcgttctcttcagagtgttaaatgcaaatggtaaaccggtaccttttggagccattgctgcgatacaagatgcaagtttggcagattcaggaattgtcggtgaccgtggcgaactttatctttctggtctaccagaaaaaggacaggttacgttatcctggggagaaaacgcctcaacaaaatgcatcttcaattattcactttcgacaccagaaagtgagagcggattaattgggtaa

SEQ ID NO: 478518 - DNA, 225 bp, Shigella flexneri; identical to SEQ ID NO: 475196

SEQ ID NO: 478519 - DNA, 441 bp, Shigella flexneri
ttgtacctcgctggcatcaaagatgtttatacgtgcgaaattgtcggctacgccatgggagagcgcatgacaaaagagctgacaggtaaagccctgtttatggtgctcaggagccagcgcccacctgccgggctaatccaccactctgatcgaggttcacagtactgcgcatacgattaccgggtcatacaggagcagtttggtctgaaaacatcaatgtcgcgtaaaggtaactgttacgacaacgctccgatggaaagcttctggggaacgctgaaaaatgagagcctgagccactatcgttttaataaccgggatgaagccatctcagtaatacgggaatacattgagattttctacaatcgtcagcgtcgtcactctcgtctggggaatatctccccggcagccttcagggaaaaatatcatcagatggctgcttaa

SEQ ID NO: 478520 - DNA, 294 bp, Shigella flexneri; identical to SEQ ID NO: 474958

SEQ ID NO: 478521 - DNA, 1320 bp, Shigella flexneri
gtgctctgcatcggtactctgtatctcctcaaactttataccgatgaattagggatgcctgcttactatggcgggattatctttctggtcgcgaagttttttaccgcgtttaccgatatgctcaccggatttttactcgactcgcggaaaaatattgggcctaaaggcaaatttcgtccctttattttatatgcagcagttccggcggcgttaattgcaacgctccagtttatcgccaccaccttttgtttgccggttaaaacgacgattgccaccgcgctgtttatgatgtttggactttcatacagtctgatgaactgctcgtatggtgcgatgatcccggcaattaccaaaaacccgaatgagcgcgcgcagctcgcggcttaccgccagggtggtgcaaccatagggctattgatttgtaccgtggcgtttattccgttgcagtcgcttttttctgactcaaccgtcggttatgcctgtgcggcacttatgttctccattggcggctttatttttatgatgctgtgctacagaggcgtcaaagagcattatgtggacacagcgccaaccggacataaagccagtattctcaaatctttttgcgcgatatttcgtaatccaccattgctggttttatgcattgctaacctgtgtactctggcggcatttaatatcaaactggcgattcaggtctattacacccagtatgtgctgaatgatattaatttattgtcgtggatgggattcttcagtatgggatgcatcctcgtcggcgtattactggtgccagtaactgtaaaatgttttggtaaaaaacaggtttatttagctggcatggtgctatgggcggtgggtgatatactgaattatttctggggaagtaactctttcactttcgtcatgttctcttgtgtcgccttttttggcacggcctttgtaaacagcctgaactgggcactggtaccagataccgtagattacggtgaatggaaaaccggtattcgtgccgaaggttctgtttataccggttataccttctttcgtaaaatttctgccgcacttgctggcttcttgccaggcattatgctgacgcaaattggttatgttcccaacatcgcgcaaagcgatgcgacattacagggtttgcgtcagctcatttttatctggccttgtgcactggcaattattgctgcattgacgatgggattcttttacacactcaatgaaaaacggtttgcattgattattgaggaaatcaaccaacgcaaaaataaagagatggcgacagaaaaaaaaacggcttccgtaacgttataa

SEQ ID NO: 478522 - DNA, 138 bp, Shigella flexneri
atggcactgaatattccattcagaaatgcgtactatcgttttgcattgaagtggcacactgaatttggccacctgaacagaggtgatatgctcacctcagaacaacacaggtactccaatgaaaaaaagaaattttag

SEQ ID NO: 478523 - DNA, 306 bp, Shigella flexneri; identical to SEQ ID NO: 475216

SEQ ID NO: 478524 - DNA, 441 bp, Shigella flexneri; identical to SEQ ID NO: 478283

SEQ ID NO: 478525 - DNA, 297 bp, Shigella flexneri
gtgaacgtcaccgtggcgtatcaaacctcagccgaaccggcgaaagtggctcaggccgacaacacctttgctaaagagagcggggcgagcgtggactggcgtaagtttgacagcggagccagcatcgtgcgggcgctggcttctggcgacgtgcaaatcggcaacctcggttccagcccattagcggttgcagccagccaacaggtgaagtggcacactgaatttggccacctgaacagaggtgatatgctcacctcagaacaacacaggtgctccaatgaaaaaaagaaattttag

SEQ ID NO: 478526 - DNA, 141 bp, Shigella flexneri; identical to SEQ ID NO: 462785

SEQ ID NO: 478527 - DNA, 195 bp, Shigella flexneri
atgctggagaatgagtactctcagagggtggctgaccggctgaaagcatccggtctgagcggtgatgcggatgcggagagggaagccggtgcacaggtgatgcgtgagactgaacagcagatttaccgtcagttgactgacgaggtactggccctgcgattgtctgaaaacggctcacgactgcaccattcataa

SEQ ID NO: 478528 - DNA, 273 bp, Shigella flexneri
atgaaaaaaagaaattttagcgcagagtttaaacgcgaatccgctcaactggttgttgaccagaaatacacggtggcagatgccgccaaagctatggatgttggcctttccacaatgacaagatgggtcaaacaactgcgtgatgagcgtcagggcaaaacaccaaaagtctcccccattaccccggaacaaattgaaatccgtgagctcaggaaaaagctacaacgcattgaaatggagaatgaaatattaaaaaaggctaccgcgctctga

SEQ ID NO: 478529 - DNA, 657 bp, Shigella flexneri
atgcctgcgatcaatgccaaacgtgtttaccggatcatgcgccagaatgcgctgttgcttgagcgaaaacctgctgtaccgccatcgaaacgggcacataccggcagagtggctgtgaaagaaagtaatcagcgatggtgctctgacgggttcgagttccgctgtgataacggagaaaaactgcgagtcacgttcgcgctggactgctgtgaccgtgaggcactgcactgggcggtcactacgggcggcttcaacagtgaaacagtacaggacatcatgctgggagcggtggaacgccgcttcggcaacgagcttccggcgtctccagtagagtggctgacggataatggttcatgctaccgggctaatgaaacacggcagtttgcccggatgttggggcttgaaccgaagagcacggcggtgcggagtccggagagtaacggcatagcagagagcttcgtgaaaacgataaagcgtgactacatcagtgccatgcccaaaccagacgggttaacggcagcaaagaaccttgcagaggcgttcgagcattataacgaatggcatccgcatagtgcactgggttatcgctcgccacgggaatatctacggcagcgggccagtaatgggttaagtgataacaggtgtctggaaatatag

SEQ ID NO: 478530 - DNA, 573 bp, Shigella flexneri
atgttgtcacaaacagtgctcaatcataacccattactagatcctcaatggttttggaacatagactccgctatggcatactggtggttattgcctctcggtagatgtatgtttttagaattaacacgtgacaggttttttggaaaatctaaaattggtttcattgtcttctcaattaccgcgataatgagtgcgtatcaactccttaaccagaaacctttgctttttaagattatctcaatattcaatgcagacataatatcaagtagttatattcaagctattaatactattatcaccacggtaggtttgataatatttaatatttttatagcaaaaataatttgtgggaatgactttattgtaagagctggaagaaatactcttaacatatgtggaatggagtatatcaccaaattatttatccctatggctttagcaatcataggcttcagcgtgaccattccaaatcctatctgcgcaatcatatatacctgtatttgtgtatatgtatcagataaaattggccattggctatcgaggacagtcggtgggccatttttgataaaatga

SEQ ID NO: 478531 - DNA, 363 bp, Shigella flexneri
atgttaaagctatttgcaaagtacacatctataggcgtgctgaacacacttatacactgggtggtttttggtgtatgtatctatgccgcacataccagtcaggccctggcaaacttcacaggtttcgtagtggctgtgagctttagcttcttcgcgaatgcaagattcacattcaaagcatcgactacagcgatgcgctacatgttatacgtgggattcatgggaatattaagtgcgattgttggttgggctgctgataaatgctcacttcctccaatagtcactcttatcaccttctccgccatcagcctggtgtgcggtttcgtctattcaaagttcattgtctttagggatgcgaaatga

SEQ ID NO: 478532 - DNA, 441 bp, Shigella flexneri; identical to SEQ ID NO: 478283

SEQ ID NO: 478533 - DNA, 207 bp, Shigella flexneri; identical to SEQ ID NO: 475285

SEQ ID NO: 478534 - DNA, 441 bp, Shigella flexneri; identical to SEQ ID NO: 478469

SEQ ID NO: 478535 - DNA, 354 bp, Shigella flexneri
atggctataagcgacacaaaactgcgtactatttatggtaaaccatattcgggcccacaagaagtggctgatgccgatggcctcagcgtacgaatttcaccgaagggggtcatccagttccagtaccgctatcgctggcatggcaagcctaatcgacttgggcttggtcgatacccatccctgtctttgaaggatgccagacagatcactgctgacttgcgaaagctctatttctcaggaacggatccacgcacctattttgaagagaaggtggagaactccatgacggtcgcccagtgtctcgactactggttcgacaactacgtctctacaactctcagagaaaaggcctag

SEQ ID NO: 478536 - DNA, 867 bp, Shigella flexneri; identical to SEQ ID NO: 475269

SEQ ID NO: 478537 - DNA, 813 bp, Shigella flexneri; identical to SEQ ID NO: 475266

SEQ ID NO: 478538 - DNA, 681 bp, Shigella flexneri
atgcaaaaaggcactttaccggtatccagacatcatgcctatgatggtgttgttataaagagaattgaaaaggaattatgtaaaaccataaaagatagagacactgagagtaagaagaaagcaatttgtgttataaaggaggctacgaaaaaagctgaatcactgcgtatagatgctgtatgtgatggttatcaaattggtatacagactgcttttgagcatattattgactatatttgtgaatggaagttaaagcaaaatgaaaacagaagaaatattgaggactatataactagtttgctttcagaaaatttacatgatgagaggatcattagcactttattggagcagtggcttagttcgttgcgtaatacagtaacagaattaaaagtggttttgcccaagtgtaatttagcactgagtaaaaagttagaacttgatctccataaatatcgctcagatgtcaagattattttaaaatattctgaagggaataattatatattctgtagtggtaatcaagtagtggagtttagtcctcaggatgtaatatcaggtgttaaaatagaacttgcggaaaaattaacaaaaaatgataaaaaatatttcaaagagttagcacataagaaactgagacaaattgcagaagacttgttaaaagagaatcctgttaatgattaa

SEQ ID NO: 478539 - DNA, 363 bp, Shigella flexneri
atgttaaagctatttgcaaagtacacatctataggcgtgctgaacacacttatacactgggtggtttttggtgtatgtatctatgccgcgcataccaatcaggctatggcaaacttcgcaggtttcgttgtggctgtgagttttagcttctttgcgaatgcaaaattcacattcaaagcatcaactacaacgatgcgctacatgttatatgtcgggttcatgggaacactgagtgctactgttggatgggttgctgatagatgttcacttcctccaattgtcactcttgttaccttctccgccatcagcctggtgtgcggtttcgtctattcaaagttcattgtctttagggatgcgaaatga

SEQ ID NO: 478540 - DNA, 303 bp, Shigella flexneri; identical to SEQ ID NO: 473532

SEQ ID NO: 478541 - DNA, 690 bp, Shigella flexneri
atgaataaccagtatttacagtttgttcgtgagcagctcattatcgccaccgctgatttgagtggggcgacaaaaggtcagcttgaagcctggcaggggaatgccatgttcgatacagggcgttacaggcgtaaaaaaatccggtaccgcgatgaggtgaccggaaaaatgataacgcgggataatccaccaatcccgggaaaacaatcactggcgaagggggcgtcaattcctctggtcagtcaggttgcgttttcgacatcatcgtggcggcgggctgttctgtctcttgaagagcaccataaagcctggttgttgtggtgttacagcggaagtatttgctgggagtatcagatcaccataacccactgggcgtgggaagagtttaaggctcattctggcactaggaaaattgcagagaaaacacaggaacgcctgaaaaaattaatctggctggcggcgcaggcggtaaaagcagaactttttggtggggaaggttatgaatatcaggagctggcattactggcgggagtaacaaccaaaaactggtccaaaacatttactggtcactgggttgtaatgaaacacatttttcaccgactggatagtgaggctttattgtttgtgatgagaacacgtttagaacaaaaagcggcattttcaaagcaaagtattgcaaaagtagattaa

SEQ ID NO: 478542 - DNA, 441 bp, Shigella flexneri; identical to SEQ ID NO: 478283

SEQ ID NO: 478543 - DNA, 960 bp, Shigella flexneri
gtggcgcaggcgcagcagagcgccggggccgcagccggaaacgcacagcagacggcgcaggatgtggcggcagccgcaacggcccgtgatgatgcacaacgttttgcggagaaagcccgacaggatgcaaccgtcacagctgaggacagaaaggccactgcggaagatgtgacaagcacaggagcaaatgcagccgcagccggacagagcgcacaggatgccgcaggttatgcccgcgcagcagaacaggccaaaaatgacattgatgctgcgctgaccggcaccctgaaaacggctaaccatctgtctgaaatcgcagcagcaggcgaaaaggcacaacagaagtcccgggataatctggggctgaaaagtgcggccacgatggaagcacagagcgacatttacgaccggacaaaaggccgtctggcgatacccggcgcattcggctttgggtgtgcttttctgcctgaagatgttatccgttttgacactaagagtgatttcctggcctgggtaaggaatgcgctgccaggtgaatattccgttgctggcccttacggcatcatcatacccgacacacggtttgaaggggggctcagcatccggtggactgatgcacgccctgagacaacagaaccgcggtacagagccaaatcccttactttttacggcattaacggccccatttatcatacccgctactgctactggcccatatccagactgactggctgggtgaaaataaatataaccacagaagatattatttacagaatcgtggcgagctctgtccgcaacagatggggagaccctgacattggcgggctgattattgctgcgtaccagggagaagctgacggtgataaagtcatcagacttgtcaggggcagtcatacagaggctcacgactgggaccggtggggatttcagtgcccagtactcccaccggaacgtatatag

SEQ ID NO: 478544 - DNA, 441 bp, Shigella flexneri; identical to SEQ ID NO: 478283

SEQ ID NO: 478545 - DNA, 441 bp, Shigella flexneri
ttgtacctcgctggcatcaaagatgtttatacgtgcgaaattgtcggctacgccatgggagagcgtatggcaaaagagctgacaggtaaagccctgtttatggcgctcaggagccagcgcccacctgccgggctaatccaccactctgatcgaggttcacagtactgcgcatacgattaccgggtcatacaggagcagtttggtctgaaaacatcaatgtcgcgtaaaggtaactgttacgacaatgctccgatggaaagcttctggggaacgctgaaaaatgagagcctgagccactatcgttttaataaccgggatgaagccatctcagtaatacgggaatacattgagattttctacaatcgtcagcgtcgtcactctcgtctggggaatatctccccggcagccttcagggaaaaatatcatcagatggctgcttaa

SEQ ID NO: 478546 - DNA, 429 bp, Shigella flexneri; identical to SEQ ID NO: 477038

SEQ ID NO: 478547 - DNA, 303 bp, Shigella flexneri; identical to SEQ ID NO: 475222

SEQ ID NO: 478548 - DNA, 441 bp, Shigella flexneri
ttgtacctcgctggcatcaaagatgtttatacgtgtgaaattgtcggctacgccatgggagagcgcatgacaaaagagctgacaggtaaagccctgtttatggcgctcaggagccagcgcccacctgccgggctaatccaccactctgatcgaggttcacagtactgcgcatacgattaccgggtcatacaggagcagtttggtctgaaaacatcaatgtcgcgtaaaggtaactgttacgacaacactccgatggaaagcttctggggaacgctgaaaaatgagagcctgagccactatcgttttaataaccgggatgaagccatctcagtaatacgggaatacattgagattttctacaatcgtcagcgtcgtcactctcgtctggggaatatctccccggcagccttcagggaaaaatatcatcagatggctgcttaa

SEQ ID NO: 478549 - DNA, 369 bp, Shigella flexneri
atgggggaaacaatctcagagcaactggatatcattaataccgcctttaaagttatcgaaaccatacgtcccaaactggcctgtagccggtgtgatgtcatcgttcaggcaccacttccccctaaaccgatcgaacgcggttatgccagtgcagggttacttgcacggatcctggtcagcaaatatatggaacatatccctttatatcgccagtcagaaatatacgcgcgacagggcgtggagctgagccgtaataccatggtgcgctgggtatcagaaatggcagacaaactccgtcctctgtatatagcgctgaatgactatgttctggaggcaggaaaggtgcacgcagatgacactctgaggtag

SEQ ID NO: 478550 - DNA, 195 bp, Shigella flexneri; identical to SEQ ID NO: 475320

SEQ ID NO: 478551 - DNA, 180 bp, Shigella flexneri; identical to SEQ ID NO: 474761

SEQ ID NO: 478552 - DNA, 195 bp, Shigella flexneri; identical to SEQ ID NO: 464447

SEQ ID NO: 478553 - DNA, 276 bp, Shigella flexneri
atggttctggaaagtcagggcgaatatgactcacaatgggcgacaatttgttccattgccccaaagattggctgtacgccggagactctgcgtgtctgggttcgccagcatgagcgggataccgggggcggtgatggagggctcaccaccgctgaacgtcagcgtctgaaagagctggagcgtgaaaatcgtgaactgcgccgcagtaacgatatccttcgccaggcttccgcttattttgcgaaggcggagttcgaccgcctctggaaaaaatga

SEQ ID NO: 478554 - DNA, 195 bp, Shigella flexneri; identical to SEQ ID NO: 464447

SEQ ID NO: 478555 - DNA, 234 bp, Shigella flexneri; identical to SEQ ID NO: 475305

SEQ ID NO: 478556 - DNA, 360 bp, Shigella flexneri
atgattgatgtcttagggccggagaaacgcagacggcgtaccacacaggaaaagatcgcaattgttcagcagagctttgaaccggggatgacggtctccctcgttgcccggcaacatggtgtagcagccagccagttatttctctggcgtaagcaataccaggaaggaagtcttactgctgtggccgccggagaacaggttgttcctgcctctgaacttgctgccgccatgaagcagattaaagaactccagcgcctgctcggcaagaaaacgatggaaaatgaactcctcaaagaagccgttgaatatggacgggcaaaaaagtggatagcgcacgcgccccccggagacaacggctga

SEQ ID NO: 478557 - DNA, 342 bp, Shigella flexneri; identical to SEQ ID NO: 474199

SEQ ID NO: 478558 - DNA, 222 bp, Shigella flexneri; identical to SEQ ID NO: 475279

SEQ ID NO: 478559 - DNA, 228 bp, Shigella flexneri
atgctgtacccagttgtaataaccgctcctggatacaccaaatacctgactggatttgcccctatatttccagacatctgttatcacttaacccattacaagcccgctgccgcagatattcccgtggcgagcgataacccagcgcactatgcggatgccattcgttataatgctcgaacgcctctgcaaggttctttgctgccgttaacccgtctggtttgggcatga

SEQ ID NO: 478560 - DNA, 207 bp, Shigella flexneri
atgactgcccctgacaagtctgatgactttatcaccgtcagcttctccctggtacgcagcaataatcagcccgccaatgtcagggtctccccatctgttgcggacagagctcgccacgattctgtaggtaatgactccaacttactgatagtgttttatgttcagataatgcccgatgaccttgtcatgcagctccaccgattttga

SEQ ID NO: 478561 - DNA, 186 bp, Shigella flexneri; identical to SEQ ID NO: 462789

SEQ ID NO: 478562 - DNA, 189 bp, Shigella flexneri; identical to SEQ ID NO: 463227

SEQ ID NO: 478563 - DNA, 318 bp, Shigella flexneri
atgaccgatgtcttttttggcgatagtgatgtggaacgagtcgatctctcttatcacgagagtttacaacgcattgttaaaggcgatgtcgatgcggtgatctggaacgtggtggcggaaaacgaactgaccatgctgggattagaggcgacgccgctaacagacgatccgcgatttttacaggccaccgaagccgtggtcctgacgcgagtcgatgattacccaatgcaacaattgctgcgtgctgttgtagataaacacgccctgcttgcccatcaacaacgggtggtgagtggggaacaggaacccagttattaa

SEQ ID NO: 478564 - DNA, 291 bp, Shigella flexneri
atgtgtatctaccttaacttaatgattttgataaaaatcattaggggattcatcagcgccgagtcgccttttagctcactgcagtccgcaaaagagaaaaccacggtattacaagatttacgtaaaatttgcacgccacatgcgtcattatcagatgaagcgtgggaaaagttaatgttgtcagatgaaaacaataaacaacatatacgcgaggccatcgtggcgatggaacgtaataatcagagcaattattgggaagcgttgggtaaggtagaatgcccggatatgtaa

SEQ ID NO: 478565 - DNA, 543 bp, Shigella flexneri
gtgaaagaaagcaatcagcgatggtgctctgacgggttcgagttctgctgtgataacggagagagactgcgtgtcacgttcgcgctggactgctgtgatcgtgaggcactgcactgggcggtgactaccggcggcttcaacagtgaaacagtacaggacgtcatgctgggagcggtggaacgccgcttcggcaacgatcttccgtcgtctccagtggagtggctgacggataatggttcatgctaccgggctaatgaaacacgccagttcgcccggatgttgggacttgaaccgaagaacacggcggtgcggagtccggagagtaacggaatagtagagagcttcgtgaaaacgataaagcgtgactacatcagtatcatgcccaaaccagacgggttaacggcagcaaagaaccttgcagaggcgttcgagcattataacgaatggcatccgcatagtgcgctgggttatcgctcgccacgggaatatctgcggcagcgggcttgtaatgggttaagtgataacagatgtctggaaatatag

SEQ ID NO: 478566 - DNA, 543 bp, Shigella flexneri; identical to SEQ ID NO: 464540

SEQ ID NO: 478567 - DNA, 315 bp, Shigella flexneri; identical to SEQ ID NO: 471903

SEQ ID NO: 478568 - DNA, 657 bp, Shigella flexneri; identical to SEQ ID NO: 475713

SEQ ID NO: 478569 - DNA, 357 bp, Shigella flexneri
  misc_feature (25)..(30): n is a, c, g, or t
atgcggaaccagaagaacaggtcgnnnnnncgcaagctggaacagcaacaggctaatgcggaaccagaagaacaggtcgatccgcgcaaagccgccgtcgaagccgctattgcccgcgccaaagcacgcaagctggaacagcaacaggccaatgcggagccagaagaacaggttgatccgcgcaaagctgccgtcgaagccgctattgcccgcgccaaagcacgcaagctggaacagcaacaggctaatgcggaaccagaagaacaggtcgatccgcgcaaagccgcagttgccgcggctattgcccgcgttcaggccaaaaaagccgcccagcaaaaggttgtaaacgaggactaa

SEQ ID NO: 478570 - DNA, 267 bp, Shigella flexneri
gtgaaaccgatcgccggtcgctgtggtagcaatatcgacctggtcagccatcatgaagaggtgctggacaaaaccagcggtaaatttgccgagcagaaaaacatctatcagcaactgtggtgtttgccgaaagtggacggtaaatacattcaggtatgtaccttcaccgttggcggcaactacggtgggacgtgtttgcgcggtgatgaatcactggtcatcaaaaaagagagtgatattgaaccgttaattgtggtgaaaaagtaa

SEQ ID NO: 478571 - DNA, 543 bp, Shigella flexneri; identical to SEQ ID NO: 464540

SEQ ID NO: 478572 - DNA, 543 bp, Shigella flexneri; identical to SEQ ID NO: 478360

SEQ ID NO: 478573 - DNA, 1233 bp, Shigella flexneri; identical to SEQ ID NO: 472942

SEQ ID NO: 478574 - DNA, 375 bp, Shigella flexneri; identical to SEQ ID NO: 473653

SEQ ID NO: 478575 - DNA, 240 bp, Shigella flexneri; identical to SEQ ID NO: 473651

SEQ ID NO: 478576 - DNA, 2451 bp, Shigella flexneri
atggttacgttttggggaaattatgaggggatctctcagtacgcggcctgcgctgcccttttgcgcgaacaaggactggcagtcgttccgcgcctcgcgatatatgcccataaagaagattgcggcagtctgctggtacaaattaaccatccgcaagtcatccgcaccttgctgttagttgctgataaaaacaaacccagcctgcaacgtgtggctaaatacagtaaaaacttcccccatgcgacactcgccgcactggcagaactgctggcgttaaaagaaccaccagcccgcccaggttatccaatcatcgaagacaaaaagctgcctgcacagcaaaaagctcgagatgaatactggcgtacgctgttacaaacgctgatggcatcgcagccacaactggcagcagaagtgatgccgtggttaagtactcaagcccgggcagtgctgaatagttatttatcggcaccgcccaaaccagttattgatagcaccgataacagccaaatgcctgaaatcctcgtttcaccaccatggcgtgggagaaagaaaaagacttccatacgtcacttttcgctgcctgatcttacgcttgcaccgcaaacgtacaggtcgccgaataaacactggacgccggaacagcaaactgcaattgaccattttagcgccatgtcttttgacgaacgtcttgctacgagaggagcgtatatcttcttgcgggaattaggttttgacgttcatagcctggaatttaataagcgtcttcttaatggacagttggatgcctttgatgctcagcaactgcaagaatacacatcaataggactattgcgtacttatcacgcgcatcaggccaaatctaaacagtaccgggaagacgccaccaatgcattactggcacaagatagcattgcgttgatgggagggtggcgaacttttcagcacggattttactatggtaatgaacagcgttgggggatttggaatctgtaccttatcgcgcagatgccgcgcgaaatggcggtatcgtgctggcaacaaattgtcgaggctgattttcattacaccggggtggaatatttgttaagtgtgctgggtaccgatgctttgcctggattaaacaccgcctttgcccgacatccaaaagagatatttccgctgctgattcatttcggcgcaacagaactggccctgcccattgcccgcgtctggcacctttttgcgggccagcgtaatctggctcgccagtggattttacaatggccggaacatacggctactgcacttatccctcttgtcttcaccaaatctagcgataaaagcgaagctgcattacttgccctgcgtttactttacgaacatgggcatggcgaatggctacaaactgtagccaatcgttggcagcgtacagatctatggcctgccctggaacaattacttaaacagagtccaatagagatttacccggcacgcattccaaaagcccctgatttctggcatccgcaaatgtggtccaggccgcgccttatcactaataatcaacctgttaccgatgacgctctggaaattatcggcgaaatgctgcgctttacccaggggggacgtttttatagcgggctggaacaactgaaaacgttctgccagccacaaacgctggcagcttttgcctgggatctcttcactgcgtggcaacaagctggtgcccccgcaaaagacaactgggcatttctggcgttaagtctctttggtgacgaaagcacggcacgggatctaacgacacatatcctcgcctggccacaagaaggcaaatctgcccgtgcggtcagtggcatgaacatccttaccctgatgaataatgatatggcgctgatgcagctgcatcatatatcgcaacgggcgaaatcccgccccttacgtgataacgcggcggaatttcttcaggtagtcgcagaaaatcgcgggctaagccaggaagagttagcggacagattagtcccaacactgggccttaatgatccgcaggcgttgagttttgattttggtccccggcagtttaccgttcgcttcgatgaaaacctcaacccggttatctttgatcagcaaaacgttcgccagaaaagtgttccccggttgcgcgccgatgacgatcaactgaaagcgcccgaggcactggcccgactaaaagggttaaaaaaagatgctactcaggtgagcaaaaacctgctcccgcgtcttgaagctgccctacgtaccacccgacgctggtcgctggcagattttcattctctgtttgttaatcatccctttacccgtctggttacccagcgattaatatggggggttatccggcaaatgaaccgcgtcgtttactcaacgcctttcgtgtggccgcagagggggagttctgcaatgcgcaagatgagccaattgacctgcctgcggacgctctga

SEQ ID NO: 478577 - DNA, 543 bp, Shigella flexneri
gtgaaagaaagcaatcagcgatggtgctctgacgggttcgagttctgctgtgataacggagagagactgcgtgtcacgttcgcgctggactgctgtgatcgtgaggcactgcactgggcggtgactaccggcggcttcaacagtgaaacagtacaggacgtcatgctgggagcagtggaacgccgcttcggcaacgatcttccgtcgtctccagtggagtggctgacggataatggttcatgctaccgggctaatgaaacacgccagttcgcccggatgttgggacttgaaccgaagaacacggcggtgcggagtccggagagtaacggaatagcagagagcttcgtgaaaacgataaagcgtgactacatcagtatcatgcccaaaccagacgggttaacggcagcaaagaaccttgcagaggcgttcgagcattataacgaatggcatccgcatagtgcgctgggttatcgctcgccacgggaatatctgcggcagcgggcttgtaatgggttaagtgataacagatgtctggaaatatag

SEQ ID NO: 478578 - DNA, 576 bp, Shigella flexneri; identical to SEQ ID NO: 473829

SEQ ID NO: 478579 - DNA, 390 bp, Shigella flexneri; identical to SEQ ID NO: 473932

SEQ ID NO: 478580 - DNA, 1524 bp, Shigella flexneri
atgaaacccactttatatactgctactggtgagtgcgttacgccaggccgtgaactgggcaaaggcggtgaaggcgcggtttatgatatcaatgagtttgtcgatagcgtcgccaagatttatcacacgccgccacccgccttaaaacaggacaaacttgcctttatggctgcgacagctgacgcgcaattgttgaattatgtcgcctggccgcaggcaacgcttcacggtggacgaggcggaaaagttatcggttttatgatgccaaaagtttctggtaaagaaccgattcatatgatctatagcccggcacatcgtcgtcaacgttaccctcattgtgcgtgggattttctactctatgttgcgcgcaatattgcttcatcttttgctacggttcacgagcacgggcatgtcgtgggtgacgtaaaccagaacagttttatggtaggtcgcgacagcaaagtggtgttgattgatagcgactcctttcagattaacgccaatggcacactgcatttatgcgaagtcggcgtgtcgcattttacgccgccagagctacaaaccttgtcgtcatttgtcggctttgaacgcacagaaaatcacggtaattttggccttgcgttgctgatttttcacgtcttgtttggtggccggcatccttattctggtgtgccgcttatctctgatgcgggtaatgcgctggagacggatattacccatttccgttatgcctacgcgtcagataatcagcgacgtggtttaaaaccgccgccacgatcgattccgctatcgatgttaccgagtgatgttgaagccatgtttcagcaggcattcacggaaagtggcgtggcaaccgggcgtccgacggctaaagcgtgggtagcggcacttgattctctgcgccaacagttaaagaaatgtcccgtttcggcaatgcatgtttatcccgctcatttgaccgactgcccgtggtgtacgctggataatcaaggcgttatctattttattgatctcggcgaagaggtcattaccaccggcggggattttgtgctggcaaaagtctgggcgatggtgatggcgtcagtagcaccgccagcattgcaactgccattacccgatcatttccaaccgactggcaggccgcttcctttaggcctgttacggcgcgaatacatcattctgcttgagatcgcactgtcagcattatcgctgctgctttgcggccttcaggcagaaccgcgttatattattttggttcctgtgctggcggctatctggattattggcagtctgacaagcaaagcgtacaaagcagaagttcagcaacgccgtgaggcatttaatcgtgcgaaaatggactatgaccatttagtccgccagatccagcaggtaggcggcctggaaggttttatcgccaaacggacgatgctcgaaaaaatgaaggacgaaattctcgggttaccggaagaagagaaactcgctctggcagcacttcatgacactgcaagggaacggcagaagtag

SEQ ID NO: 478581 - DNA, 294 bp, Shigella flexneri
atgcctatttggtccgcctcatgggtgctacccgctggatttaagggtgctcgtgatgcccgttacgccatgtgggtttctatgttgagcatgtggggttgccgggttgtagtcggttatgtgcagggaatcatgcttggctggggtgtggttggtgtctggatgggaatgtttgccgactgggctgtgcgggccgtgctgttttactggcgaatggttactggacgttggctgtggaaataccctcgatccgagccgcaaaagtgtgaaaaaaagccagttgtgtcggaataa

SEQ ID NO: 478582 - DNA, 465 bp, Shigella flexneri; identical to SEQ ID NO: 33535

SEQ ID NO: 478583 - DNA, 618 bp, Shigella flexneri
atgctaagaattaaacattttgacgctaacgaaaaactacagattttatatgcaaagcaactctgcgagcgtttttcgattcagacattcaaaaataaatttacaggcagtgaaagtttagtcactcttacttccgtgtgtggggattgggtaattcgtattgatacattatcttttttgaaaaaaaaatacgaggtattttcaggattttctacacaagaatctttactgcatttatcaaaatgtgtctttatagagtcgtcatctgtattttcgattccagaactgtctgataagattactttccggatcacgaatgaaatccagtatgcaactactgggagtcatttatgctgtttttcctcttctttaggtattatttattttgacaagatgccggtattacgtaatcaagtttctcttgactcattgcatcatcttttagagttttgcttaggttcatctaatgtaaggctggctactttaaaaagaattcgcactggtgatataatcatagttcagaaactttataatttattattgtgtaatcaagttattattggtcagaacacacagaagtttctttggcattattcaattatgatgatatcaatgtaa

SEQ ID NO: 478584 - DNA, 543 bp, Shigella flexneri
gtgaaagaaagcaatcagcgatggtgctctgacgggttcgagttctgctgtgataacggagagagactgcgtgtcacgttcgcgctggactgctgtgatcgtgaggtactgcactgggcggtgactaccggcggcttcaacagtgaaacagtacaggacgtcatgctgggagcggtggaacgccgcttcggcaacgatcttccgtcgtctccagtggagtggctgacggataatggttcatgctaccgggctaatgaaacacgccagttcgcccggatgttgggacttgaaccgaagaacacggcggtgcggagtccggagagtaacggaatagcagagagcttcgtgaaaacgataaagcgtgactacatcagtatcatgcccaaaccagacgggttaacggcagcaaagaaccttgcagaggcgttcgagcattataacgaatggcatccgcatagtgcgctgggttatcgctcgccacgggaatatctgcggcagcgggcttgtaatgggttaagtgataacagatgtctggaaatatag

SEQ ID NO: 478585 - DNA, 543 bp, Shigella flexneri
gtgaaagaaagcaatcagcgatggtgctctgacgggttcgagttctgctgtgataacggagagagactgcgtgtcacgttcgcgctggactgctgtgatcgtgaggcactgcactgggcggggactaccggcggcttcaacagtgaaacagtacaggacgtcatgctgggagcggtggaacgccgcttcggcaacgatcttccgtcgtctccagtggagtggctgacggataatggttcatgctaccgggctaatgaaacacgccagttcgcccggatgttgggacttgaaccgaagaacacggcggtgcggagtccggagagtaacggaatagcagagagcttcgtgaaaacgataaagcgtgactacatcagtatcatgcccaaaccagacgggttaacggcagcaaagaaccttgcagaggcgttcgagcattataacgaatggcatccgcatagtgcgctgggttatcgctcgccacgggaatatctgcggcagcgggcttgtaatgggttaagtgataacagatgtctggaaatatag

SEQ ID NO: 478586 - DNA, 543 bp, Shigella flexneri
gtgaaagaaagcaatcagcgatggtgctctgacgggttcgagttctgctgtgataacggagagagactgcgtgtcacgttcgcgctggactgctgtgatcgtgaggcactgcactgggcggtgactaccggcggcttcaacagtgaaacagtacaggacgtcatgctgggagcggtggaacgccgcttcggcaacgatcttccgtcgtctccagtggagtggctgacggataatggttcatgctaccgggctaatgaaacacgccagttcgcccggatgttgggacttgaaccgaagaacacggcggtgcgtagtccggagagtaacggaatagcagagagcttcgtgaaaacgataaagcgtgactacatcagtatcatgcccaaaccagacgggttaacggcagcaaagaaccttgcagaggcgttcgagcattataacgaatggcatccgcatagtgcgctgggttatcgctcgccacgggaatatctgcggcagcgggcttgtaataggttaagtgataacagatgtctggaaatatag

SEQ ID NO: 478587 - DNA, 1812 bp, Shigella flexneri; identical to SEQ ID NO: 474377

SEQ ID NO: 478588 - DNA, 543 bp, Shigella flexneri; identical to SEQ ID NO: 464540

SEQ ID NO: 478589 - DNA, 543 bp, Shigella flexneri; identical to SEQ ID NO: 464540

SEQ ID NO: 478590 - DNA, 543 bp, Shigella flexneri; identical to SEQ ID NO: 478372

SEQ ID NO: 478591 - DNA, 1020 bp, Shigella flexneri; identical to SEQ ID NO: 6124

SEQ ID NO: 478592 - DNA, 510 bp, Shigella flexneri
atggtcgggaagcgctgtcatgagcgcactgaccagcgtatccagttcccagccggtgcgggccgatacggccacaaccggatgtacaggccggaacagacggaataccgcctccgttttttcgcgaatgttctgtgcctgtgcgggagagggctgaatgccggccatatcccattcatggcagggctccgttttgtcggcctgtgtcaccacaaacagcacctgctgatgtccgcactgcaggatgtgtcgccagaaatactcatccacagacagggcccggtcatcggctttaatcagccacagcaccaggtccagttcaggcagaatgtcacggtacagggcttcatactctgcatccctgtcccggctctcgcccaccccgggcaggttagtgataaccatgctgtgaccgtgaccactcagacggaagcgctgcacttcccgggtgccggcgtgaacatcactgaccggggtgacctccccctgaaacagtgcattacagagtga

SEQ ID NO: 478593 - DNA, 543 bp, Shigella flexneri; identical to SEQ ID NO: 464540

SEQ ID NO: 478594 - DNA, 543 bp, Shigella flexneri
gtgaaagaaagcaatcagcgatggtgctctgacgggttcgagttctgctgtgataacggagagagactgcgtgtcacgttcgcgctggactgctgtgatcgtgaggcactgcactgggcggtgactaccggcggcttcaacagtgaaacagtacaggatgtcatgctgggagcggtggaacgccgcttcggcaacgatcttccgtcgtctccagtggagtggctgacggataatggttcatgctaccgggctaatgaaacacgccagttcgcccggatgttgggacttgaaccgaagaacacggcggtgcggagtccggagagtaacggaatagcagagagcttcgtgaaaacgataaagcgtgactacatcagtatcatgcccaaaccagacgggttaacggcagcaaagaaccttgcagaggcgttcgagcattataacgaatggcatccgcatagtgcgctgggttatcgctcgccacgggaatatctgcggcagcgggcttgtaatgggttaagtgataacagatgtctggaaatatag

SEQ ID NO: 478595 - DNA, 543 bp, Shigella flexneri; identical to SEQ ID NO: 464540

SEQ ID NO: 478596 - DNA, 339 bp, Shigella flexneri
gtgaaagaaagcaatcagcgatggtgctctgacgggttcgagttctgctgtgataacggagagagactgcgtgtcacgttcgcgctggactgctgtgatcgtgaggcactgcactgggcggtgactaccggcggcttcaacagtgaaacagtacaggacgtcatgctgggagcggtggaacgccgcttcggcaacgatcttccgtcgtctccagtggagtggctgacggataatggttcatgctaccgggctaatgaaacacgccagttcgcccggatgttgggacttgaaccgaagaacacggcggtgcggagtccggagagtaacggaatagcatag

SEQ ID NO: 478597 - DNA, 543 bp, Shigella flexneri
gtgaaagaaagcaatcagcgatggtgctctgacgggttcgagttctgctgtgataacggagagagactgcgtgtcacgttcgcgctggactgctgtgatcgtgaggcactgcactgggcggtcactacgggcggcttcaacagtgaaacagtacaggacgtcatgctgggagcggtggaacgccgcttcggcaacgatcttccgtcgtctccagtggagtggctgacggataatggttcatgctaccgggctaatgaaacacgccagttcgcccggatgttgggacttgaaccgaagaacacggcggtgcggagtccggagagtaacggaatagcagagagcttcgtgaaaacgataaagcgtgactacatcagtatcatgcccaaaccagacgggttaacggcagcaaagaaccttgcagaggcgttcgagcattataacgaatggcatccgcatagtgcgctgggttatcgctcgccacgggaatatctgcggcagcgggcttgtaatgggttaagtgataacagatgtctggaaatatag

SEQ ID NO: 478598 - DNA, 279 bp, Shigella flexneri; identical to SEQ ID NO: 127146

SEQ ID NO: 478599 - DNA, 288 bp, Shigella flexneri; identical to SEQ ID NO: 474636

SEQ ID NO: 478600 - DNA, 372 bp, Shigella flexneri; identical to SEQ ID NO: 477910

SEQ ID NO: 478601 - DNA, 267 bp, Shigella flexneri; identical to SEQ ID NO: 475819

SEQ ID NO: 478602 - DNA, 378 bp, Shigella flexneri
atgcttccatcggaaacgatgatctggcagcctgagttcacagataaaacactctccaggaaacccggggcggttcagaaagtaaatgaaacagatgctgaatacctggtgcgtaaattcgatgagcttgaagctaaatgtgcagcacaggaaaacaaagtaataccagtgtcaactgaactgccaccagcaaatgaaagtgttttgttattcgatgctaacggagaaggctggctaattggctggcgttctctctggtacacctggggacaaaaagaaaccggagaatggcagtggacatttcaggtcggggaccttgaaaacgtcaatatcactcactgggcagtaatgccaaaagcaccggaggctggagcataa

SEQ ID NO: 478603 - DNA, 573 bp, Shigella flexneri; identical to SEQ ID NO: 476003

SEQ ID NO: 478604 - DNA, 204 bp, Shigella flexneri; identical to SEQ ID NO: 475480

SEQ ID NO: 478605 - DNA, 222 bp, Shigella flexneri; identical to SEQ ID NO: 13320

SEQ ID NO: 478606 - DNA, 351 bp, Shigella flexneri; identical to SEQ ID NO: 464002

SEQ ID NO: 478607 - DNA, 327 bp, Shigella flexneri; identical to SEQ ID NO: 466843

SEQ ID NO: 478608 - DNA, 198 bp, Shigella flexneri; identical to SEQ ID NO: 475648

SEQ ID NO: 478609 - DNA, 240 bp, Shigella flexneri
atgaacaacaatatgtattgtgagctgtatgatgttgagtatttacttagtgaagatagtgccaactataaagtgctagaatattttattagtaatggattggttgatgtaaacaaaagatttcaaaaagcaaatagtggggacactatgcttgacaatgcaatgaaaagcaaagattcaaaaacaattgattttttattaaaaaatggagcggtatcaggcaaacgatttgggaggtga

SEQ ID NO: 478610 - DNA, 543 bp, Shigella flexneri; identical to SEQ ID NO: 464540

SEQ ID NO: 478611 - DNA, 543 bp, Shigella flexneri
gtgaaagaaagcaatcagcgatggtgctctgacgggttcgagttctgctgtgataacggagagagactgcgtgtcacgttcgcgctggactgctgtgatcgtgaggcactgcactgggcggggactaccggcggcttcaacagtgaaacagtacaggacatcatgctgggagcggtggaacgccgcttcggcaacgatcttccgtcgtctccagtggagtggctgacggataatggttcatgctaccgggctaatgaaacacgccagttcgcccggatgttgggacttgaaccgaagaacacggcggtgcggagtccggagagtaacggaatagcagagagcttcgtgaaaacgataaagcgtgactacatcagtatcatgcccaaaccagacgggttaacggcagcaaagaaccttgcagaggcgttcgagcattataacgaatggcatccgcatagtgcgctgggttatcgctcgccacgggaatatctgcggcagcgggcttgtaatgggttaagtgataacagatgtctggaaatatag

SEQ ID NO: 478612 - DNA, 489 bp, Shigella flexneri
gtgaaagaaagcaatcagcgatggtgctctgacgggttcgagttctgctgtgataacggagagagactgcgtgtcacgttcgcgctggactgctgtgatcgtgaggcactgcactgggcggtgactaccggcggcttcaacagtgaaacagtacaggacgtcatgctgggagcggtggaacgccgcttcggcaacgatcttccgtcgtctccagtggagtggctgacggataatggttcatgctaccgggctaatgaaacacgccagttcgcccggatgttgggacttgaaccgaagaacacggcggtgcggagtccggagagtaacggaatagcagagagcttcgtgaaaacggtaagcgccccatcagcgacgtcttgtgaaaattgtcctgtctggcaacaatcgcgcccatctatattgatggacacgaacgatgaattcccagacaacaaaagatattccctgcttccgttcttatttgcctga

SEQ ID NO: 478613 - DNA, 516 bp, Shigella flexneri
atggaagggtttttttttgtccgaaatcaaaatataaaattcagtgataatgtgaactatcattatcgctttaacattaatagttgtgcaaaatttcttgctttttgggactatttcagtggtgctctagtagagcatagccatgctgaaaaatgtattcatttctatcatgagaatgatcttcgggatagttgtaataccgaatcgatgcttgataagttaatgttaagattcatcttttcatctgaccagaatgtaagtaatgcactggctatgatacgaatgactgagtcatatcatttggttctttatcttctgagaactattgagaaagaaaaggaggtaagaataaagagtctgacagagcattatggtgtgtcggaggcttattttagatctttatgtagaaaagctttaggggcaaaagtcaaagaacaactgaacacttggcggttagtaaatggtttattagatgtatttttaacatcaagcatacatcacctactttatagttag

SEQ ID NO: 478614 - DNA, 240 bp, Shigella flexneri
atgaaaaacaatagatattgtaatctgtatgatgttgaatacttacttagtaaagatggtgccaactataaagtgctagaatattttatcaataatggattggttgatgtaaacaaaaaatttcaaaaagtaaatagtggggacactatgcttgacaatgcaatgaaaagcaaagattcaaaaatgattgattttttattaaaaaatggagcaatattaggcaaacgatttgagatatga

SEQ ID NO: 478615 - DNA, 366 bp, Shigella flexneri; identical to SEQ ID NO: 474684

SEQ ID NO: 478616 - DNA, 267 bp, Shigella flexneri; identical to SEQ ID NO: 462029

SEQ ID NO: 478617 - DNA, 219 bp, Shigella flexneri; identical to SEQ ID NO: 474644

SEQ ID NO: 478618 - DNA, 213 bp, Shigella flexneri; identical to SEQ ID NO: 474663

SEQ ID NO: 478619 - DNA, 558 bp, Shigella flexneri
atgaacaatgaactccccgatgatattgagctgcttaaagccatgttgcgtaagcaacagagtcggcttcgacagtatgcctgtcaggtcgcgggctatgagcaggaaattgaacggctgaaagcgcaactcgacaggttgcgtcgtatgttgttcggccagagttcagagaaaaagcgtcataagcttgaaaatcagatccgacaggcagaaaaacgactgtcggaactggaaaaccggctgaacacagccagaaatcttctggaagatgcatcgtcagtcacagattcacctgacaccagtcccccgtcagaaaacccgatcgccagtaagcctgaattcccgggacgaaaatcttcacgaaaaccgctgccggcagaacttccccgggagacacatcgccttctgcctgctgaaaccagttgcccggcctgtggaggtgttctgaaagaaatgggggaaacaatctcagagcaactggatatcattaataccgcctttaaagttatcgaaaccatacatcccaaactggcctgtagccggtgtgaggtagcctga

SEQ ID NO: 478620 - DNA, 189 bp, Shigella flexneri; identical to SEQ ID NO: 476052

SEQ ID NO: 478621 - DNA, 276 bp, Shigella flexneri
gtggcttctgtttctatcagctgtccctcctgttcagctactgacggggtggtgcgtaacggcaaaagcaccgccggacatcagcgctatctctgctctcactgccgtaaaacatggcaactgcagttcacttacaccgcttctcaacccggtacgcaccagaaaatcattgatatggccatgaatggcgttggatgccgggcaactgcccgcattatgggcgttggcctcaacacggttttacgtcacttaaaaaactcaggccgcagtcggtaa

SEQ ID NO: 478622 - DNA, 543 bp, Shigella flexneri; identical to SEQ ID NO: 478360

SEQ ID NO: 478623 - DNA, 267 bp, Shigella flexneri; identical to SEQ ID NO: 475819

SEQ ID NO: 478624 - DNA, 267 bp, Shigella flexneri; identical to SEQ ID NO: 474742

SEQ ID NO: 478625 - DNA, 288 bp, Shigella flexneri; identical to SEQ ID NO: 474636

SEQ ID NO: 478626 - DNA, 219 bp, Shigella flexneri; identical to SEQ ID NO: 474644

SEQ ID NO: 478627 - DNA, 123 bp, Shigella flexneri; identical to SEQ ID NO: 463327

SEQ ID NO: 478628 - DNA, 123 bp, Shigella flexneri; identical to SEQ ID NO: 463321

SEQ ID NO: 478629 - DNA, 210 bp, Shigella flexneri; identical to SEQ ID NO: 475853

SEQ ID NO: 478630 - DNA, 480 bp, Shigella flexneri
gtggcggacctgacgtatgttgccacacaggagggatggttgtacctcgctggcatcaaagatgtttatacgtgcgaaattgtcggctacgccatgggagagcgcatgacaaaagagctgacaggtaaagccctgtttatggcgctcaggagccagcgcccacctgccgggctaatccaccactctgatcgaggttcacagtactgcgcatacgattaccgggtcatacaggagcagtttggtctgaaaacatcaatgtcgcgtaaaggtaactgttacgacaacgctccgatggaaagcttctggggaacgctgaaaaatgagagcctgagccactatcgttttaataaccgggatgaagccatctcagtaatacgggaatacattgagattttctacaatcgtcagcgtcgtcactctcgtctggggaatatctccccggcagccttcagggaaaaatatcatcagatgactgcttaa

SEQ ID NO: 478631 - DNA, 429 bp, Shigella flexneri
atgtacgggccggaacagacggaataccgcctccgttttttcgcgaatattctgtgcctgtgcgggagaaggctgaataccggccatatcccattcatggcagggctccgttttgtcggcctgcgtcaccacaaacagcacctgctgatgtccccggtgcaggatgtgtcgccagaaatactcatccacagacagggcacggtcatcggctttaatcagccacagtaccaggtcaagttcaggcagaatgtcacggtacagggcttcatactctgcatctctgtcccggctctcgcccaccccgggcaggtcagtgataaccatgctgtgaccatggccactcagacggaaacgctgcacttcccgggtgccggcgtgaacatcactgaccggggtgacctccccctgaaacagtgcattacagagtga

SEQ ID NO: 478632 - DNA, 210 bp, Shigella flexneri; identical to SEQ ID NO: 9340

SEQ ID NO: 478633 - DNA, 210 bp, Shigella flexneri
atgacggatggctggccgctgtatgaatcacgcctgaagggaaagctgcacgttatcagcaagcgttacactcagcgcattgagcgacataatctgaagctgagacaacatctggcaaggctgggacggaagtcactgtcgttctcaaaatcggtggagctgcatgacaaggtcatcgggcattatctgaacataaaacactatcagtaa

SEQ ID NO: 478634 - DNA, 210 bp, Shigella flexneri; identical to SEQ ID NO: 475853

SEQ ID NO: 478635 - DNA, 210 bp, Shigella flexneri; identical to SEQ ID NO: 9340

SEQ ID NO: 478636 - DNA, 498 bp, Shigella flexneri; identical to SEQ ID NO: 478398

SEQ ID NO: 478637 - DNA, 474 bp, Shigella flexneri; identical to SEQ ID NO: 475593

SEQ ID NO: 478638 - DNA, 219 bp, Shigella flexneri; identical to SEQ ID NO: 473975

SEQ ID NO: 478639 - DNA, 252 bp, Shigella flexneri
gtgactgccgaagaggtgaataacgcacttaaacaagcaaccaccaataacgagtcatttggttataccgatgaagaaatagtctcttccgatatcattggcagccatttcggttcagtgtttgatgccacgcaaacggaaattaccgccgtgggcgatttacaactggtgaaaacggtcgcctggtacgataacgaatatggcttcgtcacgcagcttattcgcaccctcgaaaaattcgctaaactctga

SEQ ID NO: 478640 - DNA, 552 bp, Shigella flexneri; identical to SEQ ID NO: 478403

SEQ ID NO: 478641 - DNA, 303 bp, Shigella flexneri; identical to SEQ ID NO: 473532

SEQ ID NO: 478642 - DNA, 375 bp, Shigella flexneri; identical to SEQ ID NO: 477340

SEQ ID NO: 478643 - DNA, 378 bp, Shigella flexneri; identical to SEQ ID NO: 474621

SEQ ID NO: 478644 - DNA, 987 bp, Shigella flexneri
atgatttataaaaatgataaaacatttcgtaatcttgaaatattcggagacagcggctctggagcatacttatatgataacaaactagaaaaatgggtattagtcggaacaacccatggtattgccagcgttaatggtgaccaactgacatggataacaaaatacaatgataaactggttagtgagttaaaagatacctatagtcataaaataaatctgaatggcaataatgtaaccattaaaaacacagatataacattacaccaaaacaatgcagataccactggtactcaagaaaaaataactaaagacaaagatattgtgttcacaaatgggggaaatgttctgtttaaggataatttggattttggtagcggtggtattatctttgacgaaggccatgaatataacataaacggtcagagatttacatttaaaggagcaggaattgatatcggaaaagaaagcattgtaaactggaatgcattgtattccagtgatgatgttttacacaaaataggccccggtactctgaatgttcaaaaaaaacagggggcaaatataaagataggtgaaggaaatgttattcttaatgaagaaggaacatttaacaatatataccttgcaagcggaaatggtaaggtaatactaaataaagataattcccttggcaatgatcaatatgcggggatattttttactaaacgtggtggcacgctagatttaaatggacacaatcagacttttactagaattgccgccactgacgatggaacaacaataactaactcagatacaaagaaagaagccgttctggcaatcaataacgaagactcctacatatatcatgggaacataaatggcaatataaaactaacgcacaatattaattctcaggataagaaaactaatgcaaaattaattctggatggtagtgtcaacacaaaaaatgatgttgaagtcagtaatgccagtcttaccatgtaa

SEQ ID NO: 478645 - DNA, 957 bp, Shigella flexneri; identical to SEQ ID NO: 476538

SEQ ID NO: 478646 - DNA, 375 bp, Shigella flexneri; identical to SEQ ID NO: 477340

SEQ ID NO: 478647 - DNA, 204 bp, Shigella flexneri
atggtagtgtccgctattgccagtacacctcatattggctacgtaattaaaacagaaaataaagaaaccccattcactgtagttgatatcgacggtctatcaggaaactttaaaactcttgttgaaggtgccacaaaaatgtgcctagtttacatcggaaataatctgcccgcagaaaaaaagccgaatttctggcaactctga

SEQ ID NO: 478648 - DNA, 381 bp, Shigella flexneri
atgctgggagcggtggaacgccgcttcggcaacgatcttccgtcgtctccagtggagtggctgacggataatggttcatgctaccgggctaatgaaacacgccagttcgcccggatgttgggacttgaaccgaagaacacggcggtgcggagtccggagagtaacagaatagcagagagcttcgtgaaaacgataaagcgtgactacatcagtatcatgcccaaaccagacgggttaacggcagcaaagaaccttgcagaggcgttcgagcattataacgaatggcatccgcatagtgcgctgggttatcgctcgccacgggaatatctgcggcagcgggcttgtaatgggttaagtgataacagatgtctggaaatatag

SEQ ID NO: 478649 - DNA, 390 bp, Shigella flexneri
atgctatgtttgtctcgttttctggggattcctcagcccttcagggcacagactaaaggtaaggtggaacggatggtgcagtacacccgtaacagtttttacatcccactaatgactcgcctgcgcccgatggggagcactgtcgatgttgaaacagccaaccgccacggtctgcgctggctgcacgatgtcgctaaccaacgaaagcatgaaacaatccaggcccgtccctgtgatcgctggctcgaagagcagcagtccatgctggcactgcctccggagaaaaaagagtatgacgtgcatcctggtgaaaatctggtgagcttcgacaaccccccccagcatcatccactctccatctacgactcattctgcagaggagtggcgtga

SEQ ID NO: 478650 - DNA, 321 bp, Shigella flexneri; identical to SEQ ID NO: 477003

SEQ ID NO: 478651 - DNA, 378 bp, Shigella flexneri
atgaatacattacccgacactcacgtacgggaggcatcgggctgcccgtctcccatcaccatctggcagacactgctcacccgactgctggaccagcactatggcctcacgctgaatgacacaccgttcgctgatgaacgtgtgattgagcagcatattgaggcaggaatttcactgtgtgacgcggtgaactttctcgttgaaaaatacgcgctggtacgtaccgaccagccgggattcagcgcaggagccccgtcgcagttaatcaacagcattgatattctccgggcacgccgggcaaccggcctgatgacccgcgataactacagaacggtaaataacattacccgggggaagcatccggaagcgaaacaatga

SEQ ID NO: 478652 - DNA, 492 bp, Shigella flexneri; identical to SEQ ID NO: 463435

SEQ ID NO: 478653 - DNA, 375 bp, Shigella flexneri; identical to SEQ ID NO: 476243

SEQ ID NO: 478654 - DNA, 564 bp, Shigella flexneri; identical to SEQ ID NO: 475711

SEQ ID NO: 478655 - DNA, 381 bp, Shigella flexneri; identical to SEQ ID NO: 458903

SEQ ID NO: 478656 - DNA, 564 bp, Shigella flexneri; identical to SEQ ID NO: 476569

SEQ ID NO: 478657 - DNA, 267 bp, Shigella flexneri; identical to SEQ ID NO: 474742

SEQ ID NO: 478658 - DNA, 249 bp, Shigella flexneri; identical to SEQ ID NO: 474743

SEQ ID NO: 478659 - DNA, 381 bp, Shigella flexneri; identical to SEQ ID NO: 458903

SEQ ID NO: 478660 - DNA, 381 bp, Shigella flexneri; identical to SEQ ID NO: 458903

SEQ ID NO: 478661 - DNA, 381 bp, Shigella flexneri; identical to SEQ ID NO: 458903

SEQ ID NO: 478662 - DNA, 222 bp, Shigella flexneri; identical to SEQ ID NO: 6179

SEQ ID NO: 478663 - DNA, 303 bp, Shigella flexneri; identical to SEQ ID NO: 458125

SEQ ID NO: 478664 - DNA, 381 bp, Shigella flexneri; identical to SEQ ID NO: 458903

SEQ ID NO: 478665 - DNA, 303 bp, Shigella flexneri; identical to SEQ ID NO: 473532

SEQ ID NO: 478666 - DNA, 327 bp, Shigella flexneri; identical to SEQ ID NO: 475476

SEQ ID NO: 478667 - DNA, 186 bp, Shigella flexneri; identical to SEQ ID NO: 462789

SEQ ID NO: 478668 - DNA, 180 bp, Shigella flexneri
atgaataagccgcaactggcggaatcacagaagaccgctttgcttaccgaggcggagtctgtcatccggccgccggggtgtgcggtcaggctgaacagagaaacggatgaatcaggggaggcccgggggcgggcctccgtttttccggagtcagtccggtctgtggtttatgcgatgtga

SEQ ID NO: 478669 - DNA, 210 bp, Shigella flexneri; identical to SEQ ID NO: 477043

SEQ ID NO: 478670 - DNA, 243 bp, Shigella flexneri; identical to SEQ ID NO: 464973

SEQ ID NO: 478671 - DNA, 381 bp, Shigella flexneri; identical to SEQ ID NO: 458903

SEQ ID NO: 478672 - DNA, 510 bp, Shigella flexneri
atgcctatagtagcagtaattttgttttcttgcttaagcaattttcgctctataaaatacctaaactgcatgttttttttatttattatatttaatggcgtttcaacatccaaaaatctatttttgaatgatactctcgcaagacagaaagatatctctttagctaaagaaatatcatacacatctcaaacaaaaggcatttcccttaacggaaaatatatatatatatatggttcaaacgactcaggaaatatgctctccatgagcgcagacacttttggaaaatcttttttttggtgggatggtggcaactattttaggatggttgcatttatgaattactatggaatctgtaattgcaaaccagcaaataaagaacaaatagagaagatttatccaattgtgaagagtttaccttcctggccgaatccagattcgatagctgaaataaatggtttggtgataataaaactatcagagaaaaaagggtggcttccatttaatatttag

SEQ ID NO: 478673 - DNA, 195 bp, Shigella flexneri; identical to SEQ ID NO: 474694

SEQ ID NO: 478674 - DNA, 216 bp, Shigella flexneri; identical to SEQ ID NO: 5123

SEQ ID NO: 478675 - DNA, 327 bp, Shigella flexneri
atgctgggagcggtggaacgccgcttcggcaacgatcttccgtcgtctccagtggagtggctgacggataatggttcatgctaccgggctaatgaaacacgccagttcgcccggatgttgggacttgaaccgaagaacacggcggtgcgtagtccggagagtaacggaatagcagagagcttcgtgaaaacgataaagcgtgactacatcagtatcatgcccaaaccagacgggttaacggcagcaaagaaccttgcagaggcgttcgagcattataacgaatggcatccgcatagtgcgctgggttatcgctcaccacgggggtaa

SEQ ID NO: 478676 - DNA, 204 bp, Shigella flexneri
atgtctgaggcaaagaactcaaatcttgcaccattcaggttattagtgaaactcacaaacggtgtcggggatgagtttccgttatattatgggaataacttaattgttctcggacggacgatagaaacacttgagtttggaaacgacaatttcccagaaaatattattcctgtaacagataataaagtcacagtacaaaactaa

SEQ ID NO: 478677 - DNA, 378 bp, Shigella flexneri; identical to SEQ ID NO: 474621

SEQ ID NO: 478678 - DNA, 426 bp, Shigella flexneri
atggcgctcgggcagtatgttgcgggtatgggcttctcgaatgttgggttagggttggtgcatggtatggcgcatccactgggcgcgttttataacactccacacggtgttgcgaacgccatcctgttaccgcatgtcatgcgctataacgctgactttaccggtgagaagtaccgcgatatcgcgcgcgttatgggcgtgaaagtggaaggtatgagcctggaaggggcgcgtaatgccgctgttgaagcggtgtttgccctcaaccgtgatgtcggtattccgccacatttgcgtgatgttggtgtacgcaaggaagacatttcggcactggctcaggcggcactggatgatgtttgtaccggtggcaacccgcgtgaagcaacgcttgaggatattgtagagctttaccataccgcctggtaa

SEQ ID NO: 478679 - DNA, 210 bp, Shigella flexneri
atgacggatggctgtccgctgtatgaatcacgcctgaagggaaagctgcacgttatcagcaagcgttacactcagcgcattgaacgacataatctgaatctgagacaacatctggcaaggctgggacggaagtcactgtcgttctcaaaatcggtggagctgcatgacaaggtcatcgggcattatctgaacataaaacactatcagtaa

SEQ ID NO: 478680 - DNA, 303 bp, Shigella flexneri; identical to SEQ ID NO: 473532

SEQ ID NO: 478681 - DNA, 330 bp, Shigella flexneri; identical to SEQ ID NO: 476379

SEQ ID NO: 478682 - DNA, 210 bp, Shigella flexneri; identical to SEQ ID NO: 475253

SEQ ID NO: 478683 - DNA, 549 bp, Shigella flexneri
atgcagaaacgtggctgggatgtcaaagaaagcgcagtgatggcgattaccgccaacgaactggataccgcccgccgccgtacaacgggttctatggacgcactgaaagctgcaggattcccggaaaaacaaatttatcaggtacctaccaaatctaacgacatcccgggggcatttgacgctgccaactcaatgctggttcaacatccggaagttaaacattggctgatcgtcggtatgaacgacagcaccgtacttggcggcgtacgtgcaaccgaaggtcagggctttaaagcagccgatatcatcggtattggtattaacggtgtggatgcagtaagcgaactgtctaaagcacaggcaaccggcttctacggttccctgctgccaagcccggacgtacatggctataaatccagcgaaatgctttacaactgggtagcaaaagacgttgaaacgccaaaatttaccgaagttacagacgtggtactgatcacgcgtgacaactttaaagaagaactggagaaaaaaggtttaggcggtaagtaa

SEQ ID NO: 478684 - DNA, 213 bp, Shigella flexneri; identical to SEQ ID NO: 462242

SEQ ID NO: 478685 - DNA, 210 bp, Shigella flexneri; identical to SEQ ID NO: 475253

SEQ ID NO: 478686 - DNA, 153 bp, Shigella flexneri; identical to SEQ ID NO: 476447

SEQ ID NO: 478687 - DNA, 210 bp, Shigella flexneri; identical to SEQ ID NO: 476448

SEQ ID NO: 478688 - DNA, 3123 bp, Shigella flexneri; identical to SEQ ID NO: 476488

SEQ ID NO: 478689 - DNA, 1596 bp, Shigella flexneri; identical to SEQ ID NO: 473547

SEQ ID NO: 478690 - DNA, 507 bp, Shigella flexneri; identical to SEQ ID NO: 473550

SEQ ID NO: 478691 - DNA, 1071 bp, Shigella flexneri; identical to SEQ ID NO: 476467

SEQ ID NO: 478692 - DNA, 3009 bp, Shigella flexneri
ttgcagcaggagtggcgtcaatatctgtatgactcagagaggctactgaagagcgttgccggcgactggattgaaaaacctgagcaatatgaactcgctgagcacggttatattgttaaaacggctcaatctggcggtgccagttcccatatcctttctctttatgatcacctgcttgtttgcaataaggatgtgccgctcttcaatcgcttcgcctcgcgagaggttcatgctgcagagtctttgctggccccaggagcaaaattcagcgacaggcttggacactccggagataagtttccgctggcaaaggctcagcgcgatgccttaagccattttctggatgcaagacatggcgatatccttgctgttaatggccctccgggaaccggaaaaaccacgctggtgctttctatcatcgccacgcagtgggccagagcggctctcgaaaaatctgagcctccggttattatcgcgacttcaacgaataaccaggctgtaacgaacattattgaggcattcgggaaagacttttcgcaaggttcaggtgcgatggccgggcgatggttgccagagctgaaaagcttcggtgcttattttccctcaagcagtcgtaaagctgaggcagccaaaaaatatcaaactgaagatttcttcaaccaggttgagtcaaaagagtatgtagaggatgcactgctgttttatctggaaaaggctaaggcagcctttcctggaaaagagtgttcatcccctgaaaaggtcattgaactcttgcatggtcagttggcagcaaaatctgagcaactgataagactgaacgcaacatggcaaacgttaagccagattcgggctgcgcgtgagcttattgctaatgatattgagcaatatctcgataatttaaataaattactttccggacaagaacaaaaagtcactctactgaagagtgctaaaacggaatggaaaaaatatcgcgccggtgaatcactgatctattcattattttcctggctcccggcggttcgcaataagcgacagtaccaaatacagctgtttctcgaagataaattaggcgcgctgattgcaggaaatcagtggtctgatcctgaaactatcgaacgtaatattgatgggctgctcaattccgctgagcgcgagcaaacaacataccggcagcagattgactccgcccatgaaatcgttcttaaagaacagcaggcggttcaggagtggcagaggctggcatttgatttagggtatgagggcgacgaggaactgagcttctcacaggccgatgaactggctgatacgcagattcgcttccctgcatttttactgacgactcactactgggaaggtcgttggctgatggatatggccagcattgatgatctgcaggatgagaagaagaaaaaaggtgctaaaggggtaaccgcccgttggcaacgtcgaatgaaactcacgccatgtgtggtgatgacatgctatatgctgcccggtaatatgcagataagtgagcacaaaggacaacgtaaattcgagaaaagttatttgtatgattttgccgatttactcattgtcgatgaagccgggcaggtgcttcctgaagtggctgctgcctcgtttgcattagctaagaaggcattagtgattggcgatacggagcagatcccgccaatatggagtattgctcctgcgattgatgtcggtaacatgctggcggaaaaaattctgtctggcagtacgcaagaagagattaccgagaaatatacggcaatcgcagaccttggtaaaagtgccgcatctggcagcgttatgaaaatagcgcagtttgcttcgcgctatcaatatgatcccgaactggctcgtggtatgtacctatatgaacaccgccggtgctacgacaatattattggatactgtaatacgctctgctatcacggtaagttgttgcctaaaagagggcgtgaagagagcaatttaatgcccgcaatggggtatctccatattgatggtaaaggagagctggcaagtagtggaagtcgatataatttgcttgaggctgaaacgatagcggtctggttggcagagaaccagcaaaatattgaagcgcattacggtaaatcgcttcatgaagttgtcggtattgtgacgccttttagcgctcaggtatccactatcaaacaggtgctgggcaaacaagatatcagtacaggcacgaatgaaaagtcgctcacagtgggcaccgtgcactctcttcagggagcggaaagagcgattgtgatattctcgccagtctattcaaaacatgaagacggcgggtttattgatagcgataacagcatgctgaatgttgcagtctcccgtgcgaaggacagttttctggtcttcggcgatatggacctgtttgaggtccagccagcctcatcgccacggggattactggcaaaatacctctttgagtcagagaagaatgcgctctcttttgattataaagagcgtaaggatttaaaaaccgccgggaccaaaatctacacacttcatggtgtggagcaacatgataatttcctgaatcagacatttgaaaataccagtaaacacatcacgataatttctccatggctgacctggcaaaggctggagcaaaccggttttcttgattccatgattgcggcgtgttcacgtggaattaacgtcacgatagtcactgacagaagctacaacactgaacataatgattttgagaagcgaaaagagaagcagcagaactttaaagcggcgctggagaaactgaatgcgctgggtattgctacaaagctggtaaaccgtgttcatagcaaaattgttattggtgatgatggtttgctgtgtgtgggatcgttcaactggtttagtgcgacacgggaagcgcgatatgaacgatacgatacatcaatggtttattgcggtgataacctgaagggtgagattgaggctatttataatagtcttgagaggcgtcaggtttag

SEQ ID NO: 478693 - DNA, 1035 bp, Shigella flexneri; identical to SEQ ID NO: 475372

SEQ ID NO: 478694 - DNA, 525 bp, Shigella flexneri
gtgagccacattgcatctgataacgtactgggcggcaaaatcgccggtgattacatcgcgaagaaagcgggtgaaggtgccaaagttatcgagctgcaaggcattgccggtacatccgcagcccgtgaacgtggcgaaggcttccagctggccgttgctgctcacaagtttaatgttcttgccagccagccagcagattttgatcgcaccaaaggtttgaacgtaatgcagaacctgttgaccgctcatccggatgttcaggctgtattcgcgcagaatgatgaaatggcgctgggcgcgctgcgcgcactgcaaactgccggtaaatcggatgtgatggtcgtcggatttgacggtacaccggatggcgaaaaagcggtgaatgatggcaaactagcagcgactatcgctcagctacccgatcagattggcgcgaaaggcgttgaaaccgcagataaagtgctgaaaggcgagaaagttcaggctaagtatccggttgatctgaaactggttgttaagcagtag

SEQ ID NO: 478695 - DNA, 498 bp, Shigella flexneri; identical to SEQ ID NO: 16552

SEQ ID NO: 478696 - DNA, 372 bp, Shigella flexneri; identical to SEQ ID NO: 16551

SEQ ID NO: 478697 - DNA, 378 bp, Shigella flexneri; identical to SEQ ID NO: 16550

SEQ ID NO: 478698 - DNA, 126 bp, Shigella flexneri; identical to SEQ ID NO: 16549

SEQ ID NO: 478699 - DNA, 1617 bp, Shigella flexneri
gtggttaggctagctacatttaatgacaatgtgcaggttgtacatattggtcatttattccgtaactcgggtcataaggagtggcgtatttttgtttggtttaatccaatgcaagaacggaaatggactcgatttactcatttgcctttattaagtcgagctaaggtggttaacagtacaacaaagcaaataaataaggcggatcgtgtgattgagtttgaagcatcggatcttcaacgagccaaaataatcgattttcctaatctctcgtcctttgcttccgtacgcaacaaggatggagcgcagagttcatttatttacgaagctgaaacaccatatagcaagactcgttatcacatcccacagttagagctagctcggtcattatttttaattaactcctatttctgtcgaagctgtttgagcagtaccgctttacagcaagagttcgacgttcagtatgaggttgagcgagatcatttagagataaggatcttacccagttcatcgtttcctaaaggggcgttagagctgtcggccgtagtgcagcttttggtttggttgttttcggatcaagatgttatggattcgtatgaaagtatttttaggcactatcaacaaaatagagaaattaagaacggcgttgaaagctggtgctttagctttgaccctccgcccatgcagggttggaaattacatgtaaaaggacgttcttctaacgaggataaggattatttagttgaggaaatagtaggtttagaaatcaacgctatgcttcctagcacaacagctattagccatgcctcttttcaggaaaaggaggcaggtgatggtagtacgcagcacatagcggtttcaacagagtcagttgttgatgatgagcatctacagttggacgatgaggaaacagccaatatagacacagacacacgagtcatagaggctgagccgacatggataagttttagtagacctagtcgaattgaaaaatctcgcagggcaagaaaaagtagccaaactattttagaaaaagaagaagcaacaacaagtgaaaatagtaatttggttagtactgatgagccacacttaggtggtgtcctagcagcggcagatgtgggtgggaagcaggatgcaaccaattacaactctatttttgctaatcgatttgctgcttttgatgagctactttcaattctaaaaactaaatttgcatgtcgggtgctttttgaagaaaccttggttttgccaaaagttgggcgtagccgattacatctgtgtaaagatggctcaccaagagtgattaaagccgttggggtgcaacgtaatggcagtgaatttgtattgctagaggtggatgcatcggatggggtgaaaatgctttctaccaaagtgttgagtggcgttgatagcgaaacatggcggaatgattttgaaaagatacggcgtggagtggtgaagagctcattgaattggccaaatagtttgtttgatcaattatatggacaagacgggcatagaggggtgaatcatccaaaggggttgggggagctgcaagtatcgagagaggatatggaagggtgggctgagagagtggttagagagcaatttacgcattaa

SEQ ID NO: 478700 - DNA, 984 bp, Shigella flexneri; identical to SEQ ID NO: 31056

SEQ ID NO: 478701 - DNA, 504 bp, Shigella flexneri; identical to SEQ ID NO: 31057

SEQ ID NO: 478702 - DNA, 486 bp, Shigella flexneri
atgttttctacaaacttaatacagagtaattatggtgatttaaatattaaaagcctggctttcgactcttttaaagaaaggcttgagtctaccatggcggcactcactttctttatatcaacgggtcaatgtgactgcgatgaaatagcagagtcgaacttcaatcgtatgattgcctatatgtctaacattaactatgatgcctcaaagctagaagcgccagcacttagttttgatacgtatctgcaggacaatgttaaatatagagtgataattaataatctttatggcagtgagtttcggataagagatattaatgagaattttgttgggatggattttacctgtgaattccgacccgaaaaaatgacgaatttgatcaatataaaaaataggttggttattcattatttaaggactatatactatgaaaaaaattatatacatcctgccgggagcatttttgctgcgattcaaaaaaaatga

SEQ ID NO: 478703 - DNA, 381 bp, Shigella flexneri
atgctgggagcggtggaatgccgcttcggcaacgatcttccgtcgtctccagtggagtggctgacggataatggttcatgctaccgggctaatgaaacacgccagttcgcccggatgttgggacttgaaccgaagaacacggcggtgcgtagtccggagagtaacggaatagcagagagcttcgtgaaaacgataaagcgtgactacatcagtatcatgcccaaaccagacgggttaacggcagcaaagaaccttgcagaggcgttcgagcattataacgaatggcatccgcatagtgcgctgggttatcgctcgccacgggaatatctgcggcagcgggcttgtaatgggttaagtgataacagatgtctggaaatatag

SEQ ID NO: 478704 - DNA, 288 bp, Shigella flexneri
atgatgacgacaaaactatcactccctgaacttgacacaactaaactgcctgacaggtgccaggcattacttgatgaaatgcatgaagaaacaggaatacgccgtgaaatacttctgtctgttatgctgacggtcatggctgcctcggtccaggatacgcatgaagttgaactttccggagggcaacgtaccagccttcagatatttatgtgtctgaggtgtactggcaatagcggacactaccatttgttcttttttaagcagccatctgatgatatttttccctga

SEQ ID NO: 478705 - DNA, 846 bp, Shigella flexneri; identical to SEQ ID NO: 474162

SEQ ID NO: 478706 - DNA, 1950 bp, Shigella flexneri
gtggcccgcgatgaactcacggcagaaaaagcggcgcaattggtcagcattgagtggcaagaattacccgttatcaccacgccagaagcggcgctgacagaagacgctgcaccaatccataacggcggcaatttactgaaacaaagcacgatgtcgacgggcaatgtccaacaaacaatcgatgccgccgactaccaggtacaggggcactatcagactcccgttattcaacattgtcacatggaaagcgtaacatcgctggcgtggatggaggatgactcgcgaattaccatcgtttccagcacccagatcccgcacattgttcgccgcgtggttggtcaggcgctggatattccctggtcatgcgtacgagtcatcaaaccgtttgtcggtggcggttttggtaataaacaggatgtactggaagagccaatggcggcattcctgaccagcaagcttggcggcattccggtgaaagtttcccttagccgtgaagagtgtttcctcgcaacccgtacccgccacgcttttactattgacgggcaaatgggcgtgaaccgcgacggaaccttgaaaggttatagtctggatgttctgtctaacaccggcgcttatgcatctcacgggcactccatcgcttctgcgggggggaataaagtcgcttacctttatcctcgttgtgcctacgcttacagttcaaagacctgctataccaacctcccctcggctggtgcgatgcgtggttatggcgcgccacaagtcgtatttgccgttgagtctatgcttgatgacgccgcgacagcgttaggtattgatcctgttgaaattcgtttacgcaacgccgcccgcgaaggagatgctaatccgctcacgggcaaacgtatttgcagcgcagggttgccggagtgtcttgaaaaaggccggaaaatctttgaatgggaaaaacgccgtgcagaatgccagaaccagcaaggcaatttgcgccgcggcgttggcgtcgcctgttttagctacacctctaacacctggcctgtcggcgtagaaatagcaggcgcgcgccttctgatgaatcaggatggaaccatcaacgtgcaaagcggcgcgacggaaatcggtcagggtgccgacaccgtcttctcgcaaatggtggcagaaaccgtgggggttccggtcagcgacgttcgcgttatttcaacacaagataccgacgttacgccgttcgatcccggcgcatttgcctcacgccagagctatgttgccgcgcctgcgctgcgcagtgcggcactattattaaaagagaaaatcatcgctcacgccgcagtcatgctacatcagtcagcgatgaatttgaccctgataaaaggccatatcgtgctggttgaacgaccggaagagccgttaatgtcgttaaaagatttggcgatggacgctttctaccaccctgaacgcggcgggcagctctctgctgaaagctccatcaaaaccaccactaacccaccggcgtttggctgtacctttgttgatctgacggtcgatattgcgctgtgcaaagtcaccatcaaccgcatcctcaacgttcatgattcagggcatattcttaatccactgctggcagaaggtcaggtacacggcggaatgggaatgggcattggctgggcgctatttgaagagatgatcatcgatgctaaaagcggcgtggtccgtaaccccaatctgctggattacaaaatgccgaccatgccggatctgccacaactggaaagcgcgttcgtcgaaatcaatgagccgcaatccgcatacggacataagtcactgggtgagccacccataattcctgttgccgctgctattcgtaacgcggtgaagatggctaccggtgttgcaatcaatacactgccgctgacgccaaaacggttatatgaagagttccatctggcaggattgatttga

SEQ ID NO: 478707 - DNA, 273 bp, Shigella flexneri; identical to SEQ ID NO: 478385

SEQ ID NO: 478708 - DNA, 435 bp, Shigella flexneri; identical to SEQ ID NO: 13800

SEQ ID NO: 478709 - DNA, 351 bp, Shigella flexneri; identical to SEQ ID NO: 13801

SEQ ID NO: 478710 - DNA, 1569 bp, Shigella flexneri
atgagtcagaaatacctcattcgcatcgctgagctggaaaggctgctctctgagcaggctgaagccctccgtcagaaagaccagcaactgagtctggttgaagagacggaggccttcctgcgctctgcactggcacgtgccgaagaaaagatcgaagaagatgaacgggaaatagagcatctgcgggctcagatagaaaaactgcgccggatgctgttcggaacccgctctgaaaaactgcgtcgtgaggttgaacaggctgaagccctgctgaaacaacgcgagcaggaaagcgatcgttacagtgggcgtgaggatgacccgctggttccccgccagttgcgacagtcgcgccatcgtcgtccgttaccggcacatctcccccgtgaaatataccgcctggagcctgaagaaagctgttgcccggagtgtggcggtgagctggattatctgggggaagtcagcgcagaacaactggaactggtgagcagcgccctgaaagtgatccgcacagaacgggtaaaaaaagcctgtacaaaatgtgactgcatcgttgaagcaccggcaccatcccgtccgatagagcgtggtatcgcgggcccggggttacttgcccgcgtgttaacgggaaaatactgcgaacacctgccactgtatcgtcagagtgaaatctttgcccgccagggtgtcgaactgagccgtgccttactctccaactgggttgatgcgtgctgccagttaatgactccgctgaatgatgccctgtacagttatgtgatgaacacccgcaaggttcacactgatgacacaccagtaaaagtactggcaccgggcaggaagaaggcgaaaacaggatatatctggacgtatgtccgggatgaccgaaatgccggttcgccagaacctccggcggtctggttcgcctactcaccggaccatcagggtaaacatccggagcaacaccttcgtcccttccggggtatcctgcaggcagatgcgttcgcaggttacgatcggctgttcagtgccgaacgtgaaggcggcgcgttgacggaagcaggatgctgggctcatgcacggcgcaaaatccacgatgtatatatcagtaccaaaagcgcgacggcggaagaagcactgaaactaatcggtgaactgtacgccattgagcacgaaatacgcgggttgccggtgtctgaacgcctggcggtcaggcaaatgcagagtaaaccgctactgacttccctatataagctgatgcaggagaaagaacacacgttatcgaaaaaatgccgtctgagagatgcgttccggtatatcaggaagcactgggttgcgttgtgcaacttctgtgatgacggtctggcggaggcggacaataacacagcggaaagagcgcttcgtgcagtctgtctcggaaagaaaaattcttatgacctttgtcaaatattaagcccaaaaagaccttacgcagctccgggagcttcgttatatcgcggattaaagaacctgaaacagtcagactgtatcttggattttacaaactcttattcggggattttagccccatga

SEQ ID NO: 478711 - DNA, 1134 bp, Shigella flexneri
atgcattcggaaaatattgcggcttacgtcgggctggatgtgcataaagaaacgttggcggttgctattgctgcacctgaacggcttggcgaagttcgttattatggtacgattaacaacgaagcccaggctgtacgtcgattatttcagaaattgcagggactttacggaaacattctttcctgctatgaggctggcccctgtggttttgggctatatcatcaactcacagcgatgaatataaaatgccaggttattgccccttcccgcataccaaaatcaccgacagacagaatcaaaaatgatcatcgggacgcaatttctctcgccaggttactgcgggctggagaacttacccctgtctggatccctgacctgactcatgaagctatgcgggatctaatcagagcccgtgcagcagctaaacgagacagcagagttgcccgacagcgaattctgagcatgctattgcgaacagacaaacattatgcaggaaagcactggacaggaaaacatcgaacctggttagctaatcaatcatttagtcagccatctcaacagattgcttttcaacactattgtcagagtctggagcagattgaagatcgcatacttcaactcgaccaggaaatatctcgcctgttacctgagtggtctctgtgcaatctggtctgccagttgcaggctcttaaaggtgttggtcagctaattgcaataactctggttgctgaactgggtgatttttcgcgattttccaatcccaaacagctcatggcttttctgggactggtgccaggtgaatattccagtggaaacagtattcgtcccagaggaataacaaaagttggaaacagcgaactgagacgtctgctttacgaagccgcctggtcttatcgtacacctgcaaaagttggggcatggcttatatattaccgaccggactctgtaacacaatattccaaagatattgcatggaaagctcaacaacgattgtgttctcgttaccgaagtctgacagcaaaagggaaaaaatcacaagtagccattacggcggtggctcgtgagttgactggatttatgtgggatattgcacttgctgcccaatcatcattcagtcagcagaagcaaaattaa

SEQ ID NO: 478712 - DNA, 207 bp, Shigella flexneri; identical to SEQ ID NO: 24440

SEQ ID NO: 478713 - DNA, 381 bp, Shigella flexneri; identical to SEQ ID NO: 458903

SEQ ID NO: 478714 - DNA, 567 bp, Shigella flexneri
atgattagtcccatcaagaatattaagaacgtatttccaataaatactgcaaatactgaatatatagtgagaaatatttatcctagagttgaacatggttactttaatgaatcaccaaacatatatgacaagaagtatatctctggtataaccagaagtatggcacaattaaaaatagaggagtttattaatgagaaatccagacgacttaattatatgaagacaatgtattctccatgtccggaagattttcagcctatttccagagccgaagccagtacaccggaaggaagctggttgacagttatatctggaaaacgtcctatggggcaattttctgtggatagtttgtaccatcctgacttacatgcattatgtgagctcccagagattagttgtaagatcttctctaaagaaaatagtgattttttgtatataattgttgtattcagaaatgattcttcccaaggagaactacgggcaaatcggtttatagaactatatgatataaaaagagagattatgcaagtgttaagagatgagtcgccagagattaaagtctattaa

SEQ ID NO: 478715 - DNA, 1425 bp, Shigella flexneri
gtgtgccacttcaatgcagacaaccctaacgcctcttatgaggagctacgggagcacctgaagaccattgtcgagtgggaacttagtgtcagccgtgatgacctgaacgacccggagtcctaccagctttacgttgaccagtacgatgacattaagtccaaccttcgggaagctgtagcgaccgagcgtctgactgtagaccagcatcgctatattaatgacgttatcggtgtgcttaaggcctgtcaggatagactcaatggcgatagctctggcctattgtcttaccttgagcctgagactggcagtctaagaccgtccgtctccctatctgtattggcggaacctgaagtccctgaacctaaagcactgaccctcgcgtctctcattgagcagtacgagcaggagaacgcccagaactggaagccagcgaccctaagcgaaaaccgagcgtcacactctacgctaatcgagatattcgactatctggatattcaggatgtcggcaaggcgacccgtgcagatatgctcagagttcgtgaagtcctccagcagctaccgaagaaccgcaagcaacgctttaagtctatgccgctgtctgacttgctgaaccgggagtctaagactgactgtctggacgtcgttaccattaacaataaatatcttatcaagatggctgctgtgtttaagtgggcggtacgcaacgacttgatagctaagaacctgaccgaaggtcttgagctgaaagtccctcagcgtaaagcctccgacgctcgtgatgcgttcagtcctgagcaggtagggcaactactggtcgcagctaaagcgtactcgcagaagacctcaggtaagccataccattattacgtcaccgctctggctgcgattacaggtgcgagacttaacgaggtggcccaacttcaggttaaagatgtcaggaccactgaggctgggaccgtttttatccatatcaacgaagacgatagcagcctgccgggtaagagtatcaagaacgcccacagtgaccgctgtgtcccgttggtagatggtgcttatggttttgtattggctgactttatgtcactcgtggaagaccgtagaaagactgagggtgataatgctatggtgttcaatggcctcaagctaatgaagaacggctacggtgagcaggttagcaagtggtttaaccgaacgttgctgcccaaagtcctcgctgaccgtagcggcttagcttttcactcgtttagacatacagttgcgacccagttaaaacaacatggggtcgagttagcgtatgctcaggcgattatgggtcatagctcagggtctataacttacgaccgttacgcgaaagaggtcgaggtggaaacgctgaaagaaaaattagcggagtcattgtcagtaaaaaaaatagacggaaagtaa

SEQ ID NO: 478716 - DNA, 1527 bp, Shigella flexneri; identical to SEQ ID NO: 16547

SEQ ID NO: 478717 - DNA, 1668 bp, Shigella flexneri; identical to SEQ ID NO: 16546

SEQ ID NO: 478718 - DNA, 792 bp, Shigella flexneri
atggatggccgccgcagtcgtcacactgatgatacggatgtgcttctccgtatacaccatgttatcggagagctgcccacgtatggttatcgtcgggtatgggcgctgcttcgcagacaggcagaacttgatggtatgcctgcgatcaatgccaaacgtgtttaccggctcatgcgccagaatgcgctgttgcttgagcgaaagcctgctgtaccgccatcgaaacgggcacatacaggcagagtggccgtgaaagaaagcaatcagcgatggtgctctgacgggttcgagttctgctgtgataacggagagagactgcgtgtcacgttcgcgctggactgctgtgatcgtgaggtactgcactgggcggtgactaccggcggcttcaacagtgaaacagtacaggacgtcatgctgggagcggtggaacgccgcttcggcaacgatcttccgtcgtctccagtggagtggctgacggataatggttcatgctaccgggctaatgaaacacgccagttcgcccggatgttgggacttgaaccgaagaacacggcggtgcggagtccggagagtaacggaatagcagagagcttcgtgaaaacgataaagcgtgactacatcagtatcatgcccaaaccagacgggttaacggcagcaaagaaccttgcagaggcgttcgagcattataacgaatggcatccgcatagtgcgctgggttatcgctcgccacgggaatatctgcggcagcgggcttgtaatgggttaagtgataacagatgtctggaaatatag

SEQ ID NO: 478719 - DNA, 378 bp, Shigella flexneri; identical to SEQ ID NO: 477315

SEQ ID NO: 478720 - DNA, 822 bp, Shigella flexneri; identical to SEQ ID NO: 16544

SEQ ID NO: 478721 - DNA, 1215 bp, Shigella flexneri; identical to SEQ ID NO: 476539

SEQ ID NO: 478722 - DNA, 216 bp, Shigella flexneri; identical to SEQ ID NO: 474400

SEQ ID NO: 478723 - DNA, 1605 bp, Shigella flexneri
atgattcagctatccagtagtcacaaacttccagcagtctactatctctaccagcgtaacggcgtctactacttccgtcttagggtcagacaatcaaacaatgatagaatgacctcaatatcattacggaccaaggatagacgcaccgctatggcttactcaaggcacataaaggcagcactcaaggcaatacacgcagacagacccaacgctacctatgaggaaatgagggaacaccttaaggacatcgctgagtgtgaactgtctatgggccgttcagatctctttgagcctgacatgagggatatctaccgggaccaatacggagaacttggtgagagccttaccgatgctctggctagtgagccgctaagcattgaccagcatcgttacatcaatgaggccctgaaggtgctaaaagcctgtatgaggcgtatcgaagcgggagacagtcagcctctgatagattacgtcgatctttttaatgatattgataggcaagataaccaagcagactctgtgtccctatctgttaatgctccagaagtaaaaccagaagttacgcctagcattaccatagcgagcctctttgaacaatacgaagcggagaactatcagaactggaagcctgcaaccttaagggaaaacaaggcgtcacacgctgcgttaatcgaaatattcgaccatctgggtctcaatgcagacgctaacagggctgacatgcttagggtccgtgatgtgctccagcagttacctaggaaccgtaagcagcgcttcaaggatgtcccacttgctgacctgttgagccgtgaagataagacagattgtctggatgtcgttaccatcaacaacaagtatcttattaagatggctgctgtctttaggtgggctgtgcgcaatgacttgattaaaaagaacatgactgagggtctggagcttaaagtccctcagcgtaaagcctcaggggcccgtaacgccttctctacggagcaggtggggcaactactggtcgcagctaaggcatactctcagaagacctctggtaagccgtatcattattatgttaccgccttggctgctatcactggggcgagactcaatgaaatagcccaactacaggtcaaagacgtcaggaccactgaggcgggaaccgtttatattcatatcaatgaagacgatagtagtctacccggtaagagcatcaagaacgctcatagtgaccgctgtgtgcctctggtcgatggggcctatggttttatattggctgactttatggcgcttgtagagacccgtagaggcgctgacggtgatgacgctatggtgttcgatggtctgcgtctcatgaagaacggttacggtgagcaggtgagtaaatggtttaatcggacgttgttgcctaaagtcctcgtagaccgtagcggcttagcgtttcactcgtttagacatacagttgcggcccagttaaaacaacatggggtcgagttggcgtatgcacaggcgatcatggggcatagttcagggtctattacgtacgaccgttatgctaaagaggtcgaggttgataggctggtcaatgtgatggctgatgtttataaggagacctag

SEQ ID NO: 478724 - DNA, 957 bp, Shigella flexneri; identical to SEQ ID NO: 476538

SEQ ID NO: 478725 - DNA, 849 bp, Shigella flexneri; identical to SEQ ID NO: 477085

SEQ ID NO: 478726 - DNA, 240 bp, Shigella flexneri; identical to SEQ ID NO: 36218

SEQ ID NO: 478727 - DNA, 327 bp, Shigella flexneri; identical to SEQ ID NO: 16555

SEQ ID NO: 478728 - DNA, 537 bp, Shigella flexneri; identical to SEQ ID NO: 16554

SEQ ID NO: 478729 - DNA, 381 bp, Shigella flexneri; identical to SEQ ID NO: 458903

SEQ ID NO: 478730 - DNA, 639 bp, Shigella flexneri; identical to SEQ ID NO: 476552

SEQ ID NO: 478731 - DNA, 483 bp, Shigella flexneri; identical to SEQ ID NO: 477014

SEQ ID NO: 478732 - DNA, 243 bp, Shigella flexneri
atggatacgcaggcccgtgatacatggtaccggtcactggagtacgataattttccggaaatcagcgaagcgaacattctgagcacatttgaacaactgcaccagaataaggatgaggtgtttgagcgaggggtgatcaacgtcttcagagggctgaactggaattacaaaaccaattgcccctgtaaatttggcagtaaaattatcgtcaacaatctggtgagatgggaccggtggggataa

SEQ ID NO: 478733 - DNA, 198 bp, Shigella flexneri; identical to SEQ ID NO: 81716

SEQ ID NO: 478734 - DNA, 378 bp, Shigella flexneri; identical to SEQ ID NO: 477037

SEQ ID NO: 478735 - DNA, 279 bp, Shigella flexneri; identical to SEQ ID NO: 127146

SEQ ID NO: 478736 - DNA, 546 bp, Shigella flexneri; identical to SEQ ID NO: 475459

SEQ ID NO: 478737 - DNA, 378 bp, Shigella flexneri
atgaaaacattatccgacacacatgtacgggaggtatctcgctgcccgtctcccgtcaccatctggcagacactgctcatccgactgctggaccagcattatggcctcacactgaatgacacaccgtttgtcgatgaacgtgtgattgagcagcatattgaggcaggcatttcactgtgtgatgcagttaattttctcgtggaaaaatacgcgctggtgcgtaccgaccagccgggattcagcacctgtccccgctctcagttaataaacagtattgatatcctccgggctcgccgggcgaccggcctgatgacccgcgacaattacagaacggtaaataacattaccctgggtaagtatccggaggcgaaacaatga

SEQ ID NO: 478738 - DNA, 222 bp, Shigella flexneri; identical to SEQ ID NO: 6179

SEQ ID NO: 478739 - DNA, 591 bp, Shigella flexneri; identical to SEQ ID NO: 477108

SEQ ID NO: 478740 - DNA, 378 bp, Shigella flexneri; identical to SEQ ID NO: 478651

SEQ ID NO: 478741 - DNA, 378 bp, Shigella flexneri
gtgtcagacacactccccgggacaacgcctcccgacgacaatcacgaccgcccctggtgggggctgccctgcaccgtgacgccctgtttcggggcccgactggtacaggagggtaaccgcctgcattaccttgcagaccgcgccggtatcagaggcaggttcagcgacgtagatgcgtaccacctggaccaggcctttccgctgctgatgaaacaactggaactcatgctcactggcggtgaactgaatccccgccatcagcataccgtcacactgtatgcgaaagggctgacctgcgaagccgacaccctcggctcctgtggttacgtttatctggctgtttatccgacaccggcagcgcccgcaaccaccgtataa

SEQ ID NO: 478742 - DNA, 222 bp, Shigella flexneri; identical to SEQ ID NO: 13320

SEQ ID NO: 478743 - DNA, 474 bp, Shigella flexneri; identical to SEQ ID NO: 52832

SEQ ID NO: 478744 - DNA, 525 bp, Shigella flexneri; identical to SEQ ID NO: 16553

SEQ ID NO: 478745 - DNA, 378 bp, Shigella flexneri; identical to SEQ ID NO: 477315

SEQ ID NO: 478746 - DNA, 189 bp, Shigella flexneri; identical to SEQ ID NO: 470416

SEQ ID NO: 478747 - DNA, 213 bp, Shigella flexneri; identical to SEQ ID NO: 462242

SEQ ID NO: 478748 - DNA, 381 bp, Shigella flexneri; identical to SEQ ID NO: 458903

SEQ ID NO: 478749 - DNA, 339 bp, Shigella flexneri; identical to SEQ ID NO: 473830

SEQ ID NO: 478750 - DNA, 195 bp, Shigella flexneri; identical to SEQ ID NO: 464447

SEQ ID NO: 478751 - DNA, 207 bp, Shigella flexneri; identical to SEQ ID NO: 476087

SEQ ID NO: 478752 - DNA, 219 bp, Shigella flexneri
atgaatgcgttattactccttgcggcactttccagccagataacctttaatacgacccagcaaggggatatgtacaccattattcctgaagttactcttactcaatcttgtctgtgcagagtacaaatattgtccctgcgcgaagtgaagtggtcaacaaaaactggccaccgagttagagtttttccagtatcgattttccgattcgtttgggggtaa

SEQ ID NO: 478753 - DNA, 207 bp, Shigella flexneri; identical to SEQ ID NO: 476087

SEQ ID NO: 478754 - DNA, 327 bp, Shigella flexneri; identical to SEQ ID NO: 475476

SEQ ID NO: 478755 - DNA, 180 bp, Shigella flexneri; identical to SEQ ID NO: 476577

SEQ ID NO: 478756 - DNA, 351 bp, Shigella flexneri; identical to SEQ ID NO: 464002

SEQ ID NO: 478757 - DNA, 183 bp, Shigella flexneri
atgcaacctcaccaaaaggcggctcagatattcggggatttcgtgttcagccaatacgagagacaaccgttttattacggcatcccctgtcggcaggctgattccaaattccagcaggaaaccgtggatctggttggttgttttcaccttatctctgatgagcgattctctgacccggtgtaa

SEQ ID NO: 478758 - DNA, 480 bp, Shigella flexneri; identical to SEQ ID NO: 464883

SEQ ID NO: 478759 - DNA, 243 bp, Shigella flexneri; identical to SEQ ID NO: 464973

SEQ ID NO: 478760 - DNA, 195 bp, Shigella flexneri; identical to SEQ ID NO: 474694

SEQ ID NO: 478761 - DNA, 513 bp, Shigella flexneri
atgtaccgcgtactcaaaaaagacgcgttaatggtgagcttctatggctggaatcgcgtcgatcgttttatgtctgcctggaaaaatgcgggattcagcgttgttggtcacctggtcttcaccaaaaactacacatcgaaggccgcatatgtgggctatcgccacgaatgtgcctacatcctggcaaaaggccgtccacgtctgccacaaaacccgctgccggacgtgctgggctggaaatattcgggcaatcgccatcacccgacggaaaagcccgttaccagcctgcaaccactgattgagagcttcacacatccgaacgcgattgtgctggacccgtttgcaggcagcggatcaacctgcgtggccgctcttcagtccggacgccggtatatcggtatcgagctgcttgagcagtatcaccgtgccggacagcaacgactggctgccgtacagcgggccatgcagcagggggccgcgaatgataactggtttgaaccggaggctgcgtaa

SEQ ID NO: 478762 - DNA, 207 bp, Shigella flexneri; identical to SEQ ID NO: 24440

SEQ ID NO: 478763 - DNA, 267 bp, Shigella flexneri; identical to SEQ ID NO: 474455

SEQ ID NO: 478764 - DNA, 156 bp, Shigella flexneri; identical to SEQ ID NO: 474739

SEQ ID NO: 478765 - DNA, 321 bp, Shigella flexneri
gtgatcccgggcagcccattcacgtttccacagtgcctgttcagcgatctgagtcagggtctccagcagttcagcagggacggtcacctggcggttttctctcacgttattgatgatctccatcgccgcaccggaagaaataccggattcagtccgctggtcttccgggatgtcctccaggcgcgccaggacagtcctgatttcatgatcggacagggaaatatccattccgtcagcgagggcctgaatctcttccggggaccagataaccagcatcagcggcgtgtctcccgaatactttgctgccagcgcccggcatag

SEQ ID NO: 478766 - DNA, 303 bp, Shigella flexneri; identical to SEQ ID NO: 473532

SEQ ID NO: 478767 - DNA, 327 bp, Shigella flexneri
atgctgggagcggtggaacgccgcttcggcaacgatcttccgtcgtctccagtggagtggctgacggataatggttcatgctaccgggctaatgaaacacgccagttcgcccggatgttgggacttgaaccgaagaacacggcggtgcgtagtccggagagtaacggaatagcagagagcttcgtgaaaacgataaagcgtgactacatcagtatcatgcccaaaccagacgggttaacggcagcaaagaaccttgcagaggcgttcgagcattataacgaatggcatccgcatagtgcgctgggttatcgctcgccacgggggtaa

SEQ ID NO: 478768 - DNA, 465 bp, Shigella flexneri; identical to SEQ ID NO: 474844

SEQ ID NO: 478769 - DNA, 177 bp, Shigella flexneri; identical to SEQ ID NO: 464563

SEQ ID NO: 478770 - DNA, 441 bp, Shigella flexneri; identical to SEQ ID NO: 478283

SEQ ID NO: 478771 - DNA, 1467 bp, Shigella flexneri; identical to SEQ ID NO: 474953

SEQ ID NO: 478772 - DNA, 129 bp, Shigella flexneri; identical to SEQ ID NO: 474954

SEQ ID NO: 478773 - DNA, 684 bp, Shigella flexneri
atgccaattcgctatctcggtattgatatcgggcaaatccagacgctggatctgattaccgcacgcaatgaagtacaggcaaaggcggtgctctatccggaatatgtccagacctttgctcgcggtggtacgcgcttctcagtggtcacaccgcaaatctcggcagctggcgttgagcatctagatactatcctccagccgtatatcaacgtcgaaccaggccgtggcaatcctcgtcgcgactttgaattagaagaggccaccattactgattcgcgttacttagatggtttaagcattattgttgaagcgccggaagccggttcgttaggcatcggtacgcctgtgctgttccgtggtctggaagtaggtacggttaccggaatgacgctggggacattgtcagatcgcgtgatgattgcgatgcgcatcagtaaacgctatcaacacctggtgcgtaacaattccgtcttctggttggcatcgggttacagtctggactttggtctgacgggcggcgtagtgaaaaccggcacctttaaccaatttatccgtggcggcatcgccttcgccacgcctccgggtacgccacttgcaccgaaagcccaggaaggcaaacacttcctgttgcaggaaagtgaaccgaaagagtggcgtgaatggggaactgcgcttcccaaataa

SEQ ID NO: 478774 - DNA, 834 bp, Shigella flexneri; identical to SEQ ID NO: 478479

SEQ ID NO: 478775 - DNA, 327 bp, Shigella flexneri
atgactaaaaatactcgtttttcccccgaagtccgtcaacgggcagtccgtatggttctggaaagtcagggcgaatatgactcacaatgggcgacaatttgttccattgctccaaagattggctgtacgccggagactctgcgtgtctgggttcgccagcatgagcgggataccgggggcggtgatggagagctcaccaccgctgaacgtcagcgtctgaaagagctggagcgtgaaaatcgtgaactgcgccgcagtaacgatatccttcgccaggcttccgcttattttgcgaaggcggagttcgaccgcctctggaaaaaatga

SEQ ID NO: 478776 - DNA, 405 bp, Shigella flexneri; identical to SEQ ID NO: 474969

SEQ ID NO: 478777 - DNA, 264 bp, Shigella flexneri
gtgaaaacgggggctgaagccatccgcgcactggccacacagctcccggcgtttcgtcagaaactgagtgacggctggtatcaggtgcgcattgccgggcgtgatgcaggtgaaaccgaattgtctgcccgtcttaatgagccgctggcaaatggtgcagtgatccacatagtaccgcgtctggtgggagctaaaagtggcggtgtgtttcaggcggtgctgggggcagctgttatggcggttgctatatggatgccggggtag

SEQ ID NO: 478778 - DNA, 729 bp, Shigella flexneri
atgataaatggggccgttaatgccgtaaaaagtaagggatttggctctgtaccgcggttctgttgtctcagggcgtgcatcagtccaccggatgctgagcaccccttcaaaccgtgtgtcgggtatgatgatgccgtaggggccagcaacggaatattcacctggcagcgcattccttacccaggccaggaaatcactcttagtgtcaaaacggataacatcttcaggcagaaaagcacacccaaagccgaatgcgccgggtatcgccagacggccttttgtccggtcgtaaatgtcgctctgtgcttccatcgtggccgcacttttcagccccagattatcccgggacttctgttgtgccttttcgcctgctgctgcgatttcagacagatggttagccgttttcagggtgccggtcagcgcagcatcaatgtcatttttggcctgttctgctgcgcgggcataacctgcggcatcctgtgcgctctgtccggctgcggctgcatttgctcctgtgcttgtcacatcttccgcagtggcctttctgtcctcagctgtgacggttgcatcctgtcgggctttctccgcaaaacgttgtgcatcatcacgggccgttgcggctgccgccacatcctgcgccgtctgctgtgcgtttccggctgcagccccggcactctgctgcgcctgcgccaccatttcctcaaagcgcttcatcacctccggacgtaa

SEQ ID NO: 478779 - DNA, 1914 bp, Shigella flexneri; identical to SEQ ID NO: 475016

SEQ ID NO: 478780 - DNA, 576 bp, Shigella flexneri; identical to SEQ ID NO: 475039

SEQ ID NO: 478781 - DNA, 285 bp, Shigella flexneri; identical to SEQ ID NO: 478493

SEQ ID NO: 478782 - DNA, 615 bp, Shigella flexneri
gtggcggcaagcctgcgccgtcagggactgagggcaaaggcctcccggaagttcagcccggtcagctaccgcgcacacggcctgcctgtgtcagaaaatctgttggagcaggatttttacgccagtggcccgaaccagaagtggccaggagacatcacgtacttacgtacagatgaaggctggctgtatctggcagtggtcattgacctgtggtcacgtgccgttattggctggtcaatgtcgccacgcatgacggcgcaactggcctgcgatgccctgcagatggcgctgtggcggcgtaagaggccccggaacgttatcgttcacacggaccgtggaggccagtactgttcagcagattatcaggcgcaactgaaacggcataatctgcgtggaagtatgagcgcaaaaggttgctgctacgataatgcctgcgtggaaagcttctttcattcgctgaaagtggaatgtatccatggagaacactttatcagccgggaaataatgcgggcaacggtgtttaattatatcgaatgtgattacaatcggtggcggcggcacagttggtgtggcggcctcagtccggaacaatttgaaaaccagaacctcgcttag

SEQ ID NO: 478783 - DNA, 162 bp, Shigella flexneri; identical to SEQ ID NO: 478496

SEQ ID NO: 478784 - DNA, 447 bp, Shigella flexneri
gtggcgttcatcattgatgtgtttgccggatgcatcgtggggtggcgggtctcatcgtccatggaaacgacattcgtgctggatgcactggagcaggcgttatgggcccgtcgaccgtccggcacggtccatcacagtgataaaggttctcagtatgtatcgctggcctacacacagcggcttaaggaagccggattactggcatcaacaggaagtacaggcgactcgtatgacaacgcgatggcggagagcatcaatggtctttacaaagcggaggtaatacaccgtaagagctggaaaaaccgtgcagaagtggaactggccacactaacgtgggtggactggtataacaatcgacgattgctggaaaggctgggccacatccctccggcagaagcagaaaaagcttattatgcttccatcggaaacgatgatctggcagcctga

SEQ ID NO: 478785 - DNA, 420 bp, Shigella flexneri; identical to SEQ ID NO: 475092

SEQ ID NO: 478786 - DNA, 738 bp, Shigella flexneri
atgattaaacaaactattgtcgcgttgcttttgagtgtgggagcgtcatcggtcttcgcggcaggaaccgtcaaggtgttcagcaatggcagcagtgaggccaaaacgctaacgggcgcagagcatttaatcgatctggtagggcaacctcgactggcaaacagctggtggcctggtgcggtgattagcgaagagctggcaacggcggcagcattgcgtcagcagcaggcgttgctgacacggctggcagagcagggcgcagattccagcaccgacgatgccgccgccattaacgccttacgccagcaaatccaggcattgaaagtgacaggcaggcaaaaaatcaatcttgatcccgatatcgtccgcgttgccgaacgcggtaacccgccgttgcagggcaactacacgctgtgggtcggaccaccgccgtccacggtcacgttgttcgggcttatcagccatcctggcaatcagccattcactccaggtcgcgacgtggcgagctatctctctgaccagagcctgctcagcggtgcggatcgcagctacgcgtgggtcgtttacccggacggacgcacgcaaaaagcgccggtggcttactggaacaagcgtcacgtagagccgatgcccggcagcattatttatgttggcctcgcagattccgtctggagtgagacgcctgatgcccttaacgccgacattcttcagactctgacgcagcggataccccaataa

SEQ ID NO: 478787 - DNA, 1284 bp, Shigella flexneri; identical to SEQ ID NO: 475110

SEQ ID NO: 478788 - DNA, 366 bp, Shigella flexneri; identical to SEQ ID NO: 462994

SEQ ID NO: 478789 - DNA, 441 bp, Shigella flexneri; identical to SEQ ID NO: 478283

SEQ ID NO: 478790 - DNA, 1854 bp, Shigella flexneri; identical to SEQ ID NO: 478500

SEQ ID NO: 478791 - DNA, 327 bp, Shigella flexneri; identical to SEQ ID NO: 478775

SEQ ID NO: 478792 - DNA, 366 bp, Shigella flexneri; identical to SEQ ID NO: 462994

SEQ ID NO: 478793 - DNA, 291 bp, Shigella flexneri
gtggtgcgaacgcatccggtgagcggtaaacaggcgctgtttgtgaatgaaggctttactacgcgaattgtcgatgtcagcgagaaagagagcgaagccttgttaggctttttattcgcccatatcactaaaccggagtttcaggtgcgttggcgctggcaaccgaatgatattgcgatttgggataaccgcgtgactcagcactatgccaatgccgattacctgccacagcggcggattatgcatcgggcgacgatccttggggataaaccgttttatcgggcggggtga

SEQ ID NO: 478794 - DNA, 366 bp, Shigella flexneri
atgattgatgtcttagggccggagaaacgcagacggcgtaccacacaggaaaagatcgcaattgttcagcagagctttgaaccggggatgacggtctccctcgttgcccgacaacatggtgtagcagccagccagttatttctctggcgtaagcaataccaggaaggaagtcttactgctgtggccgccggagaacaggttgttcctgcctctgaacttgctgccgccatgaagcagattaaagaactccagcgcctgctcggcaagaaaacgatggaaaatgaactcctcaaagaagccgttgaatatggacgggcaaaaaagtggatagcgcacgcgcccttattgcccggggatggggagtaa

SEQ ID NO: 478795 - DNA, 606 bp, Shigella flexneri; identical to SEQ ID NO: 478508

SEQ ID NO: 478796 - DNA, 228 bp, Shigella flexneri; identical to SEQ ID NO: 475144

SEQ ID NO: 478797 - DNA, 294 bp, Shigella flexneri; identical to SEQ ID NO: 25632

SEQ ID NO: 478798 - DNA, 201 bp, Shigella flexneri; identical to SEQ ID NO: 478509

SEQ ID NO: 478799 - DNA, 384 bp, Shigella flexneri; identical to SEQ ID NO: 478510

SEQ ID NO: 478800 - DNA, 372 bp, Shigella flexneri; identical to SEQ ID NO: 475842

SEQ ID NO: 478801 - DNA, 294 bp, Shigella flexneri; identical to SEQ ID NO: 25632

SEQ ID NO: 478802 - DNA, 216 bp, Shigella flexneri; identical to SEQ ID NO: 474400

SEQ ID NO: 478803 - DNA, 480 bp, Shigella flexneri
gtggcggacctgacgtatgttgccacacaggaaggatggttgtacctcgctggcatcaaagatgtttatacgtgcgaaattgtcggctacgccatgggagagcgcatgacaaaagagctgacaggtaaagccctgtttatggcgctcaggagccagcgcccacctgccgggctaatccaccactctgatcgaggttcacagtactgcgcatacgattaccgggtcatacaggagcagtttggtctgaaaacatcaatgtcgcgtaaaggtaactgttacgacaacgctccgatggaaagcttctggggaacgctgaaaaatgagagcctgagccactatcgttttaataaccgggatgaagccatctcagtaatacgggaatacattgagattttctacaatcgtcagcgtcgtcactctcgtctggggaatatctccccggcagccttcagggaaaaatatcatcagatggctgcttaa

SEQ ID NO: 478804 - DNA, 603 bp, Shigella flexneri; identical to SEQ ID NO: 475189

SEQ ID NO: 478805 - DNA, 555 bp, Shigella flexneri; identical to SEQ ID NO: 474545

SEQ ID NO: 478806 - DNA, 312 bp, Shigella flexneri
atgccatggtccccagagggagaaccagtccgtaaattcattctcttcacggcttctgaccatggcttcggcagtgcggaggtcatttgctgtcactcccgacacgccatagaaacgcatttccttcacggcagtagagagctgaagtttctctgcgagcatggtctggaaggccaggtaaacttctatctcatccacaaaatggagagttctgactttatcccgggcaatgtcctccagaatttcgaggcggaacatttccctgcccagggagagcagagcgccggtatcattatcgaaaaggccttctga

SEQ ID NO: 478807 - DNA, 294 bp, Shigella flexneri; identical to SEQ ID NO: 25632

SEQ ID NO: 478808 - DNA, 273 bp, Shigella flexneri; identical to SEQ ID NO: 474355

SEQ ID NO: 478809 - DNA, 1482 bp, Shigella flexneri
atgcgcgctgagacagcagcaaaacgggcagaggatattgctgatgtcgtatctctggaagatgcgagcacgacgaaaaaggggatagtgcagctcagcagtgcgaccaacagtgcatccgagtcactggccgcgacagcgaaagcggttaaggtggtaatggatgaaacaaacaagaaagcgcccctgaacagtccggctctgaccggaacgccaaccacacccactgcgccaaaggggactaataatactcagatcgccagtacggcttatgttatggccgcgattgctgccctcgtggactcgtcgcctgatgcactgaacacgctgaatgaactggcggcggcgctgggcaacgacccgaattttgcgaccaccatgactaacgcgcttgcgggtaagcaaccgaaagatgccactctgacggcgctggcggggcttgctactgcggcagacaggtttccgtattttacggggaatgatgtcgccagcctggcaaccctgacaaaagtcgggcgggatattcttgcgaaatcgaccgttgccgccgttatcgaatacctcggtttacaggaaacggtaaacaaggctgataacgctgtccaaaagacaggcgataccttgtccggtggacttacttttgaaaacgactcaatccttgcctggattcggaatactgactgggcgaagattggatttaaaaatgattcggatgcagacaccgattcctacatgtggtttgaaacaggtgacaacggcaatgagtatttcaaatggagacaccgcctcgctggcggccagctcaaagagctgatgaatcttaaatgggattcactaaatattctggttaatgccgtcattaatggttgccttggcattggtacgacgaatgcgttaggtggaaattcaattgctttcggggataacgataccggcctgaaacagaacggcgatggtctgctggatgtttatgcgaatggacagcatgtatttcgttttcagaatggcgtggctattgcttttaagaatattcaggccggaactgccagaaaattcacgttatccagcgccaacaactccacgaaaaatgcagcgttttatttgtggggtaatccatccaggcctgttgttgcagagcttggcgatgattcaggctggcattttttcagccagagaaacccggataacagcatagtgttcactgttaacggacaggtaattccgttaaattacggaaacttcgatgcccgctataaatatcgaacagagggggtacaggatgtacggtatggccatgaaatgtattacagccccggcagtaacaccgtttcgtggagattttgcgcaccttcgggacacgggctgtcagggatggcgatatcggataccggccgtaactcagcggataacgttgacggtgtgtattaccgaccactgcaaaaactgattaatggcacctggtataacgtagcgagtatttaa

SEQ ID NO: 478810 - DNA, 189 bp, Shigella flexneri; identical to SEQ ID NO: 463227

SEQ ID NO: 478811 - DNA, 1215 bp, Shigella flexneri; identical to SEQ ID NO: 475194

SEQ ID NO: 478812 - DNA, 639 bp, Shigella flexneri; identical to SEQ ID NO: 475208

SEQ ID NO: 478813 - DNA, 1092 bp, Shigella flexneri; identical to SEQ ID NO: 475227

SEQ ID NO: 478814 - DNA, 249 bp, Shigella flexneri
gtggaaatagacaacaacatcggtgaaaacgcgttacgatcggtggcggttggaagaaaaaattatctctttttcggctcagacaagggaggagaaagtgcggcgatcatctacagtctgctggtcacctgcaaccagaacgaagtggagccggaggactggttgcgcgaagtgatcgagaagctcaatgactggccgtcgaaccaagtgcatgaactgctgccctggaacttctcgtctgtaaaataa

SEQ ID NO: 478815 - DNA, 195 bp, Shigella flexneri; identical to SEQ ID NO: 475224

SEQ ID NO: 478816 - DNA, 327 bp, Shigella flexneri; identical to SEQ ID NO: 474582

SEQ ID NO: 478817 - DNA, 441 bp, Shigella flexneri; identical to SEQ ID NO: 478548

SEQ ID NO: 478818 - DNA, 690 bp, Shigella flexneri; identical to SEQ ID NO: 478541

SEQ ID NO: 478819 - DNA, 243 bp, Shigella flexneri
gtgtgctctggttaccactttaacgtaaaaaccgtggcagccagtctgcaccgtcaggaactgagcgcaaaagcctcccagaagttcagcccgatcagttaccgtgcacacggcctgcctgtatcagaaaatctgctgacgcaggatttttacgccagtggcccgaaccagaagtgggcgggagacatcacgtactattacagctcaccgactgcggggaaacacggggcgccgggttattga

SEQ ID NO: 478820 - DNA, 366 bp, Shigella flexneri
gtgcgtaaagtctggcatcagttgttacgggaaggtatcagagtggccagatgcactgtggcacgtctcatggcggttatggggcttgccggtgttctccggggtaaaaaggtccacactaccgtcagccggaaagccgttgccgcaggcgaccgcgtaaaccgtcatcaaggcaatgtgccgcgtactccgggtggcccgcagcggctggtatacgtggtgtcagcggcggacaaggataaacacacgtcagcagttccgtcagcactgcgacagcgttgtccgcaaggcttttacccagtccagcgttacggtgccccacgcctgacggatgaactgtgtgctctggttaccactttaacgtaa

SEQ ID NO: 478821 - DNA, 375 bp, Shigella flexneri; identical to SEQ ID NO: 475220

SEQ ID NO: 478822 - DNA, 297 bp, Shigella flexneri; identical to SEQ ID NO: 478525

SEQ ID NO: 478823 - DNA, 645 bp, Shigella flexneri
atgcatgacgccttccctaatcgtccggcatcttctatcacggttaagcaatgggttgacctgcttaccgaagaagaaaaagataatccacgccgagcaaggcaggtgctaagtcaactaagatcagcaattagttggtgcatgcggcgtcagttgatagatagttgcgcaattatgagcatccagccaagggacttcggctcccgcgctgaggtaggggatcgggtactgtcgtatcacgaactggctaagatttggcttgctattgaaagaagccgtgcgtctacgtcaaataagctccttcatcagatgcttatgctgtggggggcgaggctctcagagcttaggctggcaacaaagacagaatttgacctgctggacaacgtatggaccgtaccgaaagagcatagcaagatgggtaatgttatccgccgtccaatcttcgaacaaattaagccttttctcgaaaaggccatgacaatgtacaatgatgttcttttccctggagaagtaagcgccccatcagcgacgtcttgtgaaaattgtcctgtctggcaacaatcgcgcccatctatattgatggacacgaacgatgaattcccagacaacaaaagatattccctgcttccgttcttatttgcctga

SEQ ID NO: 478824 - DNA, 294 bp, Shigella flexneri; identical to SEQ ID NO: 25632

SEQ ID NO: 478825 - DNA, 441 bp, Shigella flexneri; identical to SEQ ID NO: 478491

SEQ ID NO: 478826 - DNA, 294 bp, Shigella flexneri; identical to SEQ ID NO: 25632

SEQ ID NO: 478827 - DNA, 327 bp, Shigella flexneri; identical to SEQ ID NO: 462700

SEQ ID NO: 478828 - DNA, 249 bp, Shigella flexneri
gtggaaatagacaacaacatcggtgaaaacgcgttacgatcggtggcggttggaagaaaaaattatctctctttcggctcagacaagggaggagaaagtgcggcgatcatctacagtctgctggtcacctgcaaacagaacgaagtggagccggaggactggttgcgcgaagtgatcgagaagctcaatgactggccgtcgaaccaagtgcatgaactgctgccctggaacttctcgtctgtaaaataa

SEQ ID NO: 478829 - DNA, 441 bp, Shigella flexneri; identical to SEQ ID NO: 478257

SEQ ID NO: 478830 - DNA, 195 bp, Shigella flexneri; identical to SEQ ID NO: 475320

SEQ ID NO: 478831 - DNA, 576 bp, Shigella flexneri
atgccggagtcgttgtcacatatcacgacggaatcacagaggagaagcctggtgctgaaagccggaggaaaatactggcatgtgtacatgtcgaaaaaaacggccggcgggaggaatacggcgcgctacctgggtcgttatctgaagaagccgccgatagcggcctcccggctggcacattacaacggaggggcgagcctgagcttccgttacctggaccacaaaacgggagaaacggcgacggaaacgctgacacagcgtgagctggtcgcgaggctgaaacagcacatcccggagaagttttttaagatggtgaggtacttcgggttccttgccagccgggtgtgtggagagaagctgccgcaggtgtaccgtgctctggggatggataaaccggaaccagtggcgaaagtgtgctatgcacaaatggtgaaacagttcctgagtcgtgacccgttcgaatgcgtgctgtgtggcggccggatggtataccgccgggccatcgcgggactgaatgtggaggggctgaagaaaaacgcgcgggatatcagtctgctgaggtatatgccggcctga

SEQ ID NO: 478832 - DNA, 354 bp, Shigella flexneri
atgccactgctgggtaagctgcgtgagcagtacgggggcggaccgctatgcagcgaactacatattgccccgtcaacgtattaccactgtcagcaacagcgacatcatccggataaacgcagtgcccgtgcgcagcgcgatgactggctgaagaaagagatacagcgcgtatacgatgaaaatcacaaggtatacggtgtaaagtctggcgtcagttgttacgggaaggtatcagagtggccagatgcactgtggcacgtctcatggcggttatgggacttgccggtgttctccggggtaaaaaggtccgtacgaccatcagccggaaagccgttgccgcaggcgaccgcgtaa

SEQ ID NO: 478833 - DNA, 303 bp, Shigella flexneri
atggaaaggttctcctggcatgtggcggataaggggttccgtatggtgaggtactacggttttttgagtccggcgaaacggcggttactggaagaagtggtgtacatcataacggagacagtgagaaaaacggcgatgcaaatcacctggagagggatatatcagaggttactgaaggttgacccgctgaagtgcgtgctgtgcgggagtcagatgcgttttacggggctgaagcggggctaccgtctggcagagcaggtcctgatgcatgagccgctggcccggatgcggtggtgcggctga

SEQ ID NO: 478834 - DNA, 123 bp, Shigella flexneri
atgattggaaatttcaaccccaaaaaaaacaaaatcgtggttagagatttctttaatatcctcagagtatgtattcttatgtgtttgtatattttcagactgaattttatcaaaggatattaa

SEQ ID NO: 478835 - DNA, 189 bp, Shigella flexneri; identical to SEQ ID NO: 469030

SEQ ID NO: 478836 - DNA, 234 bp, Shigella flexneri; identical to SEQ ID NO: 475305

SEQ ID NO: 478837 - DNA, 369 bp, Shigella flexneri; identical to SEQ ID NO: 475309

SEQ ID NO: 478838 - DNA, 366 bp, Shigella flexneri; identical to SEQ ID NO: 462994

SEQ ID NO: 478839 - DNA, 189 bp, Shigella flexneri; identical to SEQ ID NO: 463227

SEQ ID NO: 478840 - DNA, 189 bp, Shigella flexneri; identical to SEQ ID NO: 463227

SEQ ID NO: 478841 - DNA, 279 bp, Shigella flexneri
atgacggtctcccttgttgcccggcaacacggtgtggcagccagccagttatttctctggcgcaagcaataccaggagggaagtcttactgctgtggccgcaggagaacaggtcgttcctgcctctgaacttgctgctgccatgaagcagattaaagaactccagcgcctgctcggcaaaaaaacgatggaaaatgaactccttaaagaagccgttgaatatgggcgtgcaaaaaagtggatagcgcacgcgcccttattgcccggggatggggagtaa

SEQ ID NO: 478842 - DNA, 195 bp, Shigella flexneri; identical to SEQ ID NO: 464447

SEQ ID NO: 478843 - DNA, 627 bp, Shigella flexneri
atgtggcgttaccggataacgcggctactgtcccggaaatacccggagctggtaataccggatgaactggcagtggaaggaaacagcaaacgggactggaatcgcttcctggacacgcattaccgccgcggctggaatgtcaacatatccagggtgatggataacgccacacatgtggcggtgtacttcggctcttacctgaaaaagccaccggtgccgatgagtcggctggagcattatgccggtcaggatgaaatcggtctgcgttacaacagtcaccgtacaaaacgggaagaatacctgttgatgagtggagatgagttcatggaaaggttctcctggcatgtagcagataaggggttccgtatggtgaggtactacggtttcctgagtccggtgaagcgccgcttactggaagaagttgtgtacgtcataacggagacggtgagaaaaacggcgatgcaaatcaggtggagagggatgtatcagaggttactgaaggttgacccgctgaagtgcattctgtgcggaagtcagatgcgctttacggggctgaaacggggttaccgactggcagagctggtcctgatgcatgagcgactggcacgacagcaggtgtgcggctga

SEQ ID NO: 478844 - DNA, 258 bp, Shigella flexneri
atgtcgcagacagaaaatgcagtgacttcctcatctggcgcaaaacgagcatacagaaagggtaaacctttgagtgaagcagagcgacagagagcagcttctgcgcgcaaacgatctgtatgtaaagagatcaaggttttcgtcagaccagaactgaaaaactaccttaccagtttgtgtgcagaggaaggtgtaactcaggcagagttgatagaaaggcttatcaaaaaagaggcctgtcacaggaatatggcgtga

SEQ ID NO: 478845 - DNA, 195 bp, Shigella flexneri; identical to SEQ ID NO: 18715

SEQ ID NO: 478846 - DNA, 1014 bp, Shigella flexneri
atgagctggtttagcgatatatatggttttgaggaatcaacttacgccagaactcaggctaaattctgcattgatggtcccctgcttcataccaggggccagtcatcccgtacctttcatgccgggatactgactatgccgagtctggctgaattacggaaggccgtttgtagtctggaggtaagtggaggtgaaaggataaagttaagtagtttggtggccgacgcttatgaacttcatcggtggccggaggcgaatcgcgcaataatccaggttgccagtcagtttaacctcctggaaatgccgaacgagcacacgacaccggagaaggggatcaccaactatcagtacgattatacgcagggtccctcatgtgcaatggcctgtgccgccgctacggtgtttcgtaactatctggtcccggttggatcgcagagggggcagactcaaacctgtcaactcaacgctctggcggacatggacagagccattggcattggggggatccggatgcaaaatggctacgctcttctgcaaccggatacggtactcgccatcagcaaacatattgaggcgatggatgaactttcgcgtgatggggtgaggcagaatctccgcgtaggggttcattctgacacggaagtgacaattccaggtgtatcgaagaaccagcgcgttacccaggtgctttgctctgctttacctgttgcttatcactactccccacgaaaggactgggctccttttgcgactttggtgctcgaggcctgctacgaagcaactctgctggctgcggtgctaaattatcacgacacaggtaatcccagagtctatctgactctggttggtggaggcgctttcggtaatgatctcagctggatcgtctctgctcttagacgcgctcttaacctggtcagtcatcatccgcttgatgtgcgtttggtgaataatcgtaaggttcctgtagagatagagtcgttgatccgggaatttggaagtcggtcgactggctga

SEQ ID NO: 478847 - DNA, 309 bp, Shigella flexneri; identical to SEQ ID NO: 18716

SEQ ID NO: 478848 - DNA, 711 bp, Shigella flexneri; identical to SEQ ID NO: 18717

SEQ ID NO: 478849 - DNA, 354 bp, Shigella flexneri; identical to SEQ ID NO: 18718

SEQ ID NO: 478850 - DNA, 732 bp, Shigella flexneri
atgaatcagggtaaatccgttgctgtacaaccagtcaggccagcccttaatttctccgcgctgcagcgcgatgttatccgtatggtggcgtttgtggcgatggtgggggaccacatagccactgcctttcagctggctatgcccttcctgaacatggccgggcgctgtgcattccccctgtttgcgctggtcagcggctgcaacatggcgggtaaaaccttacgtcagcacagccttaaccgcctgtggctgatggcactcctggcacagccgggatactggctggccttccgggatgtcggccttgcgtggtggcaactgaatatcctgttcacctttgctgttgtcatgcaggtggcccgtttcctgcagtcggtcacggtgcttaatggtgctgccgcctttgtctccctggtggggtatctgccgcttagctctgccagttacggtataccgggtctgctgatgctcgccggcgcgcttcttatctggcaggtccgggactcactgcggccagccctgtttgctttctggctgttgctggtcgccctgcttaatgcccgacatggtgatgtgatgacgctttccggtgtactgctgacgttgactgtgctgttttgcgtgcatgggctggtaccggctcccggacgacgcctgcaggccggacggtggtttgcaccagcgtatgccctccatctgctgtgtattggttttatggtcagtgttctctga

SEQ ID NO: 478851 - DNA, 567 bp, Shigella flexneri
atgtttattgcattcattattattgtcattcttctgggcggatttgtgcttctgctccgtcaggctggtcgggcagggcatccacttctgcaatcgttgcggtcacgggggattcggcctggcacagcagagctgttgttgtgcagcaggccatcatttgtcagtgcgggccgattgatgaccgaacgggaacagtgctttctgcgccggctggacaaggtgactgatacccgttgctggcgtctgtgtccgcaggtccgggtggccgatattgtcagagtggcccccgaccggaagccgggcagccgggaatggtggcagttatttcgtctggtatcacagtggcactgcgatgtggttatcacggaccgcgccggtcgcatcattgcagcggttgagctggacgaccgctctcatcaggcaccgaaacgtcagcggcgtgacctgctgctggaagaggtgctcagacaggcgggtattccgctgctgcgtggcgataatgaacagcagctggcggagcgcgtcaggttacacctttgcgcacaacgtccggaggccgctgcatga

SEQ ID NO: 478852 - DNA, 5298 bp, Shigella flexneri
atgctctccatttcttccattaaaggtgatgcgggctactacagtcatgaagacaactactacgccagcggttcactggactcccgctggatgggggagggtgcggagaaactgggactgaagggggaagtcgccagcgccgatatggatgctgtgcgtcagggtaaacttccggacggttcagatctctcccgtatggtaaatggtgtgaataagcaccgcagcggctacgacctgacgttttctgcccccaaaagtgtctccgtcatggcgctggtcggggaagaccgacgctttattgaggcgcataaccgggctgtagcggtggtgatgcaggaggttgagaagctggtcagcgcgcgcattacagaagaggggaaaacggaaacagtactgaccggcaacatggtggccgcactctataaccatgatacgtcccgtgacctcgatccgcagttgcatacccacgctctggtctttaacgccacgtttgccggtgaaaaatggcggtcgctggccagtgatacgcgcatgaaaacgggtttctccgagaatctgtatgccaccaagatagcgctgggaaacctgtatcgttctgctttacgtgaagacgttgagtcgatgggatttgaaactgttgcggccggaaagaatggtctgtgggagctgaaggatgtccctgtcgatgttttttcctcacgtagtcagactatccgggaggccgccggcccggacgcgtctgccaaatcccgcgacgttgccgcgctcgatacccgtcaggccaaagcctgggccgacccggagctgctgaaagctgactggcgccggcggctggccgatgaaaaatttgatatcgatggctacatcagacaggcgcaggcgcgcgtggaggttcctggtgctgttgcaggtggacatagcggtatacatgcaccggacctgtcgggaggcgcgtcttccggcgagattgctgacgagcaggtgcggaaagctgtcagcgacacgatttcggcgttgtcggagaaaaaggtccagttcacctggtcggagatgctggccggtacggtcaaccgtctgccttccgcacccggtctgtttgagcaggcccgggccggcatcgatgccgcgattgaagggcagcgtcttatccctctggaccgtgagaaggggatattcacctctgatatccacctgctgaatgaactcagcgtccatcagctggcgcgcacggccattcaggaacagaccgtgctgctctttcctgaacgggcacaggaacgcgatataccggcaggtgatgctgtctctgttctgacgcaggacaaaagcccggtggccattctcagtggtcgcggaggcgcgcaggccctgcgtgagcgcacggaagacgtggccatgatggcccgttcacagggccgtgaggtgatggtgattgcagccgacggtcgcagtggccagtttatgtcagaaagtccgcatctggcaggccatgtgatgctgcgctcgcagatgaacgctgacaccgtattgccggtgcagggaacggtcatcgttgaccgcgcggagcggctgtcgctgaaagagacggtgctgctgcaggaaaaggcgctcagcgccggggcgcagctgatttttatggatacggagaaccggcagggaacggggaatgccctgtctgtgctgaaagaagccggtattccgcagtaccggttttatagcacccaactaccggaggtgcgactggtcagcgaggcggacaagcgaagccgttacagccagctggcacaggactatgtgcgcctgtcggcggaagggcgggatgtggtggcccaggtgaccggtgcccgggagcagcagcaactgacggatatcattcgcgagtcacggcgtgaggccggagaactgggcagggagcagatgacaatccgggtgctggagcctgtgtggctggacagcaaaacccgtcatcagcgcgataattaccgcgccgggatggtgatggaacagtgggatgctgagaagaaaatgatgacacgtcacaccattgaccgtgtggctgaggccaccaacagcctggttctgctgggagaagacggcagtcgcctgacgctgaaggtctcgcagcttgacggaagctggagcctgtaccgcagccggacgctggcagtttcagagggggaccgcgtcagggcgctgggtcgtgagctgaagggggccatcaaagcgaaggagccgttcacggtgactgctctggaaaacggtgcgatacggttgcgcagtggcgaccgggagctgcgcctgcccactgagcgggccgtgaagctggcccatgattatgtggaggggaccggtgccggaacgagtgcttcccggacagtgctggccgcggtcgggccacgaagtctgaataaacaggtcctgaacgcgctggcgcagagcggcggtgacatccggatttatacgccactggaggccgggcaggccgcgcgtaaagtggagaatgtgtcttctgtccggcttgccagtgaccaggtccgccagtcgaccggcgagacaaatctggataccgccatacaggccagccgggagcgcctgatgtcggatgcagagcaggcggtgaatctggccatcccgcgtgcacagcagggacaggtgtatctcagcgaaatcgccctgctgtcagaggcggtaaaatccggccagccgctggctgatgtccggacagaaatcgcccggcaggtgagcagcggggcgctgattcagctggattcggtttccagggtgggaaacagggtgcttgttccgcgtgtggcgtatgagatggaaaagagcatcatccgccatattgccgagggtaaggatgccgttcagcccctgatggcgctgacgcctgcgtctgtactggccggtttgacggccggccagcgggaggccacgcggacagtgctggaaaacaccgaccgctttatggccattcagggctacgccggggtggggaaaaccacccagttccgggcggtgatgggtgccctgaacaccctgtctgaatccgtgcgcccgcaggtcatcggcctgggacccacgcaccgggctgtgcatgagatgcgtgaggccggggtggaggcacgaacgctcgccagtttcctgagtgaaacccgccaggccattcaggccggggaaactcctgactttcgcaacgtcctgtttctgactgatgagagctcgatggtgggcaaccgtgatatggcggagctctaccagctggttgccgccggtggcgggcgaatggtctccagcggggacaccgcgcagttgcaggctgtctccaccgggcagccgttccgtctggtacaacagcgtagcgccatcgatacggtggtgatgcaggagattgtccgtcagaccccggcgctgcgcccggcaattgaaagcattatcgccgggcaggtggagacatcccttcgccaggtggatgacgtcagcccacagcaggtcccgcgtcaggccggggcatggataccagaaaagtccgttatggaaatccgcgagtcgaaaaaaggccaggaacaggacaataacgttgcaggtgaacagacgcagactcctgagcagttgtcaccggcgcgtaccgacatcattgcagctatccgggatgactggatggggcgtacgccggaggcacagcagcagacgctgattatggctgaacttaacgccgaccggcatgccattaacgaagccattcatgccgcccggcatgagaaaggtgataccggcgcagaagaacgtacgttcaccgtgctggagccgctacgggtgccggacaacgccctgcgtgcggctgaaacctttgcggaatacaccggggcggtggcgatgatgaatgaacgctactggacggtagcagacgtaaacccacaggacggtgtggtcaccctgcgtaataccgacggtgaatcggttctgatttcaccgcagcagaacactgcacaggatatttccctattcacaccccgcgaactgacggtcagtcagggggaccgggtgcgctttacccgctcggacaccgaccgcggctatgtggccaacagtctgtgggaggtggccgggttcactgacgacggggccatccgcttccgccagggagagctggagaaaatcgtcgacccgcaggccatgacggaggaccgtcatattgacctcgcctacgccctgacggtgtatggcgtgcagggggccagtgaacgttttgccattgccctgaccggtaccgaaggtggcaggaaaagaatggcgtccctggagtccacttatgtgacgctgtcacgtgcgaaagagcatgtccaggtctacacggacaacctagaggactggcagcaacaggtccggcagtctgacggcggcaaaactgcccacgacctgctgcacgagaaaagtgaccgcgagtccgacaccggtaaccgtctgctggctaccgcatcgcggctggataaaacggcgctgggccgccgggtgctggcggaaaacggtctggagggtgaaacgatggcccgctttatcgcggcaggcaaaaagtatccggcaccgtatgtggctcttcctgtgtggaaccgacacggaaaagaagccggggcgctgctgacggaaattcgtattgaggatgatggaatgcgcgtggtgctaagcgaagagtcccggctacgcgctggtgaagatgcgcagttcgccggcctgcaggccagccgtaacggacagacactcattgctgatgatgcacagacggcgctgcgcctggcacaggagaacccggagagtggggtggtgatacgcctgcacggtgaagaacggttgctcaatgcagcccgcctgaccgggggacgaatcacggagcctgatgaggtggcacggacggtgcgcagtgtggcggaggctgaatcggtggcgaaagcggaagaccccattacgctgcctccggatgagcagcagaagctggcggaggcgcaggagaaagccgcccgtgagctggcggagcaggcccggcgtgaactgttgtcggtggcaccgcagaaagatgaaggcaaacgtgacccgctgttatctgccgatgatgaacgtcgcctgcgtgacaattcagaacgggaaatccgggagctggacgaggctgtccgggaggcggttgccgatggtcgtggtgcccgccaacaggtacgtgaacagatactgcgtactgaacgtgagtgggtggtgaatatgccggaaaaagaaatagagatggaaaagacactcggtggcgactga

SEQ ID NO: 478853 - DNA, 2232 bp, Shigella flexneri
atgagcctgaatcctcgcgatttaacgcagggcggtcaggtcgcttttatgcgcctgaaaatgttcctgcaaataaataatctgatttcttattacgttatcatgggcacggtgttatttggtattgccgttctgctgatgcgaataagcatccagaatctgaccaacggtattatttactggtttgtccggatgatttcaccttttacggaaaaaatggtgagtcagcctgtctataccatccgttattacgaacataagctgcagtacagtgcacgtcagatactgaatgatgattacaccgtatattgcggtcagttgctgaagcaggagctgattattgctggttgcgccgcgctgctggtcgcctttgtggccacattcgccgtgtactggtatatcgggcgcaccggtcgccagcagagtgaggatgaaatcatcgggggccgcgctctcagtgagtcaccaaaagacgttgcccggatgatgaaaaaacgtggggaagcatccgatatccgcatcgatgacctgccgctgaagctggattctgagatacagaatatgtccatgcacggtactgtatcgaccggtaagtccactctgatgcgcaagattatgaagcaactgcgcgacaggggggacctggtcattatctacgacaagggctgtacgttcattgaggatttctacgatgaatcccgggataaagtgcttaatgcgctggatgcccgttgccccaactgggatttgtgggaagagtgccgtacgatttccgaactggagaatgccagtgcaaccttgatcccggccagcagtggtgaagatccgttctggcagggcagtgcgcgtaccatctttgcggaaggcgcagaacgcatgcgcagggatgaagaccgcagctacaataaattcctgcgcactctgctggctattcagcttgatcaactgagaacgtttcttgccggcacgcccgcttccaccctggttgacggtaagattgagaagaccgccatttccatccgcagcgtgctgactaactacgtcaaggcgatgcgttatctgcagggtatcgacaggcccggacgcgaaaagtttaccatccgggaatggatgaagggccaggccgataaatcgaaaaatggctggctctttattacctccgacgaacagaaccatgagtctcttaagccattgatttcactgtggctaagtattgcagccaccagtctgctggcgatggggccaaaccgccagcgacgtgtctggtttttttatgacgaactggcttctttgcacaaattaccgactctgccacgaattatttcggaggcgcgtaagtttggcggctgttttgtcctgggcttccagagcttcgcacagctggaagaaatttacggcccgaaagcggcggcggcgctgtttgacctgctgaataccaaattcttcttccgctccccgagcgcccagattgcgaagtttgtggaggaagatatcggtgaaacctggcgaaaaaaattcagtgaacagaccagctttggtcatgaacaggtgcgtgacgggatttcttttggcaaggaagaagaacgcgtcagtattgtcagctactccgatgtgcagtccctgaacgacctgcagtgttttgtcaccctgccgggaagttatccggtggtgaaactgacaatgaagtatgaggcgatgcccaaagtggctgactcgctgttgttgcgtgatgtacagaccagtctggatcagatgcttgaagatgaaattacccgtcgcactgaagaagagaggcataagtttgccggcctgttcgaaggggcgtcgttaattcaggctgttccggagagtaatctgtcgaatacgccccctccttctgccggccgggtggctgctgttcttgcggaaacgaacacacctcctgagacgcgcacattacagacagaaaacgctgccggcgatgcagataccaaaaacacgggatccactgctgttgcagcggaaggtggctccacctccaccggaggaactgagcgggatattgaacaggatttacctaaggacgttcctccgggtctgaacagcgatggtgaggtggtggattccgaagcgtatgaggactgggttcaggcttcacatcagacccgcgatatgacccgcagggaagaggtcaacatcaatcatgcgacagataaagcgcgtgattttgatgacgacagggaggtgttctga

SEQ ID NO: 478854 - DNA, 738 bp, Shigella flexneri
atgaagaaaaacatgaagctaatggcaatgactgccgtactatcctctgtgttagtcctctctggttgtggcgcgatgaacacagcaatcaagaaacgtaatcttgaagtgaaaacccagatgagtgaaaccatctggcttgaaccgtcctcgcagaaaaccgtatatcttcagataaagaatacctccgacaaagacatgtccggtctgcaggcgaaagtgactaaggcgcttcaggataaagggtatactgtgacatccgcgccggacagcgcgtattactggatacaggccaatgtcctcaaagccgataaaatggatctgcgcacagcccagggattcctgagtcaggggtatcagggggcagcaatgggagctgcgttaggggcaggtattacggcctataactccaactctgcgggggcgacattaggtgtggggcttgctgccggtctcgtgggtatggccgctgatgcgatgattgaagatattaactacaccatggtcacagatattcagatttctgaaaaaacgaatgccactgtccagaccgataatgtagctgcgctgaaacaaggaacatccggatataaggttcagaccagtacgcagacaggcaatcagcataaataccagacgcgtattgtctcttccgctaataaagttaatctcaaatttgaagaagccaaacccgttcttgaagatcaactggcgaaatcagttgctaatatcctgtaa

SEQ ID NO: 478855 - DNA, 579 bp, Shigella flexneri
atgaagcgtagcgaggtggagaaggatgttttttttatccttgaatctcttaaagaaaaggattatgagataccatcgaacaaaaggatattgggtgttttgtttagaaaaatatggctggtatatgtattacagttaatcatggtaactcttgactgttacttgtatttttctgatgagggtgacattccctatttttttcataagttcatggggttgttgttactttcatctggatctatgctgttttttacgctggcttttgtaggcagtatgtatagtcctgttagcatgtctctagtgataggtaaggaggtaatggaaaaatcagtgttaatgcaggttctgtctaaaaaaattagattttatagcaaatttcttttgctatttaatacgctgattggtctgttctttctgtactttcatgaggcggccgttgtagcattaggtttatcgtggtttgggtcatttattttctgtgtgattattcttcaaggttccatgtctagatatatgacgccgtcggcgatagataccattgctaaaattaagacgattatttcatcgggtactaaataa

SEQ ID NO: 478856 - DNA, 2889 bp, Shigella flexneri
atggccattgataccatttacacgattgccggtggtgcgtggtttcaggatacgctcaatggcgtggcatcgtttctcgacagccgtgcgggcgatgcgctgattgcgatggccaccgccgtgtcagtcattgtcggcgctgcaacttatatccggacccgtaatattatggatctggtcaagtgggccgggttttatgttctggtcattgccgttttgattggcgataaacgaagcgttcagattattgacctgtctgaaccggcccggatttatcaggtggataatgttcctgcaggcctggctgcgcccgccagtatgattacccggatcggtgccggtatggcacagacgtacgataccatttttgcccgccctgacgcgctgacctacagtaaaaccgggatgctttttggtgcgcagctggctgcagggagcagtgatttccggttctctgagccggagattcagcgcatgttctcggattatgttcataactgcgtggtgggtgacatcatgctgaacaacaagtacaccatcggggagctgatgaatgcggccgacccctatgcactgatattcagccgtccgagtccgctgcgtgggctctacgacaaaaatcgtaatttcctgacctgtgaacaggctgccaccagaattaatacggactccggtgatatttccggggcgaatacgtcaccttttcttcaacagatcctgaatacgctgcacggcttcactgaccaggtatttggtcagacgaacggggcgcaatcggcgctgtttactgaaatgctgggtgacagctataactattttcatcgtacttccctgacatccacggagatcatccgaaagaatgtgataatgaacggcctgcgcagcggactggagagtttttccgcactgagcggggatacggcgggactggtgaatgtggccacgcagacctcaatggcaaaaatgcggctgtcgcaggcgaccagtgcgtccattgcggctaacacactaccggttatgtacagcgtactgttgggcatgacaatagcgcttttccctgtactgattgtgcttgcggtggtgagttccctgtcgtggaccattattaaaggctatgtctataccatcgcctatctgcaaatgtggcccatcctgttctccatcctgaaccatgccatgaacttctatctgcagggtaagctcagtggtacggcagtaacgctggctaattttgaccaggtacagaatacctactcggatattggcacaaccgccggctggctggcgctgtccatcccgttcatcgcttacgggatggtaaaagggctggggcaggtggtatcgcaggcggggaactatctggggcagaccctgcagtctgcctccacgcaatcctcgtctcaggccattgacggtaactggcacttcaacaatatgacgaccgggaacgtacagggtaacaagtgggatacaaactacagccatcgtgaaggccatatgagcagtcagctggagagcggggcgatgaaaacgctgacgagctccgggcagtcggtctacaacaccacagatgcgatttcaaaactgccggtcgatattgcactgggtaaaaccgcaacgagcagctggcagcagcaacagcgtgatgccatgagcgaagcgcaaagcctcactaacagcctgtcgcagacatccagcctggccgcgtcgcagatgagccagtggagtcagcagcggggcaacagcgacaccaccgtggcgggcagtgacatctcgagcagcagcaatctgaccaaagcgctgaataccattcagtcgattggtaaccgctatgcccgcgatgaaaatgtcagtctggctgaagccgtgagagaagccgcgacaaaaagtcaggatatgagttttggtgcaggtggaagcgcccaggtttcatttgatacagaccgtcacattctcggtaaaattggcgggctggcaacaggacttaaaggttctgctgaagggcatctcaagacggattatacaggccgaagtggctcctcgcacgggaccagttccgatctgacccggcagggcgggaccagtaaagggttcagtgctcaggagcttaaagattttcgcgatgcaatggatgtggtggcctccagccgtgtcactgacagtggtagtcatacagacaatgagtcagcttccctggccagccagttgtcgtccaccttctccagcctgaagagtcaggcgtcacaatataatgatgccgttacccgtagccatgagtatgcccagctggccacctatgcagagaacaacagcgctaacattaaccagaactactcgcaggagtttgtcgggtatgtcaccagccagcgtccgggagaggctgaccagctgctttctgacactgccagcccggaagtgcgggcagaacgcgaaagactggtacaggcctttgtggaagagcgcatgaagccgcagttgttacagcaatttgagcagaacaaagctcgtaccggagagggaatggggagtgtgtcttcttcctctggtggcggtgatctggaaagtgaatatcaggtgcagcaaatgcaaatggaatacagggccaacgaaagcggcgtgagacaacagggcgatgtcagtggtgatgtggctgacagacgtcgtcacgctgaatcgcaggtccatgatgaaaaaaatactgtgatctcatccggcaatataccgaaggaagaatacaaccgcttgcagagtgagcatgaacagggtaataagaatttcaatgtagcaaaggcagcggagaatgaacggcaaacaacattacctgatgaacataaaggtaaatatagtcttgataaagtgatggatgagatgaagaaaaataatcagtga

SEQ ID NO: 478857 - DNA, 1362 bp, Shigella flexneri
atgcgactgaaaccgctttgcctggcgtttacgctgggcctgtacagtgcaggaacggcacaggccgggctgcaggatgacatgaattcgtttttcaacaatatgagttatgccagtaactccacctcggcgaaagcctggcagggacaggcggcacgctatgtaaccggcggttcgttctatgcccgcacaggaaacaaaaatatccagctgatatccatcagcctgccgtccatcaacgccggatgtggcgggattgatgtctatcttggatctttctcctttattaactccgaccagattatggcgtttgtgaaacagacgatggccaacgcggcggggtactttttcgaccttgcactggaaactaccgtgcctgagctgaaagcggcaaaagacttcctgcagaagatggctgctgaccttaaccgtttcaatatgtccagctgccaggcggcaaaagcgatggtcgacagcgtggcgtcactgtggggggaaagtcagcagaacgtctgtcagtctgtcgccggtcagaataacgtgttctcggactgggtctcctcccgtcagggttgcacatccggcgggaaatacgaaagcgtcacgaacaaggccaccggcgcagaaaaagaccaggtcctgaaggatattaacctgatgtgggatgctctcagcaacagtacgctcagcagcaatgcagagctgcgccagtttgccatgagcatcagcggttcggtgattttcggcagtaacggagaaatgcgtatcctgtcttcactggcgtcagaccgcagtctgctgagtgcgatgatgagtggtggcagcgccaaagtgtacgtctgtgataaccagaacaagtgtctgtcaccctccctgaataacgtgaccatttcggagtcaaagtcgttgatccgcatggtagaggacacgctgacaagcatagaaaataaagccatcacggacacaccgttgacggataaagagaagcagttcatcaacagcacctccatccccatcctgtcatggatagtggaccagtcatcactgagcgtctcgcagtccctgtttgcccagctgacggattacatcgccgtcgacatttacctgcagtatctggaggccgtcatgaaggtggttaatggctcactggccaccaaagactatccgggtgccaatatgaatgaactgaaaaatggcctggcagatgcacgccaggctctcaactcactgcgaatggaggttcagattaaggaaaatgcgcttatttccgcacaacagcaaatccgctttatccgccagcagctctcctcaaagatgagcgatcgcgtgctgggtaactaccagttcagcagagtgaattaa

SEQ ID NO: 478858 - DNA, 603 bp, Shigella flexneri
atgcttattctcgtattgcgaaccgccattctgatggcggcgatgctgtccggctgtctgcaggcagggacactggatgatattcgtgcactggaagctgggaaaaacggacatagcgcacctgcactggatggattgcgtcttcctgagagcaacacaccaccgtcaccaggactcagtgaaaagacgtcgcccgtctggtatccgctgagtgacgggcggcgggtggatttgcaggactggaaactggtgctgtttatgcagtcgacctgtcaatactgtcgccagtttgcgccggtactgaagtcactgtcgcagcagagtggtctcagtgtcttccctgtaagccttgacggaaaaggtgatgtcgaatttcccgatgtacttccggccacaccggatgtgatggtggagtttttccagagtggcgtgccggtagccaccccaaccacttttctgaccaacgttaatacgatggaaacctggcctctgctgcagggtgctgcagaggccggagaggtccgtaaacgtctcgatgacgtgttccgtatgaccctggaccgtcaggccggtaaatcccttcaggctcattctcaggaataa

SEQ ID NO: 478859 - DNA, 780 bp, Shigella flexneri
atgagagctgtcgccggtgtgcttgttcttcttgccactgcatcactgcatgcggctcccgacgatgtactggtccccaactatgcccgggaagaaggctggcagtggtacaacccgaatgcggaagagattcaaccggagcctgcgccagagccgacccttcgggaacgtctggccagtatgacgccatctgagcagaaaaaggtcctgcagcaggcgacccgtgaagcgctggatacggccattctgtatccgtctgcggagaacttccgccgttttatgatactccagaatttctggactgaccgggcgacagattttacccagacatcaaagctggcgcgcctgaaatatccggaactcgactacaacgtgaaacgtagtcactacaacggttctgtggaagcgcgtcttaccgaagagagaaaggttcagaatgcggtcatccgtcaggtggcacagcgctatggcctgttcttcttctaccgggggaataatgccgtcgacaacctgatggccggtgtcatccgcgcgttctgcgaagaccggggcattacacttatggccgtgagtgtggacggtaaaatcagcgaccagctgccgcagagccgtccggacagcgggcaggctgagcagatgcgcgccacacatttccccgcgaccttcctggtcgatccgaaaacgcaccagtggcagcctcttgcatggggatttatgagccacgatgacctggaccgccagatggtcaacgttcttacccattttaaacctgactactga

SEQ ID NO: 478860 - DNA, 1839 bp, Shigella flexneri
atgaaacgataccttcctttactgatgctggcggcatctttctgcctggtacagccgcttgtcgcaaatgagcagtttaaccagggaatgaatctgagtagccagaataagggacagggggccagtgccattcaggggtttaatcctgcggaggtcatcccgggttataccaactcccctcctgaaagcgggtattacggtggcgtgacctcctctggcgtcgatatgaccgccccgggttcagcagcgctgaacacatctgaagcgggtaaaataatcacggagtccattctcaatacgccgccggataacaagccgtcgctggatgcgccgtttatttcagaagggctggccatgaaggataaggcggaggccattaccggtggtggatttgatggttgtgtggatcaggttgctggcttcacggaaatcaccacacaccagtgcctgcgggacacgaaaattgaacagtactgtacccgtacagcgaccatcagtgggtactatgaggatacgacagaaatcaaacagatagtgattgaatcttcctcgattcggttcactgaaaagaacaattctttttctggtgaatttaaggtcagcactggagggaaagtgatcgctgccagcgcggtttactcctggaataagaaacttgcttacggcaacgatcactggttcatgagagtgaccacgccatttggtttaatttcaatggatgattctgaggggagcgtcacgctgagttccgggctgaatataacagatgggcagtcattgccgttttccataacgaatagacgcaacaaacctacagtgtcttccatctggtatagctcaaatatgaagtaccgtttcaccattacgctgacgattcaggttccttccagaaaatgggtacctgaggttgtctggacagaaagctgcccgttcagcaagtctgaaggtgcaatgaccggatctcagtgtgtagagccaggaggcacccggaccgtcgttgttgacggaaaaacctacagcatccaccaggactgctggaagtggcaggacacatatctgacacagaccgaaactgagggaagctgcggtgagtatatgaagaaccctgcctgtacggttgtacgaagtcagtgtgccgatacggtggatggtttttgtgtcagccagcaggtcacctactcctgtgagcgtaaaaaagagggaaacggccagatttgcggcggggagttcttctgcaaagacggcagttgtgcccaggcgcagacagggaccagcaatatgtttggtcaggcagtgtcagcgctggcggcagtggctgctgccggagaggatgtggcggaactgaacggcgagaatgtcagggcattcactggcgaagccaaatcctgcaagaagtttgctgccgggtttaacaattgctgtaaggattctggctggggccaggatatcgggctgtccagttgcagcagtgatgaaaaggcactgggtaaggctaaagagaaaaaactgacggtctatgtaggggaatactgcagcaaaaaagtgctgggggtatgtctggagaagaaacgcgggtactgcgtgtttgactccaaactggcacgcattgtccaggagcagggacgccgtggacagctgggcattggtttcggcagtggcaaatctccggactgtcggggcatcacggtggatgaactgcagaagctggactttggtgtgatgaatttcagcgatttctatgatgatcttaatgccggcagcgatatcccggaagaccaggccttgctgaagaaagcacaggacattattgctgaaaagatgaaggagaacgcgccatga

SEQ ID NO: 478861 - DNA, 615 bp, Shigella flexneri
atgaaacgagtaatggtatcgctggtcctgcttctggtcagcggagtcggaatggcgaatgaccatacggagagccgtcagtttatccatgagcagctgcaactggaccgtcagcgatttcagtctctgcaaaccccggaattcctgaaacagacccgtccggtggcaccgcaggagcagtcgtttctcgacgcgcaggcacagcagttccggcaatccatgcagcccggggaacgcccggtgaatgcggccctggtgtttgtgtccttctcgatgccggcggaggagttgaagcagcgtgtaaaggatgcggcacaactcaatattccggtggttatccggggaatggttaacggcgatatgcgggcgacggctaatgccgttgccggtcttgtgaaagagagcaataccggtggggtacagatagatccgacgacgtttcgtaaatacaacattaccgccgtgccggtgctggttgtagcctgtggtaatcagggtgagaaagtcgatcgtctgcagggggatcttacgctgcatcaggccctgaagcgggtggcagaagagggcgactgtgctgacacagccaggagcctgcttggcgaggggggggaatga

SEQ ID NO: 478862 - DNA, 369 bp, Shigella flexneri
atgctcgtgagtaaaaaaaagtatgactttctgctcgcccgctacgaacaggccgcctcccgtgctgacctgctggagcgtcagcaggcagagctgaacggcgcgcttaagaaaaatggcgggccgttcaaatgtattctggagtgccgggaagcggcgatagcgctgtcatcgtcaggtagtgaacaggtatggctgacactggagcgtctggcgtttgtggacagatggataagcggtctgcttccggtactgagacggcagatgtcagtccgggaacgacgcatgtgggaggagatgctggacattcgttctgcggatcgcgcctacggtatggcacaccgcccgtcacaggaggatacgcgatga

SEQ ID NO: 478863 - DNA, 987 bp, Shigella flexneri
atgaaccgttatgtaacaggactggcgctgatgttgttatgcctgaccgggacggccagggccgcttcggctgaatgtgaaggcaattttgtcaatccaataacggatatctgctgggagtgtatttttccggtaaccattggcaatgttccggtcgccaaaggacgtcagccggatacgccgaatccttccatgccgatccagttttgcccgatgggcattttataccgggtggggctggccattggttactgggagccgatggcgctgacggatgtgacacgctccccttactgcatggtgaatctggggggctttaatatcaatattggtaatgtgggtagcggcagtggtggtcaggaaagccgcgccaaaccgggggccttctaccatgttcactggtacaaatacccgttgacctactggctgaacattatcacgtcgatgggctgcctgcagggtggcgacctggatattggttatctgtcggaacttgatcccatgtgggacagcagctctctcagcatgattatccagccggaagcgattctctttggcaacatcatcgcccagggagcctgtgccgctgatgccgtggccagtctggtgagtaaacccatcgacgcccttttctggtgtgccggcagtcagggcagtatgtacccgtttaacggctatgtttctaacgaattcagtccgttacagacgtcactgttactcagtgagcgcatggcgttcaagcttcaccgccagggcatgatcatgaacagcatcggtgaaaacagggctgtctgctttgaatatccatccccgatcatccccaaaagccgctggcgatatcacatggtcaacaagtatcccgatgccggacagtgtcatccgctggggcgtagcgtaacccgctgggaagcgggcaagaacatgcccaatgaccggcgtaactttgggtatctcttctggcgtaagcgcaactgcgtctttctgtaa

SEQ ID NO: 478864 - DNA, 636 bp, Shigella flexneri
atgtaccgacgtctgctcatactgcttgccctgtccggcatggtacaggcaaaaaacctgggcacatggggggagatgtaccccattgccgagcaggacatgctgaccaccattcagacccggctgaaagcaatggaggccagtggtgagatggcccgggagcaggaagcattcaaacagcgtgtcatagaaaacaccctgcgtcctaagccggtggaagggctgacgctggcgcaggaaaacaccacgcactatatcgatccatcgctgacggtcagtgaagatctgaaagaccatcaggggcgggtgtttgcccgtaagggacaggtgattaatccgcttgatacggtgccctttaccgacacgctgtattttattgatgcggataatccgcagcagctggcgtggatgaagaagcagaatcccggcacgctgacgtaccgcgtcatactggtcaatggggatgttcgagaagcgaccaatgccctgaatacacgcatttacttcgatcaggatggctcgctcagccggaagtttgaactcaaaaccatcccagcccgtgtgacgatggctgaagatcgtcgccgtctgcgggtggattcgtttgcactggatgtgccggaggtgaagccatga

SEQ ID NO: 478865 - DNA, 465 bp, Shigella flexneri
atgaccacagagcaaaaccttaactcagcaccgtctgaatcctctgtttctgctgagtcagtcagaaaaggggggaatattaatgttaaagggagccggcgggagcaacgccgtcgccgctgtctgcgtaatctgctgctggtcgccgccactgttttgtgcgttaacgcggcggtcacgtctctgctgattagctggcgtacaccgacggttgtgtcttttgatatgaagggcacggtcgatcagttcaccgaccaggcgggggcacagtccctgaacgaggcgcagatgagcgtcctgacagaacgctttatgcagacacttagcacagaacttcaggaataccagcgcgatcacaacgtccttatcctggtgacgccggcggtggtcagcggtgcggcagacattaccggtgaaattcagtctgcagtggcacaaaaaatggccgccggaggggggcagtaa

SEQ ID NO: 478866 - DNA, 2592 bp, Shigella flexneri
gtgaaaaaatttctgagcgtgctggagaacctcacgaatgctttccgtatgccggatggtgcatctgagatgacgcgtaatctggccagtctggattttccgcagctgaccagcgtcctgccgtatcgcgactatgaccgtgactccgggctgtttgtgaaccgcagtacggttggttttctgctgcgggcggaaccccttatcggtgctaacgaacagatagtgtatgtgctggaagacctcatcaaaagcaagctgccgcgtaagacaccgatttccttccacctggtgtccagtaagctgattggcgagcagctggatcgtggcctgtctgaattccgctggcagggtaagcgtgcggataaatttaaccgtatcacgcgggcgttttaccggcgtgctgcacagcagcagttcaacagtcctacggggttgccgctgaccctgcgggactaccgcctgtatatctcctactgtgtgaaagcaaagaaacgcacggcggcggtcatgacggaggttgcccacacactgaaagttcttcgttcttcactggatgcggcaaaaattttcacacagacggcagatgctcaggaactggccacgctggttcacgggatgctgaatgcccgccatgatcagttgtatccggacgacgtacgtgtcggcaaatttgatgaactgcatcagcgctgtattgatcagcgtatcggtatcgatgtgcgtcctgacgatgtgcgtatcagcctggctgacaggcagggcagtgtgaccacaacacgggccatgaactttatgctggaaaataacccggatatgttcatgctgtggatgggcggcgataacctatccaatctgctcagcccggacctggccattgccagcccgtttgtcatcaccatggtaatggaggccgaggaccaggtggcaacgcaaggggaggccacacgaaagtatctcgaccgggacaaaaaagcgaaatccccctatgccaccctgtttcccggtgtggccaaacaggcccaggagtggaaggaaatccgcgagcgtcttaacagcaaccagacctgtattgttcgttattactataacatcaccacattctgtccggatacggatgaggatgcgctggtctgcgaacagcaggttatcaacacgttcaagaaaaacggtatagagctgttttccccgacctatatgcagttccgcaactggatagcgatgatccccttcattcatgcggaagggctctgggaggacattaaaatgggcggagccacgtgccgggcggagagtatccaggccgtgaatctgctgccggtggtggccgacaaccggctgtgtcaggggggactgctgacaccgtcctaccgtaaccagctggccttcctcgatatctacggggacgggatgggcaacaccaactacaacatggcggtcaccggtacctcgggggcaggcaagaccggcctggtgcagcctatcctgcgcagcgtgctggactccggtggtatcgcctgggtgtttgacatgggggacggctacaaatcgttctgtgagaacgtgggtggcacctaccttgacggtaagtcactcaaatttaatccgtttgccaacatctctaacatcaatgagtccggggaacgtatccgtgaccagctggctgtgctggcaagccctaacggtacgctggatgaagtccaccacagcctgctgttgcgcggggttcaggaggcctgggaagaacacgaggaaaccgcccgtattgaccatgtcgtccataagctgacggctatccgtgagcatgataaatatcagaattcgccgggcatcaccaaccgactagatgaaattatcgagctactcgggaaatactgctcctggggaatttacggtgaatatttcaacagcgatgagccgtcactgaccgacgatgcccgctttattgtcctggagctgggcggtctgcaggacaagcctgatctgctggttgcggtaatgttttccctcatcatctacattgaggacaagatgtaccgcacgccgcgcagcctgaagaagtgctgcaccatcgacgaaggctggaagctgctcaacttcaaaaatgagaaggtcggtgagtttattgagaccggttaccgtaccgtgcgacgtcaccgtggcgcgttcatcaccatcagccagaacatcaaggactttgatgccgatgatgcctctggcgcggcaaaagcagcctggggtaactctgccttcaaggtggttctcaagcaggatgcgtcggaattcaaacagtacaaccagaaccgccccaaccagttcagcgagctggaacgcagcgttatttccaaattcggggatgccaaagaccagtggttctcttcctttatgctgcgcatcaacgatacctgcagtttccatcgtctcttcgtcgacccgctcagccgggcgatgttcagttcaaagggcgatgacttcgaatttatccgccagtgccgggaacagaacatggatatccatgacgccgtctacctgctggcacaacgcaacttccctgatgagatgcgcgaactggaagcgcttgcggaggcagcatga

SEQ ID NO: 478867 - DNA, 600 bp, Shigella flexneri; identical to SEQ ID NO: 18720

SEQ ID NO: 478868 - DNA, 411 bp, Shigella flexneri
atgacaaccaacagtaacggcgctccgggtaacacccgccaccttaatgatattgcggtctgctgtgagaatccggggatgcgtgtcatctgtgttgatgacgcagagagcgacttctggctctcagcgtctctgccgtgcgctaccgtccttgaggggaagttgcggatttctcaggacgtacttgtactgcagcgggaacgagggcactgcctgttcccgggaactccgggggcaggtatgagcataaccaaacaaccgatgtaccggtttttcctggcgaagtctgacgtcagccagattaaagcactgtatagcggtgaggacggggagaggctggcggaggttatccgtcagaactgcaacgtctggtatccgctgaagccaggggacgggcatcatgataaataa

SEQ ID NO: 478869 - DNA, 186 bp, Shigella flexneri; identical to SEQ ID NO: 18722

SEQ ID NO: 478870 - DNA, 225 bp, Shigella flexneri
atggccgacgttctggaccatttacagaagcaggaagacctgctgaaccggctgcatattcaggctgcccggcagttgatcataaggggtggggaaagcctctgcgagtgtgaatgttgtggcaacgatattcctctcaaacgccagcaaacgatacctggtgtacgaacctgcacggaatgccagcgggtactggaaatccggcagaaacactacctgaggtga

SEQ ID NO: 478871 - DNA, 1365 bp, Shigella flexneri
atggccaacgttaacaaaatcgttcgtcgtcgtcagctcgctctgtttatcgcgcttgtgctgggtattggtgcgggtggggcaggaacctggatggtatccgagatgaacctgaagaaagccccgccggcaaaagcaccaaagggcgaacctgcgccggatatgaccggggtggtcaatcagtcctttgacaataaagtccagcgttccgccattgcggaagcccagcgtctgaacaaggaaacgcaggctgaaattaaaaagctgcgtacagaaatggggattatcgggcgtgatctgaaaggctctcaggaacgtatccgtgagctggaagatgaaaataaactcctgcagacacaaatcgaagccgggaagaactttgactctctcagtgctgaaccgttgccaggggcactcgcctcacagggaaaagcagcggtacaggccggtgaagttctgcccccgaccacattctggcccgccggtggtgggcaggctcctgtcgcaccggtgatgaccccggttcagcgtccgggaatgatggacagtcaggagttcactctgccggacaccactccgcaaaagccccgtttcccgtggatttcctccggcagttttgccgaagccattgtggtggaaggtgctgatgctaatgcctctgttaccggcgataaaaataccgtcccgatgcagcttcgtctgaccggcaaagttcagatgcctaacgatcaggaatttgatctgaccgggtgttttgtgactctggaagcctggggggatgtttccagtgaacgggccatcgtccgtacccgctccatcagctgcaagctgggtgatgacaatatcgaccagaagattgccggtcatgtgtcctttatgggcaagaacggcatcaagggcgaagtggtcatgcgtaatggtcaaatcctgctgtatgcggggggctcaggctttcttgatggtatcgggaagggcattgagaaagcctcttccacaaccgtgggcgttggagccactgccagcatgagtgccggtgaaatcggtcaggccggactcggcggcggagtcagttctgcggccaaaacactctctgattactacatcaaacgtgctgaacagtaccaccctgttattccgattggtgcgggcaatgaagtcaccctggttttccaggatggcttccagcttgaaacgctggaagaagcccgcgcgaaagccgctgcacgcaggaaacaaaatcaaccatcagcctcatctgcgcctgctgccatgcccggcaacacgacggacatgcttaaacacctgcaggacttcaggctgggggacaccgtcgacccggctacaggccaggttgtcacgcagtaa

SEQ ID NO: 478872 - DNA, 741 bp, Shigella flexneri
atgaaaaataactttccggcgctgcttttgggcaccgccctgatgatcacttcgcctgtgacagtatatgcacagtcacctgccacactcagctttccgcagggggggcagttccggctcagtatcagtaataccgatcccaatatgatttttattccgggagataaagtcacagccatcacagctcagaacgggatgctggcagataaacgactgacgtctgccggtggggtgctgttcacttccgtggctacccgggccttcacgctgtatgtggaaacggccctggggcaaaccttctctgttgtggccacgcccgtcaaaggtgaggggcgagtctaccgactgatgagtgcagaacctccctcacggccagaaacccgccactgggaaaccgctcaggcttacgaaaaactgctcatcgcactcaaccgggctgtgctgacagacacgatacctgatggctatggcgaggtgaaaccgcttgcggacggtatcaacgtaccgggtgggttttccgccacgccgcagaaagcatggtcgggcgacaagttacgggtcgatagttatgaactgcgcaatgcaaatacgtggggagtggctctgcgtgagcaggacttctggaagcccggagttcgtgccgtcatgtttgacagcaatgcacagaccctgatgggcgggggacggctgactgtcaccgttatccgtgaaaacggggagggaacagatggccaacgttaa

SEQ ID NO: 478873 - DNA, 564 bp, Shigella flexneri
atggaaataagcgctcgtaactcatccacaaaaattattgccattattattctgtcactcacggctctggtctttattctggggtttgctgttacctggctggcggtgactaacagaacactcattcatgagcagcgtacggtcgtcaccccgatgacctataacgcgcctttcgcggtatctgaaacaaaagcggataccgagtttttccggatgatgacgctgtccttcctggccctgcgtcttaacgtctcccccgaaacggtagattcaaaccacgcttttctgatgtcttttgtcgaaccagaagtcagagaggaatttaaaaaagttctgcaggaagaggctgcacagataaaggccagtgatgtgaattccacattctacaccacggaaatcaatgtctatcccgtagacgggcgcgtggatgtcaggggggtgctgaaaatgtggatcggcaactcaaaacccaccacggaattaaaaaactatcgtctccgccttaagtacgccggtggctttacccgcattggccgtttctatgaggtaaccaatgaaaaataa

SEQ ID NO: 478874 - DNA, 306 bp, Shigella flexneri
atgtcgggaaacgatttagaaaaattccgtttcccgaaaactctgtcagagcagaaccgcattatcggactgccgcttgatgaagccatccccgcagctgtgttagtgctgtggggatttttcgccaagaaatatgtatttggtctgattattgcgacagtggtctggcagctaatccgggcggcaaaacgcggaaagagttcccgctggttatataactggtgctactggcatctgcctgttgaattattccgggttgtctaccgcgttattcccgactccagttacaggaaatggataaaataa

SEQ ID NO: 478875 - DNA, 360 bp, Shigella flexneri
atgaatttatccttatctgaaggcggtcgccccgcgtctgtaaaaaaccgtgcatggcattattgccagatggcatggcgtggagtgtgtaccccaaaagcactgtcccgtctggctgcattctctccgctgctgttactggggatggggcagatggctcatgccactgacctgctggccgggggcaagaacgatgtaaaagcgacctttggtgccgactcattcgtcatcatgtgtatttatatcgctgaaatcgttatcggtgttgcgacgtatatccgaaccaagaacctgctgattctgctgggactcgtcgtggttattgtcttcaccaccgttggcctgacattcgtcaactga

SEQ ID NO: 478876 - DNA, 189 bp, Shigella flexneri
atgaggagtgacgatgtgaatgttgttcggcctgtcagaaagcaggtgcatgtatttttggatatgacaacttatgaacagttaaagaaaagcgcgattttttcgaagatgaagattggaaagatggccgaacaaattatcagttcttatttcgaggaagaagataataaaaattatcacgtcggttaa

SEQ ID NO: 478877 - DNA, 276 bp, Shigella flexneri
atggttattatcaatcctatctttatgtctaaattaagcaagatctttcctgaaataagtgatcaaaaaatagaaattttgacattttttgtttacgggatgagtacaaaagacattgcttactataaaggtgtaagtgttcaagccatatccaaaaacttacgtgaattatgtgaagtgtatgctgtacctactacagatatgcttaaaactgtctacacggtgagactcgatctctataaccaccttcgttttagttatgaagagcactcttaa

SEQ ID NO: 478878 - DNA, 1113 bp, Shigella flexneri
atgaattactctcacgataactggtcagcaattctggcccatattggtaagcccgaagaactggatacttcggcacgtaatgccggggctctaacccgccgccgcgaaattcgtgatgctgcaactctgctacgtctggggctggcttacggccccggggggatgtcattacgtgaagtcactgcatgggctcagctccatgacgttgcaacattatctgacgtggctctcctgaagcggctgcggaatgccgccgactggtttggcatacttgccgcacaaacacttgctgtacgcgccgcagttacgggttgtacaagcggaaagagattgcgtcttgtcgatggaacagcaatcagtgcgcccgggggcggcagcgctgaatggcgactacatatgggatatgatcctcatacctgtcagttcactgattttgagctaaccgacagcagagacgctgaacggctggaccgatttgcgcaaacggcagacgagatacgcattgctgaccggggattcggttcgcgtcccgaatgtatccgctcacttgcttttggagaagctgattatatcgtccgggttcactggcgaggattgcgctggttaactgcagaaggaatgcgctttgacatgatgggttttctgcgcgggctggattgcggtaagaacggtgaaaccactgtaatgataggcaattcaggtaataaaaaagccggagctccctttccggcacgtctcattgccgtatcacttcctcccgaaaaagcattaatcagtaaaacccgactgctcagcgagaatcgtcgaaaaggacgagtagttcaggcgaaaacgctggaagcagcgggccatgtgctattgctaacatcattaccggaagatgaatattcagcagagcaagtggctgattgttaccgtctgcgatggcaaattgaactggcttttaagcggctcaaaagtttgctgcacctggatgctttgcgtgcaaaggaacctgaactcgcgaaagcgtggatatttgctaatctactcgccgcatttttaattgacgacataatccagccatcgctggatttcccccccagaagtgccggatccgaaaagaagaactaa

SEQ ID NO: 478879 - DNA, 141 bp, Shigella flexneri; identical to SEQ ID NO: 11535

SEQ ID NO: 478880 - DNA, 384 bp, Shigella flexneri
atgccacgcatacaaacttttgtcagtaatcaggtccgtgaagaaattgaatctctggtaacagaaaggaggcaagagggggcgacggaaaacgatgctacggtatcgtctgttacttcaatgcttatagaactcggtctcagagtatacaggattcagagagaaaagaaggagagtggttttaatcagatggagtacaacaagattatgctggataacatagccagagtcagggcaatgtgttcagaaataatgaagatgaatgcattaagtcatgaagttataagcaatggtaattttgataatgaagtaatgaaaagatctataaccaaattcgcagaagaccaggtaaggattttctttccagaagaagaaatggattaa

SEQ ID NO: 478881 - DNA, 666 bp, Shigella flexneri
gtgcaagataaaatcttgcgacgggtgtggggctttgatgttaaggagcaggcatatgaaaattatcaggccgggcaggattcagtattaacgggcattgccgtttttgttaaaaaatggcactctggcacaggtaaagataataatggaattttgcagatgaagagcgttctgcttgttggattactcgcgcttacctctccggtcattgctcaggactgttttgaactggctggaagagattacaaaatagaccctgatttactaagagcaatatcatggaaagaatcccgttatcgggttaatgccatcggtattaatccgataacgggatatggcagcggacttatgcaggtagactcccagcattttaacgaactggcccgctacggaattaagccggaacatctgacaacagatccctgcatgaacatttataccggtgcttattacctggcaatagcctttaaaaaatggggcgtctcctgggtggccgttggtgcatataatgcaggattcaggaaaaccgaacgccagaaccagagacgtcttgcctatgcatcagacgtttaccggatttataccgggataaaaagcagtaaaggcatccggcttccggccacgaagaaatcactttcggaaattaacagcgtgcagaacaattaa

SEQ ID NO: 478882 - DNA, 822 bp, Shigella flexneri
atgcgattagcttcccgttttggtcgatataattctattcgccgtgagcgcccgttaacggatgacgaattaatgcactttgttccatctgtcttttctggtgataaacatgaatcccggagtgagcgttatacatatatcccaaccatcaatatcatcaataagttacgtgatgaaggtttccagccgttctttgcctgtcagagtcgggttcgtgatttggggcgtcgcgaatacagtaaacatatgttacgtcttcgcagggaagggcatattaatgggaaagaagttcctgaaattattctgcttaattcacatgatggttcatccagttatcagatgatccccgggatttttcgttttgtctgcacaaatggcctggtgtgcgggaataattttggagaaatccgcgttccacataaaggtgatattgtcgggcaggttattgagggagcgtatgaagtgctcggtgtctttgataaagtcactgaaaatatggaagcaatgaaagagatacatcttaacggtgacgagcaatatttatttggcagggctgcattgatggtcaggtatgaagatgaaaataagacaccagtgacgcctgaacaaataattacccctcgtcgttgggaggataaacagaacgatctctggacgacatggcagcgtgtccaggagaatatgatcaagggtggattatcgggaaaaagtgcctccggtaaaaataccaggacaagagccattacaggtattaatggtgatatccgaatcaacaaggcgttatggatgattgccgaacaattcagggagtggaagtcatga

SEQ ID NO: 478883 - DNA, 450 bp, Shigella flexneri
ttgcgaaacggcgttgccccttacatcccggcggccttttgccgggatgccgggagcgcaggccacggcgcgacagaggcggcgcgaccggaacggtcgctgcaagcccggggtttcgcgtcagggatggaagcccgccagggcggagacagcttcgctggctccgttcacgacagcccgccccgccagggggacgcccggaaaagccataaacaggagaggaacggaaagaggaagaagaacagtaacaggcacggtaaccacagaaaaataacatcagaaaaaaacattccggacacatcacaaacgggaagggtaacgggcgacgcgccagcgtggcccgcttcccttccggcaggcgtcagcctgccaggggttttcgcgcgggctgacaggcggcctccaccgcctgccctgtatcacctgtttctgctgccctgtaagatgtag

SEQ ID NO: 478884 - DNA, 927 bp, Shigella flexneri; identical to SEQ ID NO: 30845

SEQ ID NO: 478885 - DNA, 705 bp, Shigella flexneri; identical to SEQ ID NO: 8686

SEQ ID NO: 478886 - DNA, 705 bp, Shigella flexneri; identical to SEQ ID NO: 8686

SEQ ID NO: 478887 - DNA, 861 bp, Shigella flexneri; identical to SEQ ID NO: 5314

SEQ ID NO: 478888 - DNA, 804 bp, Shigella flexneri; identical to SEQ ID NO: 6089

SEQ ID NO: 478889 - DNA, 516 bp, Shigella flexneri
atgtactgtgtagcgcttctgttccatgtcattgcacgggctgcatatgaacccgaatctgtgggtaaagatccgacacttccagaatattgccggtggatgaaaaattggatagagaaaacattaggtcatgattttttagatagaatgatgatctattgtgcgctgtttgccccagcgtattttcccgcgttacaacgtctgagcggagagaaagaaacgcgtgatgtccatgaattcctggctgagcatgttcgcactttagctcaaaaaaattcttcagaggtaaattatagagatcaacggcaattcacgtttggctacaccatgttcacgaagcaacaatttgaatttctggacatgatgcgcgatgtccattaccggattgattgtattgaacagctccttctggaccttatagaacgtaaggttgtggatttcactgatgcatctgttgcaggcacgtggattgagaagcaaattcagcggcttgaatcaaacgacgtaaagcagtaa

SEQ ID NO: 478890 - DNA, 366 bp, Shigella flexneri
atggcccgttcagctaaaccccgtaaacgcaaacccgcacaacaaagaagcaaacttccccgctatgttgtgaaacttcatccggatgatttttttgacgaagaagacgctgaagttctgcgctttgataattttgacgatgccgttgagtgctgcgctgacctgggtattccgttctttctggatgcaggaaacaaaaagctggtcttctggtttgttcgtgtcgatgacgaagggtatccggaaatagcccgctgtacggagcgggagtttgcaaccattcttgccggtatcagtgtcggtggtatgtactgcccggaatgcggcacagttcactggccggatggcgttaccccacccgtctga

SEQ ID NO: 478891 - DNA, 189 bp, Shigella flexneri; identical to SEQ ID NO: 470416

SEQ ID NO: 478892 - DNA, 171 bp, Shigella flexneri
atgctcagtcaaattcaacgctttggcggcgcgatgttcacgccagtgctgctgtttcccttcgccgggattgtggtgggtcttgccatcttgctgcaaaacccgatgttttgtcggggaatcactgaccgatccgaacagtttattcgcgcaaatcgtacacattattga

SEQ ID NO: 478893 - DNA, 138 bp, Shigella flexneri
atggcgagacgtattctggtcgtagaagatgaagctccaattcgcgaaatggtctgcttcgtgctcgaacaaaatggctttcagccggtcgaagcggaagattatgacagtgctgtgaatcaactgaatgaaccctag

SEQ ID NO: 478894 - DNA, 1818 bp, Shigella flexneri
atgatgttaaatgcatggcacctgccggtgcccccatttgttaaacaaagcaaagatcaactgctcattacactgtggctgacgggcgaagacccaccgcagcgcattatgctgcgtacagaacacgataacgaagaaatgtcagtaccaatgcataagcagcgcagtcagccgcagccaggcgtcaccgcatggcgtgcggcgattgatctctccagcggacaaccccggcggcgttacagtttcaaactgctgtggcacgatcgccagcgttggtttacaccgcagggcttcagccgaatgccgccggcacgactggagcagtttgccgtcgatgtacctgatatcggcccacaatgggctgcggatcagattttttatcagatcttccctgatcgttttgcgcgtagtcttcctcgtgaagctgaacaggatcatgtctattaccatcatgcagccggacaagagatcatcttgcgtgactgggatgaaccggtcacggcgcaggcgggcggatcaacgttctatggcggcgatctggacgggataagcgaaaaactgccgtatctgaaaaagcttggcgtgacagcgctgtatctcaatccggtgtttaaagctcccagcgtacataaatacgataccgaggattatcgccatgtcgatccgcagtttggcggtgatggggtgttgctgcgtttgcgacacaatacgcagcagctgggaatgcggctggtgctggacggcgtgtttaaccacagtggcgattcccatgcctggtttgacaggcacaatcttggcacggggggagcttgtcacaactctgaatcgccctggcgcgactggtactcgtttagtgatgatggcacggcgctcgactggcttggctatgccagcttgacgaagctggattatcagtcggaaagtctggtgaatgaaatttatcgcggggaagacagtattgtccgccactggctgaaagcgccgtggaatatggacggctggcggctggatgtggtgcatatgctgggggaggcgggtggggcgcgcaataatatgcagcacgttgccgggatcaccgaagcggcgaaagaaacccagccggaagcgtatattgtcggcgaacattttggcgatgcacggcaatggttacaggccgatgtggaagatgctgccatgaactatcgtggcttcacattcccgttgtggggatttcttgccaataccgacatctcttatgatccgcagcaaattgacgcccaaacctgtatggcctggatggataattaccgcgcagggctttctcatcaacaacaattacgtatgtttaatcagctcgatagccacgatactgcgcgatttaaaacgctgctcggtcgggatattgcgcgcctgccgctggcggtggtctggctgttcacctggcctggtgtaccgtgcatttattacggtgatgaagtgggactggatggtaaaaacgatccgttttgccgtaaaccgttcccctggcaggtggaaaagcaggatacggcgttattcgcgctgtaccggcgaatgattgtgctgcgtaagaaaagtcaggcgctgcgtcgtggcggctgtcaggtgctgtatgcggaagataacgtagtggtatttgtccgcgtgctgaatcagcaacgtgtactggtggcaatcaaccgtggcgaggccagtgaagtggtgctacccgcgtcaccgtttctcaatgccgtgcaatggcaatgcaaagaagggcatgggcaactgactgacgggattctggctttgcctgccatttcggctacggtatggatgaactaa

SEQ ID NO: 478895 - DNA, 810 bp, Shigella flexneri
atgtttagtgctgaatctccaattggtgtaatagactcaggtgtaggtggattgacatcggtaaaggaaataattaatttgcttcctggtgaagatattatctattgtggagataatatgaatgcaccttatggcaaccgttctgccgatgatatcatcagtttgactaaaaaaatgctgacttttttacagtcaaggaatgtcaaactagttgctgtcgcatgtaatactatatcctcaactttggaatccgaagaatacagcggatatgctaagagctttccgtttcctatcttatccatcattgaacctgcagtagaagatgtgattcgccagcaatataaaaatgttggtattatcgctactgagtttactattaaaacggggtgtcacaaagagctaataaaaaaattgaattcaacaataaatgtatttggagaaccaagcaaaaatcttgcaatgttaattgaggaaggtaatcttaatgctcctgcaatcttgaatgacatcaaaaaacatgttaaccatttaatttccctccatccagtaaatgaaattattctcggctgtactcactatccaattgttcagaatttttttgaagcagttgcaccggatataaaatttattaatcctgcacatgatcaggctatctctattaaaaatcacttgggacagctaaatttattaaactcctcaaatataggaactttgcaaataaatactagtggaagtatggagatctacaaaacggtactaggggaattgagcattacgaaacctcatacattcagtatcaggcagttttaa

SEQ ID NO: 478896 - DNA, 2760 bp, Shigella flexneri
gtggcgacgaataccaccaatatcgccaataacacttccaatattgccactaacaccaccaacatctctaacctgactgagacggtgactaatcttggtgaggatgcgctgaaatgggataaggacaatggtgtattcacggcagctcatggcaccgagaccaccagcaaaataaccaacgttaaagatggcgacctgacgactggcagcaccgatgccgttaacggctctcagctgaaaaccaccaacgatgccgtggcgacgaataccaccaatatcgccactaacaccaccaacatctctaatctgactgagacggtgactaatcttggtgaggatgcgctgaaatgggataaggacaatggtgtcttcactgcagctcatggcaacaataccgccagcaaaatcaccaatatcctggacggcacagtcactgcaaccagttccgatgccattaacggtagccagctttatgacttaagcagcaatatcgccacctacttcggcggcaatgcttctgtgaatactgacggtgtgtttaccggtccaacctacaaaatcggtgaaacaaattattataacgtcggcgatgcactggctgcgattaactcctcatttagcacgtctctcggcgatgctctgctttgggatgccaccgcaggtaaattcagtgccaaacacggtactaatggtgacgcaagcgtgatcactgatgtcgcagatggtgaaatttcagactccagttctgacgcagtaaacggctcacaactccacggcgtgagcagttatgttgttgatgcgctggggggtggtgccgaagtcaatgcagacggcaccatcaccgcaccgacttacaccattgcgaacgccgagtacaacaacgtcggtgacgccctggatgcgcttgatgataacgccctgctgtgggataagactgccaatggcggtgctggagcctacaatgccagccatgacggtaaagccagcatcatcactaatgtcgctaatggcagtattagtgaggacagtaccgatgcagtgaacggttctcagttgaatgcgacgaatatgatgattgagcagaacacccaaattatcaatcagctcgctggtaacaccgacgcaacctatatcgaagaaaatggcgctggtatcaactacgttcgtactaacgacaacgatttagcctttaacgatgcaagcgcctctggtgtcggcgctacagctgtaggttataacgctgtcgcgtctggtgccagcagcgtagccattggtcagaacagcagcagcaccgttgataccggtattgcgctgggtagcagctccgtttccagccgtgtgattgccaaaggttctcgtgacactagcgtaacggaaaatggcgtggtgattggttatgacaccactgacggcgaactgctaggtgcattgtcaattggtgatgacggtaaataccgccaaatcatcaacgtagctgatggttcagaagcccatgacgccgttacggttcgccagttgcagaacgctattggagcggtcgccactacgccaaccaagtactttcacgccaactcaacggcagaagactcactggccgttggtgaagactcgctggcaatgggtgcgaaaactgtcgttaatggtaatgcaggtattggtatcggtttgaacactctggttctggctgatgcgatcaacggcattgctatcggcagtaacgcacgcgcaaaccatgcaaacagtatcgcaatgggtaacggttctcagaccacccgtggtgcacagactggctacaccgcctacaacatggacgcaccgcagaactctgtaggtgagttttctgtcggtagtgaagacggtcaacgtcagatcacaaacgtcgcagctggttcagcggataccgatgcggttaacgtgggtcagttgaaagtcactgatgagcgcgtagcgcaaaatacccagagcattactaacctgaacaatcaggtcactaatctggatactcgcgttactaatatcgaaaacggtattggcgacattgtcaccaccggtagcaccaagtacttcaagaccaacaccgatggcgtagatgccaacgcccagggtaaagatagcgttgctattggttctggttccattgctgccgctgacaacagcgtcgcactgggtaccggttccgttgcagaggaagaaaatacaatctctgtaggttcttctactaaccaacgccgtatcaccaacgtagctgccagtgttaatgccaccgatgcggttaacgtgtcgcagctgaaatcttctgaagcaggcggagtgcgctacgacaccaaagctgatggttctatcgactatagcaatatcaccctcggtggtggcaacggcagtacgactcgtatcagcaacgtctccgctggcgtcaacaacaacgacgcggtgaactacgcgcagttgaagcaaagcgcgcaggaaacgaagcaatacaccgatcagcggatggttgagatggataacaaactgtctaaaactgaaagcaagttgagcggtggtatcgcttctgcaatggcaatgaccggtctgccgcaggcttatacaccgggtgccagcatggcttctattggtggcggtacttacaacggtgaatcggcagttgctttaggtgtatcgatggtgagcgccaatggtcgttgggtctacaaattacaaggtagtaccaatagccagggtgaatactccgccgcactcggtgccggtattcagtggtaa

SEQ ID NO: 478897 - DNA, 270 bp, Shigella flexneri; identical to SEQ ID NO: 476990

SEQ ID NO: 478898 - DNA, 669 bp, Shigella flexneri
atgcggcatctgtatgcccagtcgcgggaagcgattcctgaactgccaacgtttgaagagttccgcaagcaggggatctttaaaaagcgcgacccacaagggcatcacgttgcttataaagccttccgtgaagatccgcaggcaaacccactgactacgccatcgggcaaaattgagatttattcgcaggcgctggctgacattgccgctacctgggaattgccagaaggcgatgtgatcgatccactgccgatctacacgccgggctttgaaagttatcaggatccgctgaacaaacagtatccgctgcagcttacaggtttccactataaatctcgcgttcactcaacttacagcaacgttgatgtgctgaaagcggcttgccgtcaggaaatgtggatcaacccgcttgatgcccaaaaacgcggtatccacaacggcgataaagtcaggatctttaacgatcgtggtgaggttcatattgaggcgaaagtgacgccacgaatgatgccgggcgtggtcgcactgggtgaaggcgcctggtatgacccggatgcaaaacgtgtcgataagggcggttgtatcaacgtactgaccactcaacgtccgtctcctctcgctaaggggaatccgtcacatacaaaccttgttcaggttgaaaaggtgtaa

SEQ ID NO: 478899 - DNA, 492 bp, Shigella flexneri
atgcacgggcatgattatgagcatcatcaccatcatcacgatcacgaacatcatcaagaccacgaacatcaccacgaccaaggacatcatcaccatcacgaatatggcgagtatcaggatgcccatgcacgagcccatgccaatgacattaaacgacgctttgatggtagagaggtcatcaactggcaaattttgttatttggcttaaccggtggctttatcccctgcccggcagcaattaccgtgctgttgatatgcattcagttgaaagccctgacactgggcgcaacactggtcgtcagtttcagcattggcctggcgttaacgcttgtcaccgtaggcgttggcgcagcaatcagcgttcagcaggtcgcaaaacgctggagcggatttaacactctcgctaaacgcgccccctatttttccagtctgttgattggcttagtcggtgtgtatatgggcgtacatggcttcatgggcataatgcgataa

SEQ ID NO: 478900 - DNA, 1167 bp, Shigella flexneri
atgttgagaatgaccccacttgcatcagcaatcgtagcgttattgctcggcattgaagcttatgcagctgaagaaacctttgatacccattttatgataggtggaatgaaagaccagcaggttgcaaatattcgtcttgatgataatcaacccttaccggggcagtatgacatcgatatttatgtcaataagcaatggcgcgggaaatatgagattattgttaaagacaacccgcaagaaacatgtttatcaagagaagttatcaagcggttaggcattaatagcgataacttcgccagcggtaagcaatgtttaacatttgagcaacttgttcagggtgggagctatagctgggatatcggggtttttcgtctcgatttcagtgtcccgcaggcttgggtggaagaactggaaagtggctatgttccaccggaaaactgggagcggggtattaatgcgttttatacttcttattatgtgagtcagtattacagcgactataaagcgtcgggtaacaacaagagtacatatgtacgttttaacagcgggttaaatttactggagtggcaactgcattctgatgccagtttcagtaaaacaaataacaatccaggggtgtggaaaagcaataccctgtatctggaacgtggatttgcccaatttctcggcacgcttcgcgtgggtgatatgtacacatcaagcgatatttttgattctgttcgcttcagcggtgtgcggttgtttcgtgatatgcagatgttgcctaactcgaaacaaaattttacgccacgggtgcaggggattgctcagagtaacgcgctggtaactattgaacagaatggttttgtggtttatcagaaagaggttcctcctggcccgtttgcgattacagatttgcagttggccggtggtggagcagatcttgatgttagcgtgaaagaggcggacggctcggtaaccacctatctggtgccttatgcagcggtgccaaatatgctgcaacccggcgtgtcgaaatatgattttgcggcgggccgtagccatattgaaggggcgagcaagcaaagtgattttgtccaggcaggttatcagtatggttttaataacttattgacgctgtatggcggcacgatggttgctaataattactatgcgtttaccctctga

SEQ ID NO: 478901 - DNA, 651 bp, Shigella flexneri; identical to SEQ ID NO: 471947

SEQ ID NO: 478902 - DNA, 210 bp, Shigella flexneri; identical to SEQ ID NO: 475853

SEQ ID NO: 478903 - DNA, 189 bp, Shigella flexneri
atgcgcggcgtgaatgatgttgctctcaatcatcatgttctggtagatgaaatccgccggataggtgttgttggcaacaatgccgcccactttcgccgccgccagatagacctggtcaatgcgttcgctggcaaagaaatcatgcacggcgcggctgtccagcaggttcagttcatcgcgggtacgtaa

SEQ ID NO: 478904 - DNA, 219 bp, Shigella flexneri
atgaccattacccatccacagcaggcgctttcggtaagcctttgttccgatcaaccctgggtgcaggtttatagcggtgaaaaattacagcgtcagggactggcagttgaacctatgagttgcccgcctaacgcctttaattcaggtatcgacttattattactggaaccaggaaaaccgcaccgcctgttttttaatatttacggacagagaaaataa

SEQ ID NO: 478905 - DNA, 210 bp, Shigella flexneri; identical to SEQ ID NO: 475253

SEQ ID NO: 478906 - DNA, 693 bp, Shigella flexneri; identical to SEQ ID NO: 473368

SEQ ID NO: 478907 - DNA, 267 bp, Shigella flexneri; identical to SEQ ID NO: 462029

SEQ ID NO: 478908 - DNA, 294 bp, Shigella flexneri
gtggcgcacgtcttcggggaacgcactctggccacactggagcgtcttctgagcctgctgtcggcctttgaggtcgtggtatggatgacggatggctggccgctgtatgaatcacgcctgaagggaaagctgcacgttatcagcaagcgttacactcagcgcattgagcgacataatctgaatctgagacaacatctggcaaggctgggacggaagtcactgtcgttctcaaaatcggtggagctgcatgacaaggtcatcgggcattatctgaacataaaacactatcagtaa

SEQ ID NO: 478909 - DNA, 393 bp, Shigella flexneri; identical to SEQ ID NO: 472257

SEQ ID NO: 478910 - DNA, 312 bp, Shigella flexneri; identical to SEQ ID NO: 472254

SEQ ID NO: 478911 - DNA, 159 bp, Shigella flexneri; identical to SEQ ID NO: 473686

SEQ ID NO: 478912 - DNA, 303 bp, Shigella flexneri
atgaaaaaaagaaattttagcgcagagttgaaacgcgaatccgctcaactggttgttgaccagaaatacacggtggcagatgccgccaaagctatggatgttggcctttccacaatgacaagatgggtcaaacaactgcgtgatgagcgtcagggcaaaacaccaaaagcctcccccattaccccggaacaaattgaaatccgtgagctcaggaaaaagctacaacgcattgaaatggagaatgaaatattaaaaaaggctaccgcgctcttgatgtcagactccctgaacagttctcgataa

SEQ ID NO: 478913 - DNA, 210 bp, Shigella flexneri; identical to SEQ ID NO: 475253

SEQ ID NO: 478914 - DNA, 495 bp, Shigella flexneri; identical to SEQ ID NO: 471654

SEQ ID NO: 478915 - DNA, 210 bp, Shigella flexneri; identical to SEQ ID NO: 475253

SEQ ID NO: 478916 - DNA, 564 bp, Shigella flexneri; identical to SEQ ID NO: 463434

SEQ ID NO: 478917 - DNA, 216 bp, Shigella flexneri
atgaaaacccgtacacaacaaattgaagaattacagaaagagtggactcaaccgcgttgggaaggcattactcgcccatacagtgcggaagatgtggtgaaattacgcggttcagtcaatcctgaatgcacgctggcgcaactgggcgcagcgaaaatgtggcgtctgctgcacggtgagtcgaaaaaagctacatcaacagcctcggtgcactga

SEQ ID NO: 478918 - DNA, 210 bp, Shigella flexneri; identical to SEQ ID NO: 475253

SEQ ID NO: 478919 - DNA, 501 bp, Shigella flexneri
atgaacctgacaacgaagggtgatttagttcttgcggcattacgtaagctcggtgttgcatcaaatgccacgttaaccgatgtcgaaccgcagtctatggaagacggcgtcaacgaccttgaaatgatgatggctgaatggcttggcggtgatgcgtcacctggtatcaacgttggctacatttttgctgatgcagatgttgctccggatccgggcgatgagcacggtttatcaaataacgctatcaatgccgtcattttcaaccttgcctgccgaattgctccagattatgcgctggaagcgtctgcaaaacttataaccactgccagatacgggaaagagcgactcgtcaaactgtctgcaatggacagggcaaaagcagctaaatgtaagtccggttatccaaaccgtatgcctgttggtagtggtaaccagttggcgaagtggaatggttggaattacttccaccgaaaggaaccttgcgataacgggagcgaataa

SEQ ID NO: 478920 - DNA, 294 bp, Shigella flexneri
gtggcgcacgtcttcggtgaacgcactctggccacactggagcgtcttctgagcctgctgtcggcctttgaggtcgtggtatggatgacggatggctggccgctgtatgaatcacgcctgaagggaaagctgcacgttatcagcaagcgttacactcagcacattgagcgacataatctgaatctgagacaacatctggcaaggctgggacggaagtcactgtcgttctcaaaatcggtggagctgcatgacaaggtcatcgggcattatctgaacataaaacactatcagtaa

SEQ ID NO: 478921 - DNA, 2064 bp, Shigella flexneri
gtgctggataacgacacctcgcgtaaagagttgatcgaccagttgcgtactgtcgccgcgacgccccctgcggaaccggtcccgaagatcgtgccgccgacgctggttgaagagcaaaccgtgctgcaaaaggtcaccgaagtcagccgccattatggtgaagccctttccgcccgcttcgggcaactttatcgcaatatcaccggctccccgcataagccatttaatccacaaaccttcagcaatgcgctgagccatttttcaatgttagcggtattagtgtttggtttttactggctgattcgcctgtgcgcactgccgctatatcgcaaaatgggtcagtgggcgaggcaaaaaaatcgtgagcgcagcaactggttgcagcttccggcgatgattattggggcgtttattatcgacctgctgttactggccctgacattatttgtcggccaggtattaagcgacaacctgaatgcaggcagtcgcaccatcgctttccaacaaagtttgtttctcaacgcctttgccctgattgaatttttcaaagccgtactacgcctgattttttgcccaaacgtggcggagctgcgcccgttcacgattcaggacgagagcgcccgttactggggtcgtcgcctgagctggttaagcagcctgattggctatggcctgattgtggccgtgccgattatctctaatcaggtgaatgtacagataggtgcgctggcgaacgtcatcattatgctgtgcatgaccgtctgggcgttgtacctgatcttccgaaataaaaaagagattacccagcatatgctcaactttgcggagcattcgctggcttttttcagcctgtttatccgcgcctttgcgctggtgtggcactggctggcaagcgcctattttatcatgctgtttttcttttcgttgttcgatccgggcaacagtctgaaatttatgatgggtgcaacggtgcgcagcctggcgattattggtatcgcagcgtttgtttccggtatgttttcccgctggctggcgaaaaccatcaccctctcgccacatactcagcgtaactatccggagctacaaaaacggctgaatggctggctttcggcggcgctgaaaacggcgcgtattctgaccgtctgcgtggcagtaatgttgctgttgagcgcatggggattgttcgatttctggaactggctgcaaaacggcgcggggcagaaaaccgtagatatcctgatccgcatcgcactcattcttttcttctcggcggttggctggacggtgctcgccagtttgatcgaaaaccggctggcttcggatattcatggccgcccgctacccagcgcccgtacgcgtaccctgctgacgctgttccgtaacgcgctggcggtgattatcagtaccatcaccatcatgattgtgttgtcggaaatcggcgtcaatatcgcgccattgctggcaggtgccggggcattaggtctggctatctcgtttggttcgcaaacgctggtaaaagatattatcaccggggtatttattcagtttgaaaacggcatgaacactggagatttggtgactatcgggccgttgaccggcacagtggaacggatgtcgattcgctccgtgggcgtgcgccaggataccggggcgtatcacatcattccgtggtcttcgataaccacctttgctaacttcgtccgcggtattggttcggtagtggcaaactacgatgttgatcgccatgaagatgctgataaagccaatcaggcactgaaagatgcggtaacggaattgatggaaaacgaagaaattcgcgggctgattattggtgaaccgaactttgccgggattgtcggcttaagcaataccgcgtttacactgcatgtttcgttcaccacgctgccactcaaacagtggacggtacgctttgccctcgacagccaggtgaaaaaacatttcgacctggcgggcgttcgcgcgccagtgcagacttatcaggtgctgcctgctccgggcgcgaccccggctgaaccgctgccgccgggggagccaacgctttaa

SEQ ID NO: 478922 - DNA, 294 bp, Shigella flexneri
gtggcgcacgtcttcggggaacgcactctggccacactggagcgtcttctgagcctgctgtcggcctttgaggtcgtggtatggatgacggatggctggccgctgtatgaatcacgcctgaagggaaagctgcacgttatcagcaagcgttacactcagcgcattgagcgacataatctgaatctgagacaacatctggcaaggctggtacggaagtcactgtcgttctcaaaatcggtggagctgcatgacaaggtcatcgggcattatctgaacataaaacactatcagtaa

SEQ ID NO: 478923 - DNA, 366 bp, Shigella flexneri
atggcccgttcagctaaaccccgtaaacgtaaacccgcctctcaaagaagcaaacttccccgctatgtcgtgaagcttcacgaagatgatttttttgacgaagaagacgcagaagttctgcgctttgatagttttgacgatgccgttgaatgctgcgcagacctgaatattccgttctttgtggatgcgggaaacaaaaagctggtcttctggtttgtacgtgttgatgacgaaggatatccggaaatcgcccgctgcacggagcgggaatttgcgaccattcttgccggtatcagcgccggcggtatgtactgcccggagtgtggcacggttcactggccggacggagtcgccccgcccttctga

SEQ ID NO: 478924 - DNA, 294 bp, Shigella flexneri; identical to SEQ ID NO: 478922

SEQ ID NO: 478925 - DNA, 465 bp, Shigella flexneri
  misc_feature (434)..(443): n is a, c, g, or t
atgtttgattttgcttcttaccatcgcgcagcaacccttgccgatgccatcaacctgctggctgacaacccgcaggccaaactgctcgccggtggcactgacgtactgattcagctccaccatcacaatgaccgttatcgccatattgttgatattcataatctggcggagctgcggggaattacgctggcggaagatggctcgctacgtatcggctctgcaacgacatttacccagctaatagaagatcctataactcaacgtcatctcccggcgttatgtgctgcggccacgttcattgctggaccgcagatccgtaacgtcgctacctacggtggaaatatttgcaacggtgccaccagcgcagattctgccacgccaacgctaatttatgacgcgaaactggagatccactccccgcgcggtgttcgttnnnnnnnnnngtgttcgtttcgtcccgattaa

SEQ ID NO: 478926 - DNA, 492 bp, Shigella flexneri
atgactcaggaagcgctcagacggatagcagagttatacgacatagaagcggagatacgtggcagtccggcagaggaacggcttgcagtcagaaaagccagaagcgtccagttgatgcagtcgttgtacgactggatacagttgcagaggaaaacgctgtcgaaacatgcggagatggcgaaggcgttcgactatatcctgaatcactggaatgcgctgaacgagttctgtcgtgacggctgggtggaaatagacaacaacatcggtgaaaacgcgttacgatcggtggcggttggaagaaaaaattatctctttttcggctcagacaagggaggagaaagtgcggcgatcatctacagtctgctggtcacctgcaaacagaacgaagtggagccggaggactggttgcgcgaagtgatcgagaagctcaatgactggccgtcgaaccaagtgcatgaactgctgccctggaacttctcgtctgtaaaataa

SEQ ID NO: 478927 - DNA, 807 bp, Shigella flexneri; identical to SEQ ID NO: 473219

SEQ ID NO: 478928 - DNA, 171 bp, Shigella flexneri
ttgatacccgtagagcgtcgccaaatcatccttgagatggtagctgaaaaaggcattgtcagtattgctgaactaacggacagaattaatgtgtcacatatgaccattcgtcgggatttacaaaaactggagcagcagggagccgttgtgctggtgtccggaggcgtctag

SEQ ID NO: 478929 - DNA, 411 bp, Shigella flexneri
atgattaaccgtatccgcgtagtcacgctgttggtaatggtgctgggggtattcgcactgttacagcttatttccggcagtttgtttttttcttcccttcaccatagccagaagagctttgtggtttccaatcaattacgggaacagcagggcgagctgacgtcaacctgggatttaatgctgcaaacgcgcattaacctgagtcgttcagcggtgcggatgatgatggattcctccaatcaacaaagtaacgccaaagttgaattgctcgatagcgctaggaaaacattggcccaggccgcgacgcattataaaaaattcaaaagcatggcaccgttacctgaaatggtcgctaccagccgtaattttgatgaaaaatataaaaactattacacagcgttaactgggtaa

SEQ ID NO: 478930 - DNA, 210 bp, Shigella flexneri; identical to SEQ ID NO: 476166

SEQ ID NO: 478931 - DNA, 315 bp, Shigella flexneri; identical to SEQ ID NO: 25695

SEQ ID NO: 478932 - DNA, 435 bp, Shigella flexneri; identical to SEQ ID NO: 25697

SEQ ID NO: 478933 - DNA, 375 bp, Shigella flexneri; identical to SEQ ID NO: 476243

SEQ ID NO: 478934 - DNA, 753 bp, Shigella flexneri
gtgcttctccgtatacaccatgttatcggagagctgcccacgtatggttatcgtcgggtatgggcgctgcttcgcagacaggcagaacttgatggtatgcctgcgatcaatgccaaacgtgtttaccggctcatgcgccagaatgcgctgttgcttgagcgaaaacctgctgtaccgccatcgaaacgggcacatacaggcagagtggccgtgaaagaaagcaatcagcgatggtgctctgacgggttcgagttctgctgtgataacggagagagactgcgtgtcacgttcgcgctggactgctgtgatcgtgaggcactgcactgggcggtgactaccggcggcttcaacagtgaaacagtacaggacgtcatgctgggagcggtggaacgccgcttcggcaacgatcttccgtcgtctccagtggagtggctgacggataatggttcatgctaccgggctaatgaaacacgccagttcgcccggatgttgggacttgaaccgaagaacacggcggtgcggagtccggagagtaacggaatagcagagagcttcgtgaaaacgataaagcgtgactacatcagtatcatgcccaaaccagacgggttaacggcagcaaagaaccttgcagaggcgttcgagcattataacgaatggcatccgcatagtgcgctgggttatcgctcgccacgggaatatctgcggcagcgggcttgtaatgggttaagtgataacagatgtctggaaatatag

SEQ ID NO: 478935 - DNA, 753 bp, Shigella flexneri
gtgcttctccgtatacaccatgttatcggagagctgcccacgtatggttatcgtcgggtatgggcgctgcttcgcagacaggcagaacttgatggtatgcctgcgatcaatgccaaacgtgtttaccggctcatgcgccagaatgcgctgttgcttgagcgaaaacctgctgtaccgctatcgaaacgggcacatacaggcagagtggccgtgaaagaaagcaatcagcgatggtgctctgacgggttcgagttctgctgtgataacggagagagactgcgtgtcgcgttcgcgctggactgctgtgatcgtgaggcactgcactgggcggtgactaccggcggcttcaacagtgaaacagtacaggacgtcatgctgggagcggtggaacgccgcttcggcaacgatcttccgtcgtctccagtggagtggctgacggataatggttcatgctaccgggctaatgaaacacgccagttcgcccggatgttgggacttgaaccgaagaacacggcggtgcggagtccggagagtaacggaatagcagagagcttcgtgaaaacgataaagcgtgactacatcagtatcatgcccaaaccagacgggttaacggcagcaaagaaccttgcagaggcgttcgagcattataacgaatggcatccgcatagtgcgctgggttatcgctcgccacgggaatatctgcggcagcgggcttgtaatgggttaagtgataacagatgtctggaaatatag

SEQ ID NO: 478936 - DNA, 195 bp, Shigella flexneri; identical to SEQ ID NO: 473921

SEQ ID NO: 478937 - DNA, 312 bp, Shigella flexneri; identical to SEQ ID NO: 475598

SEQ ID NO: 478938 - DNA, 339 bp, Shigella flexneri; identical to SEQ ID NO: 474257

SEQ ID NO: 478939 - DNA, 2034 bp, Shigella flexneri; identical to SEQ ID NO: 475764

SEQ ID NO: 478940 - DNA, 726 bp, Shigella flexneri; identical to SEQ ID NO: 13308

SEQ ID NO: 478941 - DNA, 234 bp, Shigella flexneri
atgaaactgacaacgataattgcggcactgcgtgagcgatgcccgcgttttgaggagcgtgttggtggcgcggcgcagtttaaggcgatccctgatgccggaaaacttcgcctgcctgctgcctatgtggttccctctgacgatgcgccgggggaacaaaaatcacagaccgattactggcaggatttgactgaaggcttctccgtgattgtggtgctcagcaatgtgaggtag

SEQ ID NO: 478942 - DNA, 753 bp, Shigella flexneri; identical to SEQ ID NO: 478934

SEQ ID NO: 478943 - DNA, 210 bp, Shigella flexneri; identical to SEQ ID NO: 9340

SEQ ID NO: 478944 - DNA, 360 bp, Shigella flexneri; identical to SEQ ID NO: 475478

SEQ ID NO: 478945 - DNA, 684 bp, Shigella flexneri; identical to SEQ ID NO: 474399

SEQ ID NO: 478946 - DNA, 825 bp, Shigella flexneri; identical to SEQ ID NO: 478357

SEQ ID NO: 478947 - DNA, 210 bp, Shigella flexneri; identical to SEQ ID NO: 475853

SEQ ID NO: 478948 - DNA, 690 bp, Shigella flexneri; identical to SEQ ID NO: 474568

SEQ ID NO: 478949 - DNA, 207 bp, Shigella flexneri
atggacaaaatttcaacgggcattgcctacggcacctccgcaggcagtgctggctactggtttttacagtggcttgatcaggtcagtccgtcacagtgggctgcgattggtgtactggggagtctggttctgggcttcctgacttatctgacaaatctgtacttcaaaatcagagaagacaagcgtaaggctgcgagaggtgaataa

SEQ ID NO: 478950 - DNA, 267 bp, Shigella flexneri; identical to SEQ ID NO: 462029

SEQ ID NO: 478951 - DNA, 303 bp, Shigella flexneri; identical to SEQ ID NO: 473532

SEQ ID NO: 478952 - DNA, 480 bp, Shigella flexneri; identical to SEQ ID NO: 464883

SEQ ID NO: 478953 - DNA, 204 bp, Shigella flexneri; identical to SEQ ID NO: 475480

SEQ ID NO: 478954 - DNA, 492 bp, Shigella flexneri
atggtgcgctgggtatcagaaatggcagacaaactccgtcctctgtatatagcgctgaatgactatgttctggaggcaggaaaggtgcacgcagatgacactccggtgaaagtactggccccggggaacggaaagacgaaaacgggtcgtctgtgggtatacgtcagggatgatcgtaatgcgggttcatccctgccggcagccgtctggttcgcgtattcggcagatcgcaaaggagaacatccgcagctccacctggcaaagtatcagggcgtactgcaggctgatgcctatgcaggttataacgtactgtacgaaacgggccgggtgaaggaagccgggtgcctggcccacgcccgccgaaaaatccatgacaaggatgtgcgccgtccgacagaaatgaagtggcacactgaatttggccacctgaacagaggtgatatgctcacctcagaacaacacaggtgctccaatgaaaaaaagaaattttag

SEQ ID NO: 478955 - DNA, 303 bp, Shigella flexneri; identical to SEQ ID NO: 473532

SEQ ID NO: 478956 - DNA, 303 bp, Shigella flexneri; identical to SEQ ID NO: 473532

SEQ ID NO: 478957 - DNA, 627 bp, Shigella flexneri
atgtggcgttaccggataacgcggctactgtcccggaaatacccggagctggtaataccggatgaactggcagtggaaggaaacagcaaacgggactggaatcgcttcctggacacgcattaccgccgcggctggaatgtcaacatatccagggtgatggataacgccacacatgtggcggtgtacttcggctcttacctgaaaaagccaccggtgccgatgagtcggctggagcattatgccggtcaggatgaaatcggtctgcgttacaacagtcaccgtacaaaacgggaagaatacctgttgatgagtggagatgagttcatggaaaggttctcctggcatgtagcagataaggggttccgtatggtgaggtactacggtttcctgagtccggtgaagcgccgcttactggaagaagttgtgtacgtcataacggagacggtgagaaaaacggcgatgcaaatcaggtggagagggatgtatcagaggttactgaaggttgacccgctgaagtgcgtgctgtgcgggagtcagatgcgttttacggggctgaagcggggctaccgtctggcagagcaggtcctgatgcatgagccgctggcccggatgcggtggtgcggctga

SEQ ID NO: 478958 - DNA, 627 bp, Shigella flexneri
atgtggcgttaccggataacgcggctactgtcccggaaatacccggagctggtaataccggatgaactggcagtggaaggaaacagcaaacgggactggaatcgcttcctggacacgcattaccgccgcggctggaatgtcaacatatccagggtgatggataatgccacccatgtggcggtgtgctttggctcttacctgaaaaagccaccggtgccgatgagtcggctggagcattatgccggtcaggatgaaatcggtctgcgttacaacagtcaccgaacaaaacgggaagaatacctgttgatgagtggagatgagtccatggaaaggttctcctggcatgtggcggataaggggttccgtatggtgaggtactacgtttttttaagtccggcgaaacggcggttactggaagaagtggtgtacatcataacggagacagtgagaaaaacggcgatgcaaatcacctggagagggatgtatcagaggttactgaaggttgacccgctgaagtgcgtgctgtgcgggagtcagatgcgttttacggggctgaagcggggctaccgtctggcagagcaggtcctgatgcatgagccgctggcccggatgcggtggtgcggctga

SEQ ID NO: 478959 - DNA, 267 bp, Shigella flexneri; identical to SEQ ID NO: 462029

SEQ ID NO: 478960 - DNA, 519 bp, Shigella flexneri; identical to SEQ ID NO: 9123

SEQ ID NO: 478961 - DNA, 210 bp, Shigella flexneri; identical to SEQ ID NO: 475853

SEQ ID NO: 478962 - DNA, 225 bp, Shigella flexneri; identical to SEQ ID NO: 133446

SEQ ID NO: 478963 - DNA, 423 bp, Shigella flexneri
  misc_feature (297)..(306): n is a, c, g, or t
atgcaggttatcaccggcaactccgttcacctgccacagaacgtgggttcctttatcggtgataatcccgccccccatccatgtctggccgttcagggcggacaccctgtaatcgccggcaaactgcagatacccagctccctgattaacggaattctgcagaacgacctcgccattattgccggtgaacaggaggttttttcctgcgttcagatcatttcctttctttccatgcatatcccaagtcgtgtttccctgagtcagtgtgccggtgccattagccgcatcatatttccnnnnnnnnnnctgcagtactccttcaccagaggtgtaggctatagttttgtcaaaatcattttgcggttgctgaccaaggaaatcctgagtggtgacgacccagttatttccatagttagttcctga

SEQ ID NO: 478964 - DNA, 237 bp, Shigella flexneri
atgatactcaagctgaaacacaaagtttataattctatccagactaacaggatcaatgtttttattataacaaaactctcggaatctttgatctttactctttcttataaaatcaataagatgcaacccaattccaagcctcatatctttagtattaaatattggcacatcagtttttccctgattaccatgcacatacctgctaacttcatccacaacctctttaaagttatctaa

SEQ ID NO: 478965 - DNA, 303 bp, Shigella flexneri; identical to SEQ ID NO: 473740

SEQ ID NO: 478966 - DNA, 303 bp, Shigella flexneri; identical to SEQ ID NO: 473740

SEQ ID NO: 478967 - DNA, 126 bp, Shigella flexneri
atgcgtgagcgcaagcagactccacagaggatgctccacctgctgttcaacaagatacacattgtgtgtagcacgggtgagcgcaacatacagcgcgttggtaaaaaatttatagatttccgctga

SEQ ID NO: 478968 - DNA, 252 bp, Shigella flexneri
atgatgctggggggggttgtcgaagctcaccagattttcaccaggatgcacgtcatactcttttttctccggaggcagtgccagcatggactgctgctcttcgagccagcgatcacagggacgggcctggattgtttcatgctttcgttggttagcgacatcgtgcatccatcagggcattttgtcggtactgatgaaatggtgctaaggcatcccggaagaaattctgacatactttatgaacaggcatag

SEQ ID NO: 478969 - DNA, 216 bp, Shigella flexneri; identical to SEQ ID NO: 5123

SEQ ID NO: 478970 - DNA, 294 bp, Shigella flexneri; identical to SEQ ID NO: 478922

SEQ ID NO: 478971 - DNA, 327 bp, Shigella flexneri
  misc_feature (110)..(119): n is a, c, g, or t
atggctgcgtgcacagatgaagctgacgagcctgtgctgggcgctgaaagaactggcaaaggatatctggagcagaccatggagcgaggaaagacgcaacgactggcagnnnnnnnnnnccccatgatgaagaatgtggctaaaacgatagggaaaaggttgtacggtatcctgaacgccatgcgccatggcgtatcaaacggaaatgcggaagcactgaacagcaagatcaggctgctgagaataaaagccaagggctaccgcaaccgggagcgctttaagctgggagtgatgttccactatgggaaactgaatatggcgttctaa

SEQ ID NO: 478972 - DNA, 219 bp, Shigella flexneri; identical to SEQ ID NO: 474644

SEQ ID NO: 478973 - DNA, 210 bp, Shigella flexneri
atgacggatggctggccgctgtatgaatcacgcctgaagggaaagctgcacgttatcagcaagcgttacactcagcgcattgagcgacataatctgaatctgagacaacatctggcaaggctggtacggaagtcactgtcgttctcaaaatcggtggagcggcatgacaaggtcatcgggcattatctgaacataaaacactatcagtaa

SEQ ID NO: 478974 - DNA, 219 bp, Shigella flexneri; identical to SEQ ID NO: 474644

SEQ ID NO: 478975 - DNA, 294 bp, Shigella flexneri; identical to SEQ ID NO: 478922

SEQ ID NO: 478976 - DNA, 267 bp, Shigella flexneri; identical to SEQ ID NO: 462029

SEQ ID NO: 478977 - DNA, 210 bp, Shigella flexneri
atgacggatggctggccgctgtatgaatcccgcctgaagggaaagctgcacgtaatcagcaagcgttacactcagcgaattgagcggcataacctgaatctgagacaacatctggcaaggctgggacggaagtcactgtcgttctcaaaatcggtggagctgcatgacaaggtcatcgggcattatctgaacataaaacactatcaataa

SEQ ID NO: 478978 - DNA, 210 bp, Shigella flexneri
atgacggatggctgtccgctgtatgaatcacgcctgaagggaaagctgcacgttatcagcaagcgttacactcagcgcattgagcgacataatctgaatctgagacaacatctggcaaggccggtacggaagtcactgtcgttctcaaaatcggtggagctgcatgacaaggtcatcgggcattatctgaacataaaacactatcagtaa

SEQ ID NO: 478979 - DNA, 780 bp, Shigella flexneri
atgtgggcagaagttcagggtaatcctcatctgctggcgctcggcgcagacagcagcatcaatatggaaggtaaagagagccgtttcggcgtgctggtcagtagcctgtttgcggtcgtgactacggcggcgtcctgtggcgcggtgattgcgatgcatgattcgtttaccgctctcggcggcatggtgccgatgtggctaatgcaaattggtgaagtggtgttcggcggtgtcggttctggtctttacggcatgatgctgtttgtcctgctggcggtgtttattgccgggctgatgattggtcgtacaccggaatatctgggtaaaaaaatagacgtacgcgagatgaaactgactgcactggcgattctggttactccaacactggtactgatgggcgcggcgttggcgatgatgaccgacgccggacgtagcgccatgcttaaccctagcccgcatggttttagcgaagtgctgtacgccgtgtcgtccgccgctaacaacaacggcagcgcctttgccggattaagcgccaactctccgttctggaactgtttactggcgttctgcatgtttgtcggtcgcttcggggtgattatcccggtgatggcaattgccggttcgctggtgagtaaaaagagccaacccgccagctccggcacgctgccaacgcacggcccgctgtttgttggcctgttaatcggcaccgtgttgctggttggcgcactgacctttatccctgccctggcgcttggtccggtggcggaatatctctcctga

SEQ ID NO: 478980 - DNA, 168 bp, Shigella flexneri
atgaaaacaattggtttgctgggaggaatgagctgggaatccaccattccttactatcgtctgataaatgaaggcattaaacagcggcttggtgggcttcactctgcgcaaatgctgctacatagcgtcgattttcatgaaatagaagagtgccagcgtcgcgggtaa

SEQ ID NO: 478981 - DNA, 210 bp, Shigella flexneri; identical to SEQ ID NO: 476166

SEQ ID NO: 478982 - DNA, 477 bp, Shigella flexneri; identical to SEQ ID NO: 471378

SEQ ID NO: 478983 - DNA, 210 bp, Shigella flexneri; identical to SEQ ID NO: 476449

SEQ ID NO: 478984 - DNA, 210 bp, Shigella flexneri; identical to SEQ ID NO: 9340

SEQ ID NO: 478985 - DNA, 210 bp, Shigella flexneri; identical to SEQ ID NO: 475253

SEQ ID NO: 478986 - DNA, 294 bp, Shigella flexneri; identical to SEQ ID NO: 476979

SEQ ID NO: 478987 - DNA, 570 bp, Shigella flexneri
atggcattcatgaatcgaatggctcgtacagaagattttaatttagatgatttttctcaatttattaccgcctttgagaaggtatatatgcatgggtggttaaaaaaacaaattaaaagccaaagagaaatggtttgttattctgctctggatgaagatttatatgagcctcgtccgaatcaagtgaacttaataaaagcaattttgcttcgcttagatatggagcaacaagatgagagcgtgattaaaacctatacggggagaatcacaattgagcatattcttcctcaagcattagttaatgaatactggattaatagattccaacctcaagagcatgtctactggctgcataaaataggtaatttaacactcataagtggttccaaaaattctgaaacacaacactatgattttatcaaaaagaaatctatttatgagaaacttaatagtaaaagctctttttatttaacaaaagatgtttgtaattcttcagaatggggattggctgaactgaaaatgagacatgaaaaaatgaaaacgcaattgaagaagctttggttggtctga

SEQ ID NO: 478988 - DNA, 885 bp, Shigella flexneri
atgagagatctgttacaacgcccggatttattcagtatcaataccgcgacactgggctataaaacgccgctacccgccattattgatgcctgcgccgcacgcggtattggcgcaattgccccctggtgcagggagttgcagggtgaagatctccagcaaatcacccgccagcttgccgccagtaacatgagcgtttccggtttgtgccgtagcacttactacaccgcgccgacactggcggaacgcaaactggcgattgatgataaccgccgggcgctggacgacgcagcggtgcttaacgccgcctgttatatgcaggtggttggcggtctgccaacgggcactaaagatctatatgaagcgcgagaacaagtgaaacaagggattcgccagttgctgccacattcgaaagatgtcggcgtgccaattgcgctggagccactgcacccgatgacagctgccgatcgctcttgcctgtgcacgttacgtcaggcgctggactggtgtgatgaactcgatcccgatggtgagtttggcctcggcgtggcggtggatgtttatcacgtctggtgggatccggatctcgccagtcagatcctgcgtgccggaaaacgcatcctcgcgtttcatgtttccgactggttaatgccgaccactgatctggtcaatgaccgtggtatgccgggagatggcgtcatcaatattccgtcaattcgtcggctggttgaaaacgccggatttaatggtgctattgaactggaaatattctcgccttactggtggcagaaagatattaacagcacgggtaatgactccaacttactgatagtgttttatgttcagataatgcccgatgaccttgtcatgcagctccaccgattttga

SEQ ID NO: 478989 - DNA, 210 bp, Shigella flexneri; identical to SEQ ID NO: 476166

SEQ ID NO: 478990 - DNA, 711 bp, Shigella flexneri
atgaacgctgagcgtaactttctgtttgcctgtcttatttttgcgctggtcatttacgctatccacgctttcggtttattcgatctgctcaccgatttaccccacttacagacactcattcgccagagcggattgttcggttatagcctctatattctgttattcatcaatgcccccctctttctgttaccaggaagcatactggtgatcgctggaggaatagtttttggcccgctcttagggacacaactctcattaattgccgcaacgctggcctcctcgtgctcattcctgctggcgcgctggctgggacgtgatttactgctgaaatacgtgggccatagccataccttccaggccattgaaaaaggcattgcgcgtaacggtattgattttcttattctgacccgcttaatcccgttgtttccttacaatattcaaaattacgcttacggattcaccaccatcgccttctggccttatacccttatttcggcactcacgaccctgcccggtattgttatttataccgtgatggcaagcgatctcgccaatgaaggcattacgctgcgctttattttacaactctgtctggcgggcctggcgctgtttattctcatccagctcgcaaaactctacgcccgacacaaacatgtggatctgtctgcttcgcgccgcagcccacttactcacccaaaaaatgaaggatag

SEQ ID NO: 478991 - DNA, 210 bp, Shigella flexneri; identical to SEQ ID NO: 475853

SEQ ID NO: 478992 - DNA, 294 bp, Shigella flexneri; identical to SEQ ID NO: 478922

SEQ ID NO: 478993 - DNA, 330 bp, Shigella flexneri; identical to SEQ ID NO: 476431

SEQ ID NO: 478994 - DNA, 210 bp, Shigella flexneri; identical to SEQ ID NO: 477941

SEQ ID NO: 478995 - DNA, 498 bp, Shigella flexneri
atgtggactattccagccgaacgcgaacctctgcctggcgtaaaattctcacaccggggctccaagatgcggacaccacatcttgtgccactcagtaaacaggctgtagccatactgacagaacttcagacatgggcaggtgaaaatggtctgatatttacgggtgcacatgacccgcgtaaaccaatcagtgaaaatactgtaaataaagccctgagggtgatggggtatgacacaacccaggaagtctgtggccatggattccgggcgatggcgtgcagtgcattgattgaatcaggtttgtggtcccgcgatgctgtggaacgtcagatgagccatcaggaacgtaacggtgtacgtgctgcttacattcataaagcagaacatctggaagaacggcgactgatgctacagtggtgggccgattttctggatgcaaacagagaaaaatttatcagtccatttgaatatgcaaagattaataacccattaaaataa

SEQ ID NO: 478996 - DNA, 483 bp, Shigella flexneri; identical to SEQ ID NO: 473783

SEQ ID NO: 478997 - DNA, 168 bp, Shigella flexneri
atgagccatcaggagcgtaatggtgtacgtgctgcgtatatccataaagcagaacatctggaagaacggcgactgatgttgcaatggtgggccgattttctagatgcgaaccgggagaagggtatcagcccgtttgaatatgcaaagattaacaatccattaaaatag

SEQ ID NO: 478998 - DNA, 210 bp, Shigella flexneri; identical to SEQ ID NO: 475253

SEQ ID NO: 478999 - DNA, 294 bp, Shigella flexneri; identical to SEQ ID NO: 478581

SEQ ID NO: 479000 - DNA, 210 bp, Shigella flexneri; identical to SEQ ID NO: 477941

SEQ ID NO: 479001 - DNA, 918 bp, Shigella flexneri
atgaacagaagaagaaagctgttaataccgttgttattctgcggcgcgatgctcaccgcctgcgatgacaaatcggcggaaaacgccgccgccatgacgcctgaggtcggtgtcgtcacactctcccctggttcggtcaatgtgttgagcgaattgcccggtagaaccgttccttatgaagttgccgagatacgtccccaggtgggcggtattatcattaaacgcaactttatcgaaggcgataaagtgaaccagggcgattcgctgtatcagattgatcctgcacctttacaggccgagctaaactccgccaaaggctcgctggcgaaagcgctctctaccgccagcaatgcccgcatcacctttaaccgccaggcatcgttgctgaagaccaactacgttagccgtcaggattacgacaccgcgcgcacccagctgaatgaagcagaagccaatgtcaccgtcgccaaagcggctgttgaacaggcgacgatcaatctgcaatacgcgaatgtcacctcgccgattacgggcgtcagcgggaaatcgtcggtgaccgtcggcgcactcgttaccgctaatcaggcagattcgctggttaccgtacaacgtctggacccgatttatgtcgatctcacgcagtcggtgcaagatttcttacgcatgaaagaagaggtcgccagtgggcaaatcaaacaggttcagggcagtacgccagtacagctcaatctggaaaatggtaaacgttacagccagaccggcacgctgaaattctccgacccgacggttgatgaaaccacgggctccgtgacgttacgggcgattttccccaacccaaatggtgacttgctgcctggcatgtatgtcacggcattagtggatgaaggtagccgccagaatgtatttatgactaggtaa

SEQ ID NO: 479002 - DNA, 294 bp, Shigella flexneri; identical to SEQ ID NO: 476979

SEQ ID NO: 479003 - DNA, 210 bp, Shigella flexneri; identical to SEQ ID NO: 475253

SEQ ID NO: 479004 - DNA, 387 bp, Shigella flexneri; identical to SEQ ID NO: 476458

SEQ ID NO: 479005 - DNA, 270 bp, Shigella flexneri; identical to SEQ ID NO: 476990

SEQ ID NO: 479006 - DNA, 441 bp, Shigella flexneri
ttgtacctcgctggcatcaaagatgtttatacgtgcgaaattgtcggctacgccatgggagagcgcatgacaaaagagctgacaggtaaagccctgtttatggcgctcaggagccagcgcccacctgccgggctaatccaccactctgatcgaggttcacagtactgcgcatacgattaccgggtcatacaggagcagtctggtctgaaaacatcaatgtcgcgtaaaggtaactgttacgacaacgctccgatggaaagcttctggggaacgctgaaaaatgagagcctgagccactatcgttttaataaccgggatgaagccatctcagtaatacgggaatacattgagattttctacaatcgtcagcgtcgtcactctcgtctggggaatatctccccggcagccttcagggaaaaatatcatcagatgactgcttaa

SEQ ID NO: 479007 - DNA, 1365 bp, Shigella flexneri
gtgcactggcaaactcacaccatttttaatcaacctataccattaaataacagcaacttatacctgtctgatggcgcgctttgcgaagcggtaacgcgtgaaggtgctggctgggatagcgattttctagccagtattggtcagcagttaggaacggctgaatcccttgaactggggcggctggcgaatgtaaacccgcctgaactgttgcgctacgatgcccaggggcggcgtctggacgatgttcgtttccatcccgcatggcacctgctgatgcaggcgttatgtaccaatcgggtgcacaatcttgcctgggaagaagacgctcgctccggcgcatttgtggcgcgcgcggcgcgttttatgttacatgcgcaggttgaggctgggtcgttatgtccaataacgatgacctttgccgccacgccattgttgttacagatgttacccacgccgtttcaggactggaccacgccgctgctgagcgatcgctacgattctcacttattgccaggtgggcaaaaacgcggtttgttgattggcatgggaatgacggaaaagcagggcggttccgatgtcatgagcaacaccacccgtgcagagcgtttggaagatggctcttatcggctggtggggcataaatggtttttctcggtgccgcaaagcgatgcgcatctggtgctggcgcagaccgcgggcggtctgtcctgcttttttgtgccgcgctttttgcctgacgggcaacgcaacgcgattcgcctcgagcggctgaaagataagctgggtaatcgctctaacgccagttgcgaagtggagtttcaggatgccattggctggttattggggcaggaaggggaaggaattcgtctgatcctgaaaatgggggggatgacgcgttttgattgcgccctgggtagccatgccatgatgcgccgtgcattttcgctggcgatttatcatgcacatcaacgccatgtttttggtaatccattgatccaacagccccttatgcgtcatgtcttaagtcgcatggcacttcagcttgaagggcaaacggcgttgctgtttcgtcttgcgcgagcgtgggaccggcgtgccgatgccaaagaagccctgtgggcgcgtttatttacgcctgcggcaaaatttgtgatctgcaaacgaggtatgccgtttgtggccgaagcgatggaggtgctgggcggcattggttattgcgaggagagcgagctgccgcggctttaccgggagatgccggtaaacagtatttgggaaggttccggcggtaatgactccaacttactgatagtgttttatgttcagataatgcccgatgaccttgtcatgcagctccaccgattttga

SEQ ID NO: 479008 - DNA, 207 bp, Shigella flexneri; identical to SEQ ID NO: 475744

SEQ ID NO: 479009 - DNA, 234 bp, Shigella flexneri; identical to SEQ ID NO: 7244

SEQ ID NO: 479010 - DNA, 930 bp, Shigella flexneri
gtgtccggtcagcacatccaggcgtccgccattttccagtacgacattatcagctttaccctccacaacagagaatgctcccaggcggtttgtgccggtgacggttgcagctgtactggtaaccagtgcaccgcccgtgttctgggtgacatcagacgctttaccgccggcattcacctgcagctttcctttctggttgatggtggtatgcgcggcagttcctccttccttaatcacctgccagccatcacggtttatcagcgtctctgttgccgtgccaccgttgtgtacatactggttacccccctccagtcgggtgttatgtgcctctccgtgtaccgtctggtcaccaccggcgtaaatgagggtgtcccgtgccatccccgaagaccagataacctgccggccatttttattgatggtggtggattcagccgtccctccgaccatctgaccgctggacacattttcagactccggaccaccttctgcaccggtgttgacgatggttccggttgccagtccgccatgttttatggtctggtaaccatcctggttaataattgtaccggcagctttccctcccccgtgtacccactgctcacctctgttatccagcgtggtgttcaccgccagtccgttaaggctctgccctccgccatcacgaataaccgtatcactggcagttcctcctgcctgcacaatctgacgaccatttgcggtgacagtggtgtttctgcctgtgccacccgcttttatccattgcccgccggtgttttcgtcactgtccggccccagctcaagcccggtactgacagtcacgccatcagctgttccggatacaaactggttgtcatggtttaccagtgttccgccattcactgtttcacccgggtgcacaacgatgtcagcagccagcaccgggagtga

SEQ ID NO: 479011 - DNA, 273 bp, Shigella flexneri
atgaatctgtccggcatggctgaggtcatccaccaccgactgcaccgtggcgttatcgggaatattccaggtggcaccagaggcgagagtgacattcgtggggtcaatggcaccgttcagcacagtgctgccggtcagcttcagggctgtaccgcgctgagcaatgacatccgtggtgacggtactgtcgttcagcgtcagcgtgccttcattcaggttgacggctttctgggtgagtgtggtgttgctgacagtgagtgtgccacttcctga

SEQ ID NO: 479012 - DNA, 1455 bp, Shigella flexneri; identical to SEQ ID NO: 476547

SEQ ID NO: 479013 - DNA, 1215 bp, Shigella flexneri; identical to SEQ ID NO: 476539

SEQ ID NO: 479014 - DNA, 327 bp, Shigella flexneri; identical to SEQ ID NO: 474582

SEQ ID NO: 479015 - DNA, 225 bp, Shigella flexneri; identical to SEQ ID NO: 476353

SEQ ID NO: 479016 - DNA, 294 bp, Shigella flexneri; identical to SEQ ID NO: 476979

SEQ ID NO: 479017 - DNA, 303 bp, Shigella flexneri; identical to SEQ ID NO: 473532

SEQ ID NO: 479018 - DNA, 237 bp, Shigella flexneri; identical to SEQ ID NO: 474596

SEQ ID NO: 479019 - DNA, 207 bp, Shigella flexneri
atgaataccccagtttcactgatggatgaccagatggtcgacatgtcgtttatcactcagctgaccggcctgaccgataagtggttttataaactcatcaagcatggagcctttccgccccccatcaaactgggccgtagctcccgctggctgaaaagcgaagtggaagcctggctgcaggcgcgtattgcacagtcccgtccgtaa

SEQ ID NO: 479020 - DNA, 162 bp, Shigella flexneri
atgagcgacgataagcctcgtcacgcttgtcatccatttctgatgctggatgagcagcaggtcacacctgttttcaagttgttgcataatattctctcctttagcgcgcagcaaaatgcctccgggggccggatcatgcctttgctgcggtggaacggataa

SEQ ID NO: 479021 - DNA, 651 bp, Shigella flexneri
atgaaacaggattttcgctgcggctgctggctgatggagaaaccggaaaccgcaatgaaagccatcacacgcaatctcgatcgcgaaatctggcgtgacctgatgcaacgttcagggatgctttccttaatggatgcacaggcccgtgatacatggtaccggtcactggagcacgataattttccggaaatcagtgaagcgaacattctgagcacatttgaacaactacaccagaataaggatgaggtgtttgagcgaggggtgatcaacgtcttcaggggactgaactggaattacaaaaccaattgcccctgcaaatttggcagtaaaattatcgtcaacaacctagtgaggtgggaccggtgggggtttcatcttatcaccgggcaacagactgaccgactcgtcgacctggaaagaatgctacatctgttcagcggcaaaccgatccccgacaaccgggaaaacatcactattcgtctggatggtcacatccagtccgttcagggtaaagagcgctatgaagacgagatgttcatcattaaatactttaagaagggatctgcacacatcactttcaaaaggctggaactgattgacagaattaacgatataatagccaggtactttccttctgtgctctcagcctga

SEQ ID NO: 479022 - DNA, 210 bp, Shigella flexneri
atgacggatggctgtccgctgtatgaatcacgcctgaagggaaagctgcacgttatcagcaagcgttacactcagcgcattgaacgacataatctgaatctgagacaacatctggcaaggctgggacggaagtcactgtcgttctcaaaatcggtggagctgcatgacaaggccatcgggcattatctgaacataaaacactatcagtaa

SEQ ID NO: 479023 - DNA, 888 bp, Shigella flexneri; identical to SEQ ID NO: 474634

SEQ ID NO: 479024 - DNA, 366 bp, Shigella flexneri; identical to SEQ ID NO: 462994

SEQ ID NO: 479025 - DNA, 207 bp, Shigella flexneri
atgcttccatcggaaacgatgatctggcagcctgagttcacagataaaacactctccaggaaacccggggcggttcagctggtcacctgcaaacagaacgaagtggagccggaggactggttgcgcgaagtgatcgagaagctcaatgactggccgtcgaaccaagtgcatgaactgctgccctggaacttctcgtctgtaaaataa

SEQ ID NO: 479026 - DNA, 189 bp, Shigella flexneri; identical to SEQ ID NO: 475619

SEQ ID NO: 479027 - DNA, 327 bp, Shigella flexneri
atgaccagcattcagacccatgaaatcatgctgcttacacattttaatctgggcggcgttttactcagtgagctacatcgtctgggtgaaaaccggctggcaaacaggctgaacagcctgctccggcgtttcgacgatcgtgatctctaccacacgctgatatggctgtgctggtatgatctgatgtgtgcccactccatgcagccctggactgaagagttaaagcataaatcacatgcagagcttgaaaactgggctgtggcgcgcaaacgggaaaagcgcgagctggaactgatgattgacgagtacctgttatacgcctgctga

SEQ ID NO: 479028 - DNA, 342 bp, Shigella flexneri
atggcgctcaggagccagcgcccacctgccgggctaatccaccactctgatcgaggttcacagtactgcgcatacgattaccgggtcatacaggagcagtctggtctgcaaacatcaatgtcgcgtaaaggtaactgttacgacaacgctccgatggaaagcttctggggaacgctgaaaaatgagagcctgagccactatcgttttaataaccgggatgaagccatctcagtaatacgggaatacattgagattttctacaatcgtcagcgtcgtcactctcgtctggggaatatctccccggcagccttcagggaaaaatatcatcagatgactgcttaa

SEQ ID NO: 479029 - DNA, 423 bp, Shigella flexneri; identical to SEQ ID NO: 235052

SEQ ID NO: 479030 - DNA, 366 bp, Shigella flexneri; identical to SEQ ID NO: 462994

SEQ ID NO: 479031 - DNA, 207 bp, Shigella flexneri; identical to SEQ ID NO: 476002

SEQ ID NO: 479032 - DNA, 303 bp, Shigella flexneri; identical to SEQ ID NO: 473532

SEQ ID NO: 479033 - DNA, 354 bp, Shigella flexneri; identical to SEQ ID NO: 466835

SEQ ID NO: 479034 - DNA, 207 bp, Shigella flexneri; identical to SEQ ID NO: 476087

SEQ ID NO: 479035 - DNA, 195 bp, Shigella flexneri; identical to SEQ ID NO: 474694

SEQ ID NO: 479036 - DNA, 327 bp, Shigella flexneri; identical to SEQ ID NO: 471498

SEQ ID NO: 479037 - DNA, 291 bp, Shigella flexneri; identical to SEQ ID NO: 474546

SEQ ID NO: 479038 - DNA, 132 bp, Shigella flexneri
atggacgaaaccgagtttcagcaggtttataaatctgtactgaatgtgctgtggaactggatcctgttccgtaaattttcctctccggaggaagtcgaaaatgtggccgcgcagttactggagtttgcgtaa

SEQ ID NO: 479039 - DNA, 231 bp, Shigella flexneri
atgctacatctgttcagcggcaaaccgatccccgacaaccgggaaaacatcactattcgtctggatggtcacatccagtccgttcagggtaaagagcgctatgaagacgagatgttcatcattaaatactttaagaagggatctgcacacatcactttcaaaaggctggaactgattgacagaattaacgatataatagccaggtactttccttctgtgctctcagcctga

SEQ ID NO: 479040 - DNA, 222 bp, Shigella flexneri
atgccattctatttcaggaaggagtgtccgttaaactcaggctacctcagtcagagccgcatgggtgagctgttgctacaccccggtatttccaccacggaggccagcatgaacaacaataacacattgtacgtcgggttagatgttcacaaagaatcgattactgtcgcttatgaaccgccccgggaatcctggagactaaacttcctgagaaagaggtaa

SEQ ID NO: 479041 - DNA, 225 bp, Shigella flexneri; identical to SEQ ID NO: 133446

SEQ ID NO: 479042 - DNA, 261 bp, Shigella flexneri; identical to SEQ ID NO: 34082

SEQ ID NO: 479043 - DNA, 480 bp, Shigella flexneri
gtggcggacctgacgtatgttgccacacaggagggatggttgtacctcgctggcatcaaagatgtttatacgtgtgaaattgtcggctacgccatgggagagcgcatgacaaaagagctgacaggtaaagccctgtttatggcgctcaggagccagcgcccacctgccgggctaatccaccactctgatcgaggttcacagtactgcgcatacgattaccgggtcatacaggagcagtttggtctgaaaacatcaatgtcgcgtaaaggtaactgttacgacaacgctccgatggaaagcttctggggaacgctgaaaaatgagagcctgagccactatcgttttaataaccgggatgaagccatctcagtaatacgggaatacattgagattttctacaatcgtcagcgtcgtcactctcgtctggggaatatctccccggcagccttcagggaaaaatatcatcagatggctgcttaa

SEQ ID NO: 479044 - DNA, 465 bp, Shigella flexneri; identical to SEQ ID NO: 474844

SEQ ID NO: 479045 - DNA, 1821 bp, Shigella flexneri; identical to SEQ ID NO: 474838

SEQ ID NO: 479046 - DNA, 783 bp, Shigella flexneri; identical to SEQ ID NO: 474887

SEQ ID NO: 479047 - DNA, 213 bp, Shigella flexneri; identical to SEQ ID NO: 462242

SEQ ID NO: 479048 - DNA, 186 bp, Shigella flexneri; identical to SEQ ID NO: 474908

SEQ ID NO: 479049 - DNA, 1326 bp, Shigella flexneri; identical to SEQ ID NO: 474914

SEQ ID NO: 479050 - DNA, 213 bp, Shigella flexneri; identical to SEQ ID NO: 462242

SEQ ID NO: 479051 - DNA, 213 bp, Shigella flexneri; identical to SEQ ID NO: 462242

SEQ ID NO: 479052 - DNA, 213 bp, Shigella flexneri
gtgaatattaattaccctgctgaatatgaaattggagatatcgtctttacatgtataggtgctgccttatttggtcaaatatcagctgcatcaaattgctggagtaatcacgtcgggatcattatcggtcataacggtgaagacttcctggttgcagaaagccgggttcccctttcaaccatcaccacgctggtaatgctgccaacttactga

SEQ ID NO: 479053 - DNA, 300 bp, Shigella flexneri; identical to SEQ ID NO: 84330

SEQ ID NO: 479054 - DNA, 2991 bp, Shigella flexneri
gtgattgaggacggctcccccaatgtctttctcggcggcggtacgcagacggtactggaaatcagcccggaaatccctgactggctgcgtcaggtggtggatgtgctgtatgtggtcgccggaatgcttggcgggctggctggcgcctggcgtcaggcggcaaagatggggtcgaaatttggtacaaaatgtgcggcaaaatttattggtggcgaaatggtcgggatggccatctctgacacagtcatgggattgttcagcaatccggtagatgtcaccactgggcaaaaaattttgctgccggagacggattttaccctgccaggacgcctgcctgtcacctgttcgagcttttacgccagccacctggaaactgaaggattgctgggcagaggatggcggctgaactgggagataaacctgcgtgaggatgaaacatatatcaccttcatcggtgtacagggtcgggaactgagttatccgaaagagatgctgataccgggccaccagatattcgacccggaagagcagttttacctgagccgtctgcatgacggatgctatgtgctgcattacaccgaccgcagctattacgtgtttgatgaatttgatgaccacggcgtcgcgccgttactttttatggagacgccgtaccggcagcgtattgctttcgggcgtgagaacggcaggctggtgcgggtggcctccagcagcggacaccatctgttattgcaccgcacgatgacgcaagcaggggaacgcctgtcgcatattgaacttgtgaagggcgggcgtcccggtaacctggtggaatatcgttacgacgataacgggcaactgactggcgtggtgaaccgggctggtgtgacggtgcgccagtttgcctatgaaaatggcctgatgacagagcatcgcaacgcgacgggctttacctgtacctaccactgggaagagattgaaggtttcccgcgcgtggtggaacacacgaccagcgacggcgaggattaccggttccactatgattttgctggcgggcagacggtggtaaccggcaggccggagcagaagtggcagtggtggtttgatgaagagacgtatgtgactgcgcaccggacgccgggcggcggaatgtaccgcttcacgtacaacgaaaaccattttccggtagcggtggaactccccggcgaacgcagggtaacgctggaatacgacaccctgagccgggtggtgaaagagacggacccggcaggccgggtgacacagacgcagtggaacggcagttttgctgaaatcacgcgccgggcgctggatgacgaccacgtatggaaggcggattacaacgaacacggccaggtgatacgggagacggacccggaagggcgcgtcacgcggtacgggtatgatgaacaggggctggcggtcagccgcacggatgcgcggggcggcgaggttgtgctggcgcacgatgcgcgcggtcaactgaggcgttacaccgactgttcagggtgcgccacgggttatgaatacgatgaagacggcaacctgacggcggtgacggacgcggaggggaaaacggtacgcatcagctataaccgtcaggggctgccggagacggtctgccaccccggtaaacagcaggaccgttacacctggaacgcgctggggttactgagcagccaccgtcgcatcacgggcagtgtgcagtcctggcagtatacgccgcgcgggatgctggcgcgccatacggatgaagagaaacgggagacgcgctggcagtacaccccggaagggctggttgccagtctgagcaacggcaacggggctcagtaccggttcagctacgacggcgacggacggctgacgggagaacagcgcccggacggcctgataaggatgtttgcgctgaatgcggacgggtttccggtcatcatccagacgcagggcacagagggcggggtgcgcaatgaacagcaggagcgtgatgcgctgggccgcctgctgcgcagtgacacgcagcacagtacacggaccttcagctacaaccgtcttgaccagataacggaagtgacgctcacccccacggaagaaggggaacggctgcaccacatgcaggcggacacggtgcgttttgcgtatgaccgcagcgggtggctgacggcagagcacagcgtgcacggcagtatcaaataccggcgcgatgcgctgggcaatcccaccgatatcacgttgccggacgggcagcatctcagtcatctttactacggcagcgggcatctgctccagacggcactggacggtatcacggtcagtgaatatgagcgtgacagcctgcaccgtcaggtgatacgcacgcaggggaaactggcgacgttcagcggctacaacgccgacaaccggttaagctggcagcgcagcctgccaggtggcagccagaatccacagcaggccggtactcccccggcgcagaacgacagcgtgacggcgcgggactatatctggaacgcagacggtgaagtcggcggcatcaatgacaaactgcgcggttgcctggtgttcagctatgaccgcagcggctggctgaccagccgcacggggcagatgtatgaccatgaccattattattacgacaaagcgggcaacctgctgacggatgagtatcagggagcggtgatggataaccgcctgccgggctacgggcgtgaccgttaccgctataacgaatggggcgaactgacagagcgcagggaccagcaactggagtggaacgcgcagggccagttaacgcgggtcatcagcagcaacagcgatacgctgtatcagtatgatgcgctgggcaggcgcatcagcaaggtgacatatggccgccatcacggggcgcggagagagccagaaaatctggtattaccacacggacctgacgggcacggtacacgaggtaaccgcgccggacgggacgctggtgtgggcgggctaccaggcgggatttggtga

SEQ ID NO: 479055 - DNA, 1209 bp, Shigella flexneri
atgagttttgtatctacgggtaataaaccagttggaaacggtggacccgtcatcaccacaccaccaatagctggcgaaagtggcggtatgagcacaggttcagctgtaaccgatgtatctggtgccgccgaggagatggcagaacaggcagcggcggacctgtttggtgcgctgccggaaccgtcaggtctggttaaagccgcagtagctgctgcgcaggctgccgctgcagcagcagggatctcggatatggctggtgcagttcaggatgcggcggcgtcgcttgcagccggtggtccgggggcgcataacgtcacagtaagtggtagtgcggtgccgccgcagatgcttttgtttgcaggcatgaatggttcggaagggcttgggaatctgttttcttacacagtacagcttaaaacgctggacgccctgaacctggggtacgtttcccccgctgctaacctgccgcttcagctcatggtgggcaaagacctgtgcgtcagtatcgaactggacggcggcggaaaacggtatatcagcgggctggtgacggcggcgagggtggtcggccatgagggccgttcggtaacgtatgaattacgcattgagccatggctgaagctgctgacccataccagcgactacaaagcgttccagaacaaaaccgtggtggatattctcgatgaagtactggatgaatattcctttccggtggaaaagcggctggtggaaaattatccaccccgcgcctggcaggtgcagtatggtgaaaccgacttcgatttcatccagcgcctgatgcaggaatgggggatttactggtggtttgagcacagcgagaacagccacacgctggtgctggtggatgccatcaatggtcataaagcgtgccctgactcgccgctggtggagtggcaccaggaagggctgaaactggataaggaatttatccacaccattacggccagtgagaggctgcgtactggaaagtgggtgatggacgattttgattttatgaagcctcgttcgctgcttaaaagtaccgtggccagtccgcgtgataccggtcatgctgaatacgagcattacgaatggcctggtgattacttcactacgggcgaaggcgagatgctgacgcgcattcgtatggaagcgcagcgcagcccaggcagccggcacatggggccggtcatatccgtaccctcatga

SEQ ID NO: 479056 - DNA, 210 bp, Shigella flexneri; identical to SEQ ID NO: 5053

SEQ ID NO: 479057 - DNA, 3120 bp, Shigella flexneri
gtgtggctggaaaacgactacatcaaagtgatgatcctgccggaactgggcggtcgggtgcatcgcgcatgggataaagtgaaacagcgcgattttgtctatcacaatgaagtcattaaacctgcgctggtggggctgctgggaccgtggatctccggcgggattgagtttaactggccgcaacaccatcgcccgaccacctttatgcccgttgatttcaccctcgaagcccatgaagacggtgcacagacggtgtgggtcggcgaaacggagccgatgcatggtttacaggtgatgacaggtttcaccctgcgccctgaccgggcggcactggaaatcgccagccgcgtctataacggcaacgccacgccgcgtcatttcttgtggtgggccaacccggcagtgaaagggggtgaagggcatcagagcgttttcccaccggatgtgactgcggtgtttgatcacggcaaacgggccgtctccgctttccccatcgccaccggcacttactacaaagtggactactccgccggagtggacatttctcgctataaaaatgtgcctgttccaacctcatatatggccgaaaaatcgcagtacgattttgtcggcgcgtggtgtcacgatgaagatggcggtttgctgcacgttgccaaccaccatattgcgccaggtaaaaaacagtggagttggggacacagtgaatttggccaggcgtgggataagagtctgaccgacaataacggcccgtatatcgaactgatgaccggtatttttgccgataaccagcctgattttacctggcttgatgcttacgaagagaagcgtttcgagcagtatttcctgccttatcattctctgtgcatggtgcaaaatgcctcccgcgatgcggtgataaaactccagcgtagtgagcgggggattgagtgggggctgtatgccatctctccgttgaacggataccgtctggcgatccgcgaaatcggcaaatgcaacgcgttgctcgatgatgccgtggccctgacaccagcgaccgccatccagggcgtgttgcacggtatcaatcctgacagactgaccattgaactctccgatgccgacggcaatattgtactgagttatcaggaacatcagccgcaggagttgccgttgccggacgtcgccaaagcgccactggcagcacaagacattaccagtacagatgaagcctggtttatcggtcagcatctggagcaatatcatcacgccagccgttcaccgttcgattactacctgcgcggcgtggcgctggacccgctggattatcgctgtaacctggcgctggcgatgctggaatataaccgcgcagatttcccgcaagcggtggcgtatgccagtcaggcgctgaaacgcgcacatgcgctgaacaaaaacccgcagtgtggacaagcaagtttgattcgcgccagtgcttacgaacgtcagggacaatatcaacaagccgaagaggatttctggcgtgcggtctggagcggcaatagtaaagcaggcggctattatggtctggcacgactggcggcgcgtaatgataacttcgacgcgggtctggatttttgccaacaaagtcttcgtgcctgcccaaccaatcaggaagtgctttgcttgcataatctgctgctggtgttaagtggtcgtcaggacaacgcgcgtttgcagcgcgagaaactgctgcgtgattatccgctgaacgccactctgtggtggctgaactggttcgatggtcgtagcgaatcagccctcgcgcagtggcgcggtctgtgtcagggacgcgacgttaacgctctgatgaccgccgggcaactgattaactggggaatgcccaccctggcggcagagatgctgaacgcactggactgccagcgcacgctgccgctttacctgcaagccagcttgctgccgaaagccgaacgtggcgaactggtcgcaaaagccattgatgtcttcccgcagtttgtccgtttcccgaatacgctggaagaagtggcggcgctggagagtattgaagagtgctggtttgctcgccatttactggcctgcttctactacaacaaacgtagctacaacaaagccattgccttatggcaacgttgcgtagagatgtcgccggagtttgccgacggctggcgcgggttagcgatccatgcgtggaataagaaacacgattatgagctggccgcgcgttatcttgataatgcttatcagcttgcgccgcaggatgcacgtctgcttttcgaacgggatttgctggataagttaagtggagccacaccggagaaacgactggcgcgtctggaaaataatctggaaattgcgctgaaacgcgacgacatgaccgcagaactgctcaatttgtggcatctcacgggtcaggcagacaaagcggcggacattctcgccacgcgtaaattccacccgtgggaaggcggggaagggaaggtcaccagtcagtttatcctcaaccagttattacgcgcctggcagcatcttgatgccagagagccgcagcaggccagcgaactgcttcatgccgcgctgcattatccggagaatttaagcgaaggccgtttaccggggcaaactgataacgacatctggttctggcaggcgatatgcgccaacgcgcagggcgatgaaactgaagcgatgcgttgtttacgtctggcggcgaccggcgatcgcaccattaacatccacagttattacaacgatcagccggttgattatctcttctggcaaggaatggcgctgcgactgctgggtgaacagcaaaccgcacagcaactgtttagtgaaatgaaacagtgggcgcaagagatggcgaaaaccagtattgaggcggatttctttgctgtttcacaacctgacctgttatcgctgtatggcgatttacaacagcagcataaagaaaaatgcctgatggtggcgatgctggcgtccgcgggactcggggaggttgcgcaatatgagtctgctcgcgctgaattgacggcgattaatccggcctggccgaaagcggcattattcaccactgtgatgccttttatttttaactacgttcaggtaatgactccaacttactga

SEQ ID NO: 479058 - DNA, 294 bp, Shigella flexneri; identical to SEQ ID NO: 25632

SEQ ID NO: 479059 - DNA, 702 bp, Shigella flexneri; identical to SEQ ID NO: 474947

SEQ ID NO: 479060 - DNA, 213 bp, Shigella flexneri; identical to SEQ ID NO: 462242

SEQ ID NO: 479061 - DNA, 237 bp, Shigella flexneri
atgtctgatttttacgtgataattcaggaggcacagaaagcgcataaaaataacaacataaaacaccttgccaccacccaagaattctctattgcattgtttttaatgaaaaaaatatcattccaacaatatctcacgataaataacattaggattttgttatttaaacacgagtcctttgcacttgcttactttatcgataaatcctacttttttaatgcgatccaatcattttaa

SEQ ID NO: 479062 - DNA, 1164 bp, Shigella flexneri
atgaagtctgcattaaagaaaagtgtcgtaagtacctcgatatctttgatactggcatctggtatggctgcatttgctgctcatgcggcagatgatgtaaagctgaaagcaaccaaaacaaacgttgctttctcagactttacgccgactgaatacagtaccaaaggaaagccaaatattatcgtactaaccatggatgatcttggttatggacaacttccttttgataagggatcttttgacccaaaaacaatggaaaatcgtgaagttgtcgatacctacaaaatagggatagataaagccattgaagctgcacaaaaatcaacgccgacgctcctttcattaatggatgaaggcgtacgttttactaacggctatgtggcacacggtgtttccggcccctcccgtgccgcaataatgaccggtcgagctcccgcccgcgttggtgtctattccaataccgatgctcaggatggtattccgctaacagaaactttcttgcctgaattattccagaatcatggttattacactgcagcagtaggtaaatggcacttgtcaaaaatcagtaatgtgccggtaccggaagataaacaaacgcgtgactatcatgacaacttcaccacattttctgcggaagaatggcaacctcaaaaccgtggctttgattactttatgggattccacgctgcaggaacggcatattacaactccccttcactgttcaaaaatcgtgaacgtgtccccgcaaaaggttatatcagcgatcagttaaccgatgaggcaattggcgttgttgatcgtgccaaaacacttgaccagccttttatgctttacctggcttataatgctccgcacctaccaaatgataatcctgcaccggatcaatatcagaagcaatttaataccggtagtcaaacagcagataactactacgcttccgtttattctgttgatcagggtgtaaaacgcattctcgaacaactgaagaaaaacggacagtatgacaatacaattattctctttacctccgataatggtgcggttatcgatggtcctctgccgctgaacggggcgcaaaaaggctataagagtcagacctatcctggcggtactcaccaccccaatgtttatgtggtggaaaggaaaacttcaacccggtaa

SEQ ID NO: 479063 - DNA, 480 bp, Shigella flexneri
gtggcggacctgacgtatgttgccacacaggagggatggttgtacctcgctggcatcaaagatgtttatacgtgtgaaattgtcggctacgccatgggagagcgcatgacaaaagagctgacaggtaaagccctgtttatggcgctcaggagccagcgcccacctgccgggctaatccaccactctgatcgaggttcacagtactgcgcatacgattaccgggtcatacaggagcagtttggtctgaaaacatcaatgtcgcgtaaaggtaactgttacgacaacgctccgatggaaagcttctggggaacgctgaaaaatgagagcctgagctactatcgttttaataaccgggatgaagccatctcagtaatacgggaatacattgagattttctacaatcgtcagcgtcgtcactctcgtctggggaatatctccccggcagccttcagggaaaaatatcatcagatggctgcttaa

SEQ ID NO: 479064 - DNA, 972 bp, Shigella flexneri; identical to SEQ ID NO: 474973

SEQ ID NO: 479065 - DNA, 252 bp, Shigella flexneri; identical to SEQ ID NO: 474975

SEQ ID NO: 479066 - DNA, 360 bp, Shigella flexneri; identical to SEQ ID NO: 478556

SEQ ID NO: 479067 - DNA, 249 bp, Shigella flexneri; identical to SEQ ID NO: 475010

SEQ ID NO: 479068 - DNA, 717 bp, Shigella flexneri; identical to SEQ ID NO: 475041

SEQ ID NO: 479069 - DNA, 285 bp, Shigella flexneri
atgtacatgcggatgccagttgagacgacggccatacgtgtggatggcgcagaagataccgggttcctggccccgtttccgggcggcatacagcagattctccaccgccagacggcacacgtcattcagcagccaccggttgctttcgaacaccggccacagcgtgtccggcagggtgaagaccaggtgtacccagtcgcagtcaggaagacgattcagctgtgtcgctatccacaggtctgtggccttttttccgcaggacgggcaggcacggctgccgcatga

SEQ ID NO: 479070 - DNA, 882 bp, Shigella flexneri; identical to SEQ ID NO: 475065

SEQ ID NO: 479071 - DNA, 819 bp, Shigella flexneri; identical to SEQ ID NO: 475066

SEQ ID NO: 479072 - DNA, 294 bp, Shigella flexneri; identical to SEQ ID NO: 25632

SEQ ID NO: 479073 - DNA, 219 bp, Shigella flexneri; identical to SEQ ID NO: 478492

SEQ ID NO: 479074 - DNA, 294 bp, Shigella flexneri; identical to SEQ ID NO: 25632

SEQ ID NO: 479075 - DNA, 213 bp, Shigella flexneri; identical to SEQ ID NO: 462242

SEQ ID NO: 479076 - DNA, 294 bp, Shigella flexneri; identical to SEQ ID NO: 25632

SEQ ID NO: 479077 - DNA, 294 bp, Shigella flexneri
gtggcgcacgtcttcggtgaacgcactctggccacactggagcgtcttctgagcctgctgtcggcctttgaggtcgtggtatggatgacggatggctggccgctgtatgaatcacgcctgaagggaaagctgcacgttatcagcaagcgttacactcagcgcattgagcgacataatctgaatctgagacaacatctggcaaggctgggacggaagtcactgtcgttctcaaaatcggtggagctgcatgacaaggtcatcggacattatctgaacataaaacactatcagtaa

SEQ ID NO: 479078 - DNA, 366 bp, Shigella flexneri; identical to SEQ ID NO: 478923

SEQ ID NO: 479079 - DNA, 237 bp, Shigella flexneri
atgaatattcctggttcggaagtaactggcatgcgcggcggcattcataacttggtcacccgcgtttgcccgaaaccgacgcatatgattggcggttacgcgcagctggcctggggctttaactactacggcaccgtcggctcgaaccgcgacgaattcatcatgatccgcaagatgaagaacgttaactggctggatgatgaaggtcgcgatcaggtacaggaggcgaaaaaatga

SEQ ID NO: 479080 - DNA, 366 bp, Shigella flexneri; identical to SEQ ID NO: 476838

SEQ ID NO: 479081 - DNA, 294 bp, Shigella flexneri; identical to SEQ ID NO: 25632

SEQ ID NO: 479082 - DNA, 426 bp, Shigella flexneri
ttgaacgttgggatcagtaaacgcttttttgagcagcattacctgccgttgttgccttattgctttgttgcttcgcaggtataccggaccaataacgcttttctcacctatgtggaaacagtgatttcttcattaaatttccgcgaaacagggctggaagagtttgttgagatggttactttttatgtcattaaccgtttacgtcattaccgcgaagaacaggtgattgatgatgtaccgcagtggctgaaaagtacggtagaaaagatgcatgataaagagcagtttagtgaatcggcgctggagaatatggtgacgttgtcagccaaatcacaggaatatttgacgcgagcgactcaacgatattatggcaaaacaccaatgcagattattaatgagatccgggtaatgactccaacttactga

SEQ ID NO: 479083 - DNA, 858 bp, Shigella flexneri
gtgactgatcttcaacaaacgtattaccgccaggtaaagaacccgaatccggtgtttacaccccgtaaaggtgccggaacgctgaagttctgcgaaaaactgatggaaaaggcggtgggcttcacttcccgttttgatttcgccattcatgtggcgcatgcccgttcgcgtggtctgcgtcgacgcatgccaccggtgctgcgtcgacgggctattgatgcgctcctgcaggggctgtgtttccactatgacccgctggccaaccgcgtccagtgctccatcaccacgctggccattgagtgcggactggcgacggagtctgctgccggaaaactctccatcacccgtgccacccgtgccctgacgttcctgtcagagctgggactgattacctaccagacggaatatgacccgcttatcgggtgctacattccgaccgatatcacgttcacaccggctctgtttgctgcccttgatgtgtctgaggatgcagtggcagctgcgcgccgcagtcgtgttgaatgggaaaacagacagcgcaaaaagcaggggctggataccctgggtatggatgagctgatagcgaaagcctggcgttttgtgcgtgagcgtttccgcagttaccagacagagcttaagtcccgtggaataaaacgtgcccgtgcgcatcgtgatgcgaacagggaacgtcaggatatcgtcaccctggtgaaacggcagctgacgcgtgaaatctcggaaggacgcttcactgctaatggtgaggcggtaaaacgcgaagtggagcgtcgtgtgaaggagcgcatgattctgtcacgtaaccgtaattacagccggctggccacagcttctccctga

SEQ ID NO: 479084 - DNA, 228 bp, Shigella flexneri; identical to SEQ ID NO: 475144

SEQ ID NO: 479085 - DNA, 294 bp, Shigella flexneri; identical to SEQ ID NO: 25632

SEQ ID NO: 479086 - DNA, 606 bp, Shigella flexneri; identical to SEQ ID NO: 478508

SEQ ID NO: 479087 - DNA, 480 bp, Shigella flexneri
gtggcggacctgacgtatgctgccacacaggagggatggttgtacctcgctggcatcaaagatgtttatacgtgcgaaattgtcggctacgccatgggagagcgcatgacaaaagagctgacaggtaaagccctgtttatggcgctcaggagccagcgcccacctgccgggctaatccaccactctgatcgaggttcacagtactgcgcatacgattaccgggtcatacaggagcagtctggtctgaaaacatcaatgtcgcgtaaaggtaactgttacgacaacgctccgatggaaagcttctggggaacgctgaaaaatgagagcctgagccactatcgttttaataaccgggatgaagccatctcagtaatacgggaatacattgagattttctacaatcgtcagcgtcgtcactctcgtctggggaatatctccccggcagccttcagggaaaaatatcatcagatggctgcttaa

SEQ ID NO: 479088 - DNA, 201 bp, Shigella flexneri; identical to SEQ ID NO: 478509

SEQ ID NO: 479089 - DNA, 234 bp, Shigella flexneri
gtgaaacaggaacataacgaagctgacggaggcggtcacggctttcccgtgggcgttttcgtcagcagacaagcccgtcagggcgcgtcagggggttttagcgggtgtcggggcgcagccatgacccagtcacgtagcgatagcggagtgtatacgggcttaaccatgcggcatcagtgcagattgtatgaaaagtgcgccataccgggtgtgaaatgctgcacagatacgtaa

SEQ ID NO: 479090 - DNA, 294 bp, Shigella flexneri; identical to SEQ ID NO: 25632

SEQ ID NO: 479091 - DNA, 294 bp, Shigella flexneri; identical to SEQ ID NO: 25632

SEQ ID NO: 479092 - DNA, 213 bp, Shigella flexneri; identical to SEQ ID NO: 462242

SEQ ID NO: 479093 - DNA, 762 bp, Shigella flexneri; identical to SEQ ID NO: 478515

SEQ ID NO: 479094 - DNA, 480 bp, Shigella flexneri; identical to SEQ ID NO: 478803

SEQ ID NO: 479095 - DNA, 213 bp, Shigella flexneri; identical to SEQ ID NO: 462242

SEQ ID NO: 479096 - DNA, 213 bp, Shigella flexneri; identical to SEQ ID NO: 462242

SEQ ID NO: 479097 - DNA, 615 bp, Shigella flexneri; identical to SEQ ID NO: 478782

SEQ ID NO: 479098 - DNA, 294 bp, Shigella flexneri; identical to SEQ ID NO: 25632

SEQ ID NO: 479099 - DNA, 294 bp, Shigella flexneri; identical to SEQ ID NO: 25632

SEQ ID NO: 479100 - DNA, 213 bp, Shigella flexneri; identical to SEQ ID NO: 462242

SEQ ID NO: 479101 - DNA, 294 bp, Shigella flexneri; identical to SEQ ID NO: 25632

SEQ ID NO: 479102 - DNA, 480 bp, Shigella flexneri
gtggcggacctgacgtatgttgccacacaggagggatggttgtacctcgctggcatcaaagatgtttatacgtgcgaaattgtcggctacgccatgggagagcgcatgacaaaagagctgacaggtaaagccctgtttatggcgctcaggagccagcgcccacctgccgggctaatccaccactctgatcgaggttcacagtactgcgcatacgattaccgggtcatacaggagcagtttggtctgaaaacatcaatgtcgcgtaaaggtaactgttacgacaacgctccgatggaaagcttctggggaacgctgaaaaatgagagcctgagccactatcgttttaataaccgggatgaagccatctcagtaatacgggaatacattgagattttctacaatcgtcagcgtcgtcactctcgtctggggaatatctcaccggcagccttcagggaaaaatatcatcagatggctgcttaa

SEQ ID NO: 479103 - DNA, 480 bp, Shigella flexneri; identical to SEQ ID NO: 464883

SEQ ID NO: 479104 - DNA, 639 bp, Shigella flexneri; identical to SEQ ID NO: 475208

SEQ ID NO: 479105 - DNA, 1068 bp, Shigella flexneri
ttgctctctattattattaattctgattttaacttcagacatcaaagtaacgctaacctgtcaaataatactcttaatattaagtcctttgataaaattaagtctgagaatatacaaacatataaaaacacattctctgaggatattgaagaaatagctaaccacgattttgttttttttggggttgaaatttccaatcatcaagaaacactcccactaaataaaacacatcatactgtggattttggtgctaatgcgtatatcattgatcatgactctccatatggatatatgacattaaccgaccactttgataatgctattccacctgttttttaccatgagcaccaatcatttttcttagataactttaaagaggttgtggatgaagttagcaggtatgtgcatggtaatcagggaaaaactgatgtgccaatatttaatacaaaagatatgaggcttggaattgggttgcatcttattgattttataagaaagagtaaagatcaaagattccgagagttttgttataataaaaacattgatcctgttagtctggatagaattataaactttgtgtttcagcttgagtatcatataccaagaatgctaagcacagataacttcaaaaagataagactcagagatatatctttggaggatgccattaaagcatccaattatgaagaaattaacaataaggtgactgataaaaaaatggctcatcaggcccttgcttattctctaggcaatgcaaaatctgatatggcactttatttactatctaaatttaattttacaaaacaagatgtcgcagagatggagaaaatgaacaacaatatgtattgtgagctgtatgatgttgagtatttacttagtgaagatagtgccaactataaagtgctagaatattttattaataatggattggttgatgtaaacaaaagatttcaaaaagcaaatagtggggacactatgcttgacaatgcaatgaaaagcaaagattcaaaaacaattgattttttattaaaaaatggagcggtatcaggcaaacgatttgggaggtga

SEQ ID NO: 479106 - DNA, 243 bp, Shigella flexneri; identical to SEQ ID NO: 478819

SEQ ID NO: 479107 - DNA, 822 bp, Shigella flexneri
atgaacaatgaactccccgatgatattgagctgcttaaagccatgttgcgtaagcaacagagtcggcttcgacagtatgcctgtcaggtcgcgggctatgagcaggaaattgaacggctgaaagcgcaactcgacaggttgcgtcgtatgttgttcggccagagttcagagaaaaagcgtcataagcttgaaaatcagatccgacaggcagaaaaacgactgtcggaactggaaaaccggctgaacacagccagaaatcttctggaagatgcatcgtcagtcacagattcacctgacaccagtcccccgtcagaaaacccgatcgccagtaagcctgaatccccgggacgaaaatcttcacgaaaaccgctgccggcagaacttccccgggagacacatcgccttctgcctgctgaaaccagttgcccggcctgtggaggtgttctgaaagaaatgggggaaacaatctcagagcaactggatatcattaataccgcctttaaagttatcgaaaccatacgtcccaaactggcctgtagccggtgtgatgtcatcgttcaggcaccacttccccctaaaccgatcgaacgcggttatgccagtgcagggttacttgcacggatcctggtcagcaaatatatggaacatatccctttatatcgccagtcagaaatatacgcgcgacagggcgtggagctgagccgtaataccatggtgcgctgggtatcagaaatggcagacaaactccgtcctctgtatatagcgctgaatgactatgttctggaggcaggaaaggtgcacgcagatgacactctgaggtag

SEQ ID NO: 479108 - DNA, 348 bp, Shigella flexneri; identical to SEQ ID NO: 475245

SEQ ID NO: 479109 - DNA, 219 bp, Shigella flexneri; identical to SEQ ID NO: 474644

SEQ ID NO: 479110 - DNA, 285 bp, Shigella flexneri; identical to SEQ ID NO: 461629

SEQ ID NO: 479111 - DNA, 285 bp, Shigella flexneri; identical to SEQ ID NO: 461629

SEQ ID NO: 479112 - DNA, 189 bp, Shigella flexneri; identical to SEQ ID NO: 469030

SEQ ID NO: 479113 - DNA, 189 bp, Shigella flexneri; identical to SEQ ID NO: 463227

SEQ ID NO: 479114 - DNA, 300 bp, Shigella flexneri; identical to SEQ ID NO: 84330

SEQ ID NO: 479115 - DNA, 180 bp, Shigella flexneri
atggaccagatggaaaaaatcacaacaggtgtgtcatacaccacgtcagcggtgggaacgggctactggttcctgcagttgctggacaggttttccccgtctcagtgggcggcaataggcgtgctggggagtctgctgtttgggctgctgacatatctgactgaggtgtacaggcaatag

SEQ ID NO: 479116 - DNA, 480 bp, Shigella flexneri
gtggcggacctgacgtatgttgccacacaggagggatggttgtacctcgctggcatcaaagatgtttatacgtgtgaaattgtcggctacgccatgggagagcgcatgacaaaagagctgacaggtaaagccctgtttatggcgctcaggagccagcgcccacctgccgggctaatccaccactctgatcgaggttcacagtactgcgcatacgattaccgggtcatacaggagcagtttggtctgaaaacatcaatgtcgcgtaaaggtaactgttacgacaacactccgatggaaagcttctggggaacgctgaaaaatgagagcctgagccactatcgttttaataaccgggatgaagccatctcagtaatacgggaatacattgagattttctacaatcgtcagcgtcgtcactctcgtctggggaatatctccccggcagccttcagggaaaaatatcatcagatggctgcttaa

SEQ ID NO: 479117 - DNA, 297 bp, Shigella flexneri
gtgaagcttcacgaagatgatttttttgacgaagaagacgcagaagttctgcgctttgatagttttgacgatgccgttgaatgctgcgcagacctgaatattccgttctttgtggatgcgggaaacaaaaagctggtcttctggtttgtacgtgttgatgacgaagggtatccggaaatcgcccgctgcacggagcgggaatttgcgaccattcttgccggtatcagcgccggcggtatgtactgcccggagtgtggcacggttcactggccggacggagtcgccccgcccttctga

SEQ ID NO: 479118 - DNA, 621 bp, Shigella flexneri
atggcggttatgggacttgccggtgttctccggggtaaaaaggtccgtacgaccatcagccggaaagccgttgccgcaggcgaccgcgtaaaccgtcagttcgtggcagaacgacctgaccagctgtgggtggctgattttacttacgtcagcacatggcagggcttcgtctatgtggcgttcatcattgatgtgtttgccggatgcatcgtggggtggcgggtctcatcgtccatggaaacgacattcgtgctggatgcactggagcaggcgttatgggcccgtcgaccgtccggcacggtccatcacagtgataaaggttctcagtatgtatcgctggcctacacacagcggcttaaggaagccggattactggcatcaacaggaagtacaggcgactcgtatgacaacgcgatggcggagagcatcaatggtctttacaaagcggaggtaatacaccgtaagagctggaaaaaccgtgcagaagtggaactggccacactaacgtgggtggactggtataacaatcgacgattgctggaaaggccgggccatactcctccggcagaagcagaaaaagcttattatgcttccatcggaaacgatgatctggcagcctga

SEQ ID NO: 479119 - DNA, 285 bp, Shigella flexneri; identical to SEQ ID NO: 461629

SEQ ID NO: 479120 - DNA, 195 bp, Shigella flexneri; identical to SEQ ID NO: 475320

SEQ ID NO: 479121 - DNA, 234 bp, Shigella flexneri; identical to SEQ ID NO: 475158

SEQ ID NO: 479122 - DNA, 480 bp, Shigella flexneri
gtggcggacctgacgtatgttgccacacaggagggatggttgtacctcgctggcatcaaagatgtttatacgtgcgaaattgtcggctacgccatgggagagcgtatggcaaaagagctgacaggtaaagccctgtttatggcgctcaggagccagcgcccacctgccgggctaatccaccactctgatcgaggttcacagtactgcgcatacgattaccgggtcatacaggagcagtttggtctgaaaacatcaatgtcgcgtaaaggtaactgttacgacaatgctccgatggaaagcttctggggaacgctgaaaaatgagagcctgagccactatcgttttaataaccgggatgaagccatctcagtaatacgggaatacattgagattttctacaatcgtcagcgtcgtcactctcgtctggggaatatctccccggcagccttcagggaaaaatatcatcagatggctgcttaa

SEQ ID NO: 479123 - DNA, 480 bp, Shigella flexneri
gtggcggacctgacgtatgttgccacacaggagggatggttgtacctcgctggcatcaaagatgtttatacgtgcgaaattgtcggctacgccatgggagagcgtatggcaaaagagctgacaggtaaagccctgtttatggcgctcaggagccagcgcccacctgccgggctaatccaccactctgatcgaggttcacagtactgcgcatacgattaccgggtcatacaggagcagtttggtctgaaaacatcaatgtcgcgtaaaggtaactgttacgacaacgctccgatggaaagcttctggggaacgctgaaaaatgagagcctgagccactatcgttttaataaccgggatgaagccatctcagtaatacgggaatacattgagattttctacaatcgtcagcgtcgtcactctcgtctggggaatatctccccggcagccttcagggaaaaatatcatcagatggctgcttaa

SEQ ID NO: 479124 - DNA, 189 bp, Shigella flexneri; identical to SEQ ID NO: 469030

SEQ ID NO: 479125 - DNA, 534 bp, Shigella flexneri
atgaaaaaccttactccgttcacgcctcttgcggagcagtatgttaaccagcttcagaacctttccagtttagaaggtcaggggcaggcacttaatcagtattacaactctcagcagtataaagaccttgcaggtcaggctcgttaccagagtcttgctgctgcggaggcgacgggtggacttggttcgacagccacaagcaatcaactggctacgatcgcgccgacactcggtcagtcttggttatcaaaccagatgagcaattacaacaatctggcaaacgttgggcttggtgcgctgcaaggtcaggcaaacgccgggcagacatacgccaacaacatgagcagcattgcacagcaaagcgcagctcttgccgctgctaatgccaacaaaccatcaagtcttcagacagcaattagtggcggaacgtctggtgcgattgccggtgcaggtcttgccagccttttgggaacatcaacaccttggggcgctggcattggtgctggtatcggattgcttggctcgttgttttaa

SEQ ID NO: 479126 - DNA, 189 bp, Shigella flexneri; identical to SEQ ID NO: 463227

SEQ ID NO: 479127 - DNA, 294 bp, Shigella flexneri; identical to SEQ ID NO: 25632

SEQ ID NO: 479128 - DNA, 480 bp, Shigella flexneri; identical to SEQ ID NO: 479043

SEQ ID NO: 479129 - DNA, 294 bp, Shigella flexneri; identical to SEQ ID NO: 25632

SEQ ID NO: 479130 - DNA, 213 bp, Shigella flexneri; identical to SEQ ID NO: 462242

SEQ ID NO: 479131 - DNA, 195 bp, Shigella flexneri; identical to SEQ ID NO: 464447

SEQ ID NO: 479132 - DNA, 195 bp, Shigella flexneri
atgctggagaatgagtaccctcagagggtggctgaccggctgaaagcctccggtctgagcggtgatgcggatgcggagagggaagccggtgcacaggtgatgcgtgagactgaacagcagatttaccgtcagctgactgacgaggtactggccctgcgattgtctgaaaacggctcacaactgcaccattcataa

SEQ ID NO: 479133 - DNA, 294 bp, Shigella flexneri; identical to SEQ ID NO: 25632

SEQ ID NO: 479134 - DNA, 366 bp, Shigella flexneri; identical to SEQ ID NO: 476838

SEQ ID NO: 479135 - DNA, 189 bp, Shigella flexneri; identical to SEQ ID NO: 463227

SEQ ID NO: 479136 - DNA, 156 bp, Shigella flexneri; identical to SEQ ID NO: 475692

SEQ ID NO: 479137 - DNA, 276 bp, Shigella flexneri
atggttctggaaagtcagggcgaatataactcacaatgggcagcgatttgttccattgccccaaagattggctgtacgccggagactctgcgtgtctgggttcgccagcatgagcgggataccgggggcggtgatggagggctcaccaccgctgaacgtcagcgtctgaaagagctggagcgtgaaaatcgtgaactgcgccgcagtaacgatatccttcgccaggcttccgcttattttgcgaaggcggagttcgaccgcctctggaaaaaatga

SEQ ID NO: 479138 - DNA, 303 bp, Shigella flexneri
atgagcagaaaaaaccaacgttactctacggagtttaaagccgaagccgtcaaaacggttcctgaaaatcagctttcgatcagtgaaggcgcttcccgattatctgttcctgaaggcactttaggacaatgggttaccgccgcaagaaaagggctcaatacaccaggctcccgcacagtggctgagctggaatctgaagttatgcaactgcgtaaggctttaaatgaagcacgacttgagcgagatatattaaaaaaagcaacagcgtattttgcacaggagtcgctgaaaaatacgcgttag

SEQ ID NO: 479139 - DNA, 294 bp, Shigella flexneri; identical to SEQ ID NO: 25632

SEQ ID NO: 479140 - DNA, 294 bp, Shigella flexneri; identical to SEQ ID NO: 25632

SEQ ID NO: 479141 - DNA, 249 bp, Shigella flexneri; identical to SEQ ID NO: 464355

SEQ ID NO: 479142 - DNA, 276 bp, Shigella flexneri
atggttctggaaagtcagggcgaatataactcacaatgggcagcgatttgttccattgctccaaagattggctgtacgccggagactctgcgtgtctggggtcgccagcatgagcgggataccgggggcggtgatggagggctcaccaccgctgaacgtcagcgtctgaaagagctggagcgtgaaaatcgtgaactgcgccgcagtaacgatatccttcgccaggcttccgcttattttgcgaaggcggagttcgaccgcctctggaaaaaatga

SEQ ID NO: 479143 - DNA, 210 bp, Shigella flexneri; identical to SEQ ID NO: 9340

SEQ ID NO: 479144 - DNA, 201 bp, Shigella flexneri
atggccattaaattaaaaattaaaaatctttataaaatatttggtgagcatccacagcgagcgttcaaatatatcgaacaaggactttcaaaagaacaaattctggaaaaaactgggctatcgcttggcgtaaaagacgccagtctggccattgaagaaggcgagataatttgtcatcatgggattatccggctcgggtaa

SEQ ID NO: 479145 - DNA, 855 bp, Shigella flexneri
ttgccgctgctcaatcgcttgcgagtgccgattgaacaggcgttgcgcgatgcgcgtctgaagccgagtcaaatcgacagtctggtgctggttggcggcgcgtcacaaatgccgctggtgcagcgaatcgccgtgcgtctgtttggcaaattaccgtatcaaagttacgatccgagcaccattgtcgcgctgggcgcagcaatccaggccgcctgccgcttacgcagtgaagatattgaagaagtgatcctcactgatatttgcccttactcgttgggcgttgaggttaaccgccagggcgtttccggcattttctcgccgattattgaacgaaacaccactgtgcccgtgtcgcgtgtagaaacttattcaaccatgcacccggaacaggattcaattacggttaacgtctatcagggagaaaaccacaaagttaaaaacaacattctggtggaatccttcgatgtgccgttgaagaaaaccggggcttatcagtcgattgatattcgctttagttatgatatcaacgggttgcttgaagttgacgtgcttctggaagacggcagcgttaagtccagagtgattaaccacagcccggtaacattgagcgcgcagcagattgaagagagtcggacgcggttatccgcattgaaaatttatccgcgcgatatgctcatcaatcgcacctttaaagccaaactggaagagttgtgggcgcgggcgctgggtgacgagcgagaagagattggccgggtgatcaccgattttgatgcggcgctgcagtcaaacgatatggcccgcgtcgatgaggtcaggcggcgggcgagcgtttatttagccattgagacctcataa

SEQ ID NO: 479146 - DNA, 771 bp, Shigella flexneri; identical to SEQ ID NO: 475856

SEQ ID NO: 479147 - DNA, 318 bp, Shigella flexneri; identical to SEQ ID NO: 475568

SEQ ID NO: 479148 - DNA, 210 bp, Shigella flexneri; identical to SEQ ID NO: 475853

SEQ ID NO: 479149 - DNA, 123 bp, Shigella flexneri
atgggcaaaatatcagatttgaattattctcaacacattacaggtaatgactccaacttactgatagtgttttatgttcagataatgcccgatgaccttgtcatgcagctccaccgattttga

SEQ ID NO: 479150 - DNA, 294 bp, Shigella flexneri; identical to SEQ ID NO: 478922

SEQ ID NO: 479151 - DNA, 312 bp, Shigella flexneri; identical to SEQ ID NO: 472254

SEQ ID NO: 479152 - DNA, 408 bp, Shigella flexneri
atgccaaagaatcaaagcctgccagcggtaagtgattttcgccgcgacttcccgcagtttgctgaccctgccaaatatcccgaagcgcaaatccagtttcgtctgaatctggccgatgaactgctgagcgaaaacgtcaccggcaaagatttgtttccgtactttgccgggttgttcgtggctcactacatgacgctatgggcggcagatagtcgggcaatgctggttggcggcccgggcggttcaaccaatggtgttcagtcctccaagtccgttgacaaggtaagcgtcagctatgacaccagcgcgacgctaaaccctgacgcaggcttctggaataacacccgatatggcgctgaattttatcagctgatcacgatgttcggtgcgggcggtcgccagctatga

SEQ ID NO: 479153 - DNA, 555 bp, Shigella flexneri
atgagtttcaaaagtggtgtaacaacgagggttgataacgctcaggccattctggatgcgctccggtcgctaaccaaaaaggatgtgctggtgggcatcccggaagaagacagcgagcgtgaggatgttccgtttggtaatgccgggatcggttacgtcaacgaatacggctcaccagcgcaaaacatacccccacgcccgcacctgatccccggcgttaaatccgtagaggaacagacggtgccgcagctcaaagcagcggcgcaggctgcgcttgatggaaatgcggcgggtgcggaaagagcgcttaaccgcgccggaacgctggccgcgaatggcgtcaggcgttacatgaccattaccggctttacaccgcttgctgatagcaccgttgaagcccgggctcgtcgggggcgcaagggggcaacactggaacttgctcggcgtgttgctggcgaatctcccggaaccgatctggcgaaaccattaattgacaccgggcaatatcgcagagctattacccatgttgtgagggataaagatgccgactcttga

SEQ ID NO: 479154 - DNA, 390 bp, Shigella flexneri
atgccgactcttgatgtaacagatgtgctttttgaccccgatttttgcgacttcaatttgtgggtaacacgccgagtgcaaacggtggatgaggacgggatcggcagcgacagtgaagttaaaaagcagtttgccggagtcgtaactgttgatcgctctctggaaaaccgccgtatgcaggcagggcaggtaatcagcggtgcaattctgattgtgacgactgagcgactgacgcagggacagactggccgtgatgccgatatcgtgacgtatcagggccgtgattatcgtgtgaccttcgtcgacccgtatacagcttatggggccggattcgttcaggcgcattgtgagttgatgccgtttgatgggggaactccggttgagcaataa

SEQ ID NO: 479155 - DNA, 558 bp, Shigella flexneri
atgggggaactccggttgagcaataacaccagtacagagcgcggatggttaataccaaccagtggcgatccggattatgacgaagcgctcgacaggctgttaagccagtggatgcgtaacgtttccggtctgtctgccgggatggttcgcccgcgctggcagaaagagcagccgccactgctaccggttgaaacgaactggtgtgcgtttggggttatcggatggtcaggtgatgacagtccggcattcaccagacagaccgatgatggctctcagctctggcggcatgaaacgattgagtgtatggcttcgttttatggtccggcggggatggtgtatgcgtcccggtttcgtgacggtatatctgtaccgcagaacaacgcagcactgaatgcgctggggctgtctcttggcgattacacaggtctcttccctgaacttattaatcagcaatgggtccgccgctacgatatgacggtgcgtctgcgccggaaggttgtgcgcgagtacggtattaaatcgctggtggaagcaccagtcatctttttcggagattaa

SEQ ID NO: 479156 - DNA, 1146 bp, Shigella flexneri
atggcacagggcttgcctgtatcaaacgttgttaatgttgatgtgatcatgtcgccgcgtgcagcatcagggcgaaattttggtgcattactcattctcggcccgtccacaatcattccggtaagtgagcgcattcgccgttattctgccgcggaagatattggaaaagattttggcgtggaatcaccagaatataaggctgcgcaggtgtttttctcacaatcaccgaaacctcaggaggtttttgttggtcgttgggtgaaaacgaagggagacagcgaacaggccacgcctgagacgctggagcaggctgtgaatgccatgctcgattatacttcatggtatgggctggggattgcagacgatgaagatattccggatgcagactggctgaaagtggctgcggcgatcgaatcctcttctgtaagccgtattctggcgattacgacaagcgatgagaaatgcctgcagactgcatccagcgatgatttggcatcaaaactgaaaaccgccggatattcacgcagttttattcaatattcatcgggtaataaatacgctgcgttatctgcatttggccgggcattcacggttaatttcaatggcagtaataccgcgattacgctcaagtttaagcaggagccgggtgtcgggtatgaaacactgacagtcagccaggcatcggcacttgatgcaaaaaactgcaatgtattcgtgtactacgccaacgacacggcgatcctgcaacagggtgtcatggcgaacggtgacttcttcgacgagcgccacgggctcgactggttgcagaactacgttcagaccaacctctataacctgctttacaccagcaccaccaaaattccgcagactgatgccggtgtgacccgtctgctttccaacgttgaacagtccatggatcagtccgtcacgaacggtctggtagctgctggcgtgtggaatggtggccctatcggacagctgaattccggcgatacgctgaccaaaggctattacgtgtatgcgcaaccgctgtccgaacaggcgcaggccgaccgtgaagcgcgcaaagcaccgttaatccaggtggcctgtaagctggctggcgcagttcattatgccgatgtgcagatcaacgtggttcgctaa

SEQ ID NO: 479157 - DNA, 441 bp, Shigella flexneri
atggcaacttattcttttctcgatgtaaccgcgtcgctcaccgggccgaccggcgttatcgatcttggtcagggttctgcgaactctgaggaaggtatcacccagaccatgggcggcaacaaaaacaccatgactatcggtgccgatggcgaggtgatgcacagcctgcacgccgataagtcaggcaccattacggtgacgctactcaaaacctccccggtgaataaaaagctgtctctggcgtataacgcgcaaagccagtcctctgccacctggggcaataacgtgatcgtcattcgcaacacggcatcgggtgatatttctactgcgcgttcgtgtgcattccagaaacagcctgatttcaataacgctaaagagggcggaaccgtcgcctgggtattcgactgcggcaagattgaccagcttctcggggagttttaa

SEQ ID NO: 479158 - DNA, 426 bp, Shigella flexneri
atggaattcgaaattaaaggcgtgaaatatcgcaccgcaaagctcagcgttttcgaacagctgaaggtgtcccgcaagctgttgccggttctggccgggatggtttcggacttccggagcgttcaggagaagatcagcagcaaagacaccgaaggcgcgatggctactatcctgccaaagattgccaatgctgtgtccgatctgagtgatggcgacgtggacgctatcctgttcccctgtctttccgttgtttcacgcgagcacatgaaaggctgggtgccggtctgccagcatggcgaaatggcgtttgacgatatcgacctgcttaccatgctgcaactggtggcgcgggtggtcgccgactcgctgggaaattttttgcaaggactccctaccagcgagacgcccaccccgctagcggaataa

SEQ ID NO: 479159 - DNA, 2016 bp, Shigella flexneri
atgagcggtaacgcagatacgattaaagatttccttgtttcgctgggattcgatatcgatcaggctggcgctaataagtttgaagccgtgctgaaaggcgttaccgcgaacgttctgaaggtcggcgcggtggtgaaaggcgcagcgctgagcattgtcggatttaccactcagatcgcgaacggtctggataaaatttactgggcatcccagcggacgggggccagtgtccagggcatcaaagcgctgggatacgccgcatcgcaaaccggtgccagcgccgagtcggctatgtcctccctcgaagggttggctggcttcatgcgtagcaatccgggggcggaagggttcctgaaccgtcttggtgtccagacccgcgatgccagcggaaagatgcgtgatactgctgccatctttactggcgttggccaaaagctcaacaacatgccgtattaccgcgcgaagcaatacgcgcagatgctcggcatcgatgaaaacacgctgatggcgatgcgcagagggatggggcagctcagttctgagtacgcgttgacggcaaagcgtattggttttaatgctgagtcagcggctaaacagtccaatattttcatgacctccatgcgtaatctgacgatgacgcttggacaggcgaaagacaagattggctctaacctagctggtggccttgctggcagtattgataacttccgcaggcagatactcgacaactggccgaagattgaagcggtcatcacgaagatcatcaaaggaattctctgggcaggtgacgcgattacccgcgtgttatggcgaactgggcaagctgttgagggtgtgatcgcctggttcaaaaagctgaacccagccacgcagcagcttatcgcattgttcagtgggctgttggttgcatggcggctgctaaataccgctttcatgtcatcacccttgggcatgataacgacgcttattattgcacttggtctgctcttggatgattaccagacgtggaaagaaggtggcaaaagcctgattgactgggggaaatggaagactgaaattgatcaggccgtcaaaatgattggtgacctgaaaaagactgttacggacctgacaaaagcgctggctaagttgctcggtattgaccccaagtcatggtccctaaagtgggattttagcaacttcatttcgcaaatgggtgagttcggcaagatgctgaacatgatcgccgacctgctcaacgccattaaagatggccgctgggctgatgccgccagcatcggcaaacagatgcttaatcagggcagcgaaaatccgtcagcgatgccgatggtaacagacagcgccaacggaaccgccgactggattaaagagcactggggattcgatcctcgcagcgtgggccgaacggtgcgcggctggttcggtgatgatgagcctgagcagctcggccagtcagttaagcggccacagccaaccaaagcaggctctgaactgctgggatggatgcagccgatgtttaccaacctggaacagctctaccggcttccggaggggttattgcgcagcgtggccataacggaatcgggcggtaatcagttcgccgtttcaggcgctggcgctaaaggtctgtttcagtttatggatggcacggcgcgcgacatgggcctgcgtgggaatgatgtattcgacccggaaaagtcagctcaggcagccgctaagtacctgagccagctgttgcggcagaacggcggagaccttagcaaagcactggcatcatataactgggggatcgggaatgttaagcgttatggaatggggctaatgccgcaggaaacgcgcaactacattccgaaagtaatgagcaatatgcccaccagcgccccggtgattcagcaggaaacgaatattaacatccacggcgttttcgatccgcgcgaggctgcccgtttgactgttgaccgtcaaaagggcgtgaattcacagttaacccagcaactccccgcaggaccgagataa

SEQ ID NO: 479160 - DNA, 603 bp, Shigella flexneri
atggatattttatcagcaatttttcgccagcaatcccggcgaattggaatattaatccccagcgtggttgtttctgaaaagcattctgatgcgctcgaaattactgagcacccggtggagaagccaacaacgaatagcgcgtcgggtttcatcgccgatcatgcgtataagcgccccagcgaagtcacgatggaatgcggcttcgcaggtggcggttcgttgctggacttcattgatacatcgtcaatcggcctcagcgccggacttagcccgaaagagacctatcagcaactactggatctccagtcctctagggtgccgttcgatgtagtgaccggaaagcgggtttacagcaatatgctggtgcgagccatcgaggtgacaacggataaaaccagcgagaacgtgctgaactgcacgcttaccctgcgtgaagtgatcatgtcgcagacgcagagcgttagcgttgcagataaatcagatatgcaggatggcgtcagcacatcggcggtgcagaattccgggatgaaatccactacaccgccaaacgaatccttgctgagccagctgggcggaagcgttacatcagcattcgggggatga

SEQ ID NO: 479161 - DNA, 306 bp, Shigella flexneri
atgcagtttaacgaaataccgctttctcctgacaatcagcagttccgagttttgctgggcaataccacgtatacactcaggatcatctggcgtgatgcggctggctggattatggacgtgatggatagcggcggtgccgcgcttctctctggcgtacctctactgaccggcgtaaaccttttacgacaatatccacagcttggcattgatggcgcgctggtggtggcgaccgataagggcgcaccagacgagcccaccaaaaccaacctcggcacatacagccacctcattttcgtacaggagtag

SEQ ID NO: 479162 - DNA, 1065 bp, Shigella flexneri
atgtctcttaactggatgcgccattttgagctgcaactgttggaccagaacgggcagggcgtttccctgtctgactttaaggtcacgttccagatcgagtgggcagacacacgctggccgcgcgtggcgaacgtgaaaatttacaacctttcgaccgataccacgaacaagatacttgggcaggagtttgccaaaattcgcatcattgccgggtatgacggtatagcgccggatgttgatgcgagccaggttggtgtgtcccgggagatttcaccagaccagatagggcaggtgaacggtcagaactacggcctgatttttgacggtgatattcgcttcaccgtcaccgggaaggacaacattacggattcctgggtgttgattcaggccattggtgatcacgaagcgttcctctatgcgaccaccatcaccacgcttgccgctggatataccgttgcggatctgcaccgggcgacgatgcaggatttcaacgcgttcggcgtgacacagggcattaccggcgattttcctgataccgtgtttcctcgtggccgcgcgatttactcatccagccgcaacgtgatggataatattgctgcgcagtgcaaagcgacatggcaactggtggatggtcaggtccagatggtgccggaggataaatatattcacgaagccattgtgttgaatgccaatactggcctgatcggtatgccgcaacaaacgatgggtggcggagtaaacgtgcgatgcctgataaacccaaacatccgtattaatggtcttatccagctcgatcaggcttcggtgtaccgcgccacgctcggcaatagcgaaatagcacagtcgcccgggcgtatcaccgaaacagaagagaacggcaaccgtgtgctgaccggcacgacgtcacaggctgccagcattgcgacggatggcgtttatatcgtcaaagctatcgactatactggcgacaccagaggtcaggcgtggtacatggatttgatgtgttttgcgcgtggcgctcgtgatctttatagcccgaaagcaatgcaagggacgacgaattag

SEQ ID NO: 479163 - DNA, 345 bp, Shigella flexneri
gtgagacatttactttgcactgttaccgtgttcgcggtgcttatatcagcacccgcttttgcggatcagcaatgtggtgattttaaaatccattgggcagatgatggcttagccagaatcaatggcgcaaagccagaaatgcaaaaaatcaccttcctgaaaaacaaaggcgattataacaatatcaagatggattggcgtatggctaccgatcagcctggaagatgggttggtcttgagtacatcaatcgaaacggcaaagccattctcaacgcacagtggctgcaagccagcatggattcgccgcgtcagtatgcaacatacgactgccgaaaagtaaaatag

SEQ ID NO: 479164 - DNA, 291 bp, Shigella flexneri
atgggatttagatttcgtaaaagaatccggattgcgcccggactcgcgatcaacattagtaaaagcggagtaagcacttcaattggtggtaaaggttccaccattaacatcgggaaaaaaggcgtaaagatgacaaatggccttcccggcacggggctgtcgcataccactaacctttactctcccgggaaatcgacagaaaaaaaacaacttactcataagcaaaaaataattagaaacatcctgttcgtaattattgtgtttataataattaaagctcaatatttttga

SEQ ID NO: 479165 - DNA, 741 bp, Shigella flexneri
atgccaattccaactcaatcacagatcggcggtgagcagcagaccgcgcaggccattgccgattcggtgtctacccagatgcgcgtagcgatgcccggcatcattcagtcgttcgatcctgagactgttacctgcacagtagaggtggcgctacgcggtattgttggcgatggatccaccgaattaaaaccgctggtggatgtgccggtcatcttcccgcgcggcggcggttgcacgctgacctttccggtaaaagaaggcgacgagtgcctcctgatttttgctgaccgttgcatcgatttttggtggcagagcggcggcgttcaggagaccgtcgacccgcgccagcatgacttatctgatgcgttcgccatcgttggcccgcagtcgcaagcacggaaaatcagcggtatcagtaccagcgccgcgcagctgcgaaccgatgatggtgcggcgtttgtagaagtcgccgcaggacataacatcaccattaaaacaccgggccagcttacagctacggctgaaggtggaacgacaatcacatccccgactatcacgctgaacggcaacgtaacgattaatggcaacttgtctcagggaatgggcgaaagcggcggtactgcgacgatgcttgggccggtgatggtaacgaatgacgtaacagcttctggtatcagtgtcgccacgcataaacatggcggagtacagactggcgggggaactaccggagggccgcaataa

SEQ ID NO: 479166 - DNA, 354 bp, Shigella flexneri
atgcgataccgtcgcgaagatactgaaggcgattacactttcggccagggtgacgatactttccttatcgacagtccggaatgtgtcgcccaggccgtaaaaacccgtttcgagctgtggcgcggtcagtggtttctcgatctgacggaaggcacgccgtatgttcagtcagtgcttgggaagcagcgatcagatgtctacatcctggctatacgcgaacgcatacaggatacaccgggcgttctgtcgattctttccttcgataccaattatgacggcaccagccgtcgcgtcaccttcacttcctccattgacacaatctacggccagacgactgtaacaagcgaggcataa

SEQ ID NO: 479167 - DNA, 1200 bp, Shigella flexneri
atggctttgaacctcgacacgctggggctatcggcaacggtaaccgcccaggggattagtgcgcctgattaccagacaatcctagatacactgaccagctatttcaggcagatttacggtagtgatgcctacctcgaaccagacagcaaagacgggcagatggtcgcgctggtggctcttgccgtgcatgacgctaacaacaccgctatcgggatctacaactctttttcaccgacgacagcgcaggccgcagcgcttagcagcaatgtgaaaattaacgggatcacgcgaaaagtagcgacaaactctactgctgaccttctgttaaccggtacggcaggcacgactatcacgaatggctccgcacgggataaaaacggcattatctggaattttcccgcaagtgtagcgatcggcgttgatggtactgtgctggtgacggccacatgtgcgaatagcggttcggttgcggcgctggccgggactattaccactatcaacaccccgacccgaggttgggtgtcggtaaccaatccagttgcggctactgtcggttcaccagccgaaaccgacgcagagctgcgcattcggcaggggcaaagcgtcgcgctaccatcgatcacaccgtttgaaggtgtcgacggtgctatcgctaatgttgctggcgtgacacgtcacaaactatatgagaacgacactggggcaaccgacagcaacgggctgccgccacactctatttccgccatcgtcgatggaggggatgttaccgagatagcccaaacaatccgggggagtaaagggcagggaaccgcaacttacggtaaaacttctgtcacggtgccggatacttacggtaatccacacgtcatcagtttttcgcgctctaccgatgtgccaattttcgtagccattaccctgaaagtttttaccggctatacctctcaaatcggcgagcagattaaacaggctgttgccgattatataaatggcctaacaattggcgacgacgttctgctgagccgtatttattccccggcaaacctcggcgttgtgagcggcgggaatgcccgctattacgatattaccgacctgctgatcggtaagtcgtctggcagcgtatcggcatcaaacattgatattgcctatgatgcttctgcgtcctgtagcaccgcgaatatcagtatcacggtgacctcatga

SEQ ID NO: 479168 - DNA, 681 bp, Shigella flexneri
atgagcaaatacaccgaactgatcactaactaccacgctaccaagccactcttttttgaccatatagatctgagcacccgcccgctgattgatgtgtccagcactatgtcagggcttataacagccttcgatattgatactgctgtcggtgtacagctcgacatcctcggtctgtggatcggacgcagtcgcatagtcagccagccaattagcggagtttatttcagctgggacactgacgggcttgggtatgaccagggcatctggaaagggccatatgatcctgattctggctatacgacgctaagcgatgagacgtaccgcatcattctgaaagcgaaaatcgctatcaacaactgggacggtcggaacgactctctgcctcccatccttgacgctgcgactgaaggctcaggcctgaggatgcaaattgtcgacaaccaggacatgacgatatcggtttgggtattccccgagactgatatttctgatgtgtctcttgaactgattgccgctatcaaacagggctatctcaccgttaaagcagctggcgtatgggccggtgatgttgaaacgccttcggtagaagcaccatccgagggctctaaattctttgggtttgatatggataacgaatacatcggcgggttcgatgttggagcatgggggacaatactctaa

SEQ ID NO: 479169 - DNA, 495 bp, Shigella flexneri
atgtcagcaatagtatttttcccaataatgtcacggccaacagaagttaaatcagtctgcgctgctgtatcatttccagtgaaatatgggagtttatttgcacctgttgcgagcccagctaatgccgacagcgtggcatcaagcgcctggaaatctttcccgaaagcggtccccattttggatataaacccgttcaggtctccatcatcaagcacatccagcctgcttttgttggcggtgtactgcgccaacgctgccgcgataaagctggcttgccgaatagctttgttgacctgtgcgctggatgctttacctgccgtaaaccctgaaagcagagccggaagtgcttcccagtcagcttgtgaggtgacgttagcgttcggatcaagcgcgaaaggtttaaagttgtttattgccattagagtattgtcccccatgctccaacatcgaacccgccgatgtattcgttatccatatcaaacccaaagaatttag

SEQ ID NO: 479170 - DNA, 210 bp, Shigella flexneri; identical to SEQ ID NO: 475253

SEQ ID NO: 479171 - DNA, 294 bp, Shigella flexneri; identical to SEQ ID NO: 478922

SEQ ID NO: 479172 - DNA, 1464 bp, Shigella flexneri
atgaaaccttccactgaatggtggcgatatcttgcgccgctggcggtcatcgccattattgctctacttccggttcccgcagggctggagaaccatacctggctctactttgccgtttttactggcgtgatcgttggactgatcctcgaacccgtgccgggtgccgtggtggcgatggtgggtatctccatcatcgccatactctctccctggctgctgttcagccccgaacagctcgcccagccaggctttaagttcaccgccaaatccctctcctgggcagtttctggtttttctaattcggttatctggctcattttcgccgcctttatgtttggcacaggctatgaaaaaaccgggcttggacgccgcattgcgctgattctggtgaaaaagatggggcatcgcacgctgtttctcggctatgcggtgatgttctccgagctgatcctggcacctgtaacaccgtccaactcggcgcgtggtgcgggtattatctatcccatcatccgtaacctgccaccgctctatcaatcacaaccaaacgacagcagttcgcgcagcattggctcgtacatcatgtggatggggattgttgccgactgcgtgaccagcgccattttcctgacggcgatggcacctaacttgctgttaattggactgatgaaaagcgcatctcacgccacgctgagttggggcgactggttcctcgggatgttgccgctcagcattttactggttctgctggttccctggctggcttacgtgctgtacccgccggtactgaagtctggtgatcaggtgccgcgctgggcagagacggaactgcaggcaatgggcccgctctgttcgcgtgaaaaacggatgctggggctgatggtaggcgcgctggtgctgtggattttcggcggtgattatatcgatgccgcgatggtcggttacagcgtggtggcgctgatgctgcttctgcgcattatcagttgggacgacattgtcagtaataaagcggcatggaacgttttcttctggctggcctcgcttatcaccctcgcgaccggactcaacaataccggttttattagctggtttggcaaactgttagcaggcagcttaagtggttattcgccgacgatggtgatggtgacgttgattgtggtgttttatctactgcgctactttttcgccagcgccacggcgtatacctgcgccctcgcaccgatgatgatcgccgccgcgctggcgatgccggaaatcccgctgccggtgttctgcctgatggttggcgcggcaattggtctggggagcattcttacaccatacgccaccggacccagtccgatttactacggtagtggttatctgccaacggcggattactggcgactgggggcgatttttgggctgatattcctcgtgttgctggtgattaccggcttactgtggatgcccgtggtgttgctttaa

SEQ ID NO: 479173 - DNA, 1524 bp, Shigella flexneri
atgaaacccactttatatactgctactggtgagtgcgttacgccaggccgtgaactgggcaaaggcggtgaaggcgcggtttatgatatcaatgagtttgtcgatagcgtcgccaagatttatcacacgccgccacccgccttaaaacaggacaaacttgcctttatggctgcgacagctgacgcgcaattgttgaattatgtcgcctggccgcaggcaacgcttcacggtggacgaggcggaaaagttatcggttttatgatgccaaaagtttctggtaaagaaccgattcatatgatctatagcccggcacatcgtcgtcaacgttaccctcattgtgcgtgggattttctactctatgttgcgcgcaatattgcttcatcttttgctacggttcacgagcacgggcatgtcgtgggtgacgtaaaccagaacagttttatggtaggtcgcgacagcaaagtggtgttgattgatagcgactcctttcagattaacgccaatggcacactgcatttatgcgaagtcggcgtgtcgcattttacgccgccagagctacaaaccttgtcgtcatttgtcggctttgaacgcacagaaaatcacggtaattttggccttgcgttgctgatttttcacgtcttgtttggtggccggcatccttattctggtgtgccgcttatctctgatgcgggtaatgcgctggagacggatattacccatttccgttatgcctacgcgtcagataatcagcgacgtggtttaaaaccgccgccacgatcgattccgctatcgatgttaccgagtgatgttgaagccatgtttcagcaggcattcacggaaagtggcgtggcaaccgggcgtccgacggctaaagcgtgggtagcggcacttgattctctgcgccaacagttaaagaaatgtcccgtttcggcaatgcatgtttatcccgctcatttgaccgactgcccgtggtgtacgctggataatcaaggcgttatctattttattgatctcggcgaagaggtcattaccaccggcggggattttgtgctggcaaaagtctgggcgatggtgatggcgtcagtagcaccgccagcattgcaactgccattacccgatcatttccaaccgactggcaggccgcttcctttaggcctgttacggcgcgaatacatcattctgcttgagatcgcactgtcagcattatcgctgctgctttgcggccttcaggcagaaccgcgttatattattttggttcctgtgctggcggctatctggattattggcagtctgacaagcaaagcgtacaaagcagaagttcagcaacgccgtgaggcatttaatcgtgcgaaaatggactatgaccatttagtccgccagatccagcaggtaggcggcctggaaggttttatcgccaaacggacgatgctcgaaaaaatgaaggacgaaattctcgggttaccggaagaaaagaaactcgctctggcagcacttcatgacactgcaagggaacggcagaagtag

SEQ ID NO: 479174 - DNA, 210 bp, Shigella flexneri; identical to SEQ ID NO: 9340

SEQ ID NO: 479175 - DNA, 210 bp, Shigella flexneri
atgacggatggctgtccgctgtatgaatcacgcctgaagggaaagctgcacgttatcagcaagcgttacactcagcgcattgagcgacataatctgaatctgagacaacatctggcaaggctggtacggaagtcactgtcgttctcaaaatcggtggagctgcatgacaatgtcatcgggcattatctgaacataaaacactatcagtaa

SEQ ID NO: 479176 - DNA, 210 bp, Shigella flexneri; identical to SEQ ID NO: 476166

SEQ ID NO: 479177 - DNA, 216 bp, Shigella flexneri
atggaatacctgctcaggagagcgcgttacgactatctcaccgagcttgtcgggtttgaggtttggcagatcggcagcgccgtagagctgtttacccgttcgacctatcggcacgtctttgcacagcagcgagccgtcagccagctgatagcgggtttcccccagccgggtattgaaaaaatatttcatggtttacctgcgattcaggcgagataa

SEQ ID NO: 479178 - DNA, 609 bp, Shigella flexneri
atggatgcgctggagcgctacagcgaaatcatcaccccctgggcgacgaaggttgctgagaactttaccgccgacattgcacgccagaatgaaaagcagtggcgtcagcacagccggaacatcagcgcagagctgcgcaacatggtcgaccgcgccccggtaggccaggtgatgaaatccatcgtcgccgagcaaattaagtatatcaagtcactgcctcttgaggccgccgatcgggtgtatgacattcagaacaaggccatcgaggccgttgtggctggtggccgcgctgaaccattcgcgaaagagatagcagcgtccggtgacgtgtcacgctcacgagcgaaccttatcgcccgtaccgagcttggacgtgcaaccggcgcgctcgatcaggcgcgtgcgctgtcaatcggctcgaatggttatatctggcgtacagccgaagatggcgacgtccggcattctcatcgggagatggaaggtaagtttgtcgaatggggcaaacctccaacgcttgatggcatgaccggtcacgctggcgagctcccgaattgtcgctgttataaagaaatcgtttttcccaaccctcattcttatctcgcctga

SEQ ID NO: 479179 - DNA, 1467 bp, Shigella flexneri
atggcacgaaacaaacaagccacgcggcgaacggcacaggccaccgctgatggctatgagaactttgttgcccgcgtggggatgcagacacctaaccagcactcagcatccacctaccgggctaatttcaccagtcgtaaccgcatgctggtggaatggtcctatcgttcgtcctggattatcggcgaagcggtcgatgctatcccggatgatatgacccgcaaaggcattcgcatcacttcggaaattgatgcaaaagatcgtggcattctcgaatcacaactggatgagttgcaaatctgggatgcgctgaacgacgtgctgaaatggtctcgcctctacggcggcgcggtcggcttcatcatgatcgaggggcaggcaccaatgaccccgctgcggctcgaaaccattggagaaggcaagtttaagggcattctcccgctcgaccgctggatgattaacccggtcctgacccgccgcattaaagagatggggccagatctcggcaaacctgagttttacgacgtggtgaccactgcaacgggcatcccggcctggcgcatccatcacagccgcctgattcgcttcgacggggtgacgctgccattccagcagaagatgaccgaaaacgaatggggaatgtcggttgtagagcgtatctgggatcggcttactgcgttcgacagcgccactgtcggcgcggcgcagctggtctacaaagcacatctgcgtacctatagcgtggagaagttgcgcgagcttatcgcgcttggaggcccggcgttcgaggcgttgctgaagaacatcgacctgatccgccagttccagagcaatgaaggtatgacgctcatggactcgcgggataagttcgaaacccaccagtacagctttagtggtctggatgacattctttcgcagtttgctgagcagattagcggtgccgttggtatcccgctggtgcggttgttcggtcaatccccgaaaggcttctctactggtgatgcagacctcgccaactattacgaccgggtgagctcattgcaggagcgccgcttacggctgccgatgcgccggatactggacattatgcaccgctcggaactcggaaagccgctgccggacgatttcacgtttgagtttaacccgctatggcaaatgtcagacgttgaccgatcaacggtggccgtaaacaccaccaacgcgattagtaccgcgctgggcgacggattgatgacgcgtaaggcggcgatgaccgacctgcgcgaaaactctgacgtcaccggcatcggggcatccattaccgacgaggatatcgagaatgccgaagacgaagcgccgccaggcatcggcgaacttggcgacaaaccgccagagccgccaggcggagatccgatatcgaacgagcctacggcagatagcgcgggcggtcggggatatcgtaaatgggcgctacgatggttcaaatga

SEQ ID NO: 479180 - DNA, 189 bp, Shigella flexneri; identical to SEQ ID NO: 477258

SEQ ID NO: 479181 - DNA, 195 bp, Shigella flexneri; identical to SEQ ID NO: 473921

SEQ ID NO: 479182 - DNA, 921 bp, Shigella flexneri; identical to SEQ ID NO: 474269

SEQ ID NO: 479183 - DNA, 234 bp, Shigella flexneri
gtggatgagctgatcagcatagattctcgttgtccgttgcttgaaaagctgaaactggaactgacaacacctcatcgtgatttcgaccgtaacggacgtgtgatggtcgaaagtaaaaaagacctcgcaaaacgcgagataccgtcaccaaacgttgctgatgcattcattatggccttcgcgccaatcgatacatcgctggatatctgggaacagctggggagacaggcctga

SEQ ID NO: 479184 - DNA, 540 bp, Shigella flexneri; identical to SEQ ID NO: 474324

SEQ ID NO: 479185 - DNA, 381 bp, Shigella flexneri
atgctgggagcagtggaacgccgcttcggcaacgatcttccgtcgtctccagtggagtggctgacggataatggttcatgctaccgggctaatgaaacacgccagttcgcccggatgttgggacttgaaccgaagaacacggcggtgcggagtccggagagtaacggaatagcagagagcttcgtgaaaacgataaagcgtgactacatcagtatcatgcccaaaccagacgggttaacggcagcaaagaaccttgcagaggcgttcgagcattataacgaatggcatccgcatagtgcgctgggttatcgctcgccacgggaatatctgcggcagcgggcttgtaatgggttaagtgataacagatgtctggaaatatag

SEQ ID NO: 479186 - DNA, 291 bp, Shigella flexneri
ttggcttacacttgcgggccacggaatgatgagacctgtcgggaactgttagccctgttgactccgttctgtatcggcatggtgaccagcgatgactggggcagctacgccagagaagtgccgaaggagaaacacctgaccggcaaaatcttcacgcaacgtattgcacgtaacaaccggaccctccgcacccgcatcaagcggctggcacgtaaaacaatctgcttctcgcgttccgtggaaatccacgaaaaagtcatcggttccttcattgaaaagcacatattctaa

SEQ ID NO: 479187 - DNA, 273 bp, Shigella flexneri; identical to SEQ ID NO: 474355

SEQ ID NO: 479188 - DNA, 381 bp, Shigella flexneri; identical to SEQ ID NO: 458903

SEQ ID NO: 479189 - DNA, 423 bp, Shigella flexneri
atgggggaaacaatctcagagcaactggatatcattaataccgcctttaaagttatcgaaaccatacgtcccaaactggcctgtagccggtgtgatgtcatcgttcaggcaccacttcctcctaaaccgatcgaacgcggttatgccagtgcagggttacttgcacggatcctggtcagcaaatatatggaacatatccctttatatcgccagtcagaaatatacgcgcgacagggcgtggagctgagccgtaataccatggtgcgctgggtatcagaaatggcagacaaactccgtcctctgtatatagcgctgaatgactatgttctggaggcaggaaaggtgcacgcagatgacaccgttcgtgggtttttataccaccaagcgaaccggcggtatgctggtggattctcaggcgattaa

SEQ ID NO: 479190 - DNA, 684 bp, Shigella flexneri
atgaataaccagtatttacagtttgtgcgtgagcagctcattatcgccaccgctgatttgagtggggcaacaaaaggtcagcttgaagcctggcaagagaatgccatgttcgatacagggcgttacaggcgtaaaaaaatccggtaccgcgatgaagtgactggaaaaatgataacgcgggataatccaccaatcccgggaaagcaatcgctggcgaaggggacgtcaattcctctggtcagtccggttgagttttcgacatcatcgtggcggcgggctgttctgtctcttgaagagcactataaagcctggttgttgtggtgttacagcgggagtatttgttgggaatatcagatcgcgataacacagtgggcgtggaaagagtttaaggctcattctggcaccagaaaaattgcagggaaaacgcaggaacgcctgaaaaaattaatctggctggcggcgcaggcagtaaaagcagaactttttggtggggaaggttatgaataccaggagctggcattactggcgggagtgacaactaaaaactggtccaaaacatttactcgtcactgggttgcaatgaaacacatttttcaccgactggatagtgaggctttattgtttgtaatgagaacacgttcaaaaaaaagacggcattttcaaagcaaagtgttgcaaaagtag

SEQ ID NO: 479191 - DNA, 639 bp, Shigella flexneri
atgggggactctgtgacaccggagacacttggcaacatgattcgtcagtatttcagtcaggtacgaactgaaaaagagagcatacaggctctgaatcatctgcgcagagtgcttcatgaggtcagtccttttgcacaggagcctgtggactgtgtgttgtgggtgaaagcggatgaggtggtggccaacgattacaaccctaatgtcatggcactaggtgagaaaaaactactgaaacagtctctggagaaagatggtttcacacaaccggtggtggtgtcagaggagaagaatcattatctggtggtggatggttttcatcgtcagttactggggcgggaagcagatgcaggaaaacgcctgaggggctggttgcctgtagcctgtattaatccggagagaaagggacaggccgcacgtattgccgcgaccattcgacataaccgggccagggggaaacaccagatcactttaatgtctgatattgtcagggatctttcacgtctgggctggacgaatgaacgtattggtacagagctgggaatggaccaggatgaagtgctgaggctgaaacagattagcgggctgacagagttgtttcaggaagaggatttcagctcggcttggacggttcgttga

SEQ ID NO: 479192 - DNA, 381 bp, Shigella flexneri; identical to SEQ ID NO: 458903

SEQ ID NO: 479193 - DNA, 303 bp, Shigella flexneri; identical to SEQ ID NO: 473532

SEQ ID NO: 479194 - DNA, 297 bp, Shigella flexneri; identical to SEQ ID NO: 463264

SEQ ID NO: 479195 - DNA, 381 bp, Shigella flexneri; identical to SEQ ID NO: 458903

SEQ ID NO: 479196 - DNA, 1095 bp, Shigella flexneri
atgcgcgctgagacagcagcaaaacgggcagaggatattgctgatgtcgtatctctggaagatgcgagcacgacgaaaaaggggatagtgcagctcagcagtgcgaccaacagtgcatccgagtcactggccgcgacagcgaaagcggttaaggtggtaatggatgaaacaaacaagaaagcgcccctgaacagtccggctctgaccggaacgccaaccacacccactgcgccaaaggggactaataatactcagatcgccagtacggcttatgttatggccgcgattgctgccctcgtggactcgtcgcctgatgcactgaacacgctgaatgaactggcggcggcgctgggcaacgacccgaattttgcgaccaccatgactaacgcgcttgcgggtaagcaaccgaaagatgccactctgacggcgctggcggggcttgctactgcggcagacaggtttccgtattttacggggaatgatgtcgccagcctggcaaccctgacaaaagtcgggcgggatattcttgcgaaatcgaccgttgccgccgttatcgaatacctcggtttacaggaaacggtaaacaaggctgataacgctgtccaaaagacaggcgataccttgtccggtggacttacttttgaaaacgactcaatccttgcctggattcggaatactgactgggcgaagattggatttaaaaatgattcggatgcagacaccgattcctacatgtggtttgaaacaggtgacaacggcaatgagtatttcaaatggagacaccgcctcgctggcggccagctcaaagagctgatgaatcttaaatgggattcactaaatattctggttaatgccgtcattaatggttgccttggcattggtacgacgaatgcgttaggtggaaattcaattgctttcggggataacgataccggcctgaaacagaacggcgatggtctgctggatgtttatgcgaatggacagcatgtatttcgttttcagaatggcgtggctattgcttttaagaatattcaggccggaactgccagaaaattcacgttatccagcgccaacaactccacgaaaaatgggtaa

SEQ ID NO: 479197 - DNA, 198 bp, Shigella flexneri; identical to SEQ ID NO: 81716

SEQ ID NO: 479198 - DNA, 564 bp, Shigella flexneri; identical to SEQ ID NO: 463434

SEQ ID NO: 479199 - DNA, 243 bp, Shigella flexneri; identical to SEQ ID NO: 464992

SEQ ID NO: 479200 - DNA, 504 bp, Shigella flexneri; identical to SEQ ID NO: 474723

SEQ ID NO: 479201 - DNA, 381 bp, Shigella flexneri; identical to SEQ ID NO: 479185

SEQ ID NO: 479202 - DNA, 669 bp, Shigella flexneri
atggcaaatcaaaagaaaagctggtggacccgcatgcgcacggccatcaaaacgggtgacgctgacaccatgaacgaactggtggagtcggctcccgcatcggttacaggagatgagggggatttgccgcagggcgttaatctcaacatcaacctgtccccgcagcaaccgctaccggacaaagtaccagagatgggcggaggtccaaccggcgacagtgatgatgacctcaaaacattactgaaagccctgctggctaagctggaaggaaatgccacgggcgataacgataataaacctgacgataatccgaccggtgacggcgaggacgatgaagaggaaaccacgattactggtgactcagcctggcgtgccgaagttatcgttccgggtatcgatctgagccgtaagatgaaaccgaccgtgttcaaacgcgaggttctggcttctgctgacaaaacgctggttcgccagatagtcggtgatgcggatatccgcaaattaccgaaacaatcggtcgacatggcgtttaatgccgtgtctgaggttgccaaagggcgaaacacccgcgccaccaccggcgatgcacagcgcctaaacatgggcatgaccagtatcgcttccctgaacaaacaaaacgctgaattctggtctaaccgcaaaggataa

SEQ ID NO: 479203 - DNA, 753 bp, Shigella flexneri
gtgcttctccgtatacaccatgttatcggagagctgcccacgtatggttatcgtcgggtatgggcgctgcttcgcagacaggcagaacttgatggtatgcctgcgatcaatgccaaacgtgtttaccggctcatgcgccagaatgcgctgttgcttgagcgaaaacctgctgtaccgccatcgaaacgggcacatacaggcagagtggccgtgaaagaaagcaatcagcgatggtgctctgacgggttcgagttctgctgtgataacggagaaaaactgcgagtcacgttcgcgctggactgctgtgaccgtaaggcactgcactgggcggtgactaccggcggcttcaacagtgaaacagtacaggacgtcatgctgggagcggtggaacgccgcttcggcaacgatcttccgtcgtctccagtggagtggctgacggataatggttcatgctaccgggctaatgaaacacgccagttcgcccggatgttgggacttgaaccgaagaacacggcggtgcggagtccggagagtaacggaatagcagagagcttcgtgaaaacgataaagcgtgactacatcagtatcatgcccaaaccagacgggttaacggcagcaaagaaccttgcagaggcgttcgagcattataacgaatggcatccgcatagtgcgctgggttatcgctcgccacgggaatatctgcggcagcgggcttgtaatgggttaagtgataacagatgtctggaaatatag

SEQ ID NO: 479204 - DNA, 300 bp, Shigella flexneri
atgagaaccgacagcaacaaggcatggaagggagcgttaaagcgggcaggcattagcaacttccgcttccatgacctgaggcatacctgggcaagctggctggttcagtccggtgtctctcttcttgcgcttaaagagatgggaggatgggaaactctcgaaatggttcaaagatacgcccacctttcagccgggcatctcaccgagctgaagtggcacactgaatttggccacctgaacagaggtgatatgctcacctcagaacaacacaggtgctccaatgaaaaaaagaaattttag

SEQ ID NO: 479205 - DNA, 180 bp, Shigella flexneri; identical to SEQ ID NO: 476577

SEQ ID NO: 479206 - DNA, 366 bp, Shigella flexneri; identical to SEQ ID NO: 462994

SEQ ID NO: 479207 - DNA, 366 bp, Shigella flexneri; identical to SEQ ID NO: 462994

SEQ ID NO: 479208 - DNA, 471 bp, Shigella flexneri
gtgcctgtcaacaacgctgccaaaacgtgggcaatctcaacaccggacgaaatccgcgcaagcattaaccaggtgctgtctgatgcgtgggccgcttccggttactctgtggttccgcgtgatttgctgatcccgccagagcagtttgctctgttgtccagcatcatcgtttcatctgcgggtaaccagtccctgttgacgtaccttcagaccaacaccatcagctatcaccagaacggtgttccgctgaatatccgcgcggttaaatggctgaaaggccgtggtgtggggaataaggatcgcatggttgcgtacaccaacgataaaaaatacgtccgctatccgctggtgccgttgcagagcgttcctatccagtatcgcggtctgtatcagattgcgacctactacggcaagctgggtgcggttgagccagtgtacaaagaaaccatttcgtacgttgatggcatttaa

SEQ ID NO: 479209 - DNA, 210 bp, Shigella flexneri
atgacggatggctggccgctgtatgaatcacgcctgaagggaaagctgcacattatcagcaagcgttacactcagcgcattgagcgacataatctgaatctgagacaacatctggcaaggctggtacggaagtcactgtcgttctcaaaatcggtggagctgcatgacaaggtcatcgggcattatctgaacataaaacactatcagtaa

SEQ ID NO: 479210 - DNA, 279 bp, Shigella flexneri; identical to SEQ ID NO: 478446

SEQ ID NO: 479211 - DNA, 294 bp, Shigella flexneri
gtggcgcacgtcttcggggaacgcactctggccacactggagcgtcttctgagcctgttgtcggcctttgaggtcgtggtatggatgacggatggctggccgctgtatgaatcacgcctgaagggaaagctgcacgttatcagcaagcgttacactcagcgcattgagcgacataatctgaatctgagacaacatctggcaaggctgggacggaagtcactgtcgttctcaaaatcggtggagctgcatgacaaggtcatcgggcattatctgaacataaaacactatcagtaa

SEQ ID NO: 479212 - DNA, 303 bp, Shigella flexneri; identical to SEQ ID NO: 473532

SEQ ID NO: 479213 - DNA, 210 bp, Shigella flexneri; identical to SEQ ID NO: 9340

SEQ ID NO: 479214 - DNA, 354 bp, Shigella flexneri; identical to SEQ ID NO: 476372

SEQ ID NO: 479215 - DNA, 504 bp, Shigella flexneri
atgcccggagaacgggtcatctttcagcgtgttctgcaccttcgaagccaggccattgaagccacaacgcatatctgtgatgccagcgatgatccagattttggtaccggtcggcagcgttatcatcggataccccctttcatttcgcggattagcgcccgtaacagttccggagtgagagggtcaaacagttttaccacacctgatttaagatgcagctcgcaccgtgggacgtttccgggagccccctcagggcgctcatcatgcttgttacgccagaagggatttgtaactggtctggtcggctccggcgtatcagtcagtgccaccgggacaggcatgcattcctgtatgtcatcatcgctcagtaagccgtcctcgtactggcttttccatttaaacagcaggttatcattgatatcgtgttctctggcgatccgggcaacaacagccccaggctgtaatgcctgcttagccagacggaccttaaattcacggctatag

SEQ ID NO: 479216 - DNA, 165 bp, Shigella flexneri
atgacggatggctgtccgctgtatgaatcacgcctgaagggaaagctgcacgttatcagcaagcgttacactcagcgcattgagcgacataatctgaatctgagacaacatctggcaaggctgggacggaagtcactgaaccgccccgggaatcctggagactaa

SEQ ID NO: 479217 - DNA, 381 bp, Shigella flexneri; identical to SEQ ID NO: 458903

SEQ ID NO: 479218 - DNA, 219 bp, Shigella flexneri; identical to SEQ ID NO: 474644

SEQ ID NO: 479219 - DNA, 381 bp, Shigella flexneri; identical to SEQ ID NO: 458903

SEQ ID NO: 479220 - DNA, 219 bp, Shigella flexneri; identical to SEQ ID NO: 474644

SEQ ID NO: 479221 - DNA, 219 bp, Shigella flexneri; identical to SEQ ID NO: 474644

SEQ ID NO: 479222 - DNA, 246 bp, Shigella flexneri
gtgttcaaacgcgaggttctggcttctgctgacaaaacgctggttcgccaggttgtcggtgatgcggatatccgcaaattgcctaagcaatcggtcgatatggcgtttaacgctgtgtctgagattgccaaagggcgaaacacccgcagcaccacgggcgatgcacaacgtccaaacatgggcatgaccagcatcgcttccctgaacaaacaaaacgctgaattctggtctaaccgcaaaggataa

SEQ ID NO: 479223 - DNA, 1812 bp, Shigella flexneri
atgctcagaaatatttcatcctgtttatttccacatatcagcacaattacatcccccaaccattatttgtccgaatgggatgattgggagaaacaggggttaccggaagaacagcgtactgaggcggtaagaagacttcgtgcatgtcttacctctaaggggcataaactggacctgcgagccttggcgctttcctcgttacctgtactccctgcttgcattaaaaagcttgatgtgagctgtaataaattaaccatccttactgatttacctgaaaatattaaagaacttattgcaagagataatttcttaacacatatatctgcattaccacattatctaataactttggatgtgtccgaaaatcaattagagaatctgccgttattaccagacaccatcaaatcactaagcgcagagtataataggttatccacactgccttcattacccttgaatttaaaaaaacttgaggttaggaacaacgaactgcaaactcttccatctctgccttctaatcttaagatacttaaggttgcgcacaaccatcttactgaactgccccctttacctaggagactgcaacttctttttgcatatagcaatagattaagcaacttaccaaacatccaagaaaatattatcatgagaagatttttttattttgaaaacaaccaaataactacaatcccgacaaatctttttcgtttagatcctcatataactattgagattgcaaataaccccttatcagatcaaactctgctattcttaatacagcaaacttcggttccaaattttaacgggcctcagtttcgtatttccctgtcagaccaaaacagactgtttttacgccagatgttgccgcaaaatttacattcgcgccatatcagagtcatcactgaaggggggcagaactttcagatcccccctcttcccgaaactgtggcagcctggtttcctgaagcagatcgtcgggaggtttctacacaatggacttctttttccaccgaggagaattcccgggcattctccgcgttccttgaccgcctttccgataccgtctctgcacgcaatacctccggattccgtgaacaggtcgctgcatggctggaaaaactcagtgcctctgcggagcttcgacagcagtctttcgctgttgctgctgatgccactgagagctgtgaggaccgtgtcgcgctcacatggaacaatctccggaaaaccctcctggtccatcaggcatcagaaggccttttcgataatgataccggcgctctgctctccctgggcagggaaatgttccgcctcgaaattctggaggatattgcccgggataaagtcagaactctccattttgtggatgagatagaagtctacctggccttccagaccatgctcgcagagaaacttcagctctccactgccgtgaaggaaatgcgtttctatggcgtgtcgggagtgacagcaaatgacctccgcactgccgaagccatggtcagaagccgtgaagagaatgaatttacggactggttctccctctggggaccatggcatgctgtactgaagcgtacggaagctgaccgctgggcgcaggcagaagagcagaaatatgagatgctggagaatgagtaccctcagagggtggctgaccggctgaaagcatcaggtctgagcggtgatgcggatgcggagagggaagccggtgcacaggtgatgcgtgagactgaacagcagatttaccgtcagctgactgacgaggtactggccctgcgattgtctgaaaacggctcacaactgcaccattcataa

SEQ ID NO: 479224 - DNA, 450 bp, Shigella flexneri
atgcaagcaacagccacaacactcgaccacgaacaagaatacacgccgatcaactcgcgtaataaagtccttgtcgcctctctcattggcacggccattgagttcttcgacttttacatttacgccactgcggccgttattgtgtttccgcatatcttcttcccgcagggcgatccaacggcagcaacgctacagtcgctcgccaccttcgccatcgccttcgtcgcgcgccccattggctctgccgtttttggtcattttggcgatcgcgttgggcgtaaagcgacgctggtcgcctcgttgctaacgatggggatttcgaccgtggtgattggtctgctgccgggctatgccacgattggtattttcgccccactgctgctggcgctggctcgatttggtcagggtctgggcttaggcggtgaatggggcggcgctgctggcgactga

SEQ ID NO: 479225 - DNA, 405 bp, Shigella flexneri
atgatcaggattgcggcgctactctcaatactcttaactaccagcgccaattctgaatgctggattgtcacaaacctgcacgggtacggggcaatgaatggcggtcgttacgggtttacaaaagacagcacggaagattacgtttttcacgtaacaataaatggcgataaatcatcagtttatgaatcagtctctggcgtctatccagagatgaaatacactgctttgtcatcgaacactatggtaggagaataccagtctggaggaggaataaccgttgaaacttggtcaatcactacagacaaaaaagctctttactccaaagtaatgaatatcccaggtatgcaacaacttacatcaaccaaatcatttgttggtgatgtagtcggaacctgcaaccagtaa

SEQ ID NO: 479226 - DNA, 513 bp, Shigella flexneri
atgccaggacaaccaataccaagtgagctcaaagagaaaggactgatatggcttttaccaccatactgctggtcacatcgtcagatagcccgtaagctgaagatcagtgcctcagttgtatcaaaatggaaatgtgagttagtggagcaaggacttttacctgaaaatgaaaagattacctccgttgatgttgaagactggacaccggagcgtcgattctcagttgttcttgagacggctacgctgtcagaaatggaacttgctgattattgccgacgcacgggattgtttgttgaacaggttaaagaatggcgggctatctcaattcaggcgcatgaaaagaaattgacggaaaatatccgaacagacagggcattgcgtgacgcaaaaaataagttacgagaactggagaaagagcttaagcgcaaagataaagctctggcggaagcagctgccctgcttatattaagggaaaagttcaatgccctctgggacaacagcgaggaagactga

SEQ ID NO: 479227 - DNA, 768 bp, Shigella flexneri
gtgatcgtaccaactctggcagacaggggtatttatattgcttctgaatcaagcttttatcgtgtactgaaatcagccaaccagttgaagaaacgatcccgtgaatgtcagtataaacggcctgatgtactcagggccgttgcaccgaatcaagtctggagttgggatatcagctatttgccgtccggggtcagaggtcagcatttttacctctatatgatcgtcgatatttacagtcgcaagattattgctgcagaggtatttgccagcgaatctggaaaacatgcagcagaactactccagcgggcaatatggaatgaaaaatgttcatccagcaatctggtactccattctgataatggtgctcccatgcgcagttacacgttgttggcgaaaatgtatgcgcttggtgtgctaagttcttattcccggccaagagtcagcaatgataatccttactcagaatctttgttccggactctcaaatattgtccctggtggcctgagaacggttttcgcactattaatgatgccagaatatgggtaaaccgttttgtaaactggtacaactttgaacataagcacagcgggatcaaatacgtcacgccagccgagcgtcatcaaggtaatgatatgaaaatactggcggccagaaaagcagtataccagctggcacgcgaacagcatcctgaacgttggggaaagcatctacgtaactgggactacatatcagaagtctacctgaatccagaaaaagaggctgcataa

SEQ ID NO: 479228 - DNA, 1542 bp, Shigella flexneri; identical to SEQ ID NO: 6142

SEQ ID NO: 479229 - DNA, 747 bp, Shigella flexneri; identical to SEQ ID NO: 6143

SEQ ID NO: 479230 - DNA, 654 bp, Shigella flexneri; identical to SEQ ID NO: 476867

SEQ ID NO: 479231 - DNA, 243 bp, Shigella flexneri; identical to SEQ ID NO: 477875

SEQ ID NO: 479232 - DNA, 147 bp, Shigella flexneri; identical to SEQ ID NO: 476209

SEQ ID NO: 479233 - DNA, 882 bp, Shigella flexneri
atggatagcgcatgtgcccttgttaccttcggacaaggaatagccccggtaagccgtgttctgggcgtgtcacgtgcgcagttaacattacggatgaaggcatctgataacaagccagataaacggcgtcagaggcgcgatgaggctgcggatgcagaagtcttatcgcgcatcctggatatcattggcgatatgccagcatacgggtatcgccgtgtctgggcgatactcaggcggcagtcccgaaatgaaggactaccgttcgtgaatgcaaagcgtgtttaccggataatgagcgaaaatagtctgttgttgttacatgacaaaccatcacgacggcagcgggaacataaaggccgaatatcggtgaaggaaagcgaccagcgttggtgttccgatggctttgagttcggttgcgatgatggcgaaaaactgcgtgttacgttcgtcctggattgttgcgatcgtgaagccatagactgggccgcaagcacgggaggttacgataaagcgacagtgcaggatgtgatgttaggagcgatagaaaaacgctttggcgataaagtaccggaacagtccatccagtggctgacagataacggttcagcgtacagagcgcatgaaacacggcagttcgccagagagctgaatctgaagccctgcacaacggcaatcagtagccctcagagtaatggaatggcagaacggttcgtgaaaacgatgaaggaagactacatcgcgttcatgccgaaaccgaatgtaagaacggcattgcataaccttgcagtggcgatcgagcattacaatgaaaaccatccgcatagtgcgttgggttatcgctctccgcgagaatatcgacgtcagcgggtaatgttaacttaa

SEQ ID NO: 479234 - DNA, 576 bp, Shigella flexneri; identical to SEQ ID NO: 473829

SEQ ID NO: 479235 - DNA, 246 bp, Shigella flexneri
gtgttacttgaaaagctaaaagctggtgaagttagcgccgaaggtctgcgcattgtgctggaagcgggtattcgcgagccgatgatcatgcgggccaatcaggcgctgtatgcgcaattacaccctataaaagaatccattttctggcgtcaggttgacggcggacatgatgcgctttgttggcgcggtggcttgatgcaggggttaatcgacctctggcaaccacttttccatgacaggagttga

SEQ ID NO: 479236 - DNA, 294 bp, Shigella flexneri; identical to SEQ ID NO: 476979

SEQ ID NO: 479237 - DNA, 294 bp, Shigella flexneri; identical to SEQ ID NO: 476979

SEQ ID NO: 479238 - DNA, 129 bp, Shigella flexneri; identical to SEQ ID NO: 476230

SEQ ID NO: 479239 - DNA, 3054 bp, Shigella flexneri
atgacctggggcgagcaaaccgacgtaccggaatctgccgactggtataactccagctacatcatcgcttgggggtctaacgtaccgcagacacgtacgccggacgcccacttctttaccgaagtacgctacaaaggcactaaaaccatcgccattacccctgactactctgaagtggccaaattgtgcgaccagtggctggcaccgaaacaaggcactgatagcgccctggcgatggcaatggggcatgtgattttaaaagagtttcatctcgataatcccagcgactactttatcaactactgccgccgctacagcgacatgccgatgctggtaatgctggagcctcgcgacgatggtagctacgttcccgggcgcatgatccgcgcatctgacctggtggatggactgggcgaaagcaacaatccgcagtggaaaaccgtagcagttaataccgcaggtgaattggtagtgccgaacggttcgattggtttccgctggggagaaaaaggcaaatggaatctggaatccattgccgccggtacggaaaccgaattgtcgttaaccctgctcggtcaacatgacgctgttgcaggcgtggccttcccctactttggcggcattgaaaatccgcattttcgcagcgtaaaacacaatccggtgctggtgcgccaattgcccgttaaaaacctgacgttagtcgatggcaacacctgtccggtggtcagcgtttatgatttggtactggcgaattacggcctcgatcgcgggctggaagatgaaaacagcgcgaaagattacgctgaaatcaaaccgtacaccccagcctggggtgagcaaattaccggcgtaccgcgccagtatattgaaaccatcgcccgcgaatttgccgatatcgcccataaaacgcatgggcgctcaatgattatcctcggcgcaggtgttaaccactggtatcacatggacatgaactaccgcgggatgatcaatatgctgatcttctgcggttgtgtcgggcaaagcggtggcggctgggcacactatgtcggccaggaaaaactgcgcccacaaaccggctggttgccactggcctttgcgctcgactggaaccgaccaccgcgccagatgaacagcacctcgtttttctacaatcattccagccaatggcgctatgaaaaagtctctgctcaggagttactttcaccgctcgccgatgccagtaagtacagcggtcatctgattgatttcaacgttcgcgccgaacgtatgggctggctaccttctgcgccgcagctggggcgtaacccgctcgggattaaagctgaagccgacaaggccggattatcccccacagaatttaccgcccaggcgctgaaatcgggcgatttacgtatggcctgcgaacaaccagatagcggcagcaatcatccgcgtaatttgtttgtctggcgctctaacctgcttggctcctccggcaaaggccacgagtatatgcagaagtatctgctggggaccgaaagcgggattcagggcgaggaactcggtgccagcgacgggatcaaaccggaagaagtcgagtggcaaactgcggcgattgaaggcaagctcgacctgctggtgacgctcgacttccgcatgtccagtacctgcctgttctccgatatcgttctgcccaccgccacctggtatgaaaaagacgatatgaacacctcggatatgcatccatttattcatccgctttctgcggcggtcgatccggcctgggaatcacgcagcgactgggaaatctacaaaggtattgccaaagcattttcgcaagtgtgcgtgggccatcttggcaaagaaaccgacgtggtattacaaccactgctgcatgactctccggcagagctctcacagccgtgtgaagtgctcgactggcgcaaaggcgaatgcgatctgatcccgggtaaaaccgcgccgaatattgtggcggtggagcgcgactaccctgctacgtatgaacgctttacctcgctcgggccattgatggacaaacttggcaatggcggtaaagggatttcgtggaatacccaggatgaaatcgatttcctcggcaaactcaattacaccaagcgtgatggcccggcacaggggcgtccgctgattgacaccgccattgacgcttcagaagtgattctggcactggcaccggaaaccaacggtcatgttgcagtcaaagcgtggcaggcgctgggcgagatcaccgggcgcgaacatacccatctggcgctgcacaaagaggacgagaagattcgctttcgcgatattcaggcgcagccgcgtaaaattatctccagccccacatggtccggtctggaaagcgatcacgtatcctataacgcgggatacaccaacgttcatgagttaattccgtggcgcacgctgtcgggacgccagcagctctatcaggatcatccgtggatgcgtgcttttggtgaaagcctggtggcttatcgcccgcctatcgacacccgtagcgtcagtgagatgcgccagataccgccaaacggcttccaggaaaaagcacttaacttcctgacgccgcaccagaaatggggcattcactcaacctacagtgaaaacctgctaatgctgacgctctctcgcggtggaccgattgtctggatcagcgaaacagatgcccgagaactgaccattgtcgataacgactgggtggaagtatttaacgccaacggcgcgctgactgcccgcgcggtggtcagccaacgtgtaccgccgggcatgaccatgatgtatcacgcccaggaacgcattatgaatattcctggttcggaagtaactggcatgcgcggcggcattcataactcggtcacccgcgtttgcccgaaaccgacgcatatgattggcggttacgcgcagctggcctggggctttaactactacggcaccgtcggctcgaaccgcgacgaattcatcatgatccgcaagatgaagaacgttaactggctggatgatgaaggtcgcgatcaggtacaggaggcgaaaaaatga

SEQ ID NO: 479240 - DNA, 327 bp, Shigella flexneri
atgactaaaaatactcgtttttcccccgaagtccgtcaacgggcagtccgtatggttctggaaagtcagagcgaatatgactcacaatgggcgacaatttgttccattgccccaaagattggctgtacgccggagactctgcgtgtctgggttcgccagcatgagcgggataccgggggcggtgatggagggctcaccaccgctgaacgtcagcgtctgaaagagctggagcgtgaaaatcgtgaactgcgccgcagtaacgatatccttcgccaggcttccgcttattttgcgaaggcggagttcgaccgcctctggaaaaaatga

SEQ ID NO: 479241 - DNA, 693 bp, Shigella flexneri
atgttatatgcatttaagctgggcagaaaactgcgcggcgaggaaccttggtgccatgaaaaaggcgggaaaggtggtagctctgataaaagcgcaaagtatgcagcagaagcccagaagtatgctgcagacctgcaaaatcagcagtggcagacgatcatgaaaaaccttgctccgttcacgcctcttgcggagcagtatgttaaccagcttcagaacctttccagtttagaaggtcaggggcaggcacttaatcagtattacaactctaagcagtataaagaccttgcagggcaggcgcgttaccagagtcttgctgctgcggaggcgacgggtggacttggttcgacagccacaagcaatcaactggctacgatcgcgccgacactcggtcagtcttggttatcaaatcagatgagcaattacaacaatctggcaaacgttgggcttggtgcgctgcaaggtcaggcaaacgccgggcagacgtacgccaacaacatgagcagcattgcacagcaaagcgcagctcttgccgctgctaatgccaataaaccatcaagtcttcagactgcaattagcggtggcacgtctggtgcgattgccggtgcaggtcttgccagccttttgggaacatcaacgccttggggcgctggtattggtgctggtatcggattgcttggctcgttgttttaa

SEQ ID NO: 479242 - DNA, 633 bp, Shigella flexneri; identical to SEQ ID NO: 474478

SEQ ID NO: 479243 - DNA, 294 bp, Shigella flexneri; identical to SEQ ID NO: 478581

SEQ ID NO: 479244 - DNA, 279 bp, Shigella flexneri; identical to SEQ ID NO: 477926

SEQ ID NO: 479245 - DNA, 654 bp, Shigella flexneri; identical to SEQ ID NO: 476867

SEQ ID NO: 479246 - DNA, 570 bp, Shigella flexneri; identical to SEQ ID NO: 474696

SEQ ID NO: 479247 - DNA, 351 bp, Shigella flexneri; identical to SEQ ID NO: 475888

SEQ ID NO: 479248 - DNA, 597 bp, Shigella flexneri
atgaccaataatgccagcggtggggccgtatttttgcaacaaggagcggaattttcactattaccagaaaatgaaactggaatgactctgtttgccaataacaccgttacaggagaatataataacggcggggccatatttgctaaagaaaactcaacgctgaatcttactgatgttattttttccggtaacgtcgcaggcggctatggtggcgcaatctattcttctggtactaatgatactggtgccgtcgatttacgtgtcactaacgccatcaataatatcgctaatgatggcaaaggtggcgcaatttataccattaataatgacgtctatttaagtgatgatgtttttaacaataaccaggcatatacatcaacaagttacagtgatggcgatggcggggcaatcgatgttaccgataataatagcgacagcaagcatccttcaggttatacgataataaataacaccgcctttacaaataacacagccgaaggttatggcggggcgatatataccaatagcgcgacggctccctatcttattgatatttctgttgatgacagcggtaatgctgccaacttactgatttag

SEQ ID NO: 479249 - DNA, 207 bp, Shigella flexneri; identical to SEQ ID NO: 479025

SEQ ID NO: 479250 - DNA, 348 bp, Shigella flexneri
atgataacgctgccgaccggtaccaaaatctggatcatcgctggcatcacagatatgcgttgtggcttcaatggcctggcttcgaaggtgcagaacacgctgaaagatgacccgttctccgggtatatcttcgtcttccggggccgcagtggcaaaatggtgaaaatactgtgggccgatcgtgacgggttatgcctgttcgccaaacgcctggaacggggccgcttcgtctggccggtgacccgggaagggaaagtgcacctgacgccagctcagttatccatgctactggaggggatcgcgtggcaacatcccaaacggacagaacggcctggcatccggatataa

SEQ ID NO: 479251 - DNA, 444 bp, Shigella flexneri; identical to SEQ ID NO: 477932

SEQ ID NO: 479252 - DNA, 504 bp, Shigella flexneri
atgcccggagaacgggtcatctttcagcgtgttctgcaccttcgaagccaggccattgaagccacaacgcatatctgtgatgccagcgatgatccagattttggtaccggtcggcagcgttatcatcggataccccctttcatttcgcggattagcgcccgtaacagttccggagtgagagggtcaaacagttttaccacacctgatttaagatgcagctcgcaccgtgggacgtttccgggagccccctcagggcgctcatcatgcttgttacgccagaagggatttgtaactggtctggtcggctccggcgtatcagtcagtgccaccgggacaggcatgcattcctgtatgtcatcatcgctcagtaagccgtcctcgtactggcttttccatttaaacagcaggttatcattgatatcgtgttctctggcgatccgggcaacaacagccccaggctgtaacgcctgcttagccagacggaccttaaattcacggctatag

SEQ ID NO: 479253 - DNA, 504 bp, Shigella flexneri
atgcccggagaacgggtcatctttcagcgtgttctgcaccttcgaagccaggccattgaagccacaacgcatatctgtgatgccagcgatgatccagattttggtaccggtcggcagcgttatcatcggataccccctttcatttcgcggattagcgcccgtaacagttccggagtgagagggtcaaacagttttaccacacctgatttaagatgcagctcgcaccgtggggcgtttccgggagccccctcagggcgctcatcatgcttgttacgccagaagggatttgtaactggtctggtcggctccggcgtatcagtcagtgccaccgggacaggcatgcattcctgtatgtcatcatcgctcagtaagccgtcctcgtactggcttttccatttaaacagcaggttattattgatatcgtgttctctggcgatccgggcaacaacagccccaggctgtaatgcctgcttagccagacggaccttaaattcacggctatag

SEQ ID NO: 479254 - DNA, 294 bp, Shigella flexneri; identical to SEQ ID NO: 476979

SEQ ID NO: 479255 - DNA, 219 bp, Shigella flexneri; identical to SEQ ID NO: 474644

SEQ ID NO: 479256 - DNA, 378 bp, Shigella flexneri; identical to SEQ ID NO: 474621

SEQ ID NO: 479257 - DNA, 132 bp, Shigella flexneri; identical to SEQ ID NO: 476846

SEQ ID NO: 479258 - DNA, 294 bp, Shigella flexneri; identical to SEQ ID NO: 25632

SEQ ID NO: 479259 - DNA, 294 bp, Shigella flexneri; identical to SEQ ID NO: 25632

SEQ ID NO: 479260 - DNA, 177 bp, Shigella flexneri
gtgttcctgttgcttgtcgtactggctgctgatatcgaattgcagtttcccggtaacagattccagcttatcgccgcacgttatctgattgccttcgtaaacgaagtcgatagcgcggtacacatcgtcatacagacctgttttcagcacacaccattgtgggccattggcgcttga

SEQ ID NO: 479261 - DNA, 177 bp, Shigella flexneri
gtgttcctgttgcttgtcgtactggctgctgatatcgaactgcaatttgccggtaaccgattccagcttatcgccgcacgttatctgattgtcttcgtaaatgaagtcgatagcgcggtacacatcgtcatacaggcctgttttcagtacacaccattgtggaccattggcgcttga

SEQ ID NO: 479262 - DNA, 180 bp, Shigella flexneri
atgtttccgcaatcgctgatgaggctgtatgatggggtgggggggcgttttcaggacaaacccgaccccgccgggcaccgaacgcctccccaaatttttatgcacgggaattttttgaaaaataatctgacgaaaaataagcatggcaagaccaccgaaagcccccgcctacctggatga

SEQ ID NO: 479263 - DNA, 417 bp, Shigella flexneri; identical to SEQ ID NO: 478007

SEQ ID NO: 479264 - DNA, 663 bp, Shigella flexneri
atggaactgtatctggacaccgctaacgtcgcagaagtcgaacgtctggcacgcacattcccgattgccggggtgacaactaacccgagcattatcgctgccagcaaggagtccatctgggaagtgctgccgcgtctgcaaaaagcgattggtgatgagggcattctgtttgctcagaccatgagccgcgacgcgcaggggatggtggaagaagcgaagcgcctgcgcgacgctattccgggtattgtggtgaaaatcccggtgacttccgaaggtctggcagcaattaaaatactgaaaaaagagggtattactacacttggcaccgctgtatatagcgccgcagaagggttattagccgcactggcaggggcaaaatacgttgctccgtatgttaaccgcgtagatgcccagggcggggacggcattcgtacggttcaggagctgcaaacgctgttagaaatgcacgcgccagaaagcatggtgctggcagccagctttaaaacgccgcgtcaggcgctggactgtttactggcaggatgtgaatccatcaccctgcccttagatgtagcgcaacaaatgctcaacacccctgcggtagagtcagctatagagaagttcgaacacgactggaatgccgcatttggcactactcatctctaa

SEQ ID NO: 479265 - DNA, 441 bp, Shigella flexneri; identical to SEQ ID NO: 478023

SEQ ID NO: 479266 - DNA, 387 bp, Shigella flexneri
atgcggaatggtgatgagaatgctgatgacattgcagggcgcttcaccgggacgtataccggagctgatgcgcgatcttgcaagtatgggacaacttgtgaaattaccgacgagaaggggaagggccttcccgagagtggtaaaggagaggcccaggaaataccccacagccccgaaaaagagccagtcagttgcttaactgactggcattacggcgcatggccggggtttcagattattgacaaagtgcgctttgtttatgccggatgcggcgtgaacgccttatccggcctacaaaatcgtgcaaattcaatatattgcaatcatcttgtaggcctgataagtgtagcgcatcaggcttatttggcattggtcattagtgattaa

SEQ ID NO: 479267 - DNA, 366 bp, Shigella flexneri; identical to SEQ ID NO: 478080

SEQ ID NO: 479268 - DNA, 267 bp, Shigella flexneri
atggacacaggcctaagcgaggttctggttttcaaattgttccggactgaggccgccacgccaactgtgccgccgccaccgattgtaatcacattcgatataattaaacaccgttgcccgcattatttcccggctgataaagtgttctccatggatacattccactttcagcgaatgaaagaagctttccacgcagattatgccgtttcagttgcgcctgataatctgctgaacagtactggcctccacggtccgtgtgaacgataa

SEQ ID NO: 479269 - DNA, 210 bp, Shigella flexneri; identical to SEQ ID NO: 476166

SEQ ID NO: 479270 - DNA, 312 bp, Shigella flexneri
atgagtcaggcgctaaaaaatttactgacattgttaaatctggaaaaaattgaggaaggactctttcgcggccagagtgaagatttaggtttacgccaagtgtttggcggccaggtcgtgggtcaggccttgtatgctgcaaaagagaccgtcccggaagagcggctggtacattcgtttcacagctactttcttcgcccaggcgatagtaagaaaccgattatttatgatgtcgaaacgctgcgtgacggtaacagcttcagcgcccgccgggttgctgctattcaaaacggcaaaccgatttttatatga

SEQ ID NO: 479271 - DNA, 747 bp, Shigella flexneri; identical to SEQ ID NO: 478117

SEQ ID NO: 479272 - DNA, 351 bp, Shigella flexneri; identical to SEQ ID NO: 478143

SEQ ID NO: 479273 - DNA, 399 bp, Shigella flexneri; identical to SEQ ID NO: 478121

SEQ ID NO: 479274 - DNA, 507 bp, Shigella flexneri
atggatagttatatcgcgattacactgtttggctgtttttttgtgctggtctttattggtgtgcccatttcgttctcaatcggtattgccactgtagcgtcaatgcttttgatgtttccctgggatatcgcggcaatcactgtttcgcaacgactggctaatggactggataactttgccctgttggcaatcccctttttcatctttgccggaacactgatgaacagcggcggtattgcgatacgtttgattaacctcgcccaggtaatggttggccgcgttcctagttcgcttggtcatgtgaacgtcctggcgaatatgatgtttggttccatttctggttcagccgttgcggcagctgctgccgttggtggcacactgaatcccattcagaccaaagaaggttatgatccggcattttctacctctgtaaacgtctcatcttgtattactggattactgaggtgtactggcaatagcggacactaccatttgttctttttttaa

SEQ ID NO: 479275 - DNA, 291 bp, Shigella flexneri
atgtttagacgaaatcttattacctctgccatcttattaatggcaccgttagccttttctgcacaatcattggctgaatcattaacggtggaacaacgccttgagttattagaaaaagcgttaagagaaacgcaaagcgaactcaaaaagtataaagatgaagagaagaaaaaatatacgccagcgacggtgaatcgtagcgtaagtacgaatgatcaagggtatgccgccaatccgttcccgaccagtagtgccgcaaaacctgatgctgtactggtcaaaaatgaatag

SEQ ID NO: 479276 - DNA, 177 bp, Shigella flexneri
atggaacagctgcgtgccgaattaagccatttactgggcgaaaaactcagtcgtattgagtgcgtcaatgaaaaagcggatacggcgttgtgggctttgtatgacagccagggaaacccaatgccgttaatggcaagaagctttagtacgcccggaaaagcccgacaactggcatag

SEQ ID NO: 479277 - DNA, 294 bp, Shigella flexneri; identical to SEQ ID NO: 25632

SEQ ID NO: 479278 - DNA, 699 bp, Shigella flexneri
atgttgagcgcgccgttacgccagccgggcattgtggctttgcgggaatatttacgccagcgtccccccgcctgcatacggcctcttaatcaggtcgataacttatttattctgccggtcgctgagtgtatttcgctcggttgggatagcagccgccagacgctggatgcgcaggtaatcagcggcgaaggtgaagataatctgctgacgttatcactgccagcctcagccagcgcgccttatgccgttgaacgcatggcggcgcttttgcaacaaacagacgaccccgtgtgtctggtttctggctttgtcagttttgttgatgggcaattgacactggaaccacaggtaatgatgacaaagactcgtgcctgggcgctggacgcagaaactgcgcctgtggtggtatcactaccttctgccagcgttctgcctgtgccgtctactgctcatcagttgctgatgcgctgccaggcgttacttattcaactgctccataacggctggcgctatcaggaacagagcgctattagtcaggcagagttgctggcgaatgacctcaccgcggtgggtttttatcggctggcacatgtgttggcacaatttcgtaatacagaaagcgaggcacgggtagaagcaatgaataacggtgttttgctttgcgaacaattattccccatgcttcagcaacaaggatga

SEQ ID NO: 479279 - DNA, 972 bp, Shigella flexneri
atggaccagatagccaacctggtcattgatttggggattgatgcggcagagtttaaaaatgaaattccccgtatcaaaaaccttctgaatggtgcagccagcgatgcagaacggtcttctgcccgtatgcagcgttttatggagcgtcagactcaggcggcccggcagacaatgcaggcggcttcttcggctgcaacagcagcatcagcccatgcgcagacggtggagaagaatgcacgggctcatgaacgcatggcccgtgaggtggaacaaacccgtctgcgcgtggatgccctgaatcagaaaatgcgcgaggaacaggcgcaggccagggcactggcggaggcgcaggataaagcggctgccgccttttatcgccagattgacagtgtgaaacaggccggtgcggggcttcaggaattacagcgtattcagcagcagatccgacaggccagaaacagtggcggggttggtcagcaggattatctggcgctgatttcggagatcacggcgaaaacccgtgccctgacgcaggcagaggaacaggccacccggcagaaagcggcgtttatccgccagcttaaagagcaggcaacccgccagaatctgtcgtcttctgagttgcttcgcgccagggcggctcagctgggggtaagcagtgctgcagaagtgtatatccgcaaaatggagcgggcaggaaaagccacacattcgctggggctgaaaagtgcggcagcccggcgggagctgggggtgttaatcagtcagatggcgcgcggcaattttggtgcgctgaggggatccgggataacgctggctaaccgtgccggatggacaggcgcacagatgtcgccgaaaggcatgatggctggcggcgttattggcggacttgtcgcggcggtcctgggtctgggtaaagcctggcatgacggcggaaggagggcgaggaatttaaccgtcagctggcgctga

SEQ ID NO: 479280 - DNA, 153 bp, Shigella flexneri; identical to SEQ ID NO: 478140

SEQ ID NO: 479281 - DNA, 303 bp, Shigella flexneri; identical to SEQ ID NO: 478142

SEQ ID NO: 479282 - DNA, 279 bp, Shigella flexneri
gtggcgcacgtcttcggtgaacgcactctggccacactggagcgtcttctgtttgaggtcgtggtatggatgacggatggctgtccgctgtatgaatcacgcctgaagggaaagctgcacgttatcagcaagcgttacactcagcgcattgagcgacataatctgaatctgagacaacatctggcaaggctgggacggaagtcactgtcgttctcaaaatcggtggagctgcatgacaaggtcatcgggcattatctgaacataaaacactatcagtaa

SEQ ID NO: 479283 - DNA, 1500 bp, Shigella flexneri; identical to SEQ ID NO: 478158

SEQ ID NO: 479284 - DNA, 798 bp, Shigella flexneri
ttgggtttaaccatttctcgttatattggcgcagttgcaattttgtgggtgctggcgattggttttaatcctgcgctaaggatttcgttaaagagctattttaaaccgctgaattttagcattatctgggaagtcatggggattggtattccagcgagtgtcgaatcagtgttatttaccagtggtcggttattaacccaaatgttcgttgccgggatggggaccagcgttattgacggaaattttatcgcgttctcaattgcggctcttatcaacttacccggaagtgcgctcggttctgcttctacgatcattacaggccgaaggttgggggtagggcagatagcgcaagcagagattcagttgcggcatgtgttctggctgtccactcttggattaacggccatcgcctggctaacggctccctttgccggggttatggcatcgttttacacccaggatccacaggttaaacacgtcgttgtgattctgatttggctaaatgctttatttatgcctatttggtccgcctcatgggtgctacccgctggatttaagggtgctcgtgatgcccgttacgccatgtgggtttctatgttgagcatgtggggttgccgggttgtagtcggttatgtgcagggaatcatgcttggctggggtgtggttggtgtctggatgggaatgtttgccgactgggctgtgctgttttactggcgaatggttactggacgttggctgtggaaataccctcgatccgagccgcaaaagtgtgaaaaaaagccagttgtgtcggaataa

SEQ ID NO: 479285 - DNA, 864 bp, Shigella flexneri; identical to SEQ ID NO: 478160

SEQ ID NO: 479286 - DNA, 534 bp, Shigella flexneri; identical to SEQ ID NO: 478159

SEQ ID NO: 479287 - DNA, 924 bp, Shigella flexneri
atggtttatgcaccgctgcccgcagcgctggtcgagtggctacgggaaattctgctaggtaaaaccactgctgaattgtatatggctatcggctgccagaagcacgccaaaaccgaaagctaccgcgaatatctcgtttatctacagggctgtaatgagcagttcattgaagcgccgggtattcgtggaatggtgatgttggtgtttacgctgccgggctttgatcgggtattcaaagtcatcaaagacaagttcgcgccgcagaaagagatgtctgccgctcacgttcgtgcctgctatcaactggtgaaagagcacgaccgtgtgggccgaatggcggacacccaggagtttgaaaactttgtgctggagaagcggcatatttccccggtattaatggaattactgctccaggaagcagcggaaaaaatcaccgatcttggtgagcagattgtaattcgccatctctatatcgagcggcggatggtgccgctcaatatctggctggaacaagtggaaggtcagcagttgcgcgacgccattgaagaatacggtaacgctattcgccagcttgccgctgctaacattttccctggcgacatgctgtttaaaaacttcggtgtcacccgtcacgggcgtgtggttttttatgattacgatgaaatttgctacatgacggaagtgaatttccgcgacatcccgccgccgcgctatccggaagacgaacttgccagcgaaccgtggtacagcgtctcgccgggcgatgttttcccggaagagtttcgccactggctatgcgccgacccgcgtattggtccgctgtttgaagagatgcacgccgacctgttccgcgctgattactggcgcgcactacaaaaccgcatacgtgaagggcattgcgtatcggcgcaggcaaagatttag

SEQ ID NO: 479288 - DNA, 792 bp, Shigella flexneri; identical to SEQ ID NO: 478164

SEQ ID NO: 479289 - DNA, 597 bp, Shigella flexneri
atggcggttgttgactggatcaacatgtttgcactggcagtgaacgaagagaacgctgctggcggtcgcgtggtgactgcgccgactaacggtgcgtgcgggattatcccggctgtgctggcgtactacgataagtttatccgcgaagtgaacgctaactcactggctcgttacctgctggtagccagcgccattggttctctttataagatgaacgcgtcgatttctggtgccgaagtgggttgccagggtgaagttggcgtggcgtgctctatggcggcagctggtctggcagaactgttaggcgcaagcccggcgcaggtttgcatcgcagcggaaatcgcgatggagcacaacctcggtctgacttgtgacccggtcgcggggcaggttcaggtaccgtgcattgagcgtaacgccattgcagcagtgaaagcggtgaacgccgcgcgtatggcactgcgccgtaccagcgaaccgcgcgtctgcctcgataaagttatcgaaaccatgtacgaaacaggtaaagacatgaacgccaagtaccgcgaaacctctcgcggcggcctggcgatgaagatcgttgcctgcgattaa

SEQ ID NO: 479290 - DNA, 201 bp, Shigella flexneri
atgaaaccaacgtcggtgatcattggatttgcccctatatttccagacatctgttatcacttaacccattacaagcccgctgccgcagatattcctgtggcgagcgataacccagcgcactatgcggatgccattcgttataatgctcgaacgcctctgcaaggttctttgctgccgttaacccgtctggtttgggcatga

SEQ ID NO: 479291 - DNA, 210 bp, Shigella flexneri; identical to SEQ ID NO: 476166

SEQ ID NO: 479292 - DNA, 213 bp, Shigella flexneri
atgaggagcgtaattacataccttcggtacagttcagccatacaaggcgctgaaggtgcagattcaaccagacgacaaaacgacctgttcaagcagtggctgaagaagaatggcgatgctctgaagtggcacactgaatttggccacctgaacagaggtgatatgctcacctcagaacaacacaggtgctccaatgaaaaaaagaaattttag

SEQ ID NO: 479293 - DNA, 189 bp, Shigella flexneri; identical to SEQ ID NO: 478297

SEQ ID NO: 479294 - DNA, 255 bp, Shigella flexneri; identical to SEQ ID NO: 478169

SEQ ID NO: 479295 - DNA, 351 bp, Shigella flexneri; identical to SEQ ID NO: 478178

SEQ ID NO: 479296 - DNA, 420 bp, Shigella flexneri; identical to SEQ ID NO: 478176

SEQ ID NO: 479297 - DNA, 423 bp, Shigella flexneri; identical to SEQ ID NO: 478177

SEQ ID NO: 479298 - DNA, 426 bp, Shigella flexneri; identical to SEQ ID NO: 478175

SEQ ID NO: 479299 - DNA, 1149 bp, Shigella flexneri
atgcacgaaaagaacatcaccctgctttgtgatgaagccgaccggcttttgcaactgagcatcaatctgctccggcaaatggttgatgagccggatgtgttatctgacggtaagaacgaaaacgggcagctttttgataaacagaaagcactgaaaagaattaaggagctggagggcgaacaaatcaaaaccgcccgcagggagatggtgctggctgttgtcggcacgatgaaagcaggcaaatcaaccaccatcaacgccattgtggggcaggaaattctgcctaaccgtaaccgccccatgacctctgtaccgacgctcatccgccacgttcccggaaaaactgagccggttctccatctggaacatattcagcctgtccgcaatttattaatcacactgcaggaaaaactcgccaccccggcaggacagcaggtcgcacagaccctgcagcaaaccggggatacccgcgaactgctggatattctgacggatgatggctggctcaaaaatgaataccacggggaggagggaatctttaccggactggcatcgttaaacgatctggttcgtcttgctgcggcaatggggagtgaatttccttttgatgaatacgcagaagtgcagaaactgccggtgatcgacgtggaattcagccatctggtggggatggatgaatgccagggaacactcacactggtggatacccccggccctaatgaagccggacaaccgcagatggaagtgatgatgcgggatcaactgcagaaagcctctgcggtgctggcggtgatggactacacccagatgaactcgaaagccgatgaggaggttcgtaaagagcttaatgccattgctgatgtgtcagtcggccgcctgtttgtgctggtcaataaatttgatgaaaaagaccgtaatggcgatggggctgatgcagtctgtcagaaggtaccggcaatgctgaacagcgatgtgctgcccgcctcccgcatttatcccggatcctcacgccaggcatacctggctaaccgtgcgcttcatgagttacggaaaaacggaacccttcctgttgatgaagcctgggtcgatgattttgtcagggaagccttcggtcgcatgaaaaaagattacgtctgtaaagacagctaa

SEQ ID NO: 479300 - DNA, 609 bp, Shigella flexneri
atgccacaacgacaccaccagggacataaacgcacaccgaaacagttggcgctcattatcaaacgttgtttgccgatggtgctcactggcagcggcatgctttgcactaccgctaacgccgaagagtattatttcgaccccattatgctggaaactacaaaaagtggtatgcaaacaaccgatctgtcacgtttttcaaaaaaatacgcacaactaccaggaacttatcaggttgatatctggctgaataaaaagaaggtttcacagaaaaaaattacatttaccgccaatacagagcaacttctgcagacacagtttacggtagaacaactacgtgagctgggtattaaggtggatgaaatcccggcgctggctgaaaaagatgacgatagcgtgatcaactcgcttgaacaaatcattcccggtacagctgctgaatttgatttcaatcatcagcgacttaatttgagcattccccaaattgcactgtaccgtgatgcaagaggttacgtctccccttctcgttgggacgatggtataccaacgctgtttaccaactactcgtttacaggttctgataaccgttaccgccagggcaatcgtagctaa

SEQ ID NO: 479301 - DNA, 201 bp, Shigella flexneri; identical to SEQ ID NO: 478194

SEQ ID NO: 479302 - DNA, 774 bp, Shigella flexneri; identical to SEQ ID NO: 478197

SEQ ID NO: 479303 - DNA, 417 bp, Shigella flexneri; identical to SEQ ID NO: 478193

SEQ ID NO: 479304 - DNA, 486 bp, Shigella flexneri
gtgccacttcaagctgacgacgatgtggcggcaacgattaaatccgtgcgccagcagttactcaatctcaatatcactggtcgcttaccggtcaaactggaccctgattttgtacgagtggatgagaacagcaatcccccgttggtcggggactatacgctctataccgtacagcgtccggtgactattactctgctgggtgcggtttctggggctgggcaattgccctggcaggcaggccgtagcgttaccgattatctgcaagatcacccccgccttgcaggcgcggacaagaataacgttatgatgattacgcctgagggtgagactgtcgtcgcccctgttgccctgtggaataaaagacatgtggaaccaccgcctggcagccagctttggttgggcttttctgcgcatgtactgcccgaaaaatatgctgatttaaatgaccagattgtgtctgttttaacgcaacgtgttcctgactga

SEQ ID NO: 479305 - DNA, 462 bp, Shigella flexneri
atgaaaattgtactacttggaacgaaaggtggcccttctttattaaaagctgaccgtttaccgatggcaacggcacttattattggcaataaaacctggttaattgatgctggttacggggccagcttacaactggtaaaaaataatattccactgcgccagattgataatattttactcacccatttacacagtgatcatattctggactatccatcagtcttaatgaatgcatgggctagcggtctgcaggacaaaactattcatgtattcggtccgccaggcacccgagccatgaccgctgccagttggcaggtcttcgatcgggacatcacactgcgtatggaagaagaaggaaaacccgatcctcgcaaactcgttaccgctctgaagtggtcaacaaaaactggccaccgagttagagtttttccagtatcgattttccgattcgtttgggggtaa

SEQ ID NO: 479306 - DNA, 330 bp, Shigella flexneri
atggtatacctgcaaacaatgaaaaaatacctagcatatctgcaacaagctgcaacactgggcagtagtaatgcccaggcggaaattggctatttatatctcatcggaaaagaactaccacagaatcttcctgatgctggtgtctggttcaaaaaagcagctgcacaaggtaattttgccgcacatttctatctgggaaggatgtatcagaatggtgacggcgttgagagaaatatggaaaaagctaggtttcatctatctaatgcggcagaaggtggaatagaacctgcgcttaaagcattaaatgaacttgaacatcaaacaaaataa

SEQ ID NO: 479307 - DNA, 267 bp, Shigella flexneri; identical to SEQ ID NO: 478209

SEQ ID NO: 479308 - DNA, 441 bp, Shigella flexneri; identical to SEQ ID NO: 478283

SEQ ID NO: 479309 - DNA, 273 bp, Shigella flexneri
gtgagctatcagcctggtggtctggttttgcctgatttaagccgccgtgggtatttgtccaagaatgcttcaagctccaatcgttttggcctggtgaatggagatgggttaagcaaagactcccgttgctggtgtactttttcgcgctggcgctcaagcatggataatgcgattgccagtagttcttcgttagtcattgtctgcacctggaaagcaatttaccggagtacctcacactacggcaaaaatgttttattgttgcaacttgcgtaa

SEQ ID NO: 479310 - DNA, 225 bp, Shigella flexneri; identical to SEQ ID NO: 133446

SEQ ID NO: 479311 - DNA, 264 bp, Shigella flexneri; identical to SEQ ID NO: 478334

SEQ ID NO: 479312 - DNA, 441 bp, Shigella flexneri; identical to SEQ ID NO: 478316

SEQ ID NO: 479313 - DNA, 717 bp, Shigella flexneri; identical to SEQ ID NO: 478326

SEQ ID NO: 479314 - DNA, 249 bp, Shigella flexneri; identical to SEQ ID NO: 461985

SEQ ID NO: 479315 - DNA, 546 bp, Shigella flexneri
atgttgcatttaaaaaatattactgcgggtaatccgaaaacagcagaacaatatcagatgacaaaacgatattcggtcacctggcttttttcagaagacggaaaaaactggtatgaagagctgaagaatttctccagcgacacaataaaaatagcttacaccggagatggtcgcgtggtgtgggtcggtaaggatgtgacaggcatcgagccacgcaatgccagtgttattgaagttcctgatattaccgctaaccgacggattaccgcgccgggttactggttttaccgcaatgatgaatttgtctttgactacagactcaaagcggaagatgagcgtgatgcccttctggctcaggtcagtgcccggacaggggaatgggaagaagacctgctgctggggttaatcagcgacgaagataaagaaaagctgaaagcctgtcgtatttacgcgaaatcgctgcaggcgatggatttcagcaccatcactgataaatcctcatacaacgccattgaatggcccgcctctccggaaggttcttcctga

SEQ ID NO: 479316 - DNA, 486 bp, Shigella flexneri
atgcgagggaaaaaacgcattgggttattgtttttgctgatagcggttgtggttggtggcggcgggttattgctggcgcaaaaagccttacataaaacgtcggatacagcattttgcctttcctgccactcgatgagtaaaccttttgaggaatatcagggaactgtccacttttcgaaccagaaagggatacgtgcggaatgtgccgattgccatattccaaagtcagggatggattatttatttgctaaattaaaagcatctaaagatatttatcatgaatttgttagcggcaaaatagacagtgacgataagttcgaaactcatcgccaggaaatggccgaaacagtatggaaagaattaaaagcaactgactctgcaacgtgccgtagttgccattcttttgatgccatggatattgcctcgcaaagtgaatctgcgcagaaaatgcataacaaagcacaggtaatgactccaacttactga

SEQ ID NO: 479317 - DNA, 207 bp, Shigella flexneri; identical to SEQ ID NO: 24440

SEQ ID NO: 479318 - DNA, 294 bp, Shigella flexneri; identical to SEQ ID NO: 25632

SEQ ID NO: 479319 - DNA, 537 bp, Shigella flexneri
atggcggtgattggttattgcagggtatcaacacaagaccagactgtagacaaccagaaactacagatagagaaggttcacaaggtcgataaatggtttattgatgaggctgtctcaggagctacaaaggccaccagcagagatggttttagagacatgatgaactatgtaaggtgtgacgatacgttagttgtggtagctattgaccgtttagggcgtaataccgttgatgtgctctctaacgtggagtcactacagactagaggtgtgagggttgtttctctacgtgaaggctttgacctatctacaccaatcggtaaagcaatgcttactatgatggctggtttagctgaccttgaaaaagaccttatcagtgaacgtagaaaggctggtattgaacgtgctaaagctgaaggggtacatatggggagacctgtaaaagcttcttcagaggctgtacagatgaagtggtcaacaaaaactggccaccgagttagagtttttccagtatcgattttccgattcgtttgggggtaa

SEQ ID NO: 479320 - DNA, 609 bp, Shigella flexneri
atgaacatcattgccattatgggaccgcatggcgtcttttataaagatgagcccatcaaagaactggagtcggcgctggtggcgcaaggctttcagattatctggccacaaaacagcgttgatttgctgaaatttatcgaacataaccctcgaatttgcggcgtgatttttgactgggatgagtacagtctcgatttatgcagcgatatcaatcaacttaatgaatatctcccgctttatgccttcatcaacacccactcgacgatggatgtcagcgtgcaggatatgcggatggcgctctggttttttgaatatgcgctggggcaggcggaagatatcgccattcgtatgcgtcagtacaccaacgaatatcttgataacattacgccgccgttcacgaaagccttgtttacctacgtcaaagagcggaagtacaccttttgtacgccggggcatatgggcggcaccgcatatcaaaaaagcccggttggctgtctgttttatgattttttcggcgggaatacccttaaggctgatgtctctatttcggtcaccgagcttggttcgttgcttgaccacaccgggccacacctggaagcggaagagtga

SEQ ID NO: 479321 - DNA, 303 bp, Shigella flexneri; identical to SEQ ID NO: 473532

SEQ ID NO: 479322 - DNA, 207 bp, Shigella flexneri
atggaacgcttcttcaggagtctgaagaacgaatggatgccggtggtgggttacgtaagcttcagcgaggcagctcacgccataacggactatatcgttggatattacagcgcactaagaccgcatgaatataacggtgggttacccccaaacgaatcggaaaatcgatactggaaaaactctaactcggtggccagtttttgttga

SEQ ID NO: 479323 - DNA, 207 bp, Shigella flexneri; identical to SEQ ID NO: 24440

SEQ ID NO: 479324 - DNA, 207 bp, Shigella flexneri; identical to SEQ ID NO: 24440

SEQ ID NO: 479325 - DNA, 225 bp, Shigella flexneri; identical to SEQ ID NO: 133446

SEQ ID NO: 479326 - DNA, 225 bp, Shigella flexneri
atgtcgcgtaaaggtaactgttgcgacaacgctccgatggaaagcttctggggaacgctgaaaaatgagagcctgagccactatcgttttaataaccgggatgaagccatctcagtaatacgggaatacattgagattttctacaatcgtcagcgtcgtcactctcgtctggggaatatctccccggcagccttcagggaaaaatatcatcagatggctgcttaa

SEQ ID NO: 479327 - DNA, 219 bp, Shigella flexneri; identical to SEQ ID NO: 478249

SEQ ID NO: 479328 - DNA, 186 bp, Shigella flexneri; identical to SEQ ID NO: 462789

SEQ ID NO: 479329 - DNA, 207 bp, Shigella flexneri; identical to SEQ ID NO: 24440

SEQ ID NO: 479330 - DNA, 300 bp, Shigella flexneri; identical to SEQ ID NO: 84330

SEQ ID NO: 479331 - DNA, 327 bp, Shigella flexneri
atgatgacgacgatgctggaagtggcgaagcgcgccggggtttcaaaagcgaccgtttcccgcgtgctttcaggtaatggctacgtcagccaggagactaaagatcgcgtgtttcaggcggtagaagagagcagttaccgcccaaatttgctggcccgcaatctgtcggcgaagagtactcagacgctggggctggtagtgaccaacacgctttatcacggcatttattttagtgaattactgtttcatgccgcgcgaatggcggaagagaaagggcgacagttgctattggcagatggtaaacacagcgccgaagaagagcgctag

SEQ ID NO: 479332 - DNA, 285 bp, Shigella flexneri
atggggatgagcggggcgcagcgtttcctgcatgttcagttaccgctggcgttaccggtatttctgcgcagcctgcgggtggtgatggtgcaaactgtaggtatggcggtgattgcggcgttaatcggcgcaggcggttttggtgcgctggttttccaggggctgctaagcagcgccattgatttagtgttgctgggggtgatcccggtaattgttctggcggtgcttaccgacgcgctgttcgatttgcttatcgcactgctgaaggtgaaacgtaatgattga

SEQ ID NO: 479333 - DNA, 189 bp, Shigella flexneri; identical to SEQ ID NO: 463227

SEQ ID NO: 479334 - DNA, 375 bp, Shigella flexneri
atgacaaaagagctgacaggtaaagccctgtttatggcgctcaggagccagcgcccacctgccgggctaatccaccactctgatcgaggttcacagtactgcgcatacgattaccgggtcatacaggagcagtttggtctgaaaacatcaatgtcgcgtaaaggtaactgttacgacaacgctccgatggaaagcttctggggaacgctgaaaaatgagagcctgagccactatcgttttaataaccgggatgaagccatctcagtaatacgggaatacattgagattttctacaatcgtcagcgtcgtcactctcgtctggggaatatctccccggcagccttcagggaaaaatatcatcagatgactgcttaa

SEQ ID NO: 479335 - DNA, 351 bp, Shigella flexneri
atgagcggcgctcgattacacacactgctgcctgaattaaccacgcgtcagccggtgatggtcgtcggcgcggcggtcattgacgtgatcgccgacgcttatgccctcccctggcgtgggtgcgatatcgaactgaaacagcagagcgttaacgttggcggctgcgcactgaatattgccgtggcgttaaagcgcctcggcatcgaagcgggtaatgccttgccgctcggtcagggcgtgtgggcggagattattcgcaaccggatggcgaaagaggggttaatcagcctgatcgataacgccgaaagcgataacggctggtgtctggcactggttgagccggatggctaa

SEQ ID NO: 479336 - DNA, 129 bp, Shigella flexneri
atgcggaagttctggaatgtttctttttttggtgatggtgaactgatggtgcctgaagcactttggctactttttcaatgtggcaagttatggcagagctggctggtggcgaagaattttgacgattga

SEQ ID NO: 479337 - DNA, 330 bp, Shigella flexneri
atgtatatcctgaactggcagccgccgtatgactggtcgtggatgttgggatttctcgccgcccgtgcggtgagtggtgtggaaacggtcgcggacagttattatgcccgtagtctggcagtgggcgaatatcgcggcgtggtgactgctattccggatatagcccgccatactctgcacataaatttaagtgcaggtttagaacccgttgccgctgagtgtctggcgaaaatgagccgcctgcttgatctgcaatgtaacccgcagattgttaacggtgcgttgggcaagttaggcgcggcccggattgcgtttacccggcagtgttga

SEQ ID NO: 479338 - DNA, 1050 bp, Shigella flexneri; identical to SEQ ID NO: 476529

SEQ ID NO: 479339 - DNA, 525 bp, Shigella flexneri; identical to SEQ ID NO: 478694

SEQ ID NO: 479340 - DNA, 480 bp, Shigella flexneri
atgcttcagcataccctgaacaacagtgagccggtgaagttgctgggttgtgacgtagacagccagtgtgcgggtgaaggtttttcctgcctggacagcagctgtctgcagggcagcatcgcgatcgccggtgctgagccagaagaccgatgccgtcagggcaaaactgatccctccggccgccagactgacaaccgaaccctcggcaatatcataagtgaccgattcgatggtcccgaaccgggtgatattacgggcctgggtataagtcagatgtccccgacgaatcagccgggacgcttctgcgggatcggttacaccgggtactttaccttcgcggatcttattcttcatggtttccacagcgccggcatactgatcacgggggacttccagttgcatgggaccatgatttcccatgtaacgatactgtccgttttgtccgtcgaatgccgcaccgacgctacgggctgcagttga

SEQ ID NO: 479341 - DNA, 474 bp, Shigella flexneri; identical to SEQ ID NO: 476512

SEQ ID NO: 479342 - DNA, 222 bp, Shigella flexneri; identical to SEQ ID NO: 13320

SEQ ID NO: 479343 - DNA, 258 bp, Shigella flexneri
atgctggcgttttaccgtggtcaatgcaccagccatatccagagccgggttatatctgatgatgccagactgtatggcgtaacgcattacagcagatattctttgctgcagacgactagcgatttcataaatttgttttgcttctgcagcacgaacagggataagcaggtccggggtattgagtgttgtgatatcccggttgccgataaaggggaaaacgtgtgtctcgaggcttttgagtactttatcgctgtgtga

SEQ ID NO: 479344 - DNA, 207 bp, Shigella flexneri; identical to SEQ ID NO: 479019

SEQ ID NO: 479345 - DNA, 483 bp, Shigella flexneri; identical to SEQ ID NO: 474711

SEQ ID NO: 479346 - DNA, 198 bp, Shigella flexneri; identical to SEQ ID NO: 478426

SEQ ID NO: 479347 - DNA, 663 bp, Shigella flexneri
atggacttcctggagcatctgcttcatgaagaaaaactggcacgtcatcaacgtaaacaggcgatgtatacccgaatggcagccttcccggcggtgaaaacgttcgaagagtatgacttcacattcgccaccggagcaccgcagaagcaactccagtcgttacgctcactcagcttcatagaacgtaatgaaaatatcgtattactggggccatcaggtgtggggaaaacccatctggcaatagcgatgggctatgaagcagtccgtgcaggtatcaaagttcgcttcacaacagcagcagatctgttacttcagttatctacggcacaacgtcagggccgttataaaacgacgcttcagcgtggagtaatggccccccgcctgctcatcattgatgaaataggctatctgccgttcagtcaggaagaagcaaaactgttcttccaggtcatcgctaaacgttacgaaaagagcgcaatgatcctgacatccaatctaccgttcgggcagtgggatcaaacgttcgccggtgatgcagcactgacctcagcgatgctgggccgtatcttacaccactcacatgtcgttcaaatcaaaggagaaagctatcgactcagacagaaacgaaaggccggggttatagcagaagctaatcctgagtaa

SEQ ID NO: 479348 - DNA, 180 bp, Shigella flexneri; identical to SEQ ID NO: 476577

SEQ ID NO: 479349 - DNA, 168 bp, Shigella flexneri; identical to SEQ ID NO: 478997

SEQ ID NO: 479350 - DNA, 153 bp, Shigella flexneri
atggtttccatgagagcaggtaataacccccggtgttttcggctgctctggtatccccgtccaacacaggtagttattataaacggtaaaaaatgtattcactgttatgaaatcaatagtcctgacgtactgtttaatgagcttgtgttctga

SEQ ID NO: 479351 - DNA, 504 bp, Shigella flexneri
atgcccggagaacgggtcatctttcagcgtgttctgcaccttcgaagccaggccattgaagccacaacgcatatctgtgatgccagcgatgatccagattttggtaccggtcggcagcgttatcatcggataccccctttcatttcgcggattagcgcccgtaacagttccggagtgagagggtcaaacagttttaccacacctgatttaagatgcagctcgcaccgtgggacgtttccgggagccccctcagggcgctcatcatgcttgttacgccagaagggatttgtaactggtctggtcggctccggcgtatcagtcagtgccaccgggacaggcatgcattcctgtatgtcatcatcgctcagtaagccgtcctcgtactggcttttccatttaaacagcaggttattattgatatcgtgttctctggcgatccgggcaacaacagccccaggctgtaatgcctgcttagccagacggaccttaaattcacggctatag

SEQ ID NO: 479352 - DNA, 378 bp, Shigella flexneri
atgaatacattacccgacactcacgtacgggaggcatcgggctgcccgtctcccatcaccatctggcagacactgctcacccgactgctggaccagcactatggcctcacgctgaatgacacaccgttcgctgatgaacgtgtgattgagcagcatattgaggcaggaatttcactgtgtgacgcggtgaactttctcgttgaaaaatacgcgctggtacgtaccgaccagccgggattcagcgcaggagccccgtcgcagttaatcaacagcattgatattctccgggcacgccgggcaaccggcctgatgacacgcgacaactacagaacggtaaataacattaccctgggtaaacatccgggggcgaaacaatga

SEQ ID NO: 479353 - DNA, 219 bp, Shigella flexneri; identical to SEQ ID NO: 474644

SEQ ID NO: 479354 - DNA, 219 bp, Shigella flexneri; identical to SEQ ID NO: 474644

SEQ ID NO: 479355 - DNA, 354 bp, Shigella flexneri; identical to SEQ ID NO: 466835

SEQ ID NO: 479356 - DNA, 207 bp, Shigella flexneri; identical to SEQ ID NO: 24440

SEQ ID NO: 479357 - DNA, 261 bp, Shigella flexneri
atgctgatggcggggattcagttcaccgccagtgagcatgagttccagttgtttcatcagcagcggaaaggcctggttcaggtggtacgcatctacgtcgctgaacctgcctctgataccggcgcggtctgcaaggtaatgcaggcggttaccctcctgtaccagtcgggccccgaaacagggcgtcacggtgcagggcagcccccaccaggggcggtcgtgattgtcgtcgggaggcgttgtcccggggagtgtgtctga

SEQ ID NO: 479358 - DNA, 189 bp, Shigella flexneri; identical to SEQ ID NO: 470416

SEQ ID NO: 479359 - DNA, 186 bp, Shigella flexneri; identical to SEQ ID NO: 474908

SEQ ID NO: 479360 - DNA, 693 bp, Shigella flexneri
atgcttgggcgtcgcgtcatgcctatcatgcatgaaatttcgcatttacccggcggtcataaccctttgaattttgttcataaactggcggatggttctactcgtcatgtgcagacctatgccggaccgattgaaatttatggcgacaagctcatgttatgtattgtgcatgatattactgagcaaaaacggctggaggagcagctggaacatgctgctcaccatgacgcgatgaccggattactgaatcggcgacagttttatcacattacggaaccaggccaaatgcagcatctcgccatcgctcaggattacagcttgttgctcatcgacaccgatcgttttaaacacattaacgatctctatgggcattctaaaggtgatgaggtgttatgcgccctcgcccgccccctcgaaagttgcgctcgcaaaggcgatttggtgtttcgttggggaggcgaagagtttgtcttattgctaccaagaaccccactggataccgcgctttcgctggctgaaactatccgcgtaagcgtggcaaaagtgagtatttcgggcttaccacgctttaccgtcagcattggtgtggcgcatcacgaaggaaatgaaagcatcgatgaactgtttaaacgcgttgatgatgctttgtatcgggcgaaaaatgatggacgcaaccgcgtgctggcggcataa

SEQ ID NO: 479361 - DNA, 702 bp, Shigella flexneri; identical to SEQ ID NO: 474947

SEQ ID NO: 479362 - DNA, 219 bp, Shigella flexneri; identical to SEQ ID NO: 474944

SEQ ID NO: 479363 - DNA, 684 bp, Shigella flexneri; identical to SEQ ID NO: 478773

SEQ ID NO: 479364 - DNA, 834 bp, Shigella flexneri; identical to SEQ ID NO: 478479

SEQ ID NO: 479365 - DNA, 264 bp, Shigella flexneri; identical to SEQ ID NO: 478777

SEQ ID NO: 479366 - DNA, 492 bp, Shigella flexneri; identical to SEQ ID NO: 474903

SEQ ID NO: 479367 - DNA, 375 bp, Shigella flexneri; identical to SEQ ID NO: 475109

SEQ ID NO: 479368 - DNA, 219 bp, Shigella flexneri; identical to SEQ ID NO: 478492

SEQ ID NO: 479369 - DNA, 420 bp, Shigella flexneri; identical to SEQ ID NO: 478494

SEQ ID NO: 479370 - DNA, 303 bp, Shigella flexneri; identical to SEQ ID NO: 475222

SEQ ID NO: 479371 - DNA, 1854 bp, Shigella flexneri; identical to SEQ ID NO: 478500

SEQ ID NO: 479372 - DNA, 375 bp, Shigella flexneri; identical to SEQ ID NO: 475109

SEQ ID NO: 479373 - DNA, 327 bp, Shigella flexneri
atgtttatgtggtggaaaggaaaacttcaacccggtaattatgacaagctgatttccgcaatggatttctacccaacagctcttgatgcagccgatatcagcattccaaaagaccttaagctggatggtgtttccttgctgccctggttgcaagataagaaacaaggcgagccacataaaaatctgacctggataacctcttattctcactggtttgatgaggaaaatattccattctgggataattaccacaaatttgttcgccatcagtcagacgattacccgcataaccctgagagatcccctcataatttccccaaaacgtaa

SEQ ID NO: 479374 - DNA, 189 bp, Shigella flexneri; identical to SEQ ID NO: 474938

SEQ ID NO: 479375 - DNA, 291 bp, Shigella flexneri; identical to SEQ ID NO: 478793

SEQ ID NO: 479376 - DNA, 606 bp, Shigella flexneri; identical to SEQ ID NO: 478508

SEQ ID NO: 479377 - DNA, 228 bp, Shigella flexneri; identical to SEQ ID NO: 475144

SEQ ID NO: 479378 - DNA, 384 bp, Shigella flexneri; identical to SEQ ID NO: 478510

SEQ ID NO: 479379 - DNA, 603 bp, Shigella flexneri; identical to SEQ ID NO: 475189

SEQ ID NO: 479380 - DNA, 2397 bp, Shigella flexneri
atgtcttcaaccagtgatgcggcgggtaatgcctctatcactctgaccttcgagactgggacatctcctgatatcgcacaggttcaggtgcaaaataaactgcaactcgctatgccttcattacctgaagcggtgcagcaacaggggattagcgtcgataagtcgagcagtaatatcctgatggtagcggcgtttatttctgataacggcagcctcaaccagtacgatatcgcggactatgtagcgtctaatataaaagacccgctaagccgtaccgcgggcgttggtagcgtacagctctttggttccgagtacgctatgcgtatctggctggacccgcaaaaactcaataaatataacctggtaccttccgatgttatttcccagattaaggtgcaaaacaaccagatttctggtggtcaactgggtggcatgccacaggtggcagaccagcaactaaacgcctcgatcattgtgcagacgcgtctgcaaacgccggaagaatttggcaaaatcctgttgaaagttcagcaagatggttcgcaagtgctgctgcgtgatgtcgcccgcgtcgaacttggggcggaagattattccaccgtggcgcgctataacggcaaacctgctgccgggatcgccatcaaactggctgccggagcaaacgccctggatacctcgcgggcagtcaaagaggagctgaaccgcttatcagcctatttccccgcaagtctgaagacggtttatccttacgacaccacgccgtttatcgaaatttctattcaggaagttttcaaaacactggttgaggctatcatcctcgtcttcctggtcatgtatctgtttttgcagaatttccgtgccaccatcatcccgacaattgccgtaccggtggttattctcgggacgtttgcgatcttgtcggcggtcggtttcaccatcaacacgttgactatgttcgggatggtgctggcgatagggttactggtggatgacgccatcgtggtggtggagaacgtcgagcgtgtcattgcggaagataagctaccgccgaaggaagcgacgcataaatcgatggggcagatccaacgtgcgctggtcgggattgccgttgttctttctgcagtgtttatgccgatggcctttatgagcggtgcaaccggggagatctaccgccagttctccatcacgctgatctcctccatgcggctttcagtatttgtggcaatgagcctgacccctgccctgtgcgccaccattctgaaagccgcgccggaaggcggtcacaaacctaacgccctgttcgcacgcttcaacacgctgtttgaaaaatcaactcagcactataccgatagcacccgctcgctgttgcgttgtaccggtcgctacatggtggtctacctgctgatttgcgccgggatggcggtgctgttcctgcgtacaccgacctctttcttaccagaagaggatcagggggtatttatgaccaccgcgcagttaccttccggtgccaccatggttaacaccacgaaagtactgcaacaggtgacggattattatcttacaaaagagaaagataatgttcagtcggtgtttaccgttggcagctttggcttcagcggccaggggcaaaacaacggcctagcgtttatcagtctcaagccgtggtctgaacgtgtcggtgaggaaaactcggttaccgcgatcattcagcgggcaatgattgcgttaagcagtatcaataaagccgtcgtcttcccgttcaacttacccgcggtggctgaactgggtaccgcgtcaggttttgatatggaactgctggacaacggtaacctggggcacgaaaaactaacccaggcacgaaacgagctgttatcactggcagcgcaatcgcctgaccaggtcaccggggtacgcccgaacggcctggaagatacgccgatgttcaaagtgaacgtcaacgccgcgaaagctgaggcaatgggtgtggcgctgtctgatatcaaccagacaatttccaccgccttcggcatcagctacgtgaacgacttcctcaaccaggggcgggtgaaaaaagtgtatgtccaggcaggcacgccgttccgtatgttgccggataacatcaaccaatggtatgtacgcaacgcctctggcacgatggcaccgctttctgcctactcgtctaccgaatggacctatggttcaccgcgattggaacgctacaacggcatcccgtcaatggagattttaggtgaagcggcggccgggaaaagtaccggtgacgctatgaaatttatggcagacctggtcgctaaacttccggcaggcgtcggctactcatggaccggactgtcgtatcaggaagcgttatcctcaaaccaggctcctgcactgtactga

SEQ ID NO: 479381 - DNA, 555 bp, Shigella flexneri; identical to SEQ ID NO: 474545

SEQ ID NO: 479382 - DNA, 291 bp, Shigella flexneri; identical to SEQ ID NO: 474546

SEQ ID NO: 479383 - DNA, 366 bp, Shigella flexneri; identical to SEQ ID NO: 462994

SEQ ID NO: 479384 - DNA, 273 bp, Shigella flexneri; identical to SEQ ID NO: 474417

SEQ ID NO: 479385 - DNA, 1617 bp, Shigella flexneri; identical to SEQ ID NO: 478517

SEQ ID NO: 479386 - DNA, 375 bp, Shigella flexneri; identical to SEQ ID NO: 475220

SEQ ID NO: 479387 - DNA, 498 bp, Shigella flexneri
atgtcgccatcattacgcaaggctgttgcagttgctattggtggcggggctgttgctatagcatctgtgttaatcactggcccaggtggtaacgatggtctggaaggtgtcagctacataccatacaaagatatcattggtgtatggactgtatgtcacggacacaccggaaaagacatcatgcctggtaaaacgtataccgaagcagaatgcaaagctctcctgaataaagaccttgtcactgtcaccagacaaattaacccgtacatcaaagtcgatataccggaaacaacgcgcggcgctctttactcgttcgtttacaacgtgggcgctggcaatttcagaacatcgacgcttcttcgcaaaataaaccagggcgatatcaaaggcgcatgtgaccagctacgtcgctggacatatgctggcggtaagcaatggaaagggctgatgacccgtcgtgagattgagcgtgaagtctgtttgtgggggcagcaatga

SEQ ID NO: 479388 - DNA, 207 bp, Shigella flexneri
atggaaaaaatatcaacaggcattgcctacggcacctccggcggcagtgccggctactggtttttgcagtggttggatcaggtcagtccatcacagtgggctgcgattggtgtgctgggaagtctgcttctggggcttctgacttatctgacgaatctgtatttcaaaataagagaagataagcgtaaggctgcgagaggtgaataa

SEQ ID NO: 479389 - DNA, 375 bp, Shigella flexneri
atgacaaaagagctgacaggtaaagccctgtttatggcgctcaggagccagcgcccacctgccgggctaatccaccactctgatcgaggttcacagtactgcgcatacgattaccgggtcatacaggagcagtttggtctgaaaacatcaatgtcgcgtaaaggtaactgttacgacaacgctccgatggaaagcttctggggaacgctgaaaaatgagagcctgagccactatcgttttaataaccgggatgaagccatctcagtaatacgggaatacattgagattttctacaatcgtcagcgtcgtcactctcgtctggggaatatctcaccggcagccttcagggaaaaatatcatcagatggctgcttaa

SEQ ID NO: 479390 - DNA, 138 bp, Shigella flexneri; identical to SEQ ID NO: 478522

SEQ ID NO: 479391 - DNA, 489 bp, Shigella flexneri; identical to SEQ ID NO: 475240

SEQ ID NO: 479392 - DNA, 375 bp, Shigella flexneri; identical to SEQ ID NO: 475109

SEQ ID NO: 479393 - DNA, 354 bp, Shigella flexneri; identical to SEQ ID NO: 478535

SEQ ID NO: 479394 - DNA, 375 bp, Shigella flexneri; identical to SEQ ID NO: 475109

SEQ ID NO: 479395 - DNA, 375 bp, Shigella flexneri; identical to SEQ ID NO: 477282

SEQ ID NO: 479396 - DNA, 219 bp, Shigella flexneri; identical to SEQ ID NO: 474644

SEQ ID NO: 479397 - DNA, 348 bp, Shigella flexneri; identical to SEQ ID NO: 475245

SEQ ID NO: 479398 - DNA, 366 bp, Shigella flexneri; identical to SEQ ID NO: 462994

SEQ ID NO: 479399 - DNA, 375 bp, Shigella flexneri; identical to SEQ ID NO: 13405

SEQ ID NO: 479400 - DNA, 189 bp, Shigella flexneri; identical to SEQ ID NO: 469030

SEQ ID NO: 479401 - DNA, 417 bp, Shigella flexneri
atgctcgcagagaaacttcagctctccactgccgtgaaggaaatgcgtttctatggcgtgtcgggagtgacagcaaatgacctccgcactgccgaagccatggtcagaagccgtgaagagaatgaatttacggactggttctccctctggggaccatggcatgctgtactgaagcgtacggaagctgaccgctgggcgctggcagaagagcagaaatatgagatgctggagaatgagtaccctcagagggtggctgaccggctgaaagcatccggtctgagcggtgatgcggatgcggagagggaagccggtgcacaggtgatgcgtgagactgaacagcagatttaccgtcagctgactgacgaggtactggccctgcgattgtctgaaaacggctcacaactgcaccattcataa

SEQ ID NO: 479402 - DNA, 288 bp, Shigella flexneri; identical to SEQ ID NO: 474636

SEQ ID NO: 479403 - DNA, 375 bp, Shigella flexneri; identical to SEQ ID NO: 475109

SEQ ID NO: 479404 - DNA, 189 bp, Shigella flexneri; identical to SEQ ID NO: 469030

SEQ ID NO: 479405 - DNA, 366 bp, Shigella flexneri; identical to SEQ ID NO: 462994

SEQ ID NO: 479406 - DNA, 225 bp, Shigella flexneri; identical to SEQ ID NO: 476353

SEQ ID NO: 479407 - DNA, 1419 bp, Shigella flexneri
atgcatgtacaccccatttcaactttccgtttgttccaggaaggtcatctgctacgtaatagcatcgctatttttgcgctaaccacgctgttctattttattggtgcagagttacggctggttcacgaactttctcttttctggccgctgaatggcgtaatggcgggggtgtttgcccgctatgtctggcttaatcgactgcattactatgcgatcagttatgtggcgatgctggtttatgatgccataaccaccgaatggggactggtttcactggttatcaatttctccaatatgatgtttattgttaccgtcgccttactggtcgtgcgggataagcgtctggggaaaaataagtatgagccagtaagtgctttacggctatttaattactgtctgattgccgcattattatgcgctattgtcggggcgattggttcggtcagtattgatagtctggatttctggcctttgcttgcggactggttcagtgagcaattctcaacgggcgtgttgatcgtgccttgtatgctgacgttggctattcctggagtgctgccgcgctttaaagcagaacagatgatgcccgccatcgcgtttattgtgtcggttattgcctcggtagtcattggcggagcggggagtctggcgttcccgctgcctgcattaatctggtgtgcagtgcgctatacgccgcaggtaacatgtctgttgacctttgtcaccggtgcggtggaaatcgtacaggtggcaaattcggtgattgatatctcggtcggttcgccgttctccattccggaaatgttctccgcacgtctcggtattgccacgatggcgatatgcccaattatggtttcttttagcgtggcagcgatcaatttgctaatgaagcaagttgcgctgcgagccgactttgattttctgactcaggtttactcacggtccggtctttatgaggcgctgaaaagtccatcgctgaaacagacacaacatctgacggtcatgctgcttgatatcgactatttcaaaagcattaacgataactatggacatgaatgtggcgataaagtgttaagcgtgtttgcccggcatattcagaagattgtcggtgataaggggctggtggcgcgcatgggcggcgaagaatttgctgttgcagtgccgtcggtgaatcctgtcgatggtctgctaatggcggaaaaaatccgtaaaggcgttgaactgcaaccattcacctggcaacaaaaaacgctttatctcacggtaagtattggcgtcggtagtggtcgcgcatcgtaccgaacgctgaccgatgattttaataaattgatggtcgaagccgatacgtgtctgtatcgctcgaagaaagatgggcgcaaccgtaccagcactatgcgttacggtgaggaagttgtctga

SEQ ID NO: 479408 - DNA, 789 bp, Shigella flexneri; identical to SEQ ID NO: 476477

SEQ ID NO: 479409 - DNA, 153 bp, Shigella flexneri; identical to SEQ ID NO: 475863

SEQ ID NO: 479410 - DNA, 1461 bp, Shigella flexneri
atgattaaaattaatttatttaaaaatgcaaatctccttgccttcatatcatgttttgcaatatcaatttattgttattgggggtggttgtacgatggaacacttaatattgatggcgagtttacaaataatttttatcaaacaatcacgcttgggcggtggtttcacacttttttgcgacattactttctccctgagcctttttcactttatataacaccattaatagccttatcttttatcatcatttcagcatttataatctgcagatcgctaaagctagaatcttatgaattattgataggtatgttagtatttattaccttccctcagatctcctatcaattagagtttcttaaccaagctgatactgtgggaattgcttttctactggcagcgatatcagcaattatttttcactcgcaaaaaaataggattgtgatattttctggtatagtactgtccattctttcaatggcaatctaccaaacattcgtaacatatattattgcattcgtcattgggttgcagataaattcgataatacgaaatgagaaaaatattcgtgaatctttttatagttcatgtttatctctatccctcatagctttatctaccttaatttacctgctattaaccaaagctatcaagcattatttttcgcttgaatcgaacgagtacatctcaaattatatacaaaatgcaagcgatattaaatggcttgttaaatcagccatagataatatatataacttctataacaatcctcccactggtttaaacctatacaagtggttactgattcctttattaattctgatgtttaccctaacatataaattaaaaacaagatcaatttatttgatttcatcaatcattttcatttatatacttccggttatatttatcgttgttgttggctcaggggcgccacctcgcctgtttgttttaatgcctatagtagcagtaattttgttttcttgcttaagcaattttcgctctataaaatacctaaactgcatgttttttttatttattatatttaatggcgtttcaacatccaaaaatctatttttgaatgatactctcgcaagacagaaagatatctctttagctaaagaaatatcatacacatctcaaacaaaaggcatttcccttaacggaaaatatatatatatatatggttcaaacgactcaggaaatatgctctccatgagcgcagacacttttggaaaatcttttttttggtgggatggtggcaactattttaggatggttgcatttatgaattactatggaatctgtaattgcaaaccagcaaataaagaacaaatagagaagatttatccaattgtgaagagtttaccttcctggccgaatccagattcgatagctgaaataaatggtttggtgataataaaactatcagagaaaaaagggtggcttccatttaatatttag

SEQ ID NO: 479411 - DNA, 1389 bp, Shigella flexneri; identical to SEQ ID NO: 476989

SEQ ID NO: 479412 - DNA, 3054 bp, Shigella flexneri
atgacctggggcgagcaaaccgacgtaccggaatctgccgactggtataactccagctacatcatcgcttgggggtctaacgtaccgcagacacgtacgccggacgcccacttctttaccgaagtacgctacaaaggcactaaaaccatcgccattacccctgactactctgaagtggccaaattgtgcgaccagtggctggcaccgaaacaaggcactgatagcgccctggcgatggcaatggggcatgtgattttaaaagagtttcatctcgataatcccagcgactactttatcaactactgccgccgctacagcgacatgccgatgctggtaatgctggagcctcgcgacgatggtagctacgttcccgggcgcatgatccgcgcatctgacctggtggatggactgggcgaaagcaacaatccgcagtggaaaaccgtagcagttaataccgcaggtgaattggtagtgccgaacggttcgattggtttccgctggggagaaaaaggcaaatggaatctggaatccattgccgccggtacggaaaccgaattgtcgttaaccctgctcggtcaacatgacgctgttgcaggcgtggccttcccctactttggcggcattgaaaatccgcattttcgcagcgtaaaacacaatccggtgctggtgcgccaattgcccgttaaaaacctgacgttagtcgatggcaacacctgtccggtggtcagcgtttatgatttggtactggcgaattacggcctcgatcgcgggctggaagatgaaaacagcgcgaaagattacgctgaaatcaaaccgtacaccccagcctggggtgagcaaattaccggcgtaccgcgccagtatattgaaaccatcgcccgcgaatttgccgataccgcccataaaacgcatgggcgctcaatgattatcctcggcgcaggtgttaaccactggtatcacatggacatgaactaccgcgggatgatcaatatgctgatcttctgcggttgtgtcgggcaaagcggtggcggctgggcacactatgtcggccaggaaaaactgcgcccacaaaccggctggttgccactggcctttgcgctcgactggaaccgaccaccgcgccagatgaacagcacctcgtttttctacaatcattccagccaatggcgctatgaaaaagtctctgctcaggagttactttcaccgctcgccgatgccagtaagtacagcggtcatctgattgatttcaacgttcgcgccgaacgtatgggctggctaccttctgcgccgcagctggggcgtaacccgctcgggattaaagctgaagccgacaaggccggattatcccccacagaatttaccgcccaggcgctgaaatcgggcgatttacgtatggcctgcgaacaaccagatagcggcagcaatcatccgcgtaatttgtttgtctggcgctctaacctgcttggctcctccggcaaaggccacgagtatatacagaagtatctgctggggaccgaaagcgggattcagggcgaggaactcggtgccagcgacgggatcaaaccggaagaagtcgagtggcaaactgcggcgattgaaggcaagctcgacctgctggtgacgctcgacttccgcatgtccagtacctgcctgttctccgatatcgttctgcccaccgccacctggtatgaaaaagacgatatgaacacctcggatatgcatccatttattcatccgctttctgcggcggtcgatccggcctgggaatcacgcagcgactgggaaatctacaaaggtattgccaaagcattttcgcaagtgtgcgtgggccatcttggcaaagaaaccgacgtggtattacaaccactgctgcatgactctccggcagagctctcacagccgtgtgaagtgctcgactggcgcaaaggcgaatgcgatctgatcccgggtaaaaccgcgccgaatattgtggcggtggagcgcgactaccctgctacgtatgaacgctttacctcgctcgggccattgatggacaaacttggcaatggcggtaaagggatttcgtggaatacccaggatgaaatcgatttcctcggcaaactcaattacaccaagcgtgatggcccggcacaggggcgtccgctgattgacaccgccattgacgcttcagaagtgattctggcactggcaccggaaaccaacggtcatgttgcagtcaaagcgtggcaggcgctgggcgagatcaccgggcgcgaacatacccatctggcgctgcacaaaaaggacgagaagattcgctttcgcgatattcaggcgcagccgcgtaaaattatctccagccccacatggtccggtctggaaagcgatcacgtatcctataacgcgggatacaccaacgttcatgagttaattccgtggcgcacgctgtcgggacgccagcagctctatcaggatcatccgtggatgcgtgcttttggtgaaagcctggtggcttatcgcccgcctatcgacacccgtagcgtcagtgagatgcgccagataccgccaaacggcttccaggaaaaagcacttaacttcctgacgccgcaccagaaatggggcattcactcaacctacagtgaaaacctgctaatgctgacgctctctcgcggtggaccgattgtctggatcagcgaaacagatgcccgagaactgaccattgtcgataacgactgggtggaagtatttaacgccaacggcgcgctgactgcccgcgcggtggtcagccaacgtgtaccgccgggcatgaccatgatgtatcacgcccaggaacgcattatgaatattcctggttcggaagtaactggcatgcgcggcggcattcataactcggtcacccgcgtttgcccgaaaccgacgcatatgattggcggttacgcgcagctggcctggggctttaactactacggcaccgtcggttcgaaccgcgacgaattcatcatgatccgcaagatgaagaacgttaactggctggatgatgaaggtcgcgatcaggtacaggaggcgaaaaaatga

SEQ ID NO: 479413 - DNA, 252 bp, Shigella flexneri; identical to SEQ ID NO: 478639

SEQ ID NO: 479414 - DNA, 678 bp, Shigella flexneri
atggccttccagtacatccaggcgaccgccggactccagaacaactccgtcagccttaccgttttccaccgtgaaattgcccagacggttgctgccaagaaccgttgccgcagtactggtaaccagtgctccaccctgtttcagggtgacatgtgtggcggtaccaccggcgttcacctgcagtttgcctttctggttaacggtggtgaaatccgccagaccaccttccttgataatctgccagccgtcactgtttacaacagtgccagacgccgtaccgccgttgtgcacatactggtaaccgccattcagtgtggtatccagcgcatgcccgtgtaccgtctggtcgccgccggcataaaccacagtggtatttgctgttccttcagcagccacaatctgacgaccattttcattgatagtggtacgtacggcatttccgcgaacaaactgcccggtatcaccattttctgcatctggtcccccttccgcgccggtattcacaaccgtgtcggttgccattgcgccggatttgacggtctgccagcccttctcattaatgacggtacccgttgcaatcccgccttcatgtacccactgctcaccgccgttcagagtggtattcactgcctgcccctgaaggctctgtccgcctccggcactgataaccgtgtctga

SEQ ID NO: 479415 - DNA, 303 bp, Shigella flexneri; identical to SEQ ID NO: 473532

SEQ ID NO: 479416 - DNA, 327 bp, Shigella flexneri; identical to SEQ ID NO: 474582

SEQ ID NO: 479417 - DNA, 429 bp, Shigella flexneri; identical to SEQ ID NO: 474590

SEQ ID NO: 479418 - DNA, 267 bp, Shigella flexneri; identical to SEQ ID NO: 474706

SEQ ID NO: 479419 - DNA, 303 bp, Shigella flexneri; identical to SEQ ID NO: 458125

SEQ ID NO: 479420 - DNA, 327 bp, Shigella flexneri; identical to SEQ ID NO: 477342

SEQ ID NO: 479421 - DNA, 222 bp, Shigella flexneri; identical to SEQ ID NO: 13320

SEQ ID NO: 479422 - DNA, 159 bp, Shigella flexneri; identical to SEQ ID NO: 6188

SEQ ID NO: 479423 - DNA, 543 bp, Shigella flexneri; identical to SEQ ID NO: 475669

SEQ ID NO: 479424 - DNA, 303 bp, Shigella flexneri; identical to SEQ ID NO: 478430

SEQ ID NO: 479425 - DNA, 207 bp, Shigella flexneri; identical to SEQ ID NO: 476087

SEQ ID NO: 479426 - DNA, 210 bp, Shigella flexneri; identical to SEQ ID NO: 475253

SEQ ID NO: 479427 - DNA, 474 bp, Shigella flexneri; identical to SEQ ID NO: 474721

SEQ ID NO: 479428 - DNA, 216 bp, Shigella flexneri; identical to SEQ ID NO: 5123

SEQ ID NO: 479429 - DNA, 216 bp, Shigella flexneri; identical to SEQ ID NO: 5123

SEQ ID NO: 479430 - DNA, 327 bp, Shigella flexneri; identical to SEQ ID NO: 477013

SEQ ID NO: 479431 - DNA, 327 bp, Shigella flexneri; identical to SEQ ID NO: 477049

SEQ ID NO: 479432 - DNA, 327 bp, Shigella flexneri; identical to SEQ ID NO: 476847

SEQ ID NO: 479433 - DNA, 435 bp, Shigella flexneri
atgccgctcaattcgctgcgtatatcgcttgctgattacgtgcagctttcccttcaggcgggattcatacagcggccagccatccgtcatccataccacgacctcaaaggccgacagcaggctcagaagacgctccagtgtggccagagtgcgttcaccgaatacgtgcgcaacaaccgtcttccggagcctgtcatacgcgtaaaacagccagcgctggcgcgatttagccccgacgtatccccactgttcgtccatttccgcgcagacgatgacgtcactgcccggctgtatgcgcgaggttaccgactgcggcctgagttttttaaatggcggaaaatcgtgttgaggccaacgcccataatgcgggcggttgcccggcatccaacgccattcatggccatatcaatgattttctggtgcgtaccgggttga

SEQ ID NO: 479434 - DNA, 276 bp, Shigella flexneri; identical to SEQ ID NO: 5786

SEQ ID NO: 479435 - DNA, 159 bp, Shigella flexneri; identical to SEQ ID NO: 6188

SEQ ID NO: 479436 - DNA, 132 bp, Shigella flexneri; identical to SEQ ID NO: 476846

SEQ ID NO: 479437 - DNA, 354 bp, Shigella flexneri
atgccactgctggataagctgcgtgagcagtacggggtcggaccgctatgcagtgaactgcatattgccccgtcaacgtattaccactgtcagcaacagcgacatcatccggataaacgcagtgcccgtgcgcagcgcgatgactggctgaagaaagagatacagcgcgtatacgatgaaaatcacaaggtatacggtgtaaagtctggcgtcagttgttacgggaaggtatcagagtggccagatgcactgtggcacgtctcatggcggttatgggacttgccggtgttctccggggtaaaaaggtccgtacgaccatcagccggaaagccgttgccgcaggcgaccgcgtaa

SEQ ID NO: 479438 - DNA, 651 bp, Shigella flexneri; identical to SEQ ID NO: 471947

SEQ ID NO: 479439 - DNA, 630 bp, Shigella flexneri
atgattaaatcaaaaatcgtgctgttatcagcactggtttcctgcgccctgatttcaggctgtaaagaagaaaataaaacccatgtatccatcgaatttatgcattcttcggtggagcaggagcgtcaggcagttatcagcaaattgattgcccgttttgaaaaagaaaacccaggtatcaccgttaaacaagtgcccgtggaagaagacgctcataacaccaaagtcatcaccctttcacgtagcggctcgctgccggaagtgatcgaaaccagccatgactacgccaaagttatggataaagagcagcttatcgatcgcaaagcggttgccacggtcatcagcaacgttggtgaaggcgcgttttacgatggcgtactgcgtattgtgcgtaccgaagatggtagcgcatggaccggtgttcctgtcagcgcctggattggcgacatctggtatcgcaaagatgtgctggcaaaagcggggctggaggagccgaaaaactggcaacagctgctggacgttgcacagaaactgaatgacccggcgaataaaaaatacggtattgcgctgcctacggcagaaagcgtgctgacggaacaatccttctcccagtttgcgttatccaactag

SEQ ID NO: 479440 - DNA, 153 bp, Shigella flexneri
gtgagtaataaaaacgtcaatgtaaggaaatcgcaggaaataacattctgcttgctggcaggtatcctgatgttcatggcaatgatggttgccggacgcgctgaagcaggagtggccttaggtgcgactcgcgtaatttatccggcagggtaa

SEQ ID NO: 479441 - DNA, 177 bp, Shigella flexneri
gtgctgtgggagatcaaaaaagatcgtctgaagtatggcttcaagccgtttatctggcaggttggcggcaaatttacctggccgctggataaagacaacttcgagtaccactatccgcgcggtttcgatgattgcttcactattgaaccggatctgccgttcaagtcattcctgtaa

SEQ ID NO: 479442 - DNA, 213 bp, Shigella flexneri
atggtcaacgccattttttgtgcccacggcaaattagcttgcgccatgctggaatcggttcagatggtttacggcaacgccaatgttgaagccgttgcatttgtgcccggtgaaaacgccggagacattgcggtaaagctggagaagttagtaagcattcacaatcaagatgagtggctgattgccgtggatttacagtgcggcagcccgtag

SEQ ID NO: 479443 - DNA, 1071 bp, Shigella flexneri; identical to SEQ ID NO: 476467

SEQ ID NO: 479444 - DNA, 231 bp, Shigella flexneri; identical to SEQ ID NO: 476092

SEQ ID NO: 479445 - DNA, 483 bp, Shigella flexneri
atggtgccgctcaatatctggctggaacaagtggaaggtcagcagttgcgcgacgccattgaagaatacggtaacgctattcgccagcttgccgctgctaacattttccctggcgacatgctgtttaaaaacttcggtgtcacccgtcacgggcgtgtggttttttatgattacgatgaaatttgctacatgacggaagtgaatttccgcgacatcccgccgccgcgctatccggaagacgaacttgccagcgaaccgtggtacagcgtctcgccgggcgatgttttcccggaagagtttcgccactggctatgcgccgacccgcgtattggtccgctgtttgaagagatgcacgccgacctgttccgcgctgattactggcgcgcactacaaaaccgcatacgtgaagggcatgtggaagatgtttatgcgtatcggcgcaggcaaagatttagcgtacggtatggggagatgcttttttga

SEQ ID NO: 479446 - DNA, 216 bp, Shigella flexneri; identical to SEQ ID NO: 478917

SEQ ID NO: 479447 - DNA, 945 bp, Shigella flexneri; identical to SEQ ID NO: 474087

SEQ ID NO: 479448 - DNA, 306 bp, Shigella flexneri; identical to SEQ ID NO: 475868

SEQ ID NO: 479449 - DNA, 1152 bp, Shigella flexneri
atgcactatcgcaatgtggtttgtttgttgtcttgttcattgtttttatcgtcggcatggggatgtcggctttccgcacctgaacataatatttaccagaaacagggaaaaggcgtggtgtacctgcgcccttataaagaaacaaatctttctctacctgacgtgaattacaagagtttgcgtcggttacccaatttattaatagacccgacaacactagacgaatgggataaagaaccgcctctgactgatttgacaaccgactacctctatgagggcgcacaggcctggtatcctcattattcatggcatagcgatggtcgcaatatcctctacgcgggtgaagttgtgcaaaaccctcccggcacacctcccgtcgatgtcgcctcgttcaaggcatggggtgattttgccgcagataaacacagtctctattttgaaggcaagcgcaccgatgacaatggtggtggaaatagcttggatatcaaaacgctgcatcaggtggaattccggcctccctgggatcctgacttactggggctgatattacgtgacgctaatttcttgtatatcaatgggcatcgcctcgctgaccccgagagtttccgtgtgctggcgcagaagtcctgggatcagcgaggaaagttttccaccacgtttaacccctgcattgccgtaccatttggcccctgggataccctggctcgtacacggaccaaaatcctgctcaacggcgaacagcttgatgccgacccggacaccttttccgtcgtgcgctggatgcccggctcactcttgacctggcgtgataaaaacgggctgcagcgtaaagtcctcgacaaggaaaatctggcgtgggatgaagatttaacaaagcactgtctggatttttctctgctggaaaagaaagtgttctggcgtaaaggacctgcttgtaaacaggaagaattacccggactcgatccggagcagtttcaacccatcagtgatgctgtcgcccagcatcaggactcgctttataccatcatcgaaacagagtctggtgaccgtaagctggagatcgtgaaacttgatgatcccaatcttattatcaacaaacgtttcaacgccgggaaacgccacggctatttacttacgcgtgccgaagggtag

SEQ ID NO: 479450 - DNA, 393 bp, Shigella flexneri
atggcacgaccagttcaatcacatgacaataccgaagtacgacagtacctaatcgataaactccaaatggactacggcttccgctatgagcttccgggctggctcgatgatgtactcacaggcgctggacgcctcaatggaagccttggcagcaacactaagccggtatccaagtacgttatcctgacccagttgatgtcccatgatgtcatcacagtggaagccgtcaggacttccataagccgcaagaagatggcccttgaaggcaagatgatttcagaaaggtatgcccgacacgtagcttcggtggtcgcagcggcaagcaagagtatcgagttctacaagctcagaagtaagacacattggaaggatgaaatagcactggctgcttag

SEQ ID NO: 479451 - DNA, 564 bp, Shigella flexneri
atgcgattcggttatgtccgcgtgtcctcgcaggaccagaacacagagcgtcaggaagcggccttaaagccacactgtgacgagatattgattgagatgaagtctggtaaggatatcaagaggaacgtcttagaatcgctcctagcgcgtctgagggctggtgatgagctggtggtcaaaagtatcgacaggttagccaggaacacgaaggacctgctgaccctcatggatgaactggtaggccgtggggtaaccgtgagattcctcgataacgccatgagcttcgacaattcgcccaccagtcgctttatgctgaccatgatgggtgcagtggctgaactggagcgtggcttcatcaatcagcgacagagagaaggcattgccattgccaaagaaaagggtgtctaccaagggaaaccgaagaacgctgagctgcgcaagacgctggctaagctgtttgctcgtgggatgtccgctgaggaagcagctaaggttgccaagtgtggccgggcgacagctttccgcatcaagaaggaactcagtgaggcttccagcgggaagtga

SEQ ID NO: 479452 - DNA, 2034 bp, Shigella flexneri; identical to SEQ ID NO: 475764

SEQ ID NO: 479453 - DNA, 276 bp, Shigella flexneri; identical to SEQ ID NO: 16135

SEQ ID NO: 479454 - DNA, 1380 bp, Shigella flexneri
atgaatatatttgatcactatcgccagcgatatgaagctgccaaggacgaagagttcacactgcaggagtttcttaccacttgtcggcaagatcgcagtgcttatgccaacgcggctgagcggctattgatggctatcggtgagcctgtcatggtcgatacagcccaggaccccagactttctcgactcttttctaaccgggtcattgcacgttatccggcatttgaagagttttacggcatggaagacgcgattgaacagattgtctcttatctgaaacacgcggctcaggggctggaagagaagaaacaaatcctgtatctgctggggcctgtgggtgggggtaaatcatcgcttgctgagcgactgaaatcattaatgcagctcgtaccgatttatgtattgagcgccaacggtgagcgtagcccggtcaacgatcatccgttctgtcttttcaatccgcaggaagatgctcagattctggaaaaagagtatggcattcctcgccgttatctcggcaccatcatgtcgccatgggcggcaaaacgcctgcatgaatttggtggcgatatcactaagttccgggtagtgaaggtctggccgtcaattctgcaacaaattgctatcgccaaaacggaacccggtgatgagaacaaccaggacatctccgcgctggttgggaaagtcgatattcgtaaactcgaacactacgcgcagaatgacccggacgcctacggctattccggtgcgctgtgccgcgccaatcaggggatcatggaattcgttgagatgtttaaagcaccgataaaagtgctgcatcccttgttaaccgccactcaggaaggtaactacaacgggacggaaggtatctccgccctgccgttcaacgggattattctcgcccactcgaacaagtccgaatgggtcactttccgtaataacaaaaacaacgaagccttcctcgaccgtgtttacatcgtgaaggtgccgtattgcttgcgcatttccgaagagatcaaaatctacgagaaattgcttaatcacagtgaattgactcacgccccatgcgcccctggcacgctcgaaacactgtcacgtttttccattctttcgcgcctgaaagagccagaaaactccagcatttattcaaagatgcgggtttatgatggcgaaagtctgaaagacaccgatccgaaagccaagtcgtatcaggaatatcgtgactacgccggtgtcgatgaagggatgaacggtctgtcgacgcgttttgcgtttaagatcctctcccgcgtgttcaacttcgatcatgtagaagtggcggcaaacccggtccatctgttctacgtcctggaacagcagattgaggtgtactggcaatag

SEQ ID NO: 479455 - DNA, 942 bp, Shigella flexneri
atgattacttttgatcaggcaaccgttgacagctctggtgcctttctcatcggagagctggagcgactcgaccagactctgaacctgccactggcggggtacacctggacccgcgatattcagttgcgtgaagatgtctctatcgcagatgacatttccagctggacgaataccagcttcgccgctgcgggtactggcgcaaatccgaatggaaaaaactgggtaggcaaagactcaaccgctattgctggcgtaaacgtggatatcggcaaatccggtaacccgctgaatctctggggcatggaactgggctggaccgttgtagagctggcagcagctcagcaggtcggccgcccgattgatacgcagaagtatgacggtatgcaactgaaatggcagatggataacgatgaacaggtatatgttggcgattccgcattaaacctgaaaggccttgttaccctggacggcgtgcctgtcaacaacgctgccaaaacgtgggcaacctcaacaccggacgaaatccgcgcaagcattaaccaggtgctgtctgatgcgtgggccgcttccggttactctgtggttccgcgtgatttgctgatcccgcctgagcagtttgctctgttgtccagcatcatcgtttcatctgcaggtaaccagtccctgttgacgaaccttcagaccaacaccatcagctatcaccagaacggtgttccgctgaatatccgcgcggttaaatggctgaaaggccgtggtgtggggaataaggatcgcatggttgcgtacaccaacgataaaaaatacgtccgctatccgctggtgccgttgcagagcgttcctatccagtatcgcggtctgtatcagattgcgacctactacggcaagctgggtgcggttgagccagtgtacaaagaaaccatttcgtacgttgatggcatttaa

SEQ ID NO: 479456 - DNA, 354 bp, Shigella flexneri; identical to SEQ ID NO: 476372

SEQ ID NO: 479457 - DNA, 288 bp, Shigella flexneri
atggtttccggtaatatcgacctgctcggctttacatggctcggtctgctcgtactccgcgtcatagccgcacgacacttcacgcaggccatcttcgataagctgaatggcgctttcgtctttgacgataaggtcagccagcatcaaatcagactgctcacccgtcccgcgccggacattctggaggtgcccgacagcaagcactttccagttctcgggatttaccagccgcacattcccgttttcatcttcaggatgcaggatcgtgatgctcatcccttcgaatga

SEQ ID NO: 479458 - DNA, 219 bp, Shigella flexneri; identical to SEQ ID NO: 474644

SEQ ID NO: 479459 - DNA, 219 bp, Shigella flexneri; identical to SEQ ID NO: 474644

SEQ ID NO: 479460 - DNA, 219 bp, Shigella flexneri; identical to SEQ ID NO: 474644

SEQ ID NO: 479461 - DNA, 345 bp, Shigella flexneri
gtggtgttattgggttatttttctcggctcagtcacggtgctgcaggggatatacgtcttagtcagttccgatgcaagcgcccgactggctcccggcattattctcatttgcctcggaatgatctgttacagcatattctcaaaagtctggctactggcactggtctggagacgtacctgttcgttagccaacagaataccgatgataccggtatttacctgtctgttttgcttgtttttgtcatcattcctcgcggaaatcgcggtaatgactccaacttactgatagtgttttatgttcagataatgcccgatgaccttgtcatgcagctccaccgattttga

SEQ ID NO: 479462 - DNA, 177 bp, Shigella flexneri
atgattgcacgttggttctggcgcgaatggcgttcgccgtcgctattaattgtctggctggcgttcgccgtcgctattaattgtctggctggcgctaagcctggcggtggcctgcgtgctggcgctgggcaatatcagcgatcgcatggagaagggcttaagccagcaaagccgtga

SEQ ID NO: 479463 - DNA, 399 bp, Shigella flexneri
atgctgcattctcgcggcttcctcgcggaagttttcggcatcctcgcgcggcataatatttcggtagacttaatcaccacgtcagaagtgagcgtggcattaacccttgataccaccggttcaacctccactggcgatacgttgctgacgcaatctctgctgatggagctttccgcactgtgccgggtggaggtggaagaaggtctggcgctggtcgcgttgattggcaatgacctgtcaaaagcctgcggcgttggcaaagaggtattcggcgtactggaaccgttcaacattcgcatgatttgttacggcgcatccagccataacctgtgcttcctggtgcccggcgaagatgccgagcaggtggtgcaaaaactgcatagtaatttgtttgagtaa

SEQ ID NO: 479464 - DNA, 258 bp, Shigella flexneri; identical to SEQ ID NO: 476742

SEQ ID NO: 479465 - DNA, 321 bp, Shigella flexneri
atggatgaatatgagaaccacccgacgcaaaaaccgaaagccttactgaaacgcattattctcgcctcttccaacccaggcgatatcgttctcgacccgtttgccggtagctttactaccggtgccgtagccatcgccagcggacgaaaattcattggtattgagatcaacagcgagtacatcaaaatggggcttcgacggctggatgtcgcgtcgcattactccgcggaagaactggcgaaagtgaaaaaaagaaagaccggcaacctgtcaaaacgaagccggttaagcgaagttgaccccgatctcattgcaaagtaa

SEQ ID NO: 479466 - DNA, 273 bp, Shigella flexneri; identical to SEQ ID NO: 441578

SEQ ID NO: 479467 - DNA, 654 bp, Shigella flexneri; identical to SEQ ID NO: 441577

SEQ ID NO: 479468 - DNA, 252 bp, Shigella flexneri; identical to SEQ ID NO: 441576

SEQ ID NO: 479469 - DNA, 387 bp, Shigella flexneri; identical to SEQ ID NO: 441575

SEQ ID NO: 479470 - DNA, 696 bp, Shigella flexneri; identical to SEQ ID NO: 441574

SEQ ID NO: 479471 - DNA, 426 bp, Shigella flexneri; identical to SEQ ID NO: 441573

SEQ ID NO: 479472 - DNA, 366 bp, Shigella flexneri; identical to SEQ ID NO: 441572

SEQ ID NO: 479473 - DNA, 1524 bp, Shigella flexneri; identical to SEQ ID NO: 441571

SEQ ID NO: 479474 - DNA, 2901 bp, Shigella flexneri; identical to SEQ ID NO: 441570

SEQ ID NO: 479475 - DNA, 1077 bp, Shigella flexneri; identical to SEQ ID NO: 441569

SEQ ID NO: 479476 - DNA, 1188 bp, Shigella flexneri; identical to SEQ ID NO: 441568

SEQ ID NO: 479477 - DNA, 801 bp, Shigella flexneri; identical to SEQ ID NO: 441567

SEQ ID NO: 479478 - DNA, 696 bp, Shigella flexneri; identical to SEQ ID NO: 441566

SEQ ID NO: 479479 - DNA, 1029 bp, Shigella flexneri; identical to SEQ ID NO: 441565

SEQ ID NO: 479480 - DNA, 231 bp, Shigella flexneri; identical to SEQ ID NO: 441564

SEQ ID NO: 479481 - DNA, 690 bp, Shigella flexneri; identical to SEQ ID NO: 441563

SEQ ID NO: 479482 - DNA, 2472 bp, Shigella flexneri; identical to SEQ ID NO: 441562

SEQ ID NO: 479483 - DNA, 315 bp, Shigella flexneri; identical to SEQ ID NO: 441561

SEQ ID NO: 479484 - DNA, 306 bp, Shigella flexneri; identical to SEQ ID NO: 441560

SEQ ID NO: 479485 - DNA, 297 bp, Shigella flexneri
atgagagctatagaacagcaaagcgttgataaagcctttagtcaaagggctgtgcgcgaagtaacagtcgtgaagcgttcggaaaaggaatggtacttcacgtttgttgcggatgatccggtgacaaaaaagccagtcacctacgcgcttcttactcaacggggcaaattgagaacttgggctgacccaagacacctttttaattttctgcgcgaaaggggcgttactcatggcaacttcaatcttgacgaggaaaacaaacatgaagaacctgaactacctccgggcgaaagctaa

SEQ ID NO: 479486 - DNA, 699 bp, Shigella flexneri; identical to SEQ ID NO: 441559

SEQ ID NO: 479487 - DNA, 594 bp, Shigella flexneri; identical to SEQ ID NO: 441558

SEQ ID NO: 479488 - DNA, 288 bp, Shigella flexneri; identical to SEQ ID NO: 441557

SEQ ID NO: 479489 - DNA, 216 bp, Shigella flexneri
atggaaccccaccgcaccaacgtcattatttttccgaaggtgcgcgaagtcgcagaggcggccgagcgagccaagcaagaggccaaagagcgcggccatgccaagcgtgcccgactcagcgccggagcaaagcaggccgccgcgacgattggcacgggtgccctcgcaaccgtcttatatctggtgtcattttcagaagacgactgcaccagttga

SEQ ID NO: 479490 - DNA, 285 bp, Shigella flexneri; identical to SEQ ID NO: 70433

SEQ ID NO: 479491 - DNA, 765 bp, Shigella flexneri; identical to SEQ ID NO: 6031

SEQ ID NO: 479492 - DNA, 657 bp, Shigella flexneri; identical to SEQ ID NO: 362999

SEQ ID NO: 479493 - DNA, 972 bp, Shigella flexneri; identical to SEQ ID NO: 441555

SEQ ID NO: 479494 - DNA, 630 bp, Shigella flexneri; identical to SEQ ID NO: 441554

SEQ ID NO: 479495 - DNA, 525 bp, Shigella flexneri; identical to SEQ ID NO: 441553

SEQ ID NO: 479496 - DNA, 603 bp, Shigella flexneri; identical to SEQ ID NO: 441552

SEQ ID NO: 479497 - DNA, 570 bp, Shigella flexneri; identical to SEQ ID NO: 447595

SEQ ID NO: 479498 - DNA, 894 bp, Shigella flexneri; identical to SEQ ID NO: 441584

SEQ ID NO: 479499 - DNA, 201 bp, Shigella flexneri; identical to SEQ ID NO: 441583

SEQ ID NO: 479500 - DNA, 165 bp, Shigella flexneri; identical to SEQ ID NO: 441582

SEQ ID NO: 479501 - DNA, 777 bp, Shigella flexneri
gtgaacagctacgaacagaagcaacaagcccgccgcgcccgttacgaggcccgcgccgaccaagccagccaagaggccgacgcgacctatagcaaggctcgcacaatggccgaggctatccccttcggccagcccatcctaatcggccatcactcggaaggccgcgaccggcgctatcgcgcccggattcatgacaccttcggcaaatcctttgccctgcaagacaaggccaagcactacgcggccaaggccgccgcagtgggaaccggcggcatatcgagcgacgaccccgacgcaatcgagaagctacgcgccgagctggcgagcgtgcgcgaagcgcaagaccggatgaaagccgcaaatcgtctcattcgcaagaatgaccgccccggtttggctgaacttggatttacccccgacgagatcgaggcgctttttacccccgatttttgcggccgcgtcggctttccggcttacgccttgagcaacaacaacgcgaacgcccgccgcatcgagaagcgcattaaagagctggaagccatgcgcgaacgcccggacgtagagcacgaaggcaacggctacacctaccgcgaggacacgacagaaaaccgcgtcatgttcattttcaccggcaagcccgatgcggagacgcggcagcttttgaaacgtcacgccttcaaatggtcgccctcgcgtaatgcttgggtgcgtcagctcaccaacgccggaatttttgcggcgaaacaggttcgcgccacactggacgccaccgcgtaa

SEQ ID NO: 479502 - DNA, 354 bp, Shigella flexneri; identical to SEQ ID NO: 441580

SEQ ID NO: 479503 - DNA, 324 bp, Shigella flexneri; identical to SEQ ID NO: 441579

SEQ ID NO: 479504 - DNA, 507 bp, Shigella flexneri; identical to SEQ ID NO: 475566

SEQ ID NO: 479505 - DNA, 264 bp, Shigella flexneri
  misc_feature (243)..(252): n is a, c, g, or t
atgaaaaaattaacagtggcaatttctgctgtagctgcatcagtactgatggcgatgtctgctcaggcagcagagatttacaataaagacagtaacaagctggatctgtacggaaaagttaatgctaagcactacttctcttctaacgatgcagatgatggcgacacaacttatgttcgtctgggcttcaaaggcgaaactcaaatcaacgatcaactgactggtttcggtcagtgggaatannnnnnnnnngtgggaatatga

SEQ ID NO: 479506 - DNA, 630 bp, Shigella flexneri
atgattaaatcaaaaatcgtgctgttatcagcactggtttcctgcgccctgatttcaggctgtaaagaagaaaataaaacccatgtatccatcgaatttatgcattcttcggtggagcaggagcgtcaggcagttatcagcaaattgattgcccgttttgaaaaagaaaacccaggtatcaccgttaaacaagtgcccgtggaagaagacgctcataacaccaaagtcatcaccctttcacgtagcggctcgctgccggaagtgatcgaaaccagccatgactacgccaaagttatggataaagagcagcttatcgatcgcaaagcggttgccacggtcatcagcaacgttggtgaaggcgcgttttacgatggcgtactgcgtattgtgcgtaccgaagatggtagcgcatggaccggtgttcctgtcagcgcctggattggcggcatctggtatcgcaaagatgtgctggcaaaagcggggctggaggagccgaaaaactggcaacagctgctggacgttgcacagaaactgaatgacccggcgaataaaaaatacggtattgcgctgcctacggcagaaagcgtgctgacggaacaatccttctcccagtttgcgttatccaactag

SEQ ID NO: 479507 - DNA, 324 bp, Shigella flexneri
atgaaaatcggcacacagaatcaggcattctttccggaaaatatccgcgagagatttcgttatatcaaagagatgggcttcgatggttttgagattgacggcaaactgctggtcaacaacatcgaagaagtcaaagcggcgatcaaagaaaccggtttaccagtgaccaccgcctgcggcggctatgacggctggattggtgactttatcgaagagcgtcgtcttaatggcttaaagcagatcgaacgcattctcgaggcgctggcagaagtggggggtttccggcagcgtggggcatgtttaccttccgcttaccgccgatga

SEQ ID NO: 479508 - DNA, 927 bp, Shigella flexneri; identical to SEQ ID NO: 473398

SEQ ID NO: 479509 - DNA, 1419 bp, Shigella flexneri; identical to SEQ ID NO: 473529

SEQ ID NO: 479510 - DNA, 162 bp, Shigella flexneri
atgaaaacactggttgtagctcttgggggcaacgccttactccagcgcggtgaggcgctgacggcggaaaatcaatatcgcaatatcgccagtgctgtacccgcgctggcacgcctggcccgttcttatcggctggcgattgttcacggcaacgggccgtag

SEQ ID NO: 479511 - DNA, 204 bp, Shigella flexneri
gtggcagcaaataccagcggcggcgtaactggcaagatgatctccccgcaatctatcgccgtggcctgcgccgcgacgggcatggtgggccgagaatctgaactgttccgctacaccgtgaagcacagtctgatttttgccagcgttatcggcgttatcaccctgctgcaggcgtatgtgtttaccgggatgttagtctcgtaa

SEQ ID NO: 479512 - DNA, 1059 bp, Shigella flexneri
atgctggtgttttccagtacggatatgttgtttaaagatgatcagcaggataccgaagccacggcgatcgcaagtgatttgttgagcggtaaaaaacgctggcaagccagctttggcctggaagagcgtacagccgaaaaaacgccagtacgcctgcgcatcgtggtcagcgccaggttgctgggttttggctaccagcggttaatgccttcttttgctggcgtacgcttcgaaatgggtaacgacggctggcacagttttgtggcgttaaatgatgaatccgccagcgtagatgccagtttcgattttacgccggtctggaacagtatgcctgccggagccagcttctgtgtggcggtgccgtattcacacggtattgccgaagagatgctttcgcacatcagccaggaaaacgacaagctgaatggggcgttagacggtgccgcggggctgtgctggtatgaagactcaaaattgcaaaccccgctgtttgtcggtcagtttgatggcactgccgaacaggcgcaattgccagggaaactgtttacgcaaaatattggtgcgcacgaaagcaaagcgccagaaggtgttttgccggtaagccagactcagcagggcgaagcgcaaatctggtgtcgcgaagtgagttcccgatacggtcagtatccgaaagcgcaggcggcgcaacccgatcaattaatgtcggattattttttccgtgtgtcgctggcgatgcaaaacaaaacgctgcttttctccctcgatgacacgctggttaataacgccctgcaaacactgaataaaacccgcccggcaatggtggatgtaatacccactgatggcatcgttccgctctatatcaatccacaaggcgtggcgaaactgctgcgtaacgaaacgttgaccagtctgccgaagaatctcgaaccggttttttataacgccgcacaaactttattaatgccgaagctggacgctttatctcaacaaccgcgttatgtcatgaagctggcccagatggaacccggtgtcgcctggcagtggctacccataacctag

SEQ ID NO: 479513 - DNA, 576 bp, Shigella flexneri; identical to SEQ ID NO: 473829

SEQ ID NO: 479514 - DNA, 306 bp, Shigella flexneri; identical to SEQ ID NO: 475868

SEQ ID NO: 479515 - DNA, 693 bp, Shigella flexneri
atgagcattccattcacccgctggccggaagagtttgcccgtcgctatcgggaaaaaggctactggcaggatttgccactgaccgacattctgactcgccacgctgcgagtgacagcatcgcggttatcgacggcgagcggcagttgagttatcgggagctgaatcaggcggcggataacctcgcctgtagtttgcgccgtcagggcattaaacctggtgaaaccgcgctggtacaactgggtaacgtcgctgaactttacattacctttttcgcgctgctgaaactgggcgtcgcgccggtgctggcgctgttcagccatcagcgtagtgaactgaacgcctacgccagccagattgaaccggcgttactgattgccgatcgccagcatgcgctatttagcggggatgatttcctcaacacatttgttgcagagcattcttccattcgcgtggtgcaactgcacaacgacagcggtgagcataacttgcaggatgcgattaaccatccggcagagggttttactgccacgccatcacctgctgatgaagtggcctatttccagctttccggcggcaccaccggcacaccgaaactgatcccgcgcactcataacgactattactacagcgtgcgtcgtagcgccgagatttgtcagttcacacaacagacgcgctacctgtgcgcgatctga

SEQ ID NO: 479516 - DNA, 1056 bp, Shigella flexneri; identical to SEQ ID NO: 476765

SEQ ID NO: 479517 - DNA, 525 bp, Shigella flexneri
gtgagccacattgcatctgataacgtactgggcggcaaaatcgccggtgattacatcgcgaagaaagcgggtgaaggtgccaaagttatcgagctgcaaggcattgccggtacatccgcagcccgtgaacgtggcgaaggcttccagctggccgttgctgctcacaagtttaatgttcttgccagccagccagcagattttgatcgcaccaaaggtttgaacgtaatgcagaacctgttgaccgctcatccggatgttcaggctgtattcgcgcagaatgatgaaatggcgctgggcgcgctgcgcgcactgcaaactgccggtaaatcggatgtgatggtcgtcggatttgacggtacaccggatggcgaaaaagcggtgaatgatggcaaactagcagcgactatcgctcagctacccgatcagattggcgcgaaaggcgttgaaaccgcagataaagtgctgaaaggcgagaaagttcaggctaagtatctggttgatctgaaactggttgttaagcagtag

SEQ ID NO: 479518 - DNA, 1122 bp, Shigella flexneri
atgtccaaaaatgaccgaatggtgggcatcagccgcagaacactcgttaaatcaaccgcgataggttctctggcgctggctgcaggcggtttttctttaccgttcaccctgcgcagtgcagcggcagcggtacaacaggccagcgaaaaagtgatctggggttcctgttccgtcaactgtggtagccgctgtgcacttcgtctacatgttaaagataatgaagtgacctgggtggaaactgacaataccggcagcgatgagtactgcaaccatcaggtacgcgcctgtttgcgcggtcgctccatccgccggcgtattaatcatcccgatcgcttgaatgacccaatgaaacgcgtgggtaaacgcggtgaaggcaaattcgaacggattagctgggatgaagccctggatactatcgccagtagcctgaaaaaaaccgtcgaacaatatggcaatgaagctgtatatattcagtactcttcggggattgttggcggcaatatgacccgctcttcgccatcagcctcggcggtcaaacgcctgatgaactgctacggcggttcactcaatcagtatggctcctacagcaccgcgcaaatttcctgtgccatgccctacacctacggcagtaatgatggcaacagcaccacggatattgaaaacagcaagctggtcgtgatgtttggtaacaacccggcagaaacccgcatgagcggtggtggcatcacttatcttcttgaaaaagcgcgcgagaaatcgaacgccaaaatgattgttatcgatccgcgatataccgatacggctgccggtcgtgaagaggaatggctccctattcgcccgggcaccgatgccgcgctggttgcgggtattgcctgggtattgattaacgaaaatctcgttgatcaaccttttctcgataaatactgcgtcggctatgacgaaaaaaccttacccgcagatgcacccaaaaatggtcactataaagcctatattcttggtgaaggtgacgataaaacagcaaaaacgccgcagtgggcttcgcaaattaccggtatcccggtagaccgtatcatcaaactggcgcgtgaaattggcacaacaaaacccgcttatatctgctag

SEQ ID NO: 479519 - DNA, 195 bp, Shigella flexneri; identical to SEQ ID NO: 473921

SEQ ID NO: 479520 - DNA, 729 bp, Shigella flexneri; identical to SEQ ID NO: 474473

SEQ ID NO: 479521 - DNA, 291 bp, Shigella flexneri; identical to SEQ ID NO: 468850

SEQ ID NO: 479522 - DNA, 174 bp, Shigella flexneri
atgcacgttacagccaagccctccagttttcaatgtaatctcaaatgtgattactgtttttaccttgaaaaagagtcgcagtttactcatgaaaaatggatggatgacagcactctgaaagagttcatcaaacaatatatcgaagcgtctggcaatcaggtctattttacctag

SEQ ID NO: 479523 - DNA, 225 bp, Shigella flexneri; identical to SEQ ID NO: 476353

SEQ ID NO: 479524 - DNA, 1215 bp, Shigella flexneri; identical to SEQ ID NO: 474550

SEQ ID NO: 479525 - DNA, 717 bp, Shigella flexneri
gtggctaacaaggccaacgaggccgggcagggcgcttatgacgcacaagtcaggaacgatgagcaggatgtgattctggtcgatcacgaaattcgactggcatcagctgaagcgaagatacaggaccacgaaacaaggatcactaacgcagaagcagcgatagtcagccttgactcacgattaacgacagcagaaaacgatattgattatctgacggatgaagttgtcgccattcaaaacacgctctcagaccatgaaacgcgcatcgatgctcttgagtatgccactactcgtaagaaatcagaggttgtttactctggcgtatcagtcaccatcccgacagcgccgactaaccttgttagcctgctgaaaacgctcacgccgtcatccgggacgttggcaccattcttcgacactgttaacaacaagatggttgtgttcaacgagaacaaaaccttgttcttcaagctgtcgatcgtcgggacgtggcccagcggaaccgccaacaggtcaatgcagctaaccttttccggctctgttcctgatacgctggtcagcagtcgtaatgcggcgacaacaaccgacaacatcctgttagctacgttcttcagcgtggataaagacggctttcttgccacaaatggaagcacgttaaccattcagtcaaatggtgcggcgtttactgccacaaccatcaagataatcgcggagcagtaa

SEQ ID NO: 479526 - DNA, 456 bp, Shigella flexneri
atgattcagttcaaaccaacgcgaaacatcgacctgatcgaagcagtcggaaatcaccctgacattattgccgggagcaacaacggtgatggatacgactacaagcctgaatgccgttactttgaggttaacgtgcacggtcagtttggcggcattgtttactatcaggagattcagccgctgacattcgattgccacgccatgtacctgccagaggttcgtggattcagcaaggaaatcgggctggcgttctggcgatacattctgactaacaccaccgttcagtgcgtcacatcgttcgctgcacgcaaattccgccacgggcagatgtactgcgcaatgattggccttaagcgtgtagggaccatcaagaaatacttcaaaggcgtggatgacgtgacgttttacagcgccacacgcgaagaactaatcgacttcctgaatcacgggagatag

SEQ ID NO: 479527 - DNA, 696 bp, Shigella flexneri
atgttatatgcatttaagctgggcagaaaactgcgcggcgaggaaccttattgccctgaaaaaggcgggaaaggtggcagttctgataaaagtgcaaagtatgccgcagaagctcagaagtatgccgcagacctgcagaatcagcagtggcagacgatcatgaaaaaccttgctccgttcacgccactcgctcagcagtacgtatcacaattgcagaatctttcctctcttcaggggcaaggtcaggcacttaaccagtattacaactctcagcagtacaaagatcttgctggtcaggctcgctatcagagtctggcggcagcggaagcaacaggtggattgggttccactgcaaccggtaatcagttagcaacaatcgcaccaacgcttggtcagcaatggctatctggtcagatgaacaactaccagaatctggcaaatattggtcttggcgcactgcaaggtcaggcaaacgccgggcagacatatgccaacaacatgagtcagatttcgcagcaaagtgcggctcttgccgctgctaatgccaataaaccatcaggtcttcagacagcaattagcggcggagcttcaggggctatgactggcgctgctcttggctctattgttccaggacttggcactggattaggtgcggcaattggcggcggacttggcctgcttggctcgttgttttaa

SEQ ID NO: 479528 - DNA, 999 bp, Shigella flexneri
gtgctattttcatgctttggtgcttttttattattgattttctctgatggaattgttaattatctaaaaatttctggtgttgaacatagtgatatacaactagcatttaaactgttggctatttgcattccattatttattctaaatcaattatggtcagccattcttgagggggatgaaaaatttggcattgtaaatattcaaaaatctatatcaagctcttgcatcgcgggaattccggccatatttgttttttatagtgctacattgtcggcagcggttgctggtttaatatttgcaagagttatttcgattttagtctctgcctattatgtcaggaatgatattaaaatttcgggggttcatttttgttataaaacctttaaacgactctttttctttggcggttggatgacagtaagtaatatcataagtccggtcatggtgtattttgatcgatttatagtgtcaaatattatgggggcagataaagttgcattttattctgcaccagcggaggttattctaaaattaggaataatacctgcagcaatcgggagggcagtgtttccaaggttaagtaacatcaaagactttaaagaatttaaacgtaatgtaaataaatcattgcttttaatgtttctaatctgtttgccggtgataatcataggcttgttatattcagggcttgtattgaaaatatggtttggtgagaattatcaaattaattcctttaatatattaaatgtgttattgatcggttttttcttcaatgcgctggcaatgataccattctctgcaatccaggcattaggaaaatctaaaattactgctttgattcattgtgctgaattggttccttatttagcccttttgtattttatggtcgaaaaatatgggttactgggtgccgcaatatcctggagcatacgtgtaattttagatgctctgttattacaatggctttatactagaatgtgttctgtatatgaaaactaa

SEQ ID NO: 479529 - DNA, 645 bp, Shigella flexneri; identical to SEQ ID NO: 474660

SEQ ID NO: 479530 - DNA, 300 bp, Shigella flexneri; identical to SEQ ID NO: 84330

SEQ ID NO: 479531 - DNA, 288 bp, Shigella flexneri; identical to SEQ ID NO: 474636

SEQ ID NO: 479532 - DNA, 300 bp, Shigella flexneri; identical to SEQ ID NO: 475664

SEQ ID NO: 479533 - DNA, 354 bp, Shigella flexneri
atgccactgctggataagctgcgtgagcagtacaggggcggaccgctatgcagcgaactgcatattgccccgtcaacgtattaccactgtcagcaacagcgacatcatccggataaacgcagtgcccgtgcgcagcgcgatgactggctgaagaaagagatacagcgcgtatacgatgaaaatcacaaggtatacggtgtaaagtctggcgtcagttgttacgggaaggtatcagagtggccagatgcactgtggcacgtctcatggcggttatgggacttgccggtgttctccggggtaaaaaggtccgtacgaccatcagccggaaagccgttgccgcaggcgaccgcgtaa

SEQ ID NO: 479534 - DNA, 543 bp, Shigella flexneri; identical to SEQ ID NO: 477935

SEQ ID NO: 479535 - DNA, 249 bp, Shigella flexneri; identical to SEQ ID NO: 462412

SEQ ID NO: 479536 - DNA, 294 bp, Shigella flexneri
ttgtgtattgcggacggttctgctgcagaaaagtttgcaggtagttttcaggatgatgccagcatagaaggtgttgaatttgagtatgatgaagaggacgaatttgccggtattaagaacacatatcctgatgaaatgctgaaagagttggttgaacgcacgccaggttatcatggatggcaacaggaattctggcttgcgcattgtggcgatttctgtgcttttatcggctatgtgggctggaatgatataaaagatcgcctcgatgaatttgccaaccttgaagaagattga

SEQ ID NO: 479537 - DNA, 381 bp, Shigella flexneri; identical to SEQ ID NO: 458903

SEQ ID NO: 479538 - DNA, 381 bp, Shigella flexneri; identical to SEQ ID NO: 458903

SEQ ID NO: 479539 - DNA, 294 bp, Shigella flexneri
atgagaaccgacagcaacaaggcatggaagggagcgttaaagcgggcaggcattagcaacttccgcttccatgatctgaggcatacctgggcaagctggctggttcagtccggtgtctctcttcttgcgcttaaagagatgggaggatgggaaactctcgaaatggttcaaagatacgcccacctttcagccgggcatctcaccgagcacgcaagcaaaatcgatgcgattataagtcgcaatggcacaaatacggcacaagaggagaacgtggtttacttaaatgcgaggtaa

SEQ ID NO: 479540 - DNA, 267 bp, Shigella flexneri; identical to SEQ ID NO: 462029

SEQ ID NO: 479541 - DNA, 399 bp, Shigella flexneri; identical to SEQ ID NO: 479463

SEQ ID NO: 479542 - DNA, 321 bp, Shigella flexneri; identical to SEQ ID NO: 479465

SEQ ID NO: 479543 - DNA, 657 bp, Shigella flexneri; identical to SEQ ID NO: 475713

SEQ ID NO: 479544 - DNA, 339 bp, Shigella flexneri
  misc_feature (307)..(312): n is a, c, g, or t
ttgctgggcggcttttttggcctgaacgcgggcaatagccgcggcaactgcggctttgcgcggatcgacctgttcttctggttccgcattagcctgttgctgttccagcttgcgtgctttggcgcgggcaatagcggcttcgacggcagctttgcgcggatcaacctgttcttctggctccgcattggcctgttgctgttccagcttgcgtgctttggcgcgggcaatagcggcttcgacggcagctttgcgcggatcaacctgttcttctggctccgcattggcctgttgctgttccagcttgcgnnnnnncgacctgttcttctggttccgcattag

SEQ ID NO: 479545 - DNA, 162 bp, Shigella flexneri; identical to SEQ ID NO: 479510

SEQ ID NO: 479546 - DNA, 174 bp, Shigella flexneri; identical to SEQ ID NO: 479522

SEQ ID NO: 479547 - DNA, 210 bp, Shigella flexneri; identical to SEQ ID NO: 9340

SEQ ID NO: 479548 - DNA, 918 bp, Shigella flexneri
atgaacagaagaagaaagctgttaataccgttgttattctgcagcgcgatgctcaccgcctgcgatgacaaatcggcggaaaacgccgccgccatgacgcctgaggtcggtgtcgtcacactctcccctggttcggtcaatgtgttgagcgaattgcccggtagaaccgttccttatgaagttgccgagatacgtccccaggtgggcggtattatcattaaacgcaactttatcgaaggcgataaagtgaaccagggcgattcgctgtatcagattgatcctgcacctttacaggccgagctaaactccgccaaaggctcgctggcgaaagcgctctctaccgccagcaatgcccgcatcacctttaaccgccaggcatcgttgctgaagaccaactacgttagccgtcaggattacgacaccgcgcgcacccagctgaatgaagcagaagccaatgtcaccgtcgccaaagcggctgttgaacaggcgacgatcaatctgcaatacgcgaatgtcacctcgccgattacgggcgtcagcgggaaatcgtcggtgaccgtcggcgcactcgttaccgctaatcaggcagattcgctggttaccgtacaacgtctggacccgatttatgtcgatctcacgcagtcggtgcaagatttcttacgcatgaaagaagaggttgccagtgggcaaatcaaacaggttcagggcagtacgccagtacagctcaatctggaaaatggtaaacgttacagccagaccggcacgctgaaattctccgacccgacggttgatgaaaccacgggctccgtgacgttacgggcgattttccccaacccaaatggtgacttgctgcctggcatgtatgtcacggcattagtggatgaaggtagccgccagaatgtatttatgactaggtaa

SEQ ID NO: 479549 - DNA, 1266 bp, Shigella flexneri
atgaagatattcataatgcgcaattggcacaagatatcaatttttatacttgcatttactttgatttggcttagacgcattgacattttgacaaatgcccagttttgggctgaggatgcagttttttggtataaagatgcatacgaacaaggttttttcagttcactcataaccccaagaaatggttattttcaaacagtatcaacactcattgttggtgcgacgacatttattaatccaatttacgcaccattattatcaaacttttttggaataataattagagctataattatatggttcttatttaccgatagatttaaattcctaagcaccacatcaaaaatcttcatctctgtatatttaatttgcatgcccgggcttgatgaagtccaagccaatataacaaatgctcactggtatttatcattgtatgttgcaatgataataatatctgaagaatccaagtcaaaattatggaaagcacatgatttattttttatagtattatctggattgagcggtccatttattatattcataattgcatcatctgtttttaaatatttacacttatcaaaaggagtaataagcataagaggtttatacttattttatactcgactgccatatttggcaatgatcttgtgtgggctgatacaggcaacatcaataattcttacatttaatggaacaagatcacatgctccattaggattcagttttgatgttatgtcatctataatatcatctaatgtatttcttttttcatttgtcccttggaatatcgctaatgctggatgggacaatcaccttttatcgtacacactatcaactttagtaattacattatgtgttttcatttatattaaaggaaattggcaaatgaaagtgtttgccacccttccaatacttattgtcgcattttctatggcaaaacctcaactggcagattctgttcctcaactgccaacacttgcaaccggaaacgggtcaaggtattttgtaaatattcatattgcaattttttcattaatatgcgtttgtttgtttcaatgcataaagaataaaaccttaaaaatattctttaaaatctatgtttcagtcatccttattgcaatgataaaattaaacttttttataacccctcttcctgacatgaactggtctcaaggagcagaattaataaataaagcaaaacatggagaagccgtctcatttacagtgctccctccatggttaactcttgatttaataaaaaaataa

SEQ ID NO: 479550 - DNA, 903 bp, Shigella flexneri
gtgtggtttgacgaagagccaccatacagcatttatggcgaaggtcttacccgtaccaacaaatacgggcaattctcaattctgacgtttaccccgctgatggggatgtctgacgttgttaccaagttcctgaagaatcccagcaagtcgcagaaagtggtcaacatgaccatctatgacgctgagcactataccgacgagcagaaagagcaaatcatcgcatcatatcccgagcatgagagagaggcgcgtgctcgcggtattcctacgatgggtagtggtcgaatcttccagataccggaagagacgattaagtgtcagccgttcgagtgtcctgatcacttctacgtaattggcgggatggatttcggatgggatcacccacaggcgcaagttcagctttggtgggataaggaggcagacacaatctacgtttcacgcgtgtggaaggcgaaagaaaaaacagccgttcaggcgtggggagccgttaaatcatgggcgcataaagtgccaaccgcatggcctcatgatggaaaccagcacgagaagggcggcggtgagcagctcaaagggcagtatgcagacgctggatttatgatgttgcaggagcatgcgacatggcctgatggcggtaacgctgttgagccaggcatcactgaattgcgcgacatgatgctcgatggtcgcttcaaagtattcaatacctgtgagccattctttgaggagttccgcctctatcaccgtgatgaaaacgggaaaatcgtcaagcttaacgacgacgtgctatccgccgttcgctatgcatacatgatgcgccgcttcgcaaaaatgatgcgcgacatcaaaaaaccaaaagagaaaaagataccagccccaatcaggcccatcgcacggagaacttaa

SEQ ID NO: 479551 - DNA, 267 bp, Shigella flexneri; identical to SEQ ID NO: 462029

SEQ ID NO: 479552 - DNA, 327 bp, Shigella flexneri; identical to SEQ ID NO: 475432

SEQ ID NO: 479553 - DNA, 354 bp, Shigella flexneri; identical to SEQ ID NO: 476372

SEQ ID NO: 479554 - DNA, 1224 bp, Shigella flexneri
atggcgcagagtgctgtttatcgcgtgtgtggcggcaagctctacaaaggcgaaagtgaagtcggtgatgttgccggaagtggtcgcgtatcaatggcgcatggtcgaacatctcaggcggtaggcgttaacgggcaactggtcgaataccgctatgatggcacggttaaaaccgtctcaaactggcctgcagacagcgggtttacgcagtatgagttaggttcggttcgtgatattacgcgcttacgtgggcgttatgcgtggtcaaaagacggtactgattcatggtttatcactgaccttgaagacgaatcgcaccctgaccgctacagcgcacaatatcgcgcagaatcgcagcctgacggcatcatcggcatcggaacatggcgagacttcatcgtctgctttggttcatcaacgattgaatatttctccctgactggtgcaaccactgttggtgccgcgttgtatgtcgcacagccatcgctgatggtgcagaaaggcattgccggaacttactgcaaaacgccgtttgctgattcctatgcgtttatcagcaatccggcaacaggtgcgccgtctgtatatatcatcggctccggtcaggtatcaccaatcgccagcgcgagcattgagaaaatactacgctcctacactgctgatgaactggctgatggcgtgatggaatcgttgcggtttgatgcgcatgagttactgattatccaccttccgcgccatgttctcgtgtacgacgcatcttcaagcgccaatggtccgcaatggtgtgtgctgaaaacaggtctgtatgacgatgtgtaccgcgctatcgacttcatttacgaaggcaatcagataacgtgcggcgataagctggagtccgtgaccgggaaattgcaattcgacatcagcagccagtacgacaagcaacaggaacatcttctgtttactccgctgttcaaagcggataacgccagagtgttcgaccttgaggttgaatcgtcaactggcgttgctcagtacgctgaccgcctttttctctctgcaaccactgacggcataaattacggtcgtgagcagatgattgagcagaatgaaccgttcgtttacgacaaacgtgttttgtggaagcgagtcgggcgcatcaggaaaaatgtcggcttcaaattgcgcattatcacgaagtcaccagtcactctgtctggcgctcagataaggattgagtaa

SEQ ID NO: 479555 - DNA, 525 bp, Shigella flexneri; identical to SEQ ID NO: 476744

SEQ ID NO: 479556 - DNA, 354 bp, Shigella flexneri; identical to SEQ ID NO: 466835

SEQ ID NO: 479557 - DNA, 354 bp, Shigella flexneri; identical to SEQ ID NO: 471497

SEQ ID NO: 479558 - DNA, 327 bp, Shigella flexneri; identical to SEQ ID NO: 475432

SEQ ID NO: 479559 - DNA, 354 bp, Shigella flexneri
atgccactgctggataagctgcgtgagcagtacgggggcggaccgctatgcagtgaactgcatattgccccgtcaacgtattaccactatcagcaacagcgacatcatccggataaacgcagtgcccgtgcgcagcgcgatgactggctgaagaaagagatacagcgcgtatacgatgaaaatcacaaggtatacggtgtaaagtctggcgtcagttgttacgggaaggtatcagagtggccagatgcactgtggcacgtctcatggcggttatgggacttgccggtgttctccggggtaaaaaggtccgtacgaccatcagccggaaagccgttgccgcaggcgaccgcgtaa

SEQ ID NO: 479560 - DNA, 354 bp, Shigella flexneri
atgccactgctggataagctgcgtgagcagtacgggggcggaccgctatgcagcgaactgcatattgccccgtcaacgtattaccactgtcagcaacagcgacatcatccggataaacgcagtgcccgtgcgcagcgcgatgactggctgaagaaagagatacagcgcgtatacgatgaaaatcacaaggtatgcggtgtaaagtctggcgtcagttgttacgggaaggtatcagagtggccagatgcactgtggcacgtctcatggcggttatgggacttgccggtgttctccggggtaaaaaggtccgtacgaccatcagccggaaagccgttgccgcaggcgaccgcgtaa

SEQ ID NO: 479561 - DNA, 210 bp, Shigella flexneri; identical to SEQ ID NO: 476021

SEQ ID NO: 479562 - DNA, 354 bp, Shigella flexneri; identical to SEQ ID NO: 476545

SEQ ID NO: 479563 - DNA, 483 bp, Shigella flexneri; identical to SEQ ID NO: 474711

SEQ ID NO: 479564 - DNA, 501 bp, Shigella flexneri
atgaacctgacaacgaagggtgatttagttcttgcggcattacgtaagctcggtgttgcatcaaatgccacgttaaccgatgtcgaaccgcagtctatggaagacggcgtcaacgaccttgaaatgatgatggctgaatggcttggcggtgatgcgtcacctggtatcaacgttggctacatttttgctgatgcagatgttgctccggatccgggtgatgagcacggtttatcaaataacgctatcaatgccgtcattttcaaccttgcctgccgaattgctccagattatgcgctggaagcgtctgcaaaacttatagccactgccagatacgggaaagagcgactcgtcaaactgtctgcaatggacagggcaaaagcagctaaatgtaagtccggttatccaaaccgtatgcctgttggtagtggtaaccagttggcgaagtggaacggttggaattacttccaccgaaaggaaccttgcgataacgggagcgaataa

SEQ ID NO: 479565 - DNA, 219 bp, Shigella flexneri; identical to SEQ ID NO: 474644

SEQ ID NO: 479566 - DNA, 219 bp, Shigella flexneri; identical to SEQ ID NO: 474644

SEQ ID NO: 479567 - DNA, 219 bp, Shigella flexneri; identical to SEQ ID NO: 474644

SEQ ID NO: 479568 - DNA, 225 bp, Shigella flexneri; identical to SEQ ID NO: 476353

SEQ ID NO: 479569 - DNA, 225 bp, Shigella flexneri; identical to SEQ ID NO: 476353

SEQ ID NO: 479570 - DNA, 534 bp, Shigella flexneri
atgggtatccgctaccttctggaaaagaaaagagacttaaggctaaatcactttaaagccttctctcataaatgcgagacaaaacctgacgtgttaattatgaccgggtgcaccgtcgctgatacttatagtatattctcacgcattgttgaagaaaatataatgaaaacgatgacacctatcgtcatcattactgggcatcactcagaagatctttgttctctggcatcgaaactgggaggagttaaaataatatcaccgacagaaaagattgcaaaaatagaaaacgctatcaatgatgcttttaacagcaagcctaaaaaaataagatttttaacagatatactctctcctcaacaaattgagaccatgaaaatggttgcgcagggtagatccgttaatgagatttcagccgcaatgaatattagcatcaagaccgtgtatgcacataaagttcgtgctatcaataagctgggaattaagaaaaaagtttatgaagcgcttttttataaagcgctaattcagttcaactga

SEQ ID NO: 479571 - DNA, 213 bp, Shigella flexneri; identical to SEQ ID NO: 462242

SEQ ID NO: 479572 - DNA, 2109 bp, Shigella flexneri; identical to SEQ ID NO: 16545

SEQ ID NO: 479573 - DNA, 246 bp, Shigella flexneri
atgaggcgcttcgcaggcgcatgtcgtttcgttttcagtcgtactctggcacgtcagaatgagaatcataaggccggtaacaaagacatcccttacgcgaaaatggcttcctggctggttgagtggaaaaatgccactgaaacgcaatggattaaagatgctccgtcacagccattgcaacagtcactgaaagaccctgagcaggcctgcaaaaactttttccagaagcgctcggcgttcccctga

SEQ ID NO: 479574 - DNA, 213 bp, Shigella flexneri; identical to SEQ ID NO: 462242

SEQ ID NO: 479575 - DNA, 1149 bp, Shigella flexneri; identical to SEQ ID NO: 477067

SEQ ID NO: 479576 - DNA, 1464 bp, Shigella flexneri
gtgcttcttgccgggcagctggacgatcggatcctggcactgcaatcacaggggatcttcaccgatcctcagtcatatattacttacgcgaccgcgctggcttatcgtggcgaaaaagcacgcctccagcattatctcattgaaaataagccgctgtttaccacgggcgcacaagagaaaagttggctctatctgttatctaaatacagcgccaaccccgttcaggcattggcgaattatacggtgcagtttgccgataaccgccagtatgttgttggcgcgacgctaccggtgctgttaaaagaaggtcagtacgacgcagcgcaaaaactgctcgccaccctccccgccaatgaaatgcttgaggagcgttatgctgtcagcgtggcgacccgtaacaaggctgaatctctgcgtctggcacgattgctgtatcagcaagaaccgacaaatcttccccgcctggatcaactgacctggcaactgatgcagaacgagcagtcacgcgaagctgccgatttattgctgcaacgctatcctttccagggcgatgcgcgtgtcagccagactttaatggcgcgactggcgtctctgctggaaagtcatccttacctagcaacgccggcgaaggtggcgattttatcgaaacccttaccgctggcggagcaacgtcagtggcaaagtcagttgccgggtattgcagataattgcccggcaatagttcgcttgctgggcgatatgtcgccttcctacgatgctgccgcctggaaccgtctggcaaagtgttatcgggacacgctacccggtgtggcgttgtatgcatggcttcaggccgaacaacgacaaccgagcgcctggcaacatcgtgcggtagcctatcaggcgtatcaggttgaggactacgccaccgcactggcggcctggcagaaaatcagtcttcacgacatgagcaatgatgatctgctcgccgccgccaacaccgctcaggcagcgggaaatggcgcagctcgcgatcgctggcttcaacaggcagaacaacgtgagctgggaaacaatgctcaatactggtggctgcatgcgcgacgttatatcccagctcagccagaactcgcactgaacgatctcacgcgctcaatcaatattgccccttctgccaactcttacgttgcgcgggcgacaatttatcgccaacgtcataatgttccggccgcggtgagtgatttgcgcgccgcgctggaactggaaccaaataatagcaacacccaggcagcgcttggttacgccttgtgggatagcggtgatatcgcacagtcgcgggaaatgctcgaacaggcgcataaagggcttccggacgatccggcactgatccgacaactggcctacgtgaaccagcgtctggatgacatgcctgcgacgcagcactacgcccggctcgtgattgatgacattgataatcaggcataa

SEQ ID NO: 479577 - DNA, 489 bp, Shigella flexneri; identical to SEQ ID NO: 473676

SEQ ID NO: 479578 - DNA, 1950 bp, Shigella flexneri; identical to SEQ ID NO: 478706

SEQ ID NO: 479579 - DNA, 948 bp, Shigella flexneri
  misc_feature (936)..(945): n is a, c, g, or t
atgagctatacaaaattgctcactcaattatcttttcctaatagaatctcggggccaatcttggaaacaagtcttagcgatgtttcgattggtgagatttgtaacattcaggctggaattgaaagtaatgaaattgttgcaagagctcaggttgtaggatttcatgatgaaaaaacaatattaagcttgattggaaattctcgtggactttcacggcaaacgttgattaagcccactgcccagtttcttcatacgcaagtcggccgtggattattgggagcagtagtcaatcctttaggggaggttactgataagtttgctgttacagataacagtgaaattctttatcgacctgtagataatgctcctccgctatatagtgaaagggctgcaattgagaagccttttttaacaggtattaaggttattgattctttactcacgtgtggtgaaggacagcgaatggggatttttgcgtcagctggttgtggcaaaacttttctcatgaatatgctcattgaacatagtggtgctgatatatatgttattgggttaattggtgagcgaggtcgagaggttactgaaacggttgattatttgaaaaactctgagaaaaaaagcaggtgtgttttagtatatgcaacttcggattactcttcggttgatcgttgtaatgctgcatatatagccactgctatagccgaattttttaggactgaaggacataaagtagcgctttttattgattcattaacaaggtatgccagagcattacgtgatgtggccttagccgctggagaatcacctgccagaagaggctatccggtttcggtttttgatagcttacccagacttcttgaaaggccaggaaagttaaaggcaggtggctctattactgcattttacactgttcttttggaggatgatgattttgcnnnnnnnnnntga

SEQ ID NO: 479580 - DNA, 525 bp, Shigella flexneri; identical to SEQ ID NO: 478694

SEQ ID NO: 479581 - DNA, 150 bp, Shigella flexneri; identical to SEQ ID NO: 193044

SEQ ID NO: 479582 - DNA, 441 bp, Shigella flexneri; identical to SEQ ID NO: 22297

SEQ ID NO: 479583 - DNA, 390 bp, Shigella flexneri; identical to SEQ ID NO: 22296

SEQ ID NO: 479584 - DNA, 927 bp, Shigella flexneri
atgccaaactggtgctcgaatcgtatgtattttcctggtgagccggcacagatcgctgagattaaacgactggccagcggtgcagtcacaccgctttatcgccgcgccacaaatgaaggtattcagctgtttctggccggaagtgccggacttctgcagatcactgaaaatatccgctctgaacagtgccccggagtgacggctgccggacgtggtgctgtatcgacggaaaatatcgcgttcacccgctggctgacacacctgcagaacggtgtgttgctggatgaacaaaactgcctgatgctgcatgaactctggttacagagcggtactggccagcgtcgttgggaaggattaccggatgatgccagggaaaccatcactgtgcatttcaccgcaaaaagaggtgactggtgtgacatatggggtaacgaggatgtatcggtgtggtggaaccgtctgtgtgacaacgtagtgccggaaaaaaccatgccgtttgacctgctgacggttctgccgacccgcctggatgttgaagtgaacggctttaatggtggtgttctgaacggtgttccttctgcatatcactggtatacggaacggtatggcgtgaagtggccttgtggatatgacctgaatatcagcagtcagggagaaaacttcattcaggtggatttcgacactccgtggtgtcagccggaaagcgacgttattgcagaattaagccgccgtttcagctgcacgctggagcactggtatgccgaacagggctgtgatttctgtggctggcagttgtatgagcgtggagagctcgtcaatgtgctgtggggggaacttgaatggtcttccccgacagatgacgatgagcagccggaagtcaccggacctgcgtggatagtcgacaatgtggcgcattatggcggatga

SEQ ID NO: 479585 - DNA, 213 bp, Shigella flexneri; identical to SEQ ID NO: 462242

SEQ ID NO: 479586 - DNA, 639 bp, Shigella flexneri; identical to SEQ ID NO: 476552

SEQ ID NO: 479587 - DNA, 957 bp, Shigella flexneri; identical to SEQ ID NO: 476538

SEQ ID NO: 479588 - DNA, 987 bp, Shigella flexneri
atgatttataaaaatgataaaacatttcgtaatcttgaaatattcggagacagcggctctggagcatacttatatgataacaaactagaaaaatgggtattagtcggaacaacccatggtattgccagcgttaatggtgaccaactgacatggataacaaaatacaatgataaactggttagtgagttaaaagatacctatagtcataaaataaatctgaatggcaataatgtaaccattaaaaacacagatataacattacaccaaaacaatgcagataccactggtactcaagaaaaaataactaaagacaaagatattgtgttcacaaatgggggaaatgttctgtttaaggataatttggattttggttgcggtggtattatctttgacgaaggccatgaatataacataaacggtcagagatttacatttaaaggagcaggaattgatatcggaaaagaaagcattgtaaactggaatgcattgtattccagtgatgatgttttacacaaaataggccccggtactctgaatgttcaaaaaaaacagggggcaaatataaagataggtgaaggaaatgttattcttaatgaagaaggaacatttaacaatatataccttgcaagcggaaatggtaaggtaatactaaataaagataattcccttggcaatgatcaatatgcggggatattttttactaaacgtggtggcacgctagatttaaatggacacaatcagacttttactagaattgccgccactgacgatggaacaacaataactaactcagatacaaagaaagaagccgttctggcaatcaataacgaagactcctacatatatcatgggaacataaatggcaatataaaactaacgcacaatattaattctcaggataagaaaactaatgcaaaattaattctggatggtagtgtcaacacaaaaaatgatgttgaagtcagtaatgccagtcttaccatgtaa

SEQ ID NO: 479589 - DNA, 189 bp, Shigella flexneri; identical to SEQ ID NO: 477058

SEQ ID NO: 479590 - DNA, 303 bp, Shigella flexneri; identical to SEQ ID NO: 473532

SEQ ID NO: 479591 - DNA, 753 bp, Shigella flexneri
gtgcttctccgtatacaccatgttatcggagagctgcccacgtatggttatcgtcgggtatgggcgctgcttcgcagacaggcagaacttgatggtatgcctgcgatcaatgccaaacgtgtttaccggctcatgcgccagaatgcgctgttgcttgagcgaaaacctgctgtaccgccatcgaaacgggcacatacaggcagagtggccgtgaaagaaagcaatcagcgatggtgctctgacgggttcgagttctgctgtgataacggagagagactgcgtgtcacgttcgcgctggactgctgtgatcgtgaggcactgcactgggcggtgactaccggcggcttcaacagtgaaacagtacaggatgtcatgctgggagcggtggaacgccgcttcggcaacgatcttccgtcgtctccagtggagtggctgacggataatggttcatgctaccgggctaatgaaacacgccagttcgcccggatgttgggacttgaaccgaagaacacggcggtgcggagtccggagagtaacggaatagcagagagcttcgtgaaaacgataaagcgtgactacatcagtatcatgcccaaaccagacgggttaacggcagcaaagaaccttgcagaggcgttcgagcattataacgaatggcatccgcatagtgcgctgggttatcgctcgccacgggaatatctgcggcagcgggcttgtaatgggttaagtgataacagatgtctggaaatatag

SEQ ID NO: 479592 - DNA, 303 bp, Shigella flexneri; identical to SEQ ID NO: 477206

SEQ ID NO: 479593 - DNA, 690 bp, Shigella flexneri
atgaataaccagtatttacagtttgttcgtgagcagctcattatcgccaccgctgatttgagtggggcgacaaaaggtcagcttgaagcctggcaggagaatgccatgttcgatacagggcgttacaggcgtaaaaaaatccggtaccgcgatgaggtgaccggaaaaatgataacgcgggataatccaccaatcccgggaaaacaatcactggcgaagggggcgtcaattcctctggtcagtcaggttgcgttttcgacatcatcgtggcggcgggctgttctgtctcttgaagagcactataaagcctggttgttgtggtgttacagcggaagtatttgctgggagtatcagatcaccataacccactgggcgtgggatgaatttaatgctcaatccggtaccagaaaaattgcagagaaaacacaggaacgcctgaaaaaattaatctggctggcggcgcaggcggtaaaagcagaactttttggtggggaaggttatgaatatcaggagctggcattactggcgggagtaacaaccaaaaactggtccaaaacatttactggtcactgggttgtaatgaaacacatttttcaccgactggatagtgaggctttattgtttgtgatgagaacacgttcagaacaaaaagcggcattttcaaagcaaagtattgcaaaagtagattaa

SEQ ID NO: 479594 - DNA, 252 bp, Shigella flexneri
gtggcgcttattgtccgtcagcagcgactgaaattaagcctgtccggaagactggcgataaagattattgcagagccaccggataagcggcgtcgtgacctggacaatatcctgaaagcaccactggatgcactgacacatgcggggttgcttatcgacgacgagcagtttgatgaaaccaatattgtgcgcggactgcctgttcctggtggtcggttggggataaaaatcacagagctggagtgtgcatga

SEQ ID NO: 479595 - DNA, 141 bp, Shigella flexneri; identical to SEQ ID NO: 474597

SEQ ID NO: 479596 - DNA, 753 bp, Shigella flexneri
gtgcttctccgtatacaccatgttatcggagagctgcccacgtatggttatcgtcgggtatgggcgctgcttcgcagacaggcagaacttgatggtatgcctgcgatcaatgccaaacgtgtttaccggctcatgcgccagaatgcgctgttgcttgagcgaaaacctgctgtaccgccatcgaaacgggcacatacaggcagagtggccgtgaaagaaagcaatcagcgatggtgctctgacgggttcgagttctgctgtgataacggagagagactgcgtgtcacgttcgcgctggactgctgtgatcgtgaggcactgcactgggcggtgactaccggcggcttcaacagtgaaacagtacaggacgtcatgctgggagcggtggaacgccgcttcggcaacgatcttccgtcgtctccagtggagtggctgacggataatggttcatgctaccgggctaatgaaacacgccagttcgtccggatgttgggacttgaaccgaagaacacggcggtgcggagtccggagagtaacggaatagcagagagcttcgtgaaaacgataaagcgtgactacatcagtatcatgcccaaaccagacgggttaacggcagcaaagaaccttgcagaggcgttcgagcattataacgaatggcatccgcatagtgcgctgggttatcgctcgccacgggaatatctgcggcagcgggcttgtaatgggttaagtgataacagatgtctggaaatatag

SEQ ID NO: 479597 - DNA, 618 bp, Shigella flexneri; identical to SEQ ID NO: 474651

SEQ ID NO: 479598 - DNA, 753 bp, Shigella flexneri; identical to SEQ ID NO: 478934

SEQ ID NO: 479599 - DNA, 495 bp, Shigella flexneri; identical to SEQ ID NO: 477031

SEQ ID NO: 479600 - DNA, 753 bp, Shigella flexneri; identical to SEQ ID NO: 478934

SEQ ID NO: 479601 - DNA, 180 bp, Shigella flexneri
atgaataagccgcaactggcggaatcacagaagaccgctttgcttaccgaggcggagtctgtcatccggccgccggggtgtgcggtcaggctgaacagagaaacggatgaatcaggggaggcccgggggcgggcctctgtttttccggagtcagtccggtctgtggtttatgcgatgtga

SEQ ID NO: 479602 - DNA, 753 bp, Shigella flexneri
gtgcttctccgtatacaccatgttatcggagagctgcccacgtatggttatcgtcgggtatgggcgctgtttcgcagacaggcagaacttgatggtatgcctgcgatcaatgccaaacgtgtttaccggctcatgcgccagaatgcgctgttgcttgagcgaaaacctgctgtaccgccatcgaaacgggcacatacaggcagagtggccgtgaaagaaagcaatcagcgatggtgctctgacgggttcgagttctgctgtgataacggagagagactgcgtgtcacgttcgcgctggactgctgtgatcgtgaggtactgcactgggcggtgactaccggcggcttcaacagtgaaacagtacaggacgtcatgctgggagcggtggaacgccgcttcggcaacgatcttccgtcgtctccagtggagtggctgacggataatggttcatgctaccgggctaatgaaacacgccagttcgcccggatgttgggacttgaaccgaagaacacggcggtgcggagtccggagagtaacggaatagcagagagcttcgtgaaaacgataaagcgtgactacatcagtatcatgcccaaaccagacgggttaacggcagcaaagaaccttgcagaggcgttcgagcattataacgaatggcatccgcatagtgcgctgggttatcgctcgccacgggaatatctgcggcagcgggcttgtaatgggttaagtgataacagatgtctggaaatatag

SEQ ID NO: 479603 - DNA, 189 bp, Shigella flexneri; identical to SEQ ID NO: 470416

SEQ ID NO: 479604 - DNA, 213 bp, Shigella flexneri; identical to SEQ ID NO: 462242

SEQ ID NO: 479605 - DNA, 372 bp, Shigella flexneri; identical to SEQ ID NO: 475842

SEQ ID NO: 479606 - DNA, 303 bp, Shigella flexneri
atgaaaaaaagaaattttagcgcagagtttaaacgcgaatccgctcaactggttgttgaccagaaatacacggtggcagatgccgccaaagctatggatgttggcctttccacaatgacaagatgggtcaaacaactgcgtgatgagcgtcagggcaaaacaccaaaagcctcccccattaccccggaacaaattgaaatccgtgagcacaggaaaaagctacaacgcattgaaatggagaatgaaatattaaaaaaggctaccgcgctcttgatgtcagactccctgaacagttctcgataa

SEQ ID NO: 479607 - DNA, 510 bp, Shigella flexneri
gtgacgtttttttttgacgacagggaccaggcagtcccctacacagccaccgctgatgatgtcgcaccgacgggtcagcaaatctggcaggaactgcaaagtggcaaatggggtgagatagccccattcactgtgacaccagaaatgctggaagcggccagagaggccagacgtcaggaaattgaagcatggcgcacagaacaggaggcgaagccgttcacgtttgaatggagcggtcgtatctggaatgctggccccgactcactgggccgcctgtccccggtagtcatgctggcaaaatctgtcacagcacaaacacatatggcgtggagcgatgccgataatcagcaggtgaaactgtcgatgccggaactggaagaactggcggcagcaatggtgcaggcgcaggtcgatcgcaacgatgagatttatcgccgtcagcgtgaaatgaaagaggagctgagcggtctggatgatttggcttcaattcgggcgtttgacgttgagtaa

SEQ ID NO: 479608 - DNA, 195 bp, Shigella flexneri; identical to SEQ ID NO: 464447

SEQ ID NO: 479609 - DNA, 444 bp, Shigella flexneri
atggctaaccatctgtcagaaaccgcagcagcaggcgaaaaggcacaacagaagtcccgggataatctggggctgaaaagtgcggccacgatggaagcacagagcgacatttacgaccggacaaaaggccgtctggcgatacccggcgcattcggctttgggtgtgcttttctgcctgaagatgttatccgttttgacactaagagtgatttcctggcctgggtaaggaatgcgctgccaggtgaatattccgttgctggcccctacggcatcatcatacccgacacacggtttgaaggggtgctcagcatccggtggactgatgcacgccctgagacaacagaaccgcggtacagagccaaatcccttactttttacggcattaacggccccatttatcacacccgctactgctactggcccatatccagactgactgggtga

SEQ ID NO: 479610 - DNA, 207 bp, Shigella flexneri
atggaacgcttcttcaggagtctgaagaacgaatggatgtcggtggtgggttacgtaagcttcagcgaggcagctcacgccataacggactatatcgttggatattacagcgcactaagaccgcacgaatataacggtgggttacccccaaacgaatcggaaaatcgatactggaaaaactctaactcggtggccagtttttgttga

SEQ ID NO: 479611 - DNA, 342 bp, Shigella flexneri; identical to SEQ ID NO: 468101

SEQ ID NO: 479612 - DNA, 300 bp, Shigella flexneri
gtgaggccctgttttggcgctcgtctggtgcaagagggtaaccgcctgtattaccttgccgaccgcgccggtatcagaggccgcttcagcgacgcagatgcataccatctggaccaggcctttccgctgctgatgaaacaactggaactcatgctcaccagcggtgaactgaatccccgatatcagcataccgtcacactgtatgcaaaagggctgacctgcgaagccgacaccctcggctcctgtggttacgtttatctggctgtttatccgacaccagcacccgcaaccacctcataa

SEQ ID NO: 479613 - DNA, 195 bp, Shigella flexneri; identical to SEQ ID NO: 464447

SEQ ID NO: 479614 - DNA, 195 bp, Shigella flexneri; identical to SEQ ID NO: 464447

SEQ ID NO: 479615 - DNA, 276 bp, Shigella flexneri
atggttctggaaagtcagggcgaatatgactcacaatgggcgacaatttgttccattgctccaaagattggctgtacgccggagactctgcgtgtctgggttcgccagcatgagcgggataccgggggcggtgatggagggctcaccaccgctgaacgtcagcgtctgaaagagccggagcgtgaaaatcgtgaactgcgccgcagtaacgatatccttcgcctggcttccgcttattttgcgaaggcggagttcgaccgcctctggaaaaaatga

SEQ ID NO: 479616 - DNA, 138 bp, Shigella flexneri; identical to SEQ ID NO: 474566

SEQ ID NO: 479617 - DNA, 492 bp, Shigella flexneri; identical to SEQ ID NO: 474903

SEQ ID NO: 479618 - DNA, 786 bp, Shigella flexneri; identical to SEQ ID NO: 470547

SEQ ID NO: 479619 - DNA, 186 bp, Shigella flexneri
atgtctgatttactttgctctgccaaattgggtgctacgacgctagcgttactgcttagcgctgccagtttgtctgcccaggcttctgtaacgccagatcgtacccgtttgatatttaatgaaagcgacaaatcaatcagcgtgacgttgcgcaataacgatccgaaactgccttatctggcctaa

SEQ ID NO: 479620 - DNA, 234 bp, Shigella flexneri
atgactcgttttgaagcaattaaacaagaccatattaaaattgtggatatatcgatagtatgcaacttcaccgtcgataagtgtgagctaaatcctgcttatgtcatcaaaaatatcgattccccaaaagatttacttaatgggcaaaaaaaacggtcctcatcagagaaccgtattagttattcgatcaaattagcggatgaaaaatatccgccacgacacgctattatttga

SEQ ID NO: 479621 - DNA, 465 bp, Shigella flexneri; identical to SEQ ID NO: 474844

SEQ ID NO: 479622 - DNA, 213 bp, Shigella flexneri; identical to SEQ ID NO: 462242

SEQ ID NO: 479623 - DNA, 783 bp, Shigella flexneri; identical to SEQ ID NO: 474887

SEQ ID NO: 479624 - DNA, 186 bp, Shigella flexneri; identical to SEQ ID NO: 474908

SEQ ID NO: 479625 - DNA, 309 bp, Shigella flexneri
atgcgtgactggattttgagtacgtcagtcggtgttttccatcgtaatgacaacggtggcgataacgacgacaacggcttgtacttatcgttttcgttatctgacacgccaacgatggatagcaataacaacagccattcaaccaatgtgtctacggattatcgttatagcgaacaggatggcgatcaaacgtcatggcagttatcgcataccttttataacgattcattcagccataaagaacttggcgtaaccgtcggaggcctgaacaccgagacgatttgctgggtgcggtactggtggatgtga

SEQ ID NO: 479626 - DNA, 1326 bp, Shigella flexneri; identical to SEQ ID NO: 474914

SEQ ID NO: 479627 - DNA, 1194 bp, Shigella flexneri; identical to SEQ ID NO: 475009

SEQ ID NO: 479628 - DNA, 213 bp, Shigella flexneri; identical to SEQ ID NO: 462242

SEQ ID NO: 479629 - DNA, 936 bp, Shigella flexneri; identical to SEQ ID NO: 474945

SEQ ID NO: 479630 - DNA, 234 bp, Shigella flexneri
atgcaccatcaccgcgcggaacactgggtagtggtcgcgggaacggcaaaagtcaccattgatggtgatatcaaactgcttggtgaaaacgagtccatttatattccgctgggggcgacgcactgcctggaaaacccggggaaaattccgctcgatttaattgaagtgcgctccggctcttatctcgaagaggatgatgtggtgcgcttcgcggatcgctacggacgggtgtaa

SEQ ID NO: 479631 - DNA, 1467 bp, Shigella flexneri; identical to SEQ ID NO: 474953

SEQ ID NO: 479632 - DNA, 129 bp, Shigella flexneri; identical to SEQ ID NO: 474954

SEQ ID NO: 479633 - DNA, 678 bp, Shigella flexneri
atgcgcgccggttctaccggtagccagaaatactccaccatgatgtgggcgggcgaccagaacgtggactggagtctcgacgatggcctggcgtccgtagtcccggcggcgctgtcgctggcaatgaccggacatggtctgcatcacagcgacattggcggttacaccaccctgtttgagatgaagcgcagcaaagagctgctgctgcgctggtgcgatttcagcgccttcacgccgatgatgcgcacccacgaaggtaaccgtcctggcgacaactggcagtttgacggcgatgcggaaactatcgcccattttgcccgtatgactaccgttttcaccaccctgaaaccttatctgaaagaggccgtcgcgctgaatgcgaagtccggtctgccggtcatgcgcccgctgttcctgcattacgaagacgatgcacatacctattccctgaaatatcagtacctgttaggccgcgacattctggtcgctccggtacacgaagaaggtcgcagcgactggacgctctatctgccggaggataactgggtacatgcctggacgggtgaagcgttccggggcggggaagttaccgttaatgcgcccatcggcaagccgccggtcttttatcgcgccgatagcgaatgggcggcactgttcgcgtcgttaaacagcatctaa

SEQ ID NO: 479634 - DNA, 684 bp, Shigella flexneri; identical to SEQ ID NO: 478773

SEQ ID NO: 479635 - DNA, 834 bp, Shigella flexneri; identical to SEQ ID NO: 478479

SEQ ID NO: 479636 - DNA, 165 bp, Shigella flexneri
atgtttgccccgcagtacaacattgagatcaataacgacggcacgaacgggcagataggtccggctgccctgaaggtggtttatgacctcgggaaaaaagcggccgcggactttatgcaacagcaggcccgtgatggtggccggttaagtggagcataccggtaa

SEQ ID NO: 479637 - DNA, 366 bp, Shigella flexneri; identical to SEQ ID NO: 462994

SEQ ID NO: 479638 - DNA, 576 bp, Shigella flexneri; identical to SEQ ID NO: 475039

SEQ ID NO: 479639 - DNA, 375 bp, Shigella flexneri; identical to SEQ ID NO: 475278

SEQ ID NO: 479640 - DNA, 717 bp, Shigella flexneri; identical to SEQ ID NO: 475041

SEQ ID NO: 479641 - DNA, 933 bp, Shigella flexneri; identical to SEQ ID NO: 475060

SEQ ID NO: 479642 - DNA, 471 bp, Shigella flexneri
atgaaagcgctggaaatggcatgggaaacccgtggtaagcccggcggggtgatgttccacagcgatcagggcagtcattatacgagcaggcagttccggcagttattgtggcgataccagatcagacagagtatgagccggcgcggaaactgctgggataacagcccaatggaacgcttcttcaggagtctgaagaacgaatggatgccggtggtgggttacgtaagcttcagcgaggcagctcacgccataacggactatatcgttggatattacagtgcactaagaccgcacgaatataacggtgggttacccccaaacgaatcggaaaatcgatactggaaaaactctaactcggtggccagtttttgttggccacttcaatgtaacatacctaaacggcatgagctgatttgtgatatgagtcatttggttacagcctggttgttatcggttttgaacgttttttga

SEQ ID NO: 479643 - DNA, 1794 bp, Shigella flexneri; identical to SEQ ID NO: 475076

SEQ ID NO: 479644 - DNA, 363 bp, Shigella flexneri; identical to SEQ ID NO: 475116

SEQ ID NO: 479645 - DNA, 228 bp, Shigella flexneri; identical to SEQ ID NO: 475118

SEQ ID NO: 479646 - DNA, 213 bp, Shigella flexneri
atgtatgatggtgattttaaggtgcttgcgtggcttccatttccatcagatgtccttcctgctccgctactgaaggcgtggtgcgtaacggcaaaagcactgccggacatcagccctatctctgctctcattgccgtaaaacatggcaactacagttcacttacaccgcctctcagcccggtacgcaccagaaaatcattgatatggccatga

SEQ ID NO: 479647 - DNA, 606 bp, Shigella flexneri; identical to SEQ ID NO: 478508

SEQ ID NO: 479648 - DNA, 570 bp, Shigella flexneri
gtggcgttcatcattgatgtgtttgccggatgcatcgtggggtggcgggtctcatcgtccatggaaacgacattcgtgctggatgcactggagcaggcgttatgggcccgtcgaccgtccggcacggtccatcacagtgataaaggttctcagtatgtatcgctggcctacacacagcggcttaaggaagccggattactggcatcaacaggaagtacaggcgactcgtatgacaacgcgatggcggagagcatcaatggtctttacaaagcggaggtaatacaccgtaagagctggaaaaaccgtgcagaagtggaactggccacactcacgtgggtggactggtataacaatcgacgattgctggaaaggctgggccatactcctccggcagaagcagaaaagcttattatgcttccatcggaaacgatgatctggcagcctgagttcacagataaaacactctccaggaaacccggggcggttcaaagcgccagccccgtcccgcccgatagagcgcggcatagcgggccccggattacttgcgtgcgacggcagaagaagccctga

SEQ ID NO: 479649 - DNA, 384 bp, Shigella flexneri; identical to SEQ ID NO: 478510

SEQ ID NO: 479650 - DNA, 1227 bp, Shigella flexneri
atggagaaaatatggttttacaatagtgagccatctatagatattcaagaatataatagttttgccgataatactactaacacgtttatctttacaattataccagacaataaccatgtgataaaattatcgtctcccattacagttaagattgagtgtaaggatggttattattttattaatttctccggagataaatcagacataatttataaagttaatgggctttctatcatacctgaaaatttctttactcttcttagcggtaattttaaagctgactggcgttgggatgtctctaaagagacgtttcctaaggataagtttgatagctatgttaaatctgtgttttctaaaatagacttttataaacaatgtggtgtgattaacccacaaaatgccaacacggcttattttggcgatacagatggaagagtaggcgctgtactttattcattgctcgtttcagggcatataggcatcagggaaaagggttggagtttattatgtgaattattaaaacacgaagacatggcttcatctgcatacatacataaaaataataaattgctctacaatttattaaatacgagagacatgatattgaatgagttgcatcaacatgtttttttaaaggacgatgcgataaccccttgtatcccccttggggatcatacaggcgatagatttagtactatttttggtgataaatatatccttactttgctaaattctatgcgaaatatggagggtaataaagatagccgtattaataaaaatgtcatcgttctggctggaaatcatgaaatcaattttaatggtaactatactgcacgactagaaaattataaactctctgccggtgatacgtataacttaattaaaacgctcgatgtttgtaattataactcagaaactaaagttttaaccagtcatcacggaataataagaaatgaagaaaatcaatgttattgtctcggtgctttgcaggttccatttaatcagatgaaagacccaattgatcctgaggaattagcaaatatatttaataaaaaacataaacaacacatggatgatcatcttctccatctaattagaagcaatgctatagcacccacacctgtatatgaaaattattttaataacactactgctttcagaccaaaacctgaagatatcttcaaatgtggacagacgctcaaaaaaactaaacagaaatttgggtaa

SEQ ID NO: 479651 - DNA, 612 bp, Shigella flexneri
atgcatgctcaccgggtctttgttaccaagtaccgacgccagatttttgaccatgacgcgacagaaaaactacgtacttacttttcaaatgtatgtgctgattttgaagctgaactggttgaaatggatggcgaaccagagcacgtccatctgttaattaactatccccccaaactggcgatatccagtctggtaaacagcctcaaaggcgtatcgggtaggttactgcgacgggatcggccagatattgctgccaggtattaccgcaaagatgttttgtggcgtcccggctattttgccagtagctgcggaggtgcgccaatatccgtcatccgccaatacattgaacaacagcaaacacctggtcaggtgaaaaaacgagccttatatccccgccctgaaggacgggcttttacggtgcactggataagcctggagattatctacacctgcatggacatcattgtactatgccccgtacatgccccatcacatcctcaacatcaaagtattagagccttgcaaaccattatgcgtctcagtttgtctcatctatcttacgcaaaaaaaatagaactaatatcaagcggcgctatattgcgtattaaataa

SEQ ID NO: 479652 - DNA, 375 bp, Shigella flexneri; identical to SEQ ID NO: 475109

SEQ ID NO: 479653 - DNA, 213 bp, Shigella flexneri; identical to SEQ ID NO: 462242

SEQ ID NO: 479654 - DNA, 978 bp, Shigella flexneri
ttgataaaattcagtctgaaaatatacaaacacataagaatacatactctgaggatattaaagaaatctctaaccacgattttgttttttggggttgaaatttccaatcatcaagaaaaactcccactaaataaaacacatcatactgtagattttggcgccaatgcgtatatcattgatcatgactctccatatggatatatgacattaaccgatcactttgataatgctattccacctgttttttaccatgagcaccaatcatttttcttagataactttaaagaggttgtggatgaagttagcaggtatgtgcatggtaatcaggggaaaactgatgttccaatatttaacactaaagatatgaggcttggaattgggttgcatcttattgattttataagaaagagtaaagatcaaggattccgagagttttgttataacaaaaacattgatcctgttagtctggatagaattataaactttgtgtttcagcttgagtatcatataccaagaatgctaagtacagataacttcaaaaaaataaaactcagagacatatctttggaggatgcgattaaagcatctaattatgaagagattaacaataaagtgactgataaaaaaatggctcatcaggcccttgcttattctttaggcaataaaaaagctgatatagcactttatttactatctaaatttaattttacaaaacaagatgtcgcagagatggagaaaatgaacaacaatagatattgtaatctgtatgatgttgaatacttacttagtaaagatggtgccaactataaagtgctagaatattttatcaataatggattggttgatgtaaacaaaaaatttcaaaaagcaaatagtggggacactatgcttgacaatgcaatgaaaagcaaagattcaaaaatgattgattttttattaaaaaatggagcaatattaggcaaacgatttgagatatga

SEQ ID NO: 479655 - DNA, 1455 bp, Shigella flexneri
atgaaaatacctgaagcagtaaatcatattaatgttcagaacaatattgatcttgttgatggaaaaataaatccgaacaaagatacaaaagcattacaaaaaaacatatcatgcgtaacaaactcatcctcttctggcataagtgaaaaacatttagatcactgtgctgatactgtgaaaagctttttaaggaagtctatagcagcgcaaagttatagtaaaatgttctctcaagggaccagtttcaaatcattaaatctttctattgaagcgccatctggagcacggtcatcatttcggtcacttgagcacctcgataaggtgtccagacactatctttctgaaataatacaaaaaactcatcctctttcttcggatgaacgtcacttgctctctattattattaattctgattttaacttcagacatcaaagtaacgctaacctgtcaaataatactcttaatattaagtcctttgataaaattaagtctgagaatatacaaacatataaaaacacattctctgaggatattgaagaaatagctaaccacgattttgttttttttggggttgaaatttccaatcatcaagaaacactcccactaaataaaacacatcatactgtggattttggtgctaatgcgtatatcattgatcatgactctccatatggatatatgacattaaccgaccactttgataatgctattccacctgttttttaccatgagcaccaatcatttttcttagataactttaaagaggttgtggatgaagttagcaggtatgtgcatggtaatcagggaaaaactgatgtgccaatatttaatacaaaagatatgaggcttggaattgggttgcatcttattgattttataagaaagagtaaagatcaaagattccgagagttttgttataataaaaacattgatcctgttagtctggatagaattataaactttgtgtttcagcttgagtatcatataccaagaatgctaagcacagataacttcaaaaagataagactcagagatatatctttggaggatgccattaaagcatccaattatgaagaaattaacaataaggtgactgataaaaaaatggctcatcaggcccttgcttattctctaggcaatgcaaaatctgatatggcactttatttactatctaaatttaattttacaaaacaagatgtcgcagagatggagaaaatgaacaacaatatgtattgtgagctgtatgatgttgagtatttacttagtgaagatagtgccaactataaagtgctagaatattttattaataatggattggttgatgtaaacaaaagatttcaaaaagcaaatagtggggacactatgcttgacaatgcaatgaaaagcaaagattcaaaaacaattgattttttattaaaaaatggagcggtatcaggcaaacgatttgggaggtga

SEQ ID NO: 479656 - DNA, 1362 bp, Shigella flexneri
gtgtccgttaaactcaggctacctcaggcagttttctctatcacgaaaaaacatcagccctatgaatttaagaatttcatttcagcctggctggataccgaacacattgatcgcggtcttctgacaaaagaatggcgaaaagggaatcgtgtttcacgcatcactcgcacgacttccggtgctaatgctggcggcgggaacctcaccgatcgcggcgaaggtttcgtccacgatctgacgtcactgacgcgcgatgtagccactggcgtactggcccgttcaatggacgtggacatctataaccttcatccggcacacgctaaacgcattgaggaaattatcgctgaaaataaaccacccttttctgttttccgcgacaaattcatcaccatgcctggcgggctggattattcccgcgccatcgtggttgcgtccgtgaaagaagcaccaattgggatcgaggtcatccccgcacacgtcactgaatatctgaacaaagtactgactgaaaccgatcatgccaaccctgatccggaaatcgtggatattgcctgcggtcgctcctctgccccgatgccgcagcgagtaacagaagaaggaaaacaggacgatgaagaaaaaccacaaccatctggcgcaatgacagatgaacaggcaacggctgaaacagtggaaccgaatgcaactgaacatcatcagaacacgcagccgctggatgctcagtcacaggtaaattctgttgatgagaaatatcaggaactgcgggcagaactccatgaagcccggaaaaacattccgcccaaaaatcctgtcgatgcagacaaattactggctgcctctcgcggagaatttgttgaagggattagcgacccgaatgattcgaaatggattcccggtcatcatatctcctcaaatgaagtcaaaaaaacggaaaatgaagtgcgacagactgaagataaacagcaccagaacagcgaaccggaggagggaacaccctgcaatcagactggcgaggataactgccctgactgtggcgcggtgatgggagacgcaacttatcaggaaacttttgacgaaaaaaaaccagatgaagcacaggaagaagagccgaagaaaacggaaaaagctgatgatttgttaccggagaacgctggcagcgatcagcataatgatagcaataatgaaactggcgaagatgaactcaactggaaaaaacaggtgttgattgcggcggtttacggtttatgtgcgaatcctgcgtgcatagcctatgcgcctgcaatccctgacatcgcaatgatgattgccaacaagcttgaaaattttggagtgaccagtgatgagcgcttacccgatttttga

SEQ ID NO: 479657 - DNA, 480 bp, Shigella flexneri; identical to SEQ ID NO: 475263

SEQ ID NO: 479658 - DNA, 978 bp, Shigella flexneri; identical to SEQ ID NO: 479654

SEQ ID NO: 479659 - DNA, 375 bp, Shigella flexneri; identical to SEQ ID NO: 475895

SEQ ID NO: 479660 - DNA, 987 bp, Shigella flexneri
atgaaggccagtgataaaccccgccagctggcggtcccctttgcgagtaccggagataaaaaccgtatcccggacaaggcgacacagcagaccagagagagcggtaatgctgcgtatgattcaggttttcctccggtgaccatgacagcggtctcagcgggaggtataccgccacacggcaaggattttaacggtctgatgtacgatattaccgcagcaatacggttcgcccaggctggcggtttgtacacgtataatgccggttttgcgggggccattggtggatatgcaaaaggagccattctcgccggagtcgcaacaacagcggtctggctgaataccacggacgataacctgaccgatcctgaaggctccgacagtgcgggctgggtaaatcttcttgaggatccgaaaaggatattcctgcggcagaagaacaatctgccagaccttcagaataaagggacggcacgggataatcttcaggtttacagtaaagagcagtcagatcaacgctatgttcatcgggaaggcgataaaataaccggagagctgaaaatccgtggtgttaatgcgctgaggattttcaacgaagcttttggcctgatttttcgtcgttcggaagagtgcctgcaccttattcccaccagtgaaggtcagggggaaaatggcgatattggtcccctgcgcccgttcaccattaatttgcggacgggtgaaatatccatgtcgcataaagtgtctgttggcggtggttcgcaggtcaatggtgcgctgggtatcggcgttcagaacgccctgggggggaattcaattgttcttggtgataatgacaccggatttaaacagaatggagacggtattctggatgtttatgctaatagtcagcgtgtattccgctggatttgcccctatatttccagacatctgttatcacttaacccattacaagcccgctgccgcagatattcccgtggcgagcgataa

SEQ ID NO: 479661 - DNA, 375 bp, Shigella flexneri; identical to SEQ ID NO: 475220

SEQ ID NO: 479662 - DNA, 843 bp, Shigella flexneri
atgctggaggaagaaaattcagcgcagccccgggagagaaacgcattcgctttctttcacgatattttcggaaccggaaatcagcatgacaggatgcgggactttgatccggacagccccgaaataaaattcagtgatcgcagggaagcccttgaactgatgacgcaaatcgaatcgaccgtgaccagcctgcaccgtgaggctgaagcacagttccgtcctgaactggaaaaaatcgtcaggggtattgaaacaggttttcgtggtacggccctgtacgccacagaaaatattgccggacgcatcaatgcccgtctggaggatgaaggtttcactgtaaaaatcagttttccggcagtcagccagttacagacccggctcgcagtaaaaacaaatctgagcgcgcttatggaggaaagaacggagacagtaacccgtcgctgtcgacaggatggtgtctggggtacgctttgtcgatgggcaaacaccagtgactggggctggaaagagtacagtgtggatgtgagccgcagcgtgatcaatatcaacaaggtcagagaggaagtgatgtcactgacccgggcatatttcggggagctgcaggcatccattgagcaggatattaaccagcccgtccgccaggaaatcgatgcctttttctgtacattcagggagaaagttgaacagctgcgtaacacgctgattcagagctctgaagatcataaacgcgatcagcaggcgcaggaacggctgaccgggcgtcttcaggcgttaaatgaaagggttcctgagctcattactgacagtaaggcgttaagggaagaactggagacaatgctgtga

SEQ ID NO: 479663 - DNA, 387 bp, Shigella flexneri
atgaaaaaagaatacgtctgtaaagacagtgaaatggcaaccgaaggggcgacagacctgtgggaaggctcacttatcgatcaactgataacggaagtcatacagagctcccattccagagcggcggcactggcggttgattctgccgccgcaaaactgatgcagaatgcggaaaatgtcagcgaatatctgtcattacgccatcaggggctacagcaaagcattcagtcactgcagtcgcatatcaccagcctgcttgcggatatccgggaaatcgcggactgtcaggagcaggtgaccgctgatgtcagaatggccatggaggagatcgatgccagaacccgggaattactgacggggtctgcacctcactggaagaggagctga

SEQ ID NO: 479664 - DNA, 336 bp, Shigella flexneri
atgatgcgggatcaactgcagaaagcctctgcggtgctggcggtgatggattacacccagatgaactcaaaagcggatgaagacgtccgtaaagagcttaatgccattgctgacgtatcagccggccgcctgtttgtgctggtcaataaatttgatgagaaagaccgcaatggcgatggggcagatgccgtacgccagaaagttccggcaatgctgaacagcgatgtgctgcccgcctcccgcgtttatcccggatcctcacgccaggcatacctggctaaccgtgcgcttcatgagttacggaaaaacggaacccttcctgttgatgaagcctag

SEQ ID NO: 479665 - DNA, 867 bp, Shigella flexneri; identical to SEQ ID NO: 461376

SEQ ID NO: 479666 - DNA, 843 bp, Shigella flexneri
atgctggaggaagaaaattcagcgcagccccgggagagaaacgcattcgctttctttcacgatattttcggaaccggaaatcagcatgacaggatgcgggactttgatccggacagccccgaaataaaattcagtgatcgcagggaagcccttgaactgatgacgcaaatcgaatcgaccgtgaccagcctgcaccgtgaggctgaagcacagttccgtcctgaactggaaaaaatcgtcaggggtattgaaacaggttttcgtggtacggccctgtacgccacagaaaatattgccggacgcatcaatgcccgtctggaggatgaaggtttcactgtaaaaatcagttttccggcagtcagccagttacagacccggctcgcagtaaaaacaaatctgagcgcgcttatggaggaaagaacggagacagtaacccgtcgctgtcgacaggatggtgtctggggtacgctttgtcgatgggcaaacaccagtgactggggctggaaagagtacagtgtggatgtgagccgcagcgtgatcaatatcaacaaggtcagagaggaagtgatgtcactgacccgggcatatttcggggagctgcaggcatccattgagcaggatattaaccagcccgtccgccaggaaatcgatgcctttttctgcgcattcagggagaaagttgaacaactgcgtaacacgctgattcagagctctgaagatcataaacgcgatcagcaggcgcaggaacggctgaccgggcgtcttcaggcgttaaatgaaagggttcctgagctcattactgacagtaaggcgctgagggaagagctggagacaatgctgtga

SEQ ID NO: 479667 - DNA, 387 bp, Shigella flexneri; identical to SEQ ID NO: 479663

SEQ ID NO: 479668 - DNA, 336 bp, Shigella flexneri; identical to SEQ ID NO: 479664

SEQ ID NO: 479669 - DNA, 366 bp, Shigella flexneri; identical to SEQ ID NO: 462994

SEQ ID NO: 479670 - DNA, 366 bp, Shigella flexneri; identical to SEQ ID NO: 462994

SEQ ID NO: 479671 - DNA, 519 bp, Shigella flexneri
atgttgtcattgttttacaataaaacagttattgcccggttaacattttcagtcattctgactcaaaatggacacattgcttttattggcggattacagggagcccctaaaaataccggacctgatgttattcggtgcgcaacccgggcctgttatgggattttcccaaaacggattatttttgaagcattttgtgcgttgatgaaagcttgcaatatctctgagtgtctggcagtcagtgagcacagtcatgttttccggcaattgagatactggtatcagaaacgcaaaacctttgttgcggtctatagtgatttctgggagtctgtagcaggaaaaacctgtggtgactggtacagattaccaacccaggtgattcgaaagccgctaagcgatatagccagtaaaaaacgctctgagtaccgaaaacgatacgctttgctggattatatccatgaaactactatccgctctttggatgcatatcctgtacactcagaacatcaggacttaaattaa

SEQ ID NO: 479672 - DNA, 366 bp, Shigella flexneri
atgattgatgtcttaggaccggagaaacgcagacggcgtactacacaggaaaagatcgctattgttcagcagagttttgaaccgggaatgacggtctcccttgttgcccggcaacacggtgtggcagccagccagttatttctctggcgcaagcaataccaggagggaagtcttactgctgtggccgcaggagaacaggtcgttcctgcctctgaacttgctgctgccatgaagcagattaaagaactccagcgcctgctcggcaaaaaaacgatggaaaatgaactccttaaagaagccgttgaatatgggcgtgcaaaaaagtggatagcgcacgcgcccttattgcccggggatggggagtaa

SEQ ID NO: 479673 - DNA, 291 bp, Shigella flexneri; identical to SEQ ID NO: 464287

SEQ ID NO: 479674 - DNA, 252 bp, Shigella flexneri; identical to SEQ ID NO: 475276

SEQ ID NO: 479675 - DNA, 366 bp, Shigella flexneri; identical to SEQ ID NO: 462994

SEQ ID NO: 479676 - DNA, 483 bp, Shigella flexneri
atgttgaatttactgttccatttaaaaatgaatggacgacagttctgttggttgattgtggggtctggttcgcctgaactgcgggagcatttacagtatcagattgacagtatgggcatgcatgatgatgtttttattgctgacaatgtttttcctgccgcccccgtatatcgggttgccagtctggtggttctgccttcagaaaacgaatcttttggtatggtgctggcagaagcatcggcattttctgtgcctgtagtggccagtcagattggtggaatccctgaggttattcagaacaaccagaccgggacattgttaccagcaagtaataagcacgcatggatgtgcgccctgaatgatttttttaatgaccctgggcgtttttatcagatggctcgccaggcaaaacaggatatagaagagcggtttgatattaataaaactgcgttaaaaatactcacattagcgaagcaaaagtaa

SEQ ID NO: 479677 - DNA, 228 bp, Shigella flexneri; identical to SEQ ID NO: 475144

SEQ ID NO: 479678 - DNA, 375 bp, Shigella flexneri; identical to SEQ ID NO: 475109

SEQ ID NO: 479679 - DNA, 375 bp, Shigella flexneri
atgaaagcgctggaaatggcatgggaaacccgtggtaagcccggcggggtgatgttccacagcgatcagggcagtcattatacgagcaggcagttccggcagttattgtggcgataccagatcagacagagtatgagccggcgcggaaactgctgggataacagcccaatggaacgcttcttcaggagtctgaagaacgaatggatgccggtggtgggttacgtaagcttcagcgaggcagctcacgccataacggactatatcgttggatattacagcgcactaagaccgcacgaatataacggtgggttacccccaaacgaatcggaaaatcgatactggaaaaactctaactcggtggccagcttttgttga

SEQ ID NO: 479680 - DNA, 375 bp, Shigella flexneri; identical to SEQ ID NO: 477282

SEQ ID NO: 479681 - DNA, 318 bp, Shigella flexneri
atgaaagagcttgatgctcttcatgaagttctacagcaaacagcaaggtcagacaccgcaaatgtagtaactcagacggggcaatcgcaagccaacaggataaggacgattggcgcaactgcgactcttggtgtatcaatggggcttgaggctggttttggtgcaatgatgcgtttgtatgagtccaaagccgcaaggaatatgcttcttcgtttggcaaacaccaaagcaggaacggcagcttatgaaagagcgttaaataatgctgtaaatgcgatacgccctatactttcaagccaaattacagcagaacaatag

SEQ ID NO: 479682 - DNA, 342 bp, Shigella flexneri; identical to SEQ ID NO: 475168

SEQ ID NO: 479683 - DNA, 213 bp, Shigella flexneri; identical to SEQ ID NO: 462242

SEQ ID NO: 479684 - DNA, 351 bp, Shigella flexneri
atgtgggcggcaacagcaaaagttcggcgctgttacatcagcctgccgaagcggcttaaagcgacataccgtcgggcaaaaaccatcacgctgatcgtggacaactacattatccacaaaagccgggaaacacagagctggctgaaggagaacccgaagttcaggggcatttatcagccggtttactcgccatgggtgaatcatgttgaacggctatggcaggcacttcacgacacaataacgcgtaatcatcagtgccgctcaatgtggcaactgttgaaaaaagttcgccattttatggaaaccgtcagcccattccccggaggcaaacatgggctggcaaaagtgtag

SEQ ID NO: 479685 - DNA, 336 bp, Shigella flexneri
ttgccgtctgcggggattgtgtggcgaagggctgcgccaactctgcgtatccgtgacccgcataaagatgaaaagatggcagcaatccataaagcactggacgaatgcagcgcagagcatccggtcttttatgaagatgaagtggatatccatcttcatcccaaaatcggtgcggactggcaactgcgcggacagcaaaaacgggtggtcacgccgggacagaatgaaaaatattatctggccggagcgctgcacagcgggacaggtaaagtcagctatgtgggcggcaacagcaaaagttcggcgctgttacatcagcctgccgaagcggcttaa

SEQ ID NO: 479686 - DNA, 366 bp, Shigella flexneri; identical to SEQ ID NO: 478923

SEQ ID NO: 479687 - DNA, 375 bp, Shigella flexneri; identical to SEQ ID NO: 13405

SEQ ID NO: 479688 - DNA, 327 bp, Shigella flexneri; identical to SEQ ID NO: 462700

SEQ ID NO: 479689 - DNA, 807 bp, Shigella flexneri
gtgctccgggtggcccgcagcggctggtatacgtggtgtcagcggcggacaaggataagcacgcgtcagcagttccgccaacactgcgacagcgttgtcctcgcggcttttacccggtcaaaacagcgttacggtgccccacgcctgacggatgaactgcgtgctcagggttacccctttaacgtaaaaaccgtggcggcaagcctgcgccgtcagggactgagggcaaaggcctcccggaagttcagcccggtcagctaccgcgcacacggcctgcctgtgtcagaaaatctgttggagcaggatttttacgccagtggcccgaaccagaagtggccaggagacatcacgtacttacgtacagatgaaggctggctgtatctggcagtggtcattgacctgtggtcacgtgccgttattggctggtcaatgtcgccacgcatgacggcgcaactggcctgcgatgccctgcagatggcgctgtggcggcgtaagaggccccggaacgttatcgttcacacggaccgtggaggccagtactgttcagcagattatcaggcgcaactgaaacggcataatctgcgtggaagtatgagcgcaaaaggttgctgctacgataatgcctgcgtggaaagcttctttcattcgctgaaagtggaatgtatccatggagaacactttatcagccgggaaataatgcgggcaacggtgtttaattatatcgaatgtgattacaatcggtggcggcggcacagttggtgtggcggcctcagtccggaacaatttgaaaaccagaacctcgcttag

SEQ ID NO: 479690 - DNA, 315 bp, Shigella flexneri; identical to SEQ ID NO: 475311

SEQ ID NO: 479691 - DNA, 228 bp, Shigella flexneri; identical to SEQ ID NO: 478559

SEQ ID NO: 479692 - DNA, 366 bp, Shigella flexneri; identical to SEQ ID NO: 462994

SEQ ID NO: 479693 - DNA, 522 bp, Shigella flexneri; identical to SEQ ID NO: 477184

SEQ ID NO: 479694 - DNA, 366 bp, Shigella flexneri; identical to SEQ ID NO: 462994

SEQ ID NO: 479695 - DNA, 375 bp, Shigella flexneri
atgacaaaagagctgacagggaaagccctgtttatggcgctcaggagccagcgcccacctgccgggctaatccaccactctgatcgaggttcacagtactgcgcatacgattaccgggtcatacaggagcagtttggtctgaaaacatcaatgtcgcgtaaaggtaactgttacgacaacgctccgatggaaagcttctggggaacgctgaaaaatgagagcctgagccactatcgttttaataaccgggatgaagccatctcagtaatacgggaatacattgagattttctacaatcgtcagcgtcgtcactctcgtctggggaatatctccccggcagccttcagggaaaaatatcatcagatggctgcttaa

SEQ ID NO: 479696 - DNA, 375 bp, Shigella flexneri; identical to SEQ ID NO: 13405

SEQ ID NO: 479697 - DNA, 375 bp, Shigella flexneri; identical to SEQ ID NO: 13405

SEQ ID NO: 479698 - DNA, 195 bp, Shigella flexneri; identical to SEQ ID NO: 475320

SEQ ID NO: 479699 - DNA, 195 bp, Shigella flexneri; identical to SEQ ID NO: 475320

SEQ ID NO: 479700 - DNA, 195 bp, Shigella flexneri; identical to SEQ ID NO: 475320

SEQ ID NO: 479701 - DNA, 249 bp, Shigella flexneri; identical to SEQ ID NO: 475177

SEQ ID NO: 479702 - DNA, 249 bp, Shigella flexneri; identical to SEQ ID NO: 464355

SEQ ID NO: 479703 - DNA, 783 bp, Shigella flexneri; identical to SEQ ID NO: 468198

SEQ ID NO: 479704 - DNA, 1029 bp, Shigella flexneri; identical to SEQ ID NO: 28131

SEQ ID NO: 479705 - DNA, 330 bp, Shigella flexneri; identical to SEQ ID NO: 476379

SEQ ID NO: 479706 - DNA, 639 bp, Shigella flexneri
atgacttcaaatgtaccaacaagctttgtccgcgcttatctgagagcgtcaacagcagaacaggatgcttcgcgtgccctggaaactatcgaggcttttgccagggaaagaggcctgatcatttgcagctactatattgagaatgaatccggcacccgtcttgagcgcccggaactttttcgtcttctgagagattgccaacaaaatgacattttgcttatcgaggatgtggacagactttcccgcctgtcaggggaagactggaatacgttgaagaaaatgatccggcagaaagacatccgggttatggcggtgaatgtgccgacgacatggattaattctggtatgagtgagtttgatagccggttgtttgcagccattaacgatatgctgctggatatgctggccgctgttgccagaagggactatgaacaacggcgggaacgccagaaacaagggatagagaaagcaaggaaagacggcaaatataaagggcgtaaacctaatcaagccagacatgatgcaattatcaggttgatagaaagcggtagctcctggacacaggtacagaaagtgctagggtgcagccgtggcacaatcagtagcgcaataaaacgtaaatcccggcaatcactctag

SEQ ID NO: 479707 - DNA, 663 bp, Shigella flexneri; identical to SEQ ID NO: 292705

SEQ ID NO: 479708 - DNA, 309 bp, Shigella flexneri
atgcataccgtacaaggggaaattgtcatggctttgaaactaaaccgtccgaacatcgatgaatctcagcaaccagcaacaaacgcagaaaccgcgcgttttatctccggcgctaccagagcgcctgtagtgggtaaaccaaagttgatgaacttcagactttctgcccattttgaggacatactggaagctgaagctatcagaacagggcagagcaaaacaaccgttctcaaagcggcgctggcgatgtacaacagccaggatgaaaacataaagaatcactggttgcttgagtctgcaaaattctaa

SEQ ID NO: 479709 - DNA, 978 bp, Shigella flexneri; identical to SEQ ID NO: 14693

SEQ ID NO: 479710 - DNA, 357 bp, Shigella flexneri; identical to SEQ ID NO: 14694

SEQ ID NO: 479711 - DNA, 447 bp, Shigella flexneri
atggctaaaatctatcaattccctcagggggaagaacgtgctaaattcaggaaagaaatagccagggagcgtaagaaacgttttgcagtgaaaacagggagcacttttgttaagtggcttggctggggatggttttatcttcgtcttcttgtcgcgagtgttttacattttatctttgtttttgtgttagccattcttggtgcgtttaaatgggctgtattctggctgggtggtattttgtgtgtcatcacctggtatcatctcgatcaccagttatggactccacaaaatctgactataccggtgattacggcaacctggattttgggactgctggctgagcctctgatggagctgctcaacaaaactatgccctggcacaagttacttgttcccgaacctgcggacgaaagcaccgagaacagtagcgagataagccagcaatga

SEQ ID NO: 479712 - DNA, 843 bp, Shigella flexneri; identical to SEQ ID NO: 14695

SEQ ID NO: 479713 - DNA, 282 bp, Shigella flexneri; identical to SEQ ID NO: 4289

SEQ ID NO: 479714 - DNA, 324 bp, Shigella flexneri; identical to SEQ ID NO: 4290

SEQ ID NO: 479715 - DNA, 246 bp, Shigella flexneri; identical to SEQ ID NO: 4291

SEQ ID NO: 479716 - DNA, 216 bp, Shigella flexneri; identical to SEQ ID NO: 4292

SEQ ID NO: 479717 - DNA, 330 bp, Shigella flexneri; identical to SEQ ID NO: 4293

SEQ ID NO: 479718 - DNA, 180 bp, Shigella flexneri; identical to SEQ ID NO: 4294

SEQ ID NO: 479719 - DNA, 150 bp, Shigella flexneri; identical to SEQ ID NO: 4295

SEQ ID NO: 479720 - DNA, 273 bp, Shigella flexneri; identical to SEQ ID NO: 4296

SEQ ID NO: 479721 - DNA, 546 bp, Shigella flexneri; identical to SEQ ID NO: 4297

SEQ ID NO: 479722 - DNA, 1167 bp, Shigella flexneri
atgggcgtttacgttgataaagaatatcgtgttaaacgaaagtcatcagaaaatggtcgtaagtcagctttcgctcacaaagtcaaaaatggtggaaagaactatagccgcaatgttcaggaacgtatcaaccgcaagggtgccagtaaggaggttgttgtcaaaatatctggaggtgctattactcgtcaggggattcggaacagtattgattatatgagccgtgagtcagagctaccagtgatgagtgaaagcggtcgggtatggacgggtgacgaaattctggaagctaaagagcacatgatagatcgtgctaatgatcctcagcatgtgatgaatgataaaggtaaagaaaataaaaaaatcacacagaatattgtcttctcgcctccagtttcagcgaaagtaaagcctgaagatttgctggagtctgtcaggaaaacgatgcagaaaaaatatcctaatcaccgttttgttcttggataccactgtgataagaaagaacatcctcacgttcatgttgtttttcgtatccgagataatgacggtaaacgcgctgatatcaggaaaaaagatttacgggaaattcgtacaggtttttgtgaagagttgaagttaaaaggttatgacgttaaagcgacccataagcaacagcatggacttaatcagtctgttaaagatgcacataatacagcaccaaaaagacagaaaggtgtttatgaggttgttgatattggctatgaccattatcagaacgataaaacaaagtctaagcaacattttataaagctaaagactcttaacaagggggttgagaaaacatactggggggctgattttggggacttatgttcgcgggaaagcgttaaagcaggtgatcttgtcagactgaagaaacttggtcagaaagaagtaaaaatcccggcgctcgataaaaatggtgttcagcatggctggaaaacggttcacagaaatgagtggcagttagaaaatctgggggttaagggcgtagacagaacaccttcagccagcaaagagctggtactgaacagccctgatatgctgttgaagcaacaacagcgaatggcgcagtttacgcagcagaaagcatccacgttacagtcagaacagaagctgaaaacagggattaagtttttgggcttataa

SEQ ID NO: 479723 - DNA, 213 bp, Shigella flexneri
atgacagctataaaaggaaagcggaaaccgcaacgcaatgtactctaccttcctacagaagttcgtgttgaagttgaaaaaattgcaattgaaataagtttcaagagggggaggcgtatctctgattctggttttgttcagtatcttattaaaaaatacaaatctcaggcgatgaaagagcttattcatggggctgatattcctgacgagtga

SEQ ID NO: 479724 - DNA, 648 bp, Shigella flexneri
atgttatctacttctacttttcttgcgcttgccatgcaatgcgctgccagcgttcatcctgacacaacgcacgaagtcgccagggttgaatcaggttttaacccatatgcgattgcggaaataataccaaaggttaaacacaaacctggtgataaaggcgtagtatcttactttcctgaatcaaaggaggcagcacttagtatcgttaaaaacattgaatcacggaaccatcgttactctgtaggacttatgcaaataacgagtaccaattttgcaaagttcggtacgacagcagagaaaatgtttgatccatgcgaaaatcttaaggtatcagaaaaaatactggttgactgttataaacgaggtggcgacttagtgcgcgggttgagttgctattattccggtaatccagaaacaggagtaaaaccagaacctgaatttaataatacaagttatgtacaacgtataggatttagccctcctgataacaaaaaaatttttattgttccctctgtaaaggaaatgattaaaaaggagaacaagacgactatcacacctgaagaaatcattatatatcctcaatacgccatacgtggcactgtatcgaatgaaaaggaaacaaaagatgtcgaaattaaatctgaataa

SEQ ID NO: 479725 - DNA, 297 bp, Shigella flexneri
atgtcgaaattaaatctgaataaacgttatttaacgctttctctatttatggctgcgttgatgctttgtgttgcagaacctgcttttgcggatgatgtgtctacgaagacaactggttttttacagaaaataattgattttttaacggatgttcgtaaaccggcaattacaattatggctcttgttattggatatattgcattattttcgcgtcaacataccgcatggatagtcccactcgttatcggaattatcatctttattgttgcaccatatattcctaactggcttgcgtaa

SEQ ID NO: 479726 - DNA, 2754 bp, Shigella flexneri
atgagtactctttttaaaggtcttacgcgccctgctttaataagggggctgggcgttccgctctacccctttcttggaatgtgcattatttgtgttctgcttggtgtctggattcatgaggctatgtacgccctcattcttcctggctggtatgccatcaggcgtgtaacacagtttgatgaacgcttttttgaccttctgtatctgagaacccttgtcaaagggcatcctttatcaaacaagcgattcagcgcagtccattatgcggggagccagtacgacgaagttgatatttcaaaagtggataactttatgaagctgaaagaccagtcttctgttgaagagttaattccgtactcttcacatatcactgacaacattatcgttacaaaaaaccgggatttgctggcaacctggcagatagacggtgcttactttgagtgtgttgattctgaagatttgtcaattctgacagatcagctcaatacgcttatacgtagctttgaagggaaatctgttacgctgtatcctcatcgtatcagatgtaaaaaggacgtcagaccagtatttaacagtaaaattccttttgtgaacagagtaatgaatgattattacgagtcattccctcagtctgaatttttcgagaataaattatttctgacgatttgttttaaaccttttactacggaagataaagtaacgcatttcttttcacgcggtaaaaaacaaaaagatatctttaaagagcctgttaatgaaatgaatgaaatttgcgacaggttgaacacctatctgtcccgttttcattcccgacgtcttgggctttatgaagatcatggggttgtttattcagatcagttatctctgttccagtatctgctttctggtcgatggcaaaaggtcagggttagcagtagtccgttttatacatatctgggaggaaaagacctgttctttggtaatgatgccggacaaattaccgcgtcagaccatgcccggtattttcgttgcatagagattaaggattattttcaggagacggatgccggtattctggatgctctgatgtatctccccgttgagtatgtcgtgacatcgtcctttactgcgatggataagcagtcagcgattaaggcgctggatgatcagatcgataagctggaaatgacggatgatgctgccaaatctttgctggcagatctgaaagtcggactggatatggtttccagcggatatatttctttcgggaaatcgcatcagaccctggttgtctttgcggattcaccggagcgtctggtgaaagacaccaatatcgtgacttccactctggaagatttggggctgattgtcacttattcaacactgagtcttggcgcagcttattttgctcagcttccaggaaattatacgcttcgccctcgtctgagtaccctcagtagtcttaattttgctgaaatggaaagttttcataatttcttttcaggaaaagaaaaaggaaatacctggggggaaaaactgattactcttcgggggtcaggtaatgatatctaccatctgaattaccatatgacgactgaacatcagaatttcttcggtaagaacccgacgctggggcataccgaaattctcggtacgtctaacgtgggtaaaaccgtattactgatgacaaaagcatttgccgcccagcagttcggtacgccggaatcattccctgcaaacagaaaactgaaaaaactgaccacggtttttttcgataaagaccgggcaggtgaagtcggtatacgggctatggggggatcttattaccgggtgaaggagggagagccgacaggctggaatcccgccgcactgccgccaacaaaacgtaatatcgcttttatgaaggacctggtgaggctgctttgtactctcaacagtgagccgctcgatgattaccagaacagcctgatttcagatgcggttgaacgtcttatgcaacggtcagatcgctcttatcctatcagtaaactacggcctcttatccaggagccggatgatactgaaaccaaacgtcatggacttaaagcccgtcttaagccgtggacgcagggggaagagtttggctgggtgttcgacaatcgggaagacacgtttgatgtcgataacctggatgttttcggtattgatggaacggagttcctggataataaggtgctggccagtgctgcttcattctatctcatctatcgggtcaccatgctggccgatggtcgcaggcttcttatctacatggatgagttctggcaatggatcaataacgaagcgttcagggactttgtttacaacaaactgaaaaccggacgcaaactcgatatggtgcttgtcgtagccacacagtcaccggatgaactgattaaatcacccattgcggcagcggttcgtgagcaatgcgccactcatatctatctggcaaacccgaaagccaaacgtagtgaatatgttgatggtttgcaggtcagggagctttattttgacaaaattaaagctattgatccgctgtcccgccagttcctggttgttaagaacccacagaggaaaggtgaaagtgatgattttgctgcttttgccagactggagctgggaaaagcagcgtattacttaccggttctcagtgcatcaaaaccccagttagaactgttcgatgaaatctggaaagaaggaatgaagccggaagagtggcttgatacctatctggaacaggcgaacctgatttga

SEQ ID NO: 479727 - DNA, 759 bp, Shigella flexneri
atgaaaaagcaaattatggcggcattcgtcgcttcactgattgttatttccggcgctcaggcagggatacctgttgccatcgacgccaaccctgaatgggcgattgaagccggacgatggacagaacgccttaagcaatgggcggaaacggtaaaacattacgaaaatcagataaatgcgtacaaacaggagctgctgtcaaaaacgggtatccgtgatgtgcagggactggtgcagtccgcacagtcagtgagtcaggaactgatgcagatttatgatcaggggaatgcttttattgacgattacattaaaaatcctgaaggggcgttatcggaacaggccaaatcgttattgtcggattacaaagtaacggatacctgccagaacctgggatattccggcgacctggtacggggatgtgaagcgacgttcctttctcaactggcaagcgtggaatacggtaacaagctggagagcaagcttcgtcaggacaaccagacgatgaaagaccttattgatcaagtcaaaaatgcgaaggatacgaaggccacgcaggatgcaacaaacgctgttgcacttgaacaactgaagttcgagaagctcaaatttcagtatcaaatgtatcgcgataagcagcgagatcttgcagaatataaagagaagatggctcaggcttctttcagaaaacagcaacgtgaagccgtgcctccttcttacagaaaagcttatatggcaatgaaatcatatgaggatgattaa

SEQ ID NO: 479728 - DNA, 228 bp, Shigella flexneri; identical to SEQ ID NO: 12387

SEQ ID NO: 479729 - DNA, 1134 bp, Shigella flexneri
atggggattgtcactggtataccggatggtactgatttatcaggtaatgtaacctctcccgcaaatgcgggaggtgttcctgggtttgattctgatttttttcagacaactcatgaagttatatttaacattctcaataagagtatatctggaaaattaagtgaatattcagatgtggcttatactcttggtaaatatggagtttctctgtatgttttatggtatgcctttactgtattagcaaggaaacaacagacacctgtacctgattttatctggaatatctgtaggttttacataatattgctttttgttaagaatacagggggaatacttacatcagcaacagatgctattgatggattgaaaaatacattggcagggggagatccgtgggtatggatggatcagttatgggtgaaggttatacaagttgcaactcttatttttgataaagatacatctactgtgcctgttgccggtgggattggtgctttattaacttatgttggtggtgttttggcattattgctttgttctatagtatttgcagctgctgaattaacattactattactttctgtcactgcgccaatatttatcatgtgtttgatgtttggtttccttcggcaaatgtttaatagctggctacagcttaattttagctcgttactggtttttctatttgcagcattagcactaagagctgggacatggcaattaaacatggcattaagtacgtctattgctacagcatcagaaaacaatcttcttcaaacgggagtaacttcattagctgctggcattttcatggcctggattatctggcaggcgaaaagttatgcttcacagattgcaggtgtgggtgttgaaggtgccatgcagggcgcagccgctatggggattggtgctggcgttttcggtgcatcccgtatggcgcgtggcgcacttggtatgggcagaaatgccggtattggtgcatggaaaggtctgcgtcgtcaggaaggcgggtttggtcagtctccgggaataacgggtaagaccgctaacctggccggacagggcgttaatattggtgccaaaaagcttcgtcaggcagctattgagagggcaaagaaaatgtatggagggtga

SEQ ID NO: 479730 - DNA, 714 bp, Shigella flexneri; identical to SEQ ID NO: 106316

SEQ ID NO: 479731 - DNA, 930 bp, Shigella flexneri
atgaaaatgaataaaggagcgttaattatggcgcttctgatggcggcgcacgtctgtaatgctgctgttcttccttcaggcagtcgctttgacccacgcaatcagatagtcagttataaccccaataataccaccataattaacagtgccgttggatacaccaccacactggtatttgatgaagatgaaacagttatcagtgccagaactggttttccgcagggatgggcggttaataaagaagataacctggtatatctggaagttcgtcctgttaaacagactgttcagaaaaataatacggatgaaaacggtaatacctcttctgaatccgtcagtgttgctcttgacccggaaaatgagcttgaacgctggcgaacgaatctgtttgttcgtaccacgaaacgtaattacagcatggagctgaacgccagaacgttccgacagccggagaaaattgcgtttgtggtgaattaccagtatccgcaggaacgccggaaagaacaggccgaaattgagaagaaacgcacagagactcttgccagacgcctggaggaacaggcaatcaaccgttccctggaaaatgcgaaatcgccccgtaactggcagtactggaagcgggttgctgaaggcagccaggatatcagccctgattatgcatatgacgatggtcgttatacctggttcggcttcagtccgttaaagaaaattcccagcgtctttgtgatgaacggtatgcaggagactcttaccaatcctgtgattaaacagagcggaagttttacggctgttggcgtaccggttgataagcgttttgttttacgtcttggtgagcaggtggtggggattgagaaccagggcttcggaaaagtacgtttaccagccggagatacggtatccccggatgttaagaaagaggtgatccagtga

SEQ ID NO: 479732 - DNA, 1206 bp, Shigella flexneri
gtgactgaacaggaaaataaaatcccgactgcaaccgaaattgaacagcagttacgggaacgcagacagaaagaactggaacaggccgggaagaccccggaagaagagcttggcaagccagcattgcagcttggtattgaaaaacttaaaaaatcacgtaaagggatgattatcctcgtcgtgggttttcttctgcttgctgccggtgtttctgtttattatatcccgtccattatccgttctgtgtcgtcaggggatgagaaacccgcaagtcagccgcttgcaaccggagaggctaaacgtcagaccggactgagcgaagatatcgatccttttaataccgcacagaaaaaaacagagaaaccagaggaagaaaaagtcatttcttctgaaaagactgaaccgccggaaaataaacagcagagcttcagccgtgcacttgacgtttctcttgatggcagccaggcaggaaacagcagcagttcagcgggaacgtcagtttcacatactgcggccagtgagccagaaagcgataaaaaggatgaagcaaaagcaaccgcacaggctacagaatctgcgccactggcgaaaataacgaaacttccatatgacccaaatttgtttatcccggaagggacatcaattccctgttcactggacaggcgttttgtttctgacctggcggggaaactggaatgtacggtcaacagtgatatatacagcgccagtggcaatgtaaaacttatcgaaagaggaaccgccgcaaaactgatgtataaggccgggtctttaaatcatggacaagggcgtgtgtttgttatggcttataagctacgtacccgcagtaagccttttattgatattcccctggttgactcacaggcggctggcgcgttaggcgaagccggtgcttctggctggattgacactcatttcagtgaacgttttcttggtgcaatgatggtcgggatgataccggatttaagtcaggcggccagtggtattgctcagaataacagggacagtcagacggactatacagctaacagccgccaggcttttgctgatatagcacgcgaagcattttctaatagtgtgaatatcccgccaacgctttataaaaatcagggagaaattattactctgattgtcggtcaggatctggatttttcaggtatttataaactgaaaatgaaagggggttaa

SEQ ID NO: 479733 - DNA, 1032 bp, Shigella flexneri
gtgaataacgaaaacagacatctgatttatgatgtggttaacgactatttttatcactggctgaatgagactgatggtgtcacggaaatcgctgttaaccgaccaggagaaatatttataaaggtcaggggaaagtggcaatggtatgaacaaaagatgagttacagtgattgtctttcttttgcatccacactggccgattttcatgacggcggttctgtgactcctgaatatcccctgcgttctgccacgcttccgggtggagaacgtgttcaggttgtgatcccaccggcaactgaaaaagatactgtttctataacaatccgtaagccgtcaggtatttttatcagtcatgacaaatttataaaacagggattttattcacgcgtcagtggtttaagtggtgactctgttatggaagataatatttctgctttaatcacttccggatattttgaacgggttatacctgaatcactgagtcaggggaaaacgatagttttctgtggaggaacagggtcaggtaaaaccacctttgcaaatgcctgtctggaatatataccgcatcatctgcggtgtatttctattgaagatactgatgaggcaaaattcagatttcataaaaaccatgtaaaactttactatccggcagagggggagagtaagattattacctcagcgagtcttctgcgttcctgttttcgtatgaatccggacaggattctgatgacagaaatcaggggagctgaggcatgggattttctgaaagcatcgagttcaggccatgcaggaaacattaccaccgttcacgaaagtagtcctgaatatgccgtgcttgggattgtccagcgatgttatatgaatcctgaatgtcagaatctaccattcaatgtcattttaagacgtgtactgagtaatattgatattatcatgagtattaaataccttgatgatgaagattttcggttcgcttccggcatttactacagacaacttcattttgatgattatttcagaaaactgaaggagtga

SEQ ID NO: 479734 - DNA, 1836 bp, Shigella flexneri
atgtctttaaaactccccgataaaggccagtgggtttttatcggtctggttatgtgtctcgtgacctattatgctggttctgttgctgtttatttcctgaacggaaaaacaccactgtatatatggaaaaattttgattccatgttgctctggaaaataataacagagagtaatatacgtacagatatcagactgactgccataccttctcttttgtcaggtatggtttcgtctctcattgtgcctgtttttgttatctggcaactgaataaaatggatgttgctctttatggtgatgcgaagtttgccagtgacaatgatttaaaaaaatcaaaactgcttaagtgggagacagaaaatgatacggatattctggtcggcgcgtataaaggaaaatatctgtggtataccgccccggattttgtatctcttggtgcaggaacccgcgccggtaaaggtgccgccattggtatccctaatcttctggtcagaaaacactctctgattgcgttagatccaaaacaggaattgtggaaaatcaccagtaaggtgcgtgaaatactgctgggtaataaagtttatcttctcgacccattcaacagtaagacacatcagtttaacccccttttctatattgatttaaaagcagagagtggtgctaaggatctgcttaaactgattgaaattctgtttccgtcttacggcatgacaggggcagaagcgcactttaataaccttgctggtcagtactggacaggactggctaagttgcttcatttctttattaactatgagccgtcctggcttaatgagttcgggcttaaacccgttttctcaatcggttctgtcgtcgacctgtacagcaatattgacagggaactgatactcagtaagcgggaagaactggagggaacaaacggacttgatgaaaacgcgttgtatcatttgcgcgatgccctgaccaaaatcagggaatatcacgaaacggaagatgaacagcgttcaagcattgatggttctttccgtaagaaaatgagcctgttttatctcccaaccgttcgtaaatgtactgatggtaatgatttcgatctccgtcagttgcgacgggaagatatcactgtttatgtcggtgttaatgcggaagatatatctctggcttacgattttctgaacctgtttttcaacttcgttgttgaagtgacattgcgtgaaaatcctgattttgatcccaccctgaaacatgactgcctgatgtttcttgatgagttcccttcgattggttatatgccaattattaaaaaggggtcagggtatattgcaggttttaaacttaaactgctgacgatttatcagaatatcagtcagctaaatgaaatctatggtattgagggagccaaaacgctgatgagtgctcatccatgccgtattatctatgctgtcagcgaagaggatgatgccgcgaagatatcagaaaaacttgggtatattacaaccacatcaaagagcacaagcaagagccggggacgatcagcttcacagggcgaatcagaaagtgaagcccgaagagcactggtgcttccacaggagctgggaacgctggactttaaagaagaatttatcatcctgaagggggagaaccctgttaaagcagaaaaggcactttattaccttgatccgtattttatggacaggttaatgaaggtcagtcctaaactggcatcattgacgatggaactaaataagacgaaaaaaatatttggtgtgaaagggcttaaatatccgtcaaaagaaaaaatgctctccgtaggggagctggagtctgaggttttgctatga

SEQ ID NO: 479735 - DNA, 414 bp, Shigella flexneri
atgaaaaaaatacttatgatcagtattcttctcctcacagcctgttcctctccacctgaaccgccacaggttgaatgggaaagacggcctgaagttatgaatacacaaataatgaactggacaccaacatctaacgttattaaatcagataatataaattccttatggagtaaggtgttgcctgattttaaaccagaaaatcgtctttacgatgattctgttttttatgcagttgcccactctgaaaaaatagttgtaaggacatcttcttttgatagttactggtcagcgaaagactggctaagaaaaaatggtgcaacaggtgttattgaatatcagccactaaaaagatggttgaataatgactatgttgaaatttatctgtcaagaataaatgttcagaggttaccatga

SEQ ID NO: 479736 - DNA, 303 bp, Shigella flexneri
atgaaaaagatatgcaaaagtctaatcgtaatttttactgtgtcctggctgacagcacctgcgtatgcatctgacccttgcgcttcggtactttgcttatatggaaaagcagtcgggcaaggtggagggagtgagtgcagaagtgctgaaaaggatttttttaatattctgaaaaagaaaaaaggaagcattcgctggagtaaaacttttgatgcccgtaaagcatttctgaatcagtgttcaacggctgatcctgctgctatatcgaaaatcatgagtaagttcggtaagattaaggggtag

SEQ ID NO: 479737 - DNA, 258 bp, Shigella flexneri
atgaaaaaaaaagaaaagattgattttcttaatgcaataaaagcagggcactctggctttatagctggtaatcctgctcatgcattggatgataagactatgaacgccatcattcataactacgaggcaacgattgcgcccggtaaagcaggtaactgcaaagaaactcctctcacaaagtattgttcgaggactatgccagagcgtatttcagttgaagaaattaatgaggttaaaatttatccagaattcttctga

SEQ ID NO: 479738 - DNA, 435 bp, Shigella flexneri
atgatgaataaatttagttatgtcaatcgtatgcttcggcaagtttttgtttttagttttatcacagccccatcaatatctttatttgttgtttttatgtttttttcgtttaataactcaactgctggttcatttttaaaagaggctagggggcttataaccgatactccttctgataaggttaacgtctgtcttttcgaaaagggcgtaccacaggatatggagttgacaaactccacaactgaacatgtattaaaaaataaatgtataacaacgttagttgatgctgctgactggcaggaatctgttgacggttctattcgatatttttattggtcgtcagttgttattggctttgtggtctggtttacctttaatttttgtgcactggaagaactattttatcgtagaaagagaaaaggagacgttgaatga

SEQ ID NO: 479739 - DNA, 537 bp, Shigella flexneri
atgaggatttttttaagcgtgattttattcctgtttactgcttttcagtctgcaaatgcaggtggaatacctggtgctttagcaggaatactttctacattaaacctggaaatccaggggaaagttattcgtgttctcgatggcgacactatagaaattaaaacactacccgcaaaaattgttgtgtatgaagttccgatccgagtccgattgataaacatcgatgcccctgaaaagaaacaaccttttggacgctggtcaactagtcagcttaaaactctggttgcaggtaaacaggtgacagtctcttattcacataaagaccgctacggacgcattatcggtcatgtgttcacgacgaacggcacggatgccagccgctttatggttcagtctggcgctgcatgggtatatgaacgttacaacgtggatgagtcattaccggctctacaacgggaagctcaggaacaaaaacgcggtttgtgggccgatgcaaatccggttccaccgtgggagtggcgatacaaacataactaa

SEQ ID NO: 479740 - DNA, 462 bp, Shigella flexneri; identical to SEQ ID NO: 79302

SEQ ID NO: 479741 - DNA, 264 bp, Shigella flexneri; identical to SEQ ID NO: 292724

SEQ ID NO: 479742 - DNA, 180 bp, Shigella flexneri; identical to SEQ ID NO: 79306

SEQ ID NO: 479743 - DNA, 822 bp, Shigella flexneri; identical to SEQ ID NO: 14689

SEQ ID NO: 479744 - DNA, 525 bp, Shigella flexneri; identical to SEQ ID NO: 14690

SEQ ID NO: 479745 - DNA, 513 bp, Shigella flexneri
gtgacggcatccctgatgctgaaaaagcttgccagctatcccaagcaaaacggacttgccaaagcactgagagaaattggccgcattgagcgaaccctgtttatgctcgactggttccgcgacccggctctgcgtcggcgggtacaggcggggctgaataaaggcgaagcccgtaacgcgctggcgcgtgcggtatttatgcaccgactgggagaaatcagggacagaaaaccggaaaatcagagctatcgcgccagtggactgacgctgctgacggctgccatatccctgtggaataccgtctatatggaaagagcggtcgatgccctgaagcgtaaaggggtgaagatcaacgagcaactgctgtcgcatttgtcgccgttgggctgggaacacatcaatctgacaggtgattatatctggaaaagcaaccggataccggcttctggtaagtttcgtcggctaagaccagctaaagtcgaaaggtcaaaaaacagccttaacgtacaataa

SEQ ID NO: 479746 - DNA, 276 bp, Shigella flexneri
gtggcttctgtttctatcagctgtccctcctgttcagctactgacggggtggtgcgtaacggcaaaagcactgccggacaccagcgctatctctgctctcactgccgtaaaacatggcaactgcagttcacttacaccgcttctcaacccggtacgcaccagaaaatcattgatatggccatgaatggcgttggatgccgggcaaccgcccgcattatgggcgttggcctcaacacgattttacgtcacttaaaaaactcaggccgcagtcggtaa

SEQ ID NO: 479747 - DNA, 660 bp, Shigella flexneri
atgagcactatcacaagagaatggctgcagcaggctatcaacgattatgaaagcgttcgtgatgagcttcctttcgggcttgatgattaccaggggaatatcctggctgccctgcgtatcgcactggcatcgctggaagcagagcctattggcgcattccacattgcagaacagcaagttgacggcacaagtgactacatcaaggatggggaatggcctattgataatgggattattgaagtctacgccgctccgccagtaccggtagtacctgctgcattacctgagaacgacgatgaggatgggcatgacattgattatcttgagccatctgaagtttacgcgcttgggcgaacagctggctggaacgcctgccgcgccgccatgcttcagggtaaatccgaacaaccacaaaacgcacaacaaaatattccggaaaatattcccggtggcaactctccggtaactcctgatggttggataagctgtagtgatcgaatgccaaacgaagaagatgttttggtttattgctcagacacaaaagagcagatggtagggtttcacaaaggtaaagggttatttcaattcttttacatgaatggtgttgagggggtatgtgagccgtcacactggatgccgctaccagagcctccactttga

SEQ ID NO: 479748 - DNA, 675 bp, Shigella flexneri
atgaaacaaatgacactaattgagatggatggatttctgaaaggtaaatgcatcccccgagatttaaatgttaacgaaacaaacgctgaatatctggtgcgtaagttcggtgaacttgaatcaaaactagaaacggcgttgcgggagtgtcgttctgctggaatcacgattgataaccttgatgccaagtgcgcggcgctggcagcggagagtgcggtgatgaaggcgggacattcatatttctcatatggctctgagcataatttcgaatggcacaaaactgctgaggaagctatcgaatcggctgaggctgcaattgacgactatcgcggtgatgcttgcgatggatggagcgaagaggtcgatagtatttgctggggaatcatcatgcaatcgtcaacgaaggttggcgaacgaccacgcaacgaggatgactgttgcgatcctgcgatcgatacgatttgcgattatgcgcttctgcctaatatcgaaaccccagccaccgatgctttcctggctgaagtccgggctaaggcgtttgatgacctttgcgcggcgttcgttaagcacgcgtcggtgtccgggctggacgatggcgactgcgttacggtgaaagaggcgactgacgcactgctgcattgtgcggaacaacttcacaagggagtgcattcatga

SEQ ID NO: 479749 - DNA, 450 bp, Shigella flexneri
atggaagaacaagcaaacaagattctcgtagaactactgcaaaaagccagcaatggaatagatgcggctgtttcatttagccaggcacagattcctgatgttgttcatcagttgctgctatggaatatggttgacagtctgattaaaacattaatagccattctaacaatcccactggttttctggtttatgaagaagcagtgccaaagagttgagacaggtaaaatcggtgatgaaggatactcatgggagaggggaaatcccaaatacaggccgacaatggtttgggatagcaaaggtgatattaatcttcttatcatgccattggttggagttttggctctgtgggggatttttattattggtgcagtaaccaatatgacttggttaaaaatttggctggctccaaagctttaccttatcgaatatgcagcatcattggttaagtaa

SEQ ID NO: 479750 - DNA, 831 bp, Shigella flexneri
atgggcgtcgttaagttagctgattacaggcctcaactggaggtcgtggagcatcgcgtggcagaactcgaagatggctacactcggactgcaaacacactgttagaagccgccatgctttctggacttactctacatcagttactgattgttatggctgtgtggcgcaagacatacggttacaacaaaaaaatagattggatcggaaacgaacagttcgctgaactcactggcatggcaccaaccaaatgctctaccgccaaaaacgagcttatcagaatgggagttctcattcaggtggggcgtcaagttggtatgaatacaaacatttccgagtggaaaacgaaagttaacggattcggtaaaacatttaccaattcggtaaaacaaaccttcaccaaatcggtaaaaagcaatttaccgaatcagtcaaacacaaaagacaatatacaaaagacaataaatacaaatacccccttaccccctaacgggggcggcgatgggcaggttaaacctgaacgtcgcaaggcagaacgaatcgactacgaatccttcctgaacgcctacaacaccgaagtcggtgacagactgccacacgctgttgcggtcaacgagaaacgcaaacgccgcctgaagaaaatcatcccgcaactgaaaacgccaaacgtggacggtttcagagcgtatgtcagggcgtttgtgcatcaggccaagccgttttacttcggagacaacgacacgggctggacggccgattttgattacctgctgagggaagactcgttaacgggggtacgggaagggaagtttgcagacagggggattgcatga

SEQ ID NO: 479751 - DNA, 1377 bp, Shigella flexneri
atgaaacaggatatcgaagcgagcgttatcggtggcctgctgattggtggattaacaccaaccgccagcgacgttctggcaacgctggagccggaagcgttttcaattccgctctaccggaaagccttcgaggttatccgcaagcaggcgcgaaacagaaacctaatcgacgcgctgatggttgccgaggcgtgcggagaggagcatttcacgtcaatcctgatgaccagcaagaactgcccgagtgccgcaaacctgaagggatatgctggaatggtcgcggataactatcaccgccgtctggtgctggaaatcatggatgaaatgcgtgaaccaattcagagcggaaccatcgacgcatcgagtcaggcgatggatgagcttgtaaagcgtctttcagccatcagaaagccccgtgacgaagttaaacctgtacggttaggggaaatcattactgactacactgacacgcttgacaggcgtctgaggaacggagaagagtccgataccctgaagaccggaatcgaagaacttgatgccatcaccggagggatgaacgcggaagacctggtgataatcgctgctcgtcctggtatggggaaaaccgaactggcgctgaagattgccgaaggcgttgcaagccgcgttattcctggttctgacgtccggcgcggagtgttgattttctcaatggaaatgagcgcattgcagattgcagagcgaagcattgccaacgccgggaggatgtcggttagcgtgctacgaaatcctgcatcgatggatgacgaaggctgggcgcgtgttgctaacggcatgagtcagcttgcagatttggatgtatgggtagtcgatgcctcgcggttatcggtcgaagaaatacgctcaatcgcagaacggcacaaacaggaaaatccaaacctgtcactcattatggcggattatcttggcctgattgagaagccgaaagcagaccgcaacgacctcgcaattgctcacatctccggaagcctgaaggcgatggcgaaagacctgaaaacgcctgttatctccctgagtcagctttcgcgcgatgttgagaagcgaccaaacaaacgcccgacaaacgcagatttgcgtgattcaggaagcattgaacaggacgcagactcaatcatcatgctctatcgggaagcggtatatgacgagaacagtagcgccgcaccatttgctgaaatcattgtgacaaaaaaccgttttggctcgcttggtacggtttaccagcggttctgcaacggacactttgttgcatgtgaccaggatgaagccagacagatttgcacagcatcaaatgcgcccgctgcgcgtggcagacgatatgcacaaggggctgacgtatga

SEQ ID NO: 479752 - DNA, 207 bp, Shigella flexneri
gtggctgagtttatgctcgtcgcatgcaaatgcgttggcgttggatggattcttctgacgttttttattgttctgcatagctacattcgtcttgtgaatgacggtaaagacccatggtatacgttgtttggcgctgcatttgtctgggtgattatcggtgttatgcctgttgtcgtagcaaaaatggcgtggcgttttgttagttga

SEQ ID NO: 479753 - DNA, 276 bp, Shigella flexneri
atggacgaatcaagaaagcagtttttggagttcgcgaaaaagcaaaatttaagccttgcatatggtgattgcgggtatgtttattcatccacggaaatggcatggagggcatggcaggcatctcgcgcagctattgaaataaccgcgccaaagtttatcgacagcagagaagcattagccaaagggtttactgttgattattccaatggcttcggtgatgcaatggatgcttatgaggaaaacatccgcgctgctggaatcaaagtgaaggagtga

SEQ ID NO: 479754 - DNA, 186 bp, Shigella flexneri; identical to SEQ ID NO: 24262

SEQ ID NO: 479755 - DNA, 171 bp, Shigella flexneri
gtgattgacccaaatcgaagttacgaacaagaaagcgtcgagcgagctttaacgtgcgctaactgcggtcagaagctgcatgtgctggaagttcacgtatgtgagcactgctgcgcagaactgatgagcgatccgaatagctcaatgtacgaggaagaagacgatgagtga

SEQ ID NO: 479756 - DNA, 270 bp, Shigella flexneri
atgagtgatttctctgagcttatttccttcaaaaaagacagagaagaaatgcggactgaatctgtctattacgttcaacaccggaataaacgctctgtgcttgatcaggagctggttattaccggagacctggcattcagaacatataaggccagcatggaaatgaaggatttccctaaatgtggttctgaaagagaagccgcgttaaagctggcagagtggatgcagagaatggctgctgcaattgagaattactggagcgaaccataa

SEQ ID NO: 479757 - DNA, 519 bp, Shigella flexneri
atgggcataagagaactaaaccttaccaaagagcagcacgagtggctgaatggctggcttgaactgtggggcgcatgggtttattcaggtcgtctggaaaagcgcatgagcagcgtaatagcgaagctcatggagagcgtagagccgggaagagttatgacaaggccaatgtgcaatgatgatgatggaatgttgatttctcaggtcgtcgattccgtcatgtacattgacaaaaaagcctttggcatcctcctcagctactacgctcatggttcatctaagcgagcaattgcatcctactatcacgcgactgcaaagccacgcaagatgtgtggacgtggtggcgagggatggagaaaaccttcactggcaacctgtagaaacgaaattgacgacatcctgaaagcgtcattatttgttttgtaccaaccaatgcaaaatgctttcaaaatgcgtaaacgtgttgagaaagttaagcatgttgctgttaaaaaccttgacatgcaattagccatttag

SEQ ID NO: 479758 - DNA, 276 bp, Shigella flexneri; identical to SEQ ID NO: 21796

SEQ ID NO: 479759 - DNA, 2202 bp, Shigella flexneri
atggctgatgatagaaagatggctgactggcatcgcaaggtgctgtgcaactttgataatgcctggtcagcaacgcaggatatgcgtgagcagattattgaggctcaacgtttcgtccgggtgtccggcgcacagtgggaaggcagcacaaacgctggttactcatttgatgaaggcaggtttgagcattacccgcgttttgaactgaataagattgcccgtgaatgtgatcgcatcattggcgagtatcgacagaatcgcatcagcgttaaattcaggccgaaggacgacaaggcatcggaagcgttagccgaaaagatgaacggcaaattccgcgctgactatcaggaaacatccggtggcgaagcgtgtgataacgcatttgatgatgccgtaacgggcggattcggttgtttccgcatgtgtgccgattacgaagatgaaatggatccgagtaacgagcagcgccgcatcagccttctcccggtttacgacccagcgacatgcgtcttcttcgatcaggacagcaagcaatatgaccgctctgatgctatgtgggctatggaaatgttctccatgacgcctaaagcgttcgaggctgaataccctgattccatcgcggcaagcctttttcgtgatgacactggcactcaatatgactggtcaacgccagatgccatctatgttggacgctactacgaagttcgcatagagaaggtgaagctcacagcatggcgtaaccctgtcagcggagaaacggcaatctatgatgaagagcaaatcaaagatattgtcgacgagctgaccgatggtgcattcgaactgattggtgagcggacagtgaagaaacgccgagtttattgcggtcttctgtctggcgctgaatggctggaagaaccgaagcgtattccgggcgaacatattcctctcatcccggtatatgggcgtcgttcatttgttgataatcaggagcgaatcgaaggccacgcagcaaaagcgatggatgcacagcgtcttgagaacctgatggtttccatgattgcagataacgccactcaggctggcggtgatggcattcctgtagttgatgttgacatgattcctggtcctctcgccactcattgggcggagcgcaacaaaaagcgcccggcgttcctgccgatggtcagtctgaaaaacaaaaacggagatattactgcgcaggctcaggtcagcagttatacgcctccgacacaaatgcctccagctcttgccgggctattgcagtacaccggaacggctattcagcaaattacaggtgcgtcgcagcttgagaacatgccgagcaacgtcgccaccgataccgttgatagcatctttaaccggatggatacgcagtcctatatctacatggacaacatggctaaatccatgcgccgtgctggcgtcgtgtggctttctatggctcgtgaagtctatggcagcgatacgccaatgcgcatcgttaatgaggatggcagcgatgacgtggcgctgatgactggtgaagtggttgaccgtcagacagggcaggttatcgcgcttaacgacctttcgcagggtaactatgaagtgactgtcgatgtcggtcagtcgttcgctactcgccgtgatgcaacggttaagtcgttactttccatgctggcacttatcccgccaggaacgccgaagcatgaccttgtatcgtcgatgattctcgacaatatggacggcgaagggatggacgaccttaaagaatacaaccgcaatcagttgcttctgtctggcgttatcaagccgagaacgcctgaagaacagcagatggttgaacaggcgaaacaacaacaggccagtcagccagatccggctatggttgcagcgcaaggtcagcttcttgctggtcaggctgaattgcagaaagctcagaacgaacaggcagccattcaggttaaagcattccaggcacagactgatgctcaggttgcagcggcaaatgttgtgaaaatcctcgcatctgccgatagccagcagaaatctgatatccgcgaggctctgaaactgctcggacagttccagcaacagcaaggagacaatgcccgtgctgatgcagagcttgtcctgaaaagtcaggcacagggccatgcgcagcgcatggacatcagcagcatcctgcaaaaatcaactcagaaacaaccacagcagtaa

SEQ ID NO: 479760 - DNA, 894 bp, Shigella flexneri
atggaccagatggcagaaaacacaccagaagttgaaatcgaaaccgacgcgtcagagcagattcctgatgatgtcgaactggctgaagaagtcgaaacagaagatggcagtgagtcctccggcaatgatgcagaggaagctactgaaactgatgacgacgaatcagaacaggaattctactttggtgacgaaaagctggattcgccaaccagcgaagatggcgcagagcatggactggtaaaacacctgcgcaagacgattaaagagaaagaccgcgagctgaaagagctgatgcgtcagtctcagaaacccgtcgagcagcagccggtaatcactcaaccaccgcgaatgccaaaactggatgatgaggacatcgggttcgatgaagaaatctaccagcaacgcatggctaagtgggcagaggataacggcaagtaccagcaacaggagatggctcgcaagcagaaggagcaggagcttcaggctgcctatcaagagcgattatccaaatatcagcaacgtgttaaggctctcaaagttcctggctatcaggaagctgagcaggccgtactcgaggaaatccccatcgagacacaaaacgcgatcctgtttgagtcagagaagccggaaatcgttgttctggcactcggtcgcaacgctgaactgcgcaagcaactggcagaagctaccaaccccgtagcaattggtcgtctgctggaacgtatcgaatcgaaggccagaatcatgccaaaagcaaaaaccacggcagccacaaccccgacagttaaggggagcaacggcgcagtaatcaataacctcgacaaactgaaagccaaggcgctggaaactggtgactggacgccgtatttcgccgctaaaaaggcaaaaaaataa

SEQ ID NO: 479761 - DNA, 1254 bp, Shigella flexneri
atggctaaccaattagcaaaagaccttgaaatcatgttcgaaaactacgttgaaggctttgaggccgcctgcgtagtttcccgtaacgctaaaaaattccgtcccggtgatacagcaatgcagcgagcaggtgatgttctgtatcgtccgcagcattaccacatgaacattgaggaaggcctcgacctcagcagcaaaacgccaacagcactggttcagcgccttgttccttctgtgttcaaggagccgaaaaacattctgtacactctggatgcgcgtgaaatgcgtgacccggaacataaaactgaagctggtcgcgccgcaggtatgcgccttgctgcacagattgactctgacctgatttccatggtcacgcagcgtgctactaacgtgatcacaatggctgactcaaccactggttcacagggccgtgatttgtggaactgtgcggcaggtattgatgccaccatgacggcgattggtgtaccacagggtatcaaccgccgctctttctggaaccccttcaactacaaagaccttgctggcgagcttggtcaccgtgcctatgctcagggcgcaaccctgacagcatacgaaaaagcgcagatccctccggttgcgtccttcgatagctacaagaccgatatttctggtcgtgttccgaagggtacagcaacttccctgacgctggcggctgaacctgcgcacaaggttgaagcgaaagatgccaacgatatgccagtggataaccgacaggggactattacggtatctgcatctgggttgcaggttggcgatgcgttcaccattgctggcgtgaattctgtacaccagatcaccaaagacaccaccgggcagccgcaggtattccgcgttctggcagtaagcggaacgacagtaactatctccccgaaaattctgccgcctgacaacgcagatgtcgccagccgtccatatgtaaacgttgatgctaacgcggcaaatggtgcagcaattaccattctcaacaagaatgccgcaccggctaacctgttctgggctgatggttctgttgagctgatgtacggcaaactggcgttcccgactggtcagggtccacaggtaatgacagcaaccaccgagcagggcgctacgctgatcatgtcttacgccttcgaccacatcaaaggcgtaaccactgctcgtttcaccactctgtacggttgctctgtacttgttcctgaatatacgggcatcgttattgccgggcagtaa

SEQ ID NO: 479762 - DNA, 189 bp, Shigella flexneri
atggcacgaacaatgctctataagcctggcaacatgatcacctgtggtcagtttgctgtcgattacatcattgttgatgacgaagaagttaaatctcacctgaaaaaaggctgggtaaaaactcctgaagaaaccgcaacgaagcataaagtggctaaggcggaagaagatggcgaaaacgaagggtga

SEQ ID NO: 479763 - DNA, 462 bp, Shigella flexneri
atggcgaaaacgaagggtgatctcgttcttaaggctttacgaaaagccgggctgtattccaatgccacgttgacagatgctgaccctcaggcaattgaagatgccattaatgacctcgaagacatgatggcagcatggcaggctaaaggtatcgagcttgggtatcagtttgctgatacagaaaacggcatcatgccgttaccggacgatgattcaggtatccctgcatgggcaaatgatggcgtcgctttgaaactcgctgtgcaagtgtgcatggataacgtcattcagccgtcagacgctctccttaccgctgctgacagtgcatatcagacaatctgcatcgctttaaccaaaataccaccacttgagcggcgaaatgacatgcctcgcggtagtggtaacaaaagcgcgtttacgtggaatcggttttacatcgagaaagatgatccgagtacgtga

SEQ ID NO: 479764 - DNA, 474 bp, Shigella flexneri
atgcacgggcatgattatgagcatcatcaccatcatcacgatcacgaacatcaccacgaccaaggacatcatcaccatcacgaacatggcgagtatcaggatgcccatgcacgagcccatgccaatgacattaaacgacgctttgatggtagagaggtcatcaactggcaaattttgttatttggcttaaccggtggctttatcccctgcccggcagcaattaccgtgctgttgatatgcattcagttgaaagccctgacactgggcgcaacactggtcgtcagtttcagcattggcctggcgttaacgcttgtcaccgtaggcgttggcgcagcaatcagcgttcagcaggtcgcaaaacgctggagcggatttaacactctcgctaaacgcgccccctatttttccagtctgttgattggcttagtcggtgtgtatatgggcgtacatggcttcatgggcataatgcgataa

SEQ ID NO: 479765 - DNA, 210 bp, Shigella flexneri; identical to SEQ ID NO: 9340

SEQ ID NO: 479766 - DNA, 543 bp, Shigella flexneri
atgagtcacatcacaacggaagatccagcaactttacgcctgccctttaaagagaaactctcttacggtattggcgacctggcctctaacatcctgctggatatcggtacgctttatcttttgaagttttataccgacgttctggggctgccaggcacctatggcggcattatctttttgatttcaaaattctttactgcgtttaccgatatgggtaccggcattatgttggattcccgacgcaagatcggtccaaaaggtaagttccgtccttttattctgtatgcgtcattcccggtcaccttactggcgatcgccaactttgtcggcacaccgtttgatgtcaccggtaaaacggtgatggccactattctgtttatgctttacggactgtttttcagcatgatgaactgctcctacggcgcaatggtcccggcccaacgaacgcgcctcactggcggcatggcgtcagggcggcgctacgctgggcctgctgctgtgcacggtgggattcgtgccagttatgaatcttatcgaaggtaa

SEQ ID NO: 479767 - DNA, 207 bp, Shigella flexneri
atgattgaattgccgttgtatttgtatgttgtgtattgttttgcttttggaatgacattttttgtcattggtaatattgtattgtcatctttttttaaggaggggtggcaggacttaacaaattttctttattttttattgcctatgcatagggatgtctttaaatattttgataatttactttctgggcatggtcgggcaatttaa

SEQ ID NO: 479768 - DNA, 210 bp, Shigella flexneri; identical to SEQ ID NO: 476448

SEQ ID NO: 479769 - DNA, 189 bp, Shigella flexneri; identical to SEQ ID NO: 475724

SEQ ID NO: 479770 - DNA, 207 bp, Shigella flexneri; identical to SEQ ID NO: 476087

SEQ ID NO: 479771 - DNA, 210 bp, Shigella flexneri; identical to SEQ ID NO: 9340

SEQ ID NO: 479772 - DNA, 210 bp, Shigella flexneri; identical to SEQ ID NO: 9340

SEQ ID NO: 479773 - DNA, 189 bp, Shigella flexneri; identical to SEQ ID NO: 463227

SEQ ID NO: 479774 - DNA, 276 bp, Shigella flexneri
gtggcttccatttccatcagctgtccctcctgttccgctactgacggcgttgtgcgtaacggtaaaagtactgccggacatcagcgctatctctgctctcactgccgtaaaacatggcagctacagttcacttacaccgcctctcaacccggtacacaccagaaaatcattgatatggccatgaatggcgtcggatgccgggcaaccgcccgctttattggcgttggcctcaacacgattttccgccatttaaaaaactcaggccgcagtcggtaa

SEQ ID NO: 479775 - DNA, 297 bp, Shigella flexneri
atgtttttaatttcaattattcaaatgttctcggttatgattataatgcttaatataaaaataaaagatgcatttagagcaattattctgcttttacttctattactatccatggttatatctattgaaataagcagcattatatcaataggtgagtacatacccacacttgcactagcaaatatatcagagacaaatagtgttggctggaaaataaaactactaccttttcttgtgttcttatcatttatgattgcatcattgattttgaaaagattgataaaagaaaaaaaataa

SEQ ID NO: 479776 - DNA, 492 bp, Shigella flexneri; identical to SEQ ID NO: 463117

SEQ ID NO: 479777 - DNA, 393 bp, Shigella flexneri; identical to SEQ ID NO: 381712

SEQ ID NO: 479778 - DNA, 315 bp, Shigella flexneri
atgacacaaaaatatgaactgattgtgaaagggatccgcaattttgagaataaagttacggtaactttagcgttacgggacaaaaaacgctttgacggtgaaatttttgacctggacatctcgctggaccgtgttgaaggtgccgcgctggagttttatgaggcagcagccagaaggagcatcagacaggtcttcctggatgttgctgccgggttatgtgaaggggacgagctgttgccagaaacgcgcccctgttcagaggcgcggtataccataaaaattaacagttctgataactcgattacgggttgttag

SEQ ID NO: 479779 - DNA, 225 bp, Shigella flexneri; identical to SEQ ID NO: 476353

SEQ ID NO: 479780 - DNA, 378 bp, Shigella flexneri; identical to SEQ ID NO: 474621

SEQ ID NO: 479781 - DNA, 762 bp, Shigella flexneri; identical to SEQ ID NO: 474223

SEQ ID NO: 479782 - DNA, 483 bp, Shigella flexneri; identical to SEQ ID NO: 477014

SEQ ID NO: 479783 - DNA, 1650 bp, Shigella flexneri
gtgacaaataaaacagctattcgtcaactcgtagttaataccttgtattctgctgcttgtgtgaaaatcaataatgatgtagcaactaaggcattacaaaaatctggtgtgaagttatacggctttatggatgccgctaattttaaatctgattcaggttccaataaaatgattggttataccttcggctatccagatggaaacgcattttcaggttataaagcagataaatgcggaagtacgaaaatgaagcttcttaatgaagataaaatgccagatcccggttcattattaataaacacgaacgggatagcgatgaatgttcaaaaagctcagatagctgctaatgctgctttagtatctggtgctatggcatatgctgaagctaacttgaaagacaggtctaagactattgatgttgaaacattaaacaaacacattgatcttatgactaatgcttatgctcaaattgttcaaactgctgctgaagctgctatgaaagatgctgttaatcaatcacaggttgataagttaacagaagctggatggacttatagctatgcgttttatatgagaataacaacggctgcgtcttctgctaatgctgctttaaataacttccctatttcctcagcaacattgaaagaagaagattttaaatacaatacatggggtgaggtttacagtagacttgataaagtaagaacgttattgaatgctactaataaactcaattctaacctttctgatgaaggtgataatgatgggttatatcaaaaagccatagggattatcggaggcaatttaggtgtattcggaactcaaaaagctgatacagcaagtttaatgcctttaaccgtttcggcaaatatcggtgagcatgttatatatggcgtagatgctatgttagcggctttaactgtaggttctatgttaggtagccttcctgtcattggtggcggtatacaagcggttgtcggtcttctgtctggaacattgacatcgttcttcgttccactattgatagtaggaaacatgttagctcatgttatgcctatgatgccttatatcattggtttcgggtgtgttataggttatatcgttcttgttcttgaagctatatgcggtgctccacttcttgtagtggcttcaataacacctgatcaggatggtgtagttggtaaacaaggacaaggttatatgttgcttttatccttattgcttagacctgctttaaacgtggctggctatgcggcttcatttgtagcgatgaatatcagttttgaatatataaacagtacgttctttgctgctgcgagtgatgtagaaggaggattcttaggtattcaaaaaggtataaccatgattgttatatattgtgtattaacgctttcagctacattagcatgttgtaagttaatgcatttattacctgacactatctttaaatggataggcggggcttcttcaactgttcttggcatgttatctactcatgctgaatcaggtatgttaaaagctcaggctgctgttggggcaagtatgcaaatggcaacggctggtcaaagtggaatgctcaatacggctaaaagctttggtcaaactttaggtgatagattgaaaccacagcctaataattctcctttgtaa

SEQ ID NO: 479784 - DNA, 1725 bp, Shigella flexneri
gtgcagaccctgcgtgagatgaacgccgacaacctgcgcaaggtgccggccgatgcacccacggccttcatcaagccgcgctggaagccgctggtgatcaccccggaaggcctcgaccggaaattctacgaaatctgcgccctgtccgagctgaagaacgccctgcgctccggcgacatctgggtcaagggctcgcggcagttccgcgacttcgacgactacctgctgccggccgagaagttcgccgcactcaagcgcgagcaggccctgcccctggcgatcaacccgaacagcgaccagtacctggaagagcgtttgcagctgctggacgagcagttggccaccgtcacccgcctggccaaggacaacgagctgcccgatgccatcctcaccgagtcagggctgaaaatcaccccgctggatgcggcggtgccggatcgggcgcaggcgctgatcgaccaaaccagccagttactgccgcgcatcaagatcaccgaactgctgatggacgtggacgactggacgggcttcagccgccacttcacccacttgaaggacggggccgaggccaaagacaggacgttgctgctgtccgcaatcctcggtgatgcgatcaacctcgggctgaccaagatggccgagtcgagccccggcctgacctacgccaagctgtcctggctgcaagcctggcacatccgcgacgaaacctattcggcggccttggccgagctggtcaaccaccagtatcgccacgcctttgccgcccactggggcgacggcacgacctcatcctccgatggccagcgcttccgcgcgggtggccggggcgagagcaccgggcacgtcaacccgaagtacggtagcgagccgggacggctgttctatacccatatctccgaccagtacgcgccgttcagcacccgcgtggtgaatgtcggcgtccgcgattccacctatgtgctcgacggcctgctgtaccacgagtccgacctgcggatcgaggagcactacaccgacacggccggcttcaccgatcacgtctttgccctgatgcacctgctaggcttccgcttcgcgccgcgcatccgcgacctcggcgaaaccaagctgtacgtgccgcagggcgtgcaagcctacccgacgttgcgcccgctgatcggcggcaccctgaacatcaagcacgtgcgtgcccactgggacgacatcctgcgcctggccagctcgatcaagcagggcaccgtcaccgcctcgctgatgctgcgcaagctcggcagctacccgcgccagaacggactggccgtggccctgcgcgagctgggccggatcgagcgcacgctgttcatcctggactggctgcaaagtgttgaactgcgccgccgcgtgcatgccggcctgaacaaaggtgaggcgcgcaactcgctggccagggcggtgttcttcaaccgccttggggaaatcagggatcggagcttcgagcagcagcgctaccgggccagcggcctcaacctggtgacggcggctatcgtgctgtggaacacggtgtacctggaacgcgccaccctggggttggtcgaggccggcaagccggtggacggcgagctgctgcaattcctgtcgccgctgggctgggagcacatcaacctaaccggcgattacgtctggcggcagagccgcagactggaagacgggaagtttcggcccttacggatgcccggaaaaccttag

SEQ ID NO: 479785 - DNA, 411 bp, Shigella flexneri
ttgtacaccgatgtcatcgaagagttttactgggttgcgctcccgcttacgacgcaaaattccctttcacaataccaacccgaatggcagtgctgggaacctgatgtcgaatgggtgcgtcagcccccgcaagatgcgataaccgctcctgactttttctgcttttaccagccaggcatgaccttcgaacaatttgtacgtgagtttgccgaatggttttcacaaaaacgtccggcggcgatgatgatcggcatccgtgcggatgagtcctacaaccgttttgtcgccatcgccagtttaaataaacaacgttttgccgacgataaaccatggactacggccgcaccaggcggtcatagctggtacatttaccccatttacgactggaaagtggctgatatctggacctga

SEQ ID NO: 479786 - DNA, 303 bp, Shigella flexneri; identical to SEQ ID NO: 473532

SEQ ID NO: 479787 - DNA, 225 bp, Shigella flexneri; identical to SEQ ID NO: 468765

SEQ ID NO: 479788 - DNA, 225 bp, Shigella flexneri; identical to SEQ ID NO: 468765

SEQ ID NO: 479789 - DNA, 822 bp, Shigella flexneri
  misc_feature (810)..(819): n is a, c, g, or t
atgactgtatctaaaaaatccaaatctaatattcttcatcttgatattgatgctttcattgctaaagcacgtaatattattcatgaagtctaccataacaaaactattctctctgttcctgattaccagaccaaaacagcagcaaacgatcaggactatatcacaaaaccacttacccccctttacgcatgggctggcggtaaacgtcgccttatcaaagcgtatcgcccctatatgccggattttaagcgtattcgatactacgcagagccgttcttcggcgcaggcgctatgttctgtgaggttttcaatcagcaccgggcgcacatcaaaagctaccacctgaacgacattaacccggagatcatcaatctcctgaacaccattaaaagggattgttccgggttcattgacgagctgaaggccattgaagaacgcaaccactataagaccattgaaggtcgtaaacacttctactatcgcttacgtgaagaataccgctcattgcccgtaggggttgagtattcagtgagaggaacagctatgttctacttcctcttaaacaatatgttcaggggcttatacagtcagaaaaacgggcgaattttcacgtcattccagacgaataaaaatggttttgattatgaaaatatcaaaaactggtcaacagcattacagaaagcagtgatcacatgtggaagctatgaagacgttaaggttaataaaaatacgttcctgttttgtgatccgccttatcgtgattgctcgattatgtattcaacagattttaatgatgaacagcataagcannnnnnnnnntaa

SEQ ID NO: 479790 - DNA, 267 bp, Shigella flexneri
  misc_feature (20)..(29): n is a, c, g, or t
atgatgaacagcataagcannnnnnnnnntaagcaatgctacgcatgggttcagaaaaaagtagaagagaaaaaaactgtaggtatgttgtgtaataaaaacctgaatgatggtttctttagttcactacctactacaacagatagcgaacatatcaacatccaatattcgcatacaaaagcaagagttggcgtaaacagaaacattgttgagctgttaatggtattcaaagaaaaaatggctgttccggttcttaaagcagcttaa

SEQ ID NO: 479791 - DNA, 294 bp, Shigella flexneri; identical to SEQ ID NO: 156811

SEQ ID NO: 479792 - DNA, 318 bp, Shigella flexneri
atgaaaaaatatatacaaaccgaaagctacattgaccaacttcaaaccctcattattttgaaaaacttcatgaatgaaagatatgaagaagaaaactgcgagatcctttataccacggataacggttatccatctgttgtgttttgtggcggtatttatgaagtaagcattatacctgttgactataaacaaggattagaaggtgaagttatgtttatagcttctgtaggtaatgaactggttaagttcccaagcttaatagacgctgttgaaagtttttattcatgtatcgatgaagcaataaaacaagcagcttga

SEQ ID NO: 479793 - DNA, 303 bp, Shigella flexneri
atgaaaaagaaaaccatgattgaagaaatgagagaaagagcaaataaactttcaaatggtgaagccctcattttattagaccatattttaaaaagagaagggcaagaggcaatgattagtatcttcatgaatgaaatgcctcaaatcaaaaacaggataatttatggcaacttcaatcttgaaggttgtagaaatatcaacactcagttagctaatgagctgatagcttatatagagcgtgaaaaactcatggtaatactggaatctaatctaaaagaaagtgccataaagaaacgtttataa

SEQ ID NO: 479794 - DNA, 690 bp, Shigella flexneri
atgaataaccagtatttacagtttgttcgtgagcagctcattatcgccaccgctgatttgagtggggcgacaaaaggtcagcttgaagcctggcaggagaatgccatgttcgatacagggcgttacaggcgtaaaaaaatccggtaccgcgatgaggtgaccggaaaaatgataacgcgggataatccaccaatcccgggaaagcaatcgctggcgaaggggacgtcaattcctctggtcagtccggttgagttttcgacatcatcgtggcggcgggctgttctgtctcttgaagagcactataaagcctggttgttgtggtgttacagcgggagtatttgttgggaatatcagatcgcgataacacagtgggcgtggaatgaatttaatgctcaatccggtaccagaaaaattgcagggaaaacgcaggaacgcctgaaaaaattaatctggctggcggcgcaggcggtaaaagcagaactttttggtggggaaggttatgaatatcaggagctggcattactggcgggagtaacaaccaaaaactggtccaaaacatttactggtcactgggttgtaatgaaacacatttttcaccgactggatagtgaggctttattgtttgtgatgagaacacgttcagaacaaaaagcggcattttcaaagcaaagtattgcaaaagtagattaa

SEQ ID NO: 479795 - DNA, 360 bp, Shigella flexneri; identical to SEQ ID NO: 474567

SEQ ID NO: 479796 - DNA, 138 bp, Shigella flexneri; identical to SEQ ID NO: 474566

SEQ ID NO: 479797 - DNA, 231 bp, Shigella flexneri
atggctgcgcaagggttcttactgattgccacgtttttactggtattaatggtgctggcgcgtcctttaggcagcgggctggcgcggctgattaatgacattcctcttccaggtacagcgggcgttgaacgtatactctttcgtttacctggcgtctctgaccatgagatgaactggaagcaatatctttgtgccattctcggcctgaacatgctggggctggcggtgtaa

SEQ ID NO: 479798 - DNA, 825 bp, Shigella flexneri; identical to SEQ ID NO: 478357

SEQ ID NO: 479799 - DNA, 402 bp, Shigella flexneri
atgggctttccatcaccggctgcagactacactgaaaaaccactctcactggatgcgttatgcatccataaaccgcacgctacgtactttatgcgggctggacaggcatatttaagggctggcatacaaaagggcgctacgctcgttgtagacgcttctgttaagccctttgatggaagcattgtgatagtggcgttagggggtgagttcgtagtgaaacggctaagacttcatccagctccggcattgatgccattggactacgcaggaaccccggtaccgatcgatctggatgatatggacgagaacaacgctacccgcattttcggcgttatgacgtattgtgtaaacgacatgcgaacaggcgagttcgacgataccccgtatggcatagacggctaa

SEQ ID NO: 479800 - DNA, 450 bp, Shigella flexneri
atgataaaagagaactacagcttacacttaaaaataaaagagcttaatgatttactctatgaccaaaacgaagaaaaaatagaacttgaaggttctaatcaggagttagagcagtctctttcccaatgtctgaataaaatccaaacataccaaaatacagtagctgtttttgaagataaaacaagacttcttgaaaaagctaataacgatcttgaaagtgaaatagattaccttaaagaaaaggctcattgtcttgaagaagagttaaataatgaagttgaggaaacagggttttttaaagaaatgtcagaagactttattactcagattaaatggttaaataacacgattgaggtttatcgcggtgaagttgatgaagacaccatacgcagggttgaatacacggttcaacagctcagggaaagtttcggtgatgattatgaggtctga

SEQ ID NO: 479801 - DNA, 1053 bp, Shigella flexneri; identical to SEQ ID NO: 474612

SEQ ID NO: 479802 - DNA, 378 bp, Shigella flexneri; identical to SEQ ID NO: 477315

SEQ ID NO: 479803 - DNA, 336 bp, Shigella flexneri
atggaatactacgagtttgtagaaacctctgtgttcacgcgagagatgaaaactctactcagtgatgatgaatacaaagagtttcaaacgttcctcatcgagaacccggaagcgggtgatctgatagtaggaactggcggttgtcgtaaggttagatggtcaaggcagggaacaggtaaaagttcaggtgtccgggctatttactacttctacaacccggcagggcgcttatacatgcttatcatctatccaaagagtgagaaggatagtttgacagcagcagagaaaaaccagctcaaagcggttgtagcgggttttaaaggtgaagagggctaa

SEQ ID NO: 479804 - DNA, 291 bp, Shigella flexneri
atgcgtaaagagctttttgatgatctgattgcttctgccaaggaagctgtagaaatccatcagggtttacgtgagccagctcgcgtgacccgttttgaacgtccagatgttaaggctatccgggctaaggttcatatgaaacaagatgattttgccagcctgatcggggttagctcttctcttgttcagtcatgggaacaggggttaagaactccggcaggtgcagcgttaaagctgttgcgtgtcatcgagcgtaaacctgaatttgttcaggaactacgtgaagcataa

SEQ ID NO: 479805 - DNA, 549 bp, Shigella flexneri
gtggatcagggtaacaaccattttgatgttgtcgcccggcattaccatctctacgccttccggcagttcgatggtaccagtcacgtcagtagtacggaagtagaactgcggacggtagcctttgaagaacggagtatgacgaccgccttcatctttggacagaatgtacacttcagattcgaacttggtgtgcggcttgatggtgcccggcttagccagtacctgaccacgttcgatttcttcacgtttgataccacgcagcagaacacctacgttctcaccagcacgcccttcgtccagcagtttgcggaacatttcaacgccagtacaggtagacttctgagtctctttgataccaacgatttcaacttcttcaccaactttgatgataccgcgttctacacgaccggtaacaacggtaccacgaccggagatggagaatacgtcttcgatcggcagcaggaacggcttgtcaatcgcacgctctggttccggaatgtaagaatccaggaagccagccagttccaggattttcgcttcccactctga

SEQ ID NO: 479806 - DNA, 258 bp, Shigella flexneri
atgaaactgaacaactacctgagcaagttctttgatgttgaagagaatgaagtggaaaacgatgaaggcgaaaaaatcccttctctgtggctctatgagaaaggggaagactctgaacctgtagttatcctgaaacagacagaaaagcccggagaatggcgcgtaggagatatttactcagctctaacgaatgatgcccggctatccgaagaacagatcaagaagctggcaaaggctggaatgattaccaaaaactaa

SEQ ID NO: 479807 - DNA, 240 bp, Shigella flexneri
atgtttgctatgagcgtgttcaatttgaagggaggggttggcaaaacgacccttagcctgaatctgtgcggctattttgcttctaaaggtcagtcaacaacgttagtagactttgacccacagggaggttcacttacatgtgcagcctttgcgatgaagaacggtaaacctctaccgtttgaagtgacccgtaaaccgaaggtagcaaccgacttcatgatctttggagtggttgaatag

SEQ ID NO: 479808 - DNA, 168 bp, Shigella flexneri; identical to SEQ ID NO: 474704

SEQ ID NO: 479809 - DNA, 294 bp, Shigella flexneri; identical to SEQ ID NO: 25632

SEQ ID NO: 479810 - DNA, 180 bp, Shigella flexneri; identical to SEQ ID NO: 474761

SEQ ID NO: 479811 - DNA, 354 bp, Shigella flexneri; identical to SEQ ID NO: 466835

SEQ ID NO: 479812 - DNA, 489 bp, Shigella flexneri
atgaatagcattaatgaattattattaatttacggttcaaatataacaaaaatcaaagaacttgttttagcaggggcaaatgttaactacatatcgccggaaggtttaacgcctttatcctgtgctgaatctgttgaagtggctcagtttcttcttagccgtggcgctgatgtgaacgctaccaatgaagacgggaaaacagccttgttcagcgttagcaacgttgatacatgccgcttcctgatagaaaacggcgcaagggtaaatcatgttaacaacaaacatgaaacagccttgttctatacaacggatatgaaaaaaatcagattactggttgaagctggatgtgatcccttagtcagaagttatgatggtaaacgccattacgatttgttggcacataatcagaaagtgagttttattaacttcttggctaaccgaaaaaagaaaatggaaactgttaacgcacctttagctcttgccttttaa

SEQ ID NO: 479813 - DNA, 225 bp, Shigella flexneri
atgaaatacaataacccacttgaagtagcaacaataacaacaaacgttttagcgcattatatttatcaagcaatatcagatcttgataaagaagactttattaaatatgacaacgttgattatatcaaagattatttagatagctctattgattctttaggaactgacggtttttatagcagtgttctaaattctttctacggcatgaacgataacgatgaataa

SEQ ID NO: 479814 - DNA, 300 bp, Shigella flexneri
atgtcatatacatataaagtcataaataatagcctcttctttattgaagaggaaagtaataagcagtatgaagtaaacgttataccacaaggaattggaaataatctgtttcaggtttctattcctgatttaagcccgcgcactttagaagcaaacaatgctaaagagctttttaatcaggttgttgatatagataatgtaagacgtagttttagacgacagacaccagaagagtttaaatctaagttccaaaaaatgaaaaagaaagcttgtccatatcagcctgctcttttttggtaa

SEQ ID NO: 479815 - DNA, 303 bp, Shigella flexneri; identical to SEQ ID NO: 473532

SEQ ID NO: 479816 - DNA, 327 bp, Shigella flexneri; identical to SEQ ID NO: 466843

SEQ ID NO: 479817 - DNA, 465 bp, Shigella flexneri
atggaaagacaacaaacaaaactttattttgctatatggaaattgaaaggcaatgaaaaactacaggctattaaatattttattagttgcggtgaagatattcatgaaagagacaaaaacgagttaacaccattacatcaggccgttggatgtggtgatgttgaggccgtgaagctgttgttaacgcttggcgctaatcccaacgctatagatatatacggaagaacgccgctgttctataccgctttcagccctaagtacaatggtcgtcagttagatgaagctctcatagcgggaaatgctgataccaccatttacgatgttaacgggcatacacgcgatcagttcgtgtatagcttcaaaagctcgatgttctaccgtcctgaaccagaagcagtagaagaacaaccggaagaggtagccccttcagctcctgtgaaaagggcaggaagacgtaaagcatga

SEQ ID NO: 479818 - DNA, 378 bp, Shigella flexneri; identical to SEQ ID NO: 477315

SEQ ID NO: 479819 - DNA, 294 bp, Shigella flexneri
atgctaaacttatatattgattcattactgaacttatcaacagtgttctacggtattccgctgttagctctttcggcgttaactacggttgttttaggtttcgtggtgttttatccgcttgctaaaatgatgaacactaacgcttataaaagctttccagtgtttcatatgatgcctgtaaacaactatgcctttaagttgattgtaggttttcccgtgagtatggttgtattcttaacgttgggtatcactattctttctttcgtcaacgttctgattaaaatcttcatgtaa

SEQ ID NO: 479820 - DNA, 186 bp, Shigella flexneri; identical to SEQ ID NO: 462789

SEQ ID NO: 479821 - DNA, 177 bp, Shigella flexneri; identical to SEQ ID NO: 479260

SEQ ID NO: 479822 - DNA, 177 bp, Shigella flexneri; identical to SEQ ID NO: 479261

SEQ ID NO: 479823 - DNA, 942 bp, Shigella flexneri
gtgagtaagaagaaaaacaccacaacgcccacgccgcatgatgccgcgttccggtcgttcctggcgaatcccgacgtcgccagagattttctggaactggatcttcctgcggagtaccggcagttgtgcgacctgtccacgctgaagctggaacccgccacctttgttgagccggacctgcatcagtacgccagcgatatcctctggagcgtgaaaaccaccgggggtgaagatggttatgtttatacgctcatcgagcaccagagcaccgaaaatctgtacatgccttttcgcatgttacgctacagtgtggcggcgatgcagagacatctggagcagcacaaaacgttgccactggtcattccggtgctgttctatcacggtgagcgcagcccgtacccgtacagcatgaactggctggactgttttgagaatccggcgcttgcggctaaaatatacacaaagccgtttccgctggttgatatcactgtcgttgatgacaatgaaatcatgaaccatcgccggatggccgcactgacgctgctgatgaagcatatccgtcagcgggatatgctgatgtgtctggacaacctggtcagagtactgcaggacatccaggatgaagagcagattacagttcttttcaactatctgcttaatggcagcgaacatgtaacggttgaatttttgcagacgctggcgcagcgactgccgcagcacgaggacagcattatgacactggcagaacgtcttaagcaggaaggtatccagcaaggtatccagcagggtatccagcagggtatccagcagggagttcagcagggggcgcttcaaaaagcacgggaaatcgcccgggagctccggaacgcgggaatgccggcagcacaaatctgtcagctgaccggactttctgaagctgaactgaagaacatcactcactga

SEQ ID NO: 479824 - DNA, 171 bp, Shigella flexneri; identical to SEQ ID NO: 113262

SEQ ID NO: 479825 - DNA, 552 bp, Shigella flexneri; identical to SEQ ID NO: 8470

SEQ ID NO: 479826 - DNA, 654 bp, Shigella flexneri; identical to SEQ ID NO: 7676

SEQ ID NO: 479827 - DNA, 258 bp, Shigella flexneri; identical to SEQ ID NO: 5121

SEQ ID NO: 479828 - DNA, 333 bp, Shigella flexneri; identical to SEQ ID NO: 5122

SEQ ID NO: 479829 - DNA, 372 bp, Shigella flexneri
atgagcgcatcggcactggtttgcctcgcccctggtagtgaagagactgaagccgtcaccacgatcaacctcttggttcgcggcggtatcaaagtcaccactgccagcgtcgacagcgatggcaacctggcaattacctgctcgcgcggcgtgaagctgctggcggatgcgccgctggtcgaagtggctgatggcgaatatgacgtgatcgtgctgcctggtggcattaaaggcacgagtgttttcgcgatagcactctgctggttgaaaccgttaaacagttccaccgttccgggcgtatcgtcgcggctatttgcgccgcgccagccaccgtgctggtgccgcacgatatctttccgattggcaatatga

SEQ ID NO: 479830 - DNA, 270 bp, Shigella flexneri; identical to SEQ ID NO: 476990

SEQ ID NO: 479831 - DNA, 669 bp, Shigella flexneri; identical to SEQ ID NO: 478898

SEQ ID NO: 479832 - DNA, 630 bp, Shigella flexneri; identical to SEQ ID NO: 479439

SEQ ID NO: 479833 - DNA, 834 bp, Shigella flexneri; identical to SEQ ID NO: 476088

SEQ ID NO: 479834 - DNA, 294 bp, Shigella flexneri; identical to SEQ ID NO: 479211

SEQ ID NO: 479835 - DNA, 1494 bp, Shigella flexneri
atgggttcatgtgcagctccatcagcaaaaggggatgataagtttatcaccaccgactatttgcaacagtgccttaaaaacctgaccgctatcatcagactggtggaaaacctcggtaattacctgacggagagcgccagagaacgccttctggccattactatgcttcagaacggtccggaagccgaacatatcgagtacctagtggcgttgaaacgccagaccgatacgctgacagagaaactcactgcgctgagaggcctgaatgttttcagcctgcaggaacagcagaacgttcgggaggtgctcactgccaggttgattgacctgcagttcttccctgatctgcaatccgaactcatgcaggggatcaccgacagactgaacgcggcccttatggacctgataaaccttgccggaccgctgcagggaaaaattaaccggcaccgggacagcatgatccggctgatcgcacagcacaaaacaaacatcaataatttcctcacttatgcaggctataaatacagggtggatatagccggcgagggagagcagagaaaactcaggctacgacacatagattttaacgggtacgtcagcggcggtagccagcatctcagctatggagaacggaacgcctttgcgattgtgttattcatgtatgaatgcctgtcaaaaaacccgggactgattatccttgatgatcccatatcttcttttgataaaaacaagaagtttgccattcttgaaatgctgttcagacgtgcaagtggtgaatgcctgaagaaccggactgtacttatgctgacgcatgacgtggagcctgtgattgacacgctgaagtcagtcagaaggttgttcagtaatcaggtgaccgcctcctgcctgcgcctgtctgctggagtcatagaagaattacctgttaacgacggcgatatcatgacattcatgcagatctgcaaatccatcaccgcgtcagcagactgtgaggagatcattaagctcatctatcttcgtcgctactttgaaatcgttgacgaacgtggtgatgcttatcagcttctatccaatctattccatcgacgcgtcgtcccgctggattatcgcgagcctgccgctgcgggctcgggctatcccaaaatggctcctgagaaaattcagcaggccttgcgggatatccgggagtatgtggacagttttgattacccgcgacttcaggctctcgtcagcagcccagatgaaataaaaaacctgtaccgtcgctgtcgtaacggctatgaaaaactgcaggtattccgtttactggaactggatcaggaccatccggtaatacgaaaattcgttaacgaaacgtaccacattgaaaatgagttcatctgtcaactagatccgtccagattcgatctcatcccggagtacgtgattatggaatgtgacaagctcatcgccctgccaccggcagcaaaccagagctcggttgcccgtatcgcttga

SEQ ID NO: 479836 - DNA, 402 bp, Shigella flexneri; identical to SEQ ID NO: 468340

SEQ ID NO: 479837 - DNA, 231 bp, Shigella flexneri
atgagaaccgtatcgatattcaaaaatggcaacaaccgcgccatccgtctgcctcgtgatctggattttgagggggtgagcgagctcgagatcgtccgggaaggggacagcatcatcctgcgccccgtccggccaacctggggatcattcctagagtacgaaaaagccgatccagattttatggcggagcgcgaggatgttgtcagcgacgaagggcgatttaacctgtga

SEQ ID NO: 479838 - DNA, 291 bp, Shigella flexneri; identical to SEQ ID NO: 113255

SEQ ID NO: 479839 - DNA, 900 bp, Shigella flexneri; identical to SEQ ID NO: 113256

SEQ ID NO: 479840 - DNA, 2226 bp, Shigella flexneri; identical to SEQ ID NO: 21308

SEQ ID NO: 479841 - DNA, 1089 bp, Shigella flexneri; identical to SEQ ID NO: 21307

SEQ ID NO: 479842 - DNA, 219 bp, Shigella flexneri; identical to SEQ ID NO: 224833

SEQ ID NO: 479843 - DNA, 309 bp, Shigella flexneri
atgttcaatatgttggctgctattgctgagtttgaaaatgacttgcggacagagaggcaagctgaaggtatcgcaaaagcacatgaaaatggagttaaatttggtaggcctgtaaaacttacggacaccttaaaacaagcaatttatgataaaagagctgagggggccactattggtcagcttgccaaggagtatcaccttggagaagcttctatttatcgggcaataaattcagttaagcaatcaattgtttccccctactcgatagatgttaaagagctgcgagattatggaaaatataaaacgtga

SEQ ID NO: 479844 - DNA, 333 bp, Shigella flexneri; identical to SEQ ID NO: 266550

SEQ ID NO: 479845 - DNA, 855 bp, Shigella flexneri; identical to SEQ ID NO: 315142

SEQ ID NO: 479846 - DNA, 573 bp, Shigella flexneri; identical to SEQ ID NO: 263951

SEQ ID NO: 479847 - DNA, 942 bp, Shigella flexneri
atgattacttttgatcaggcaaccgttgacagctctggtgcctttctcatcggagagctggagcgactcgaccagactctgaacctgccactggcggggtacacctggacccgcgatattcagttgcgtgaagatgtctctatcgcagatgacatttccagctggacgaataccagcttcgccgctgcgggtactggtgcaaatccgaatggcaaaaactgggtaggcaaagactcaaccgctattgctggcgtaaacgtggatatcggcaaatccggtaacccgctgaatctctgggggatggaacttggctggacggtcatagaattgcaggctgctcagcaggtaggtcgcccgattgacacccagaagtacgacgggatgcagctcaaatggcagatggacaacgacgagcaggtgtatgttggcgattccgcattaaacctgaaaggccttgttaccctggacggcgtgcctgtcaacaacgctgccaaaacgtgggcaatctcaacaccggacgaaatccgcgcaagcattaaccaggtgctgtctgatgcgtgggccgcttccggttactctgtggttccgcgtgatttgctgatcccgccagagcagtttgctctgttgtccagcatcatcgtttcatctgcgggtaaccagtccctgttgacgtaccttcagaccaacaccatcagctatcaccagaacggtgttccgctgaatatccgcgcggttaaatggctgaaaggccgtggtgtggggaataaggatcgcatggttgcgtacaccaacgataaaaaatacgtccgctatccgctggtgccgttgcagagcgttcctatccagtatcgcggtctgtatcagattgcgacctactacggcaagctgggtgcggttgagccagtgtacaaagaaaccatttcgtacgttgatggcatttaa

SEQ ID NO: 479848 - DNA, 222 bp, Shigella flexneri
atggcaaaaaataatgcagtaatacacgtacataccccgtttgtgctcacgcttcccgacggttcgcggcgcgagtttgttaaaggccgtcatgcagtggaggaagacgttgccacgcactggttcactcgtgcgcacgcggaagtatccgttggcaaagccacagacgcgcgtaacgaggtaaaaaatgccaaagaatcaaagcctgccagcggtaagtga

SEQ ID NO: 479849 - DNA, 489 bp, Shigella flexneri; identical to SEQ ID NO: 473676

SEQ ID NO: 479850 - DNA, 294 bp, Shigella flexneri; identical to SEQ ID NO: 478908

SEQ ID NO: 479851 - DNA, 675 bp, Shigella flexneri
atgaattcccagacaacaaaagatattccctgcttccgttcttatttgcctgatgccctgcgtttaagatttgaagataaactgaccatccgggccatcgctcagcgtctgggtctcagtcattccacaatacatacgctttttcagcgatttcttgcatccggtatcgcatggccattgcccgattcagtttcattcgctcaacttgacgccatcctttatgccaacagaaagaaggaattaacagagcctcaaatcagagaaggctcatggcgaaaagaacggcgaaccagctatagccgtgaatttaaggtccgtctggctaagcaggcattgcagcctggggctgttgttgcccggatcgccagagaacacgatatcaataataacctgctgtttaaatggaaaagccagtacgaggacggcttactgagcgatgatgacatacaggaatgcatgcctgtcccggtggcactgactgatacgccggagccgaccagaccagttacaaatcccttctggcgtaacaagcatgatgagcgccctgagggggctcccggaaacgtcccacggtgcgagctgcatcttaaatcaggtgtggtaaaactgtttgaccctctcactccggaactgttacgggcgctaatccgcgaaatgaaagggggtatccgatga

SEQ ID NO: 479852 - DNA, 210 bp, Shigella flexneri; identical to SEQ ID NO: 475853

SEQ ID NO: 479853 - DNA, 834 bp, Shigella flexneri; identical to SEQ ID NO: 476088

SEQ ID NO: 479854 - DNA, 834 bp, Shigella flexneri; identical to SEQ ID NO: 476088

SEQ ID NO: 479855 - DNA, 288 bp, Shigella flexneri
atggtttccggtaatatcgacctgctcggctttacatggctcggtctgctcgtactccgcgtcatagccgcacgacacttcgcgcaggccatcttcgataagctgaatggcgctttcgtctttgacgataaggtcagccagcatcaaatcagactgctcacccgtcccgcgccgcacattctgaagatgcccgacagcaagctctttccagttctcgggatttaccagccgcacattcccgttttcatcttcaggatgcaggatcgtgatgctcatcccttcgaatga

SEQ ID NO: 479856 - DNA, 210 bp, Shigella flexneri; identical to SEQ ID NO: 475253

SEQ ID NO: 479857 - DNA, 708 bp, Shigella flexneri; identical to SEQ ID NO: 10371

SEQ ID NO: 479858 - DNA, 852 bp, Shigella flexneri; identical to SEQ ID NO: 10372

SEQ ID NO: 479859 - DNA, 210 bp, Shigella flexneri; identical to SEQ ID NO: 475853

SEQ ID NO: 479860 - DNA, 234 bp, Shigella flexneri; identical to SEQ ID NO: 479183

SEQ ID NO: 479861 - DNA, 729 bp, Shigella flexneri; identical to SEQ ID NO: 474473

SEQ ID NO: 479862 - DNA, 1215 bp, Shigella flexneri; identical to SEQ ID NO: 476539

SEQ ID NO: 479863 - DNA, 1401 bp, Shigella flexneri; identical to SEQ ID NO: 474418

SEQ ID NO: 479864 - DNA, 627 bp, Shigella flexneri
atgcaatttggctacagcagtagctggaagcgtctctcgtggaacgtctcctggagttattccaatactgccagacaggggacggggaacaaccatgccagtgataacaccagtgagcagatctacatgctctctttatctgttcctttatcgggctggtggggtaatagttacgccacctattctgtttcgcaaaacgataattccggtagctcacatcaactcggactcagcggtacggcgctggaaagaaataacctttcatggaatttaatgcagtcctataacagtcatgatgatgaggttggcggtaatatgtccctgacctatgatggctcttatggcacggtgaacggcagctataactacagccaaaattcccagaggctgaattatggtatcagagggggaattctggcacacagcgaaggggtaacgttaagtcaggagttaggtgaaactattgctcttgttaaagcacctggggccgccgggttagaaatagataatatgcgcggtgctgcgacggactggcgcggctatacggtcaagacacagctaaacccttatgatgaaaatcgggtagcaatcagcgataactatttctcgaagtcgaatatagggtaa

SEQ ID NO: 479865 - DNA, 645 bp, Shigella flexneri
atgctaagcccaatagaagtaataaccacaccggtaaccagtggcgggaataaaggcatcaagcgaccaataagtggcgctaataatgtggtgataaaacccgcggcgatagtggcaccaaatatccccagcaggccgatatccgggttcatcccaatggctatcattggtgttacagcagcaaaggtcaccgacataatcaccggcaggcggatccccataaagcggccgataccgatacattgcaataatgtgacgatcccgcagcaaaagagatccgagctaatgagcatcgcaatagcatcttttgagaggcccagtcggtcaccaatcataagaggaacagcgactgcacctgcgtacatgacaaggacgtgttgcagaccgagtatgatcagctttcctggtgataatatgcggtcaacctcatcagttgggcggtcttgcccagaagatgagggaagttgggaatctatggcgctcatcagtgtttctcctttcgcccgccagaataaaaagcaaccgtttacgttaatgaaactgtctaaacacatgctcgtggagtgccagtttttgcgaggaaggggagttagagacaggaattgcggaggcaatcacataatcgtgcttaaaccacgaaaatga

SEQ ID NO: 479866 - DNA, 546 bp, Shigella flexneri
atgttgcatttaaaaagtattactgcgggtaatccgaaaacagcagaacaatatcagatgacaaaacgatattcggtcacctggcttttttcagaagacggaaaaaactggtatgaagagctgaagaatttcgccagcgacacaataaaaatagcttacaccggagatggtcgcgtggtgtgggtcggtaaggatgtgacaggcatcgagccacgcaatgccagcgttatcgaagttccggatattaccactaaccgacggattaccgcgccgggttactggttttaccgcaatgatgaatttgtctttgactacagactcaaagcggaagatgagcgtgatgcccttctggctcaggtcagtgcccggacaggggaatgggaagaagacctgctgctggggttaatcagcgacgaagataaagaaaagctgaaagcctgtcgtatttacgcgaaatcgctgcaggcgatggatttcagcaccatcactgataaatcctcatacaacgccattgaatggcccgtctctccggaaggttcttcctga

SEQ ID NO: 479867 - DNA, 381 bp, Shigella flexneri; identical to SEQ ID NO: 458903

SEQ ID NO: 479868 - DNA, 327 bp, Shigella flexneri; identical to SEQ ID NO: 476461

SEQ ID NO: 479869 - DNA, 210 bp, Shigella flexneri; identical to SEQ ID NO: 478973

SEQ ID NO: 479870 - DNA, 210 bp, Shigella flexneri
atgacggatggctggccgctgtatgaatcacgcctgaagggaaagctgcacgttatcagcaagcgttacactcagcgcattgagcgacataatctgaatctgagacaacatctggcaaggctgggacggaagtcactgtcgttctcaaaatcggtggagctgcatgacaaggccatcgggcattatctgaacataaaacactatcagtaa

SEQ ID NO: 479871 - DNA, 381 bp, Shigella flexneri; identical to SEQ ID NO: 458903

SEQ ID NO: 479872 - DNA, 501 bp, Shigella flexneri
atgggggaaacaatctcagagcaactggatatcattaataccgcctttaaagttatcgaaaccatacgtcccaaactggcctgtagccggtgtgatgtcatcgttcaggcaccacttccccctaaaccgatcgaacgcggttatgccagtgcagggttacttgcacggatcctggtcagcaaatatatggaacatatccctttatatcgccagtcagaaatatacgcgcgacagggcgtggagctgagccgtaataccatggtgcgctgggtatcagaaatggcagacaaactccgtcctctgtatatagcgctgaatgactatgttctggaggcaggaaaggtgcacgcagatgacactccggtgaaagtactggccccggggaacggaaagacgaaaacgggtcgtctgtgggtatacgtcagggatgatcgtaatgcgggttcatccctagactggccccctgaatctccagacaaccagtatcacttatttaagtga

SEQ ID NO: 479873 - DNA, 210 bp, Shigella flexneri; identical to SEQ ID NO: 9340

SEQ ID NO: 479874 - DNA, 219 bp, Shigella flexneri; identical to SEQ ID NO: 474644

SEQ ID NO: 479875 - DNA, 258 bp, Shigella flexneri
atgaaaccgaccgcgttcaaacgcgaggttctggcttctgctgacaaaacgctggttcgccagatagtcggtgatgcggatatccgcaaattaccgaaacaatcggtcgacatggcgtttaatgccgtgtctgaggttgccaaagggcgaaacacccgcgccaccaccggcgatgcacagcgcctaaacatgggcatgaccagtatcgcttccctgaacaaacaaaacgctgaattctgggcaaaccgtaaagggtaa

SEQ ID NO: 479876 - DNA, 258 bp, Shigella flexneri
atgaaaccgaccgtgttcaaacgcgaggttctggcttctgctgacaaaacgctggttcgccaggttgtcggtgatgcggatatccgcaaattgcctaagcaatcggtcgatatggcgtttaacgctgtgtctgagattgccaaagggcgaaacacccgcagcaccacgggcgatgcacaacgtccaaacatgggcatgaccagcatcgcttccctgaacaaacaaaacgctgaattctggtctaaccgcaaaggataa

SEQ ID NO: 479877 - DNA, 180 bp, Shigella flexneri
gtggccgccggagaacaggttgttcctgcctctgaacttgctgccgccatgaagcagattaaagaactccagcgcctgctcggcaagaaaacgatggaaaatgaactcctcaaagaagccgttgaatatggacgggcaaaaaagtggatagcgcacgcgacacccggagacaacggctga

SEQ ID NO: 479878 - DNA, 246 bp, Shigella flexneri
atgccgttactggcaccgcttggcgatctggtcggtgttaaccgtcaggttaccgtgctggcgttccagtttggtgatggcttcagccacatcatttacccaacctcagcttcgttaatggcaacgctcggtgtgtgccgggtggacttccgtaactggctgaaggtgggcgcgaccctgcttggactgctgtttattatgtccagcgtcgtagtgatcggcgctcagttgatgggctaccactaa

SEQ ID NO: 479879 - DNA, 651 bp, Shigella flexneri
atgaatgcacgaaaagcggtactggcagataatccagaattgatcctgcgtgtgctacagctgagatttgacgagtcactgtcgtacccgcgcatttctgcgcagactggtgtcagcaaaaccgccattttttctctggtgaggcgatttcaccaggtattcactgactggcctctttccggtgaatattcctgcgggcaactggcccgggctcttttcccggggcgatacccttcagccccgaccgtgactcagcctgtgaaagcagagaaaccccgccggaaccgattttcaccggagtttaaatggagactggttcagcaaactcttttacccggtgcctgtgtcgcacaaatagctcgagagaatggaattaacgataacctgctctttaactggcggcatctctggcgtaacggtggcctgcaaccgcccggcgaacatgaaacatcgctacttcccgtgacgttaactccggagccggataataaaatcccggcaccagtgcagatacctgaacagataaatacactgccagacagtctgtgctgcgagctggttctgccggccggaactctcaggctgaaaggtgaactgacaccggcgttattacagacacttatccgcgaaatgaaagggagcagccactga

SEQ ID NO: 479880 - DNA, 558 bp, Shigella flexneri
atgaggaaatcagtgttagagcaggatgttagctctttgattgagaaaataaaagaaagtgattatgaaataccaaaaagctctgatgtaatgaaaattatattaaaaagaatacaagtggtaataattattcagttggtaatgattttatgtcacttcatcatctacagatacgatcatgaggcattaattggtataagcattttgtctgcaggtggaattttgtttttctcagccgtgtttgtcccttctttatatcaacctgtcagcataatgttgtcgattaatgaggtggataaaggtgattccctaattgtaaaattgttaatgagaaagcttaaacagtactggaaatttcttgtggttataaacctgattataggtgtaggtttactactctctggtgaaggggttatttcggggcttggtttttcatggtttgttacatatctcatctgcatgatgtcgtttcaaatgtcgttatccagatatatgaccccagcagtggtcagtagtttatcgaaaattaaagagcttatttcggcatccccgaaataa

SEQ ID NO: 479881 - DNA, 732 bp, Shigella flexneri
atgaatcaggggaaatccgttgctgtgcaacctgtcaggccggtcctgaatttctccgcgctgcagcgcgatgtcatccggatggtggcgtttgtggcgatggtgggggaccacatagctactgcctttcagctggatatgcccttactgaacatggtcgggcgctgtgctttccccctgtttgtgctggtctgtggctgcaacatggcgggtaaaaccttacgtcagcacagcctgaaccgcctgtggctgatggcgcttctggcccagccgggttactggctggccttccgggatgtcggtcttgcgtggtggcaactgaatatcctgttcacctttgctgttgtcatgcaggtggctcttttcctgcagtctgctactgcccgtaatggtgttgcggccttcacggcactgatggggtatataccattcagttctgccagttacggcatccccggtctgctgatgcttgctggagcgctgctggtctggcaggtcagggacacgctgcgtcccgccctgtttgctgtctggctgttgctggttgccctgcttaatgcccgacacggtgatgtgatgatgttttccggcgtgattctgacgctgacggtgctgttctgtgtccacgggctggtaccggcttccggacgacgtctgcaggcaggacgctggtttgcgccagcgtatgccattcatctgttttttattggctttctggtcagagttctctga

SEQ ID NO: 479882 - DNA, 285 bp, Shigella flexneri
atgaatggattcagaaaccgttcacgaagcagtctagtctggcgttataggtgtgtcggaaaccgtgctgtccggctggaggtcagggaactctgggcagaggctgcggatgtatggtggctggctgcccatattgctccccgcactgactggcagcagtttgcatggcagagagcagaacactgccagcggcgcagcaggggtaaggccggacatcaaccacgcccttcaggaggtagaggatgcctggcgaaaaccaaagaacatacaagtcaggtgggctga

SEQ ID NO: 479883 - DNA, 2379 bp, Shigella flexneri
ttgaagctcaaggccggcagcagcatcacctggttgacctggctgcgccaggcaccgctgaaacccaactctcggcacatgctggaacacatcgagcggctgaagacatttcagttggtggacttgcccgaaggcctgggccggcacatccaccagaaccgcctgctcaagctggcccgcgagggtgggcagatgacgcccaaagacctcggtaagttcgagccgcagcgccgctacgcgaccctggccgccgtggtgctggagagcaccgcgaccgtgatcgatgagctggtcgatctgcatgaccgcatcctggtcaagctgttcagcggcgcgaagcacaagcatcagcagcagttccagaagcagggcaaggcgatcaacgacaaggtgcgcctgtactccaggatcggccaggcgctgctggaagcgaaggaaagcggcagcgacccctatgccgccatcgaggcggtgattccctgggacgagttcaccgagagcgtcagcgaggccgagctgctggcccggccggaaggcttcgaccacctgcacctggtcggcgagaacttcgccaccctgcgccgttacacgccggccttgctggaggtgctggaactgcgcgccgcgccggccgcgcaaggcgtgctggcagccgtgcagaccctgcgtgagatgaacgccgacaacctgcgcaaggtgccggccgatgcacccacggccttcatcaagccgcgctggaagccgctggtgatcaccccggaaggcctcgaccggaaattctacgaaatctgcgccctgtccgagctgaagaacgccctgcgctccggcgacatctgggtcaagggctcgcggcagttccgcgacttcgacgactacctgctgccggccgagaagttcgccgcactcaagcgcgagcaggccctgcccctggcgatcaacccgaacagcgaccagtacctggaagagcgtttgcagctgctggacgagcagttggccaccgtcacccgcctggccaaggacaacgagctgcccgatgccatcctcaccgagtcagggctgaaaatcaccccgctggatgcggcggtgccggatcgggcgcaggcgctgatcgaccaaaccagccagttactgccgcgcatcaagatcaccgaactgctgatggacgtggacgactggacgggcttcagccgccacttcacccacttgaaggacggggccgaggccaaagacaggacgttgctgctgtccgcaatcctcggtgatgcgatcaacctcgggctgaccaagatggccgagtcgagccccggcctgacctacgccaagctgtcctggctgcaagcctggcacatccgcgacgaaacctattcggcggccttggccgagctggtcaaccaccagtatcgccacgcctttgccgcccactggggcgacggcacgacctcatcctccgatggccagcgcttccgcgcgggtggccggggcgagagcaccgggcacgtcaacccgaagtacggtagcgagccgggacggctgttctatacccatatctccgaccagtacgcgccgttcagcacccgcgtggtgaatgtcggcgtccgcgattccacctatgtgctcgacggcctgctgtaccacgagtccgacctgcggatcgaggagcactacaccgacacggccggcttcaccgatcacgtctttgccctgatgcacctgctaggcttccgcttcgcgccgcgcatccgcgacctcggcgaaaccaagctgtacgtgccgcagggcgtgcaagcctacccgacgttgcgcccgctgatcggcggcaccctgaacatcaagcacgtgcgtgcccactgggacgacatcctgcgcctggccagctcgatcaagcagggcaccgtcaccgcctcgctgatgctgcgcaagctcggcagctacccgcgccagaacggactggccgtggccctgcgcgagctgggccggatcgagcgcacgctgttcatcctggactggctgcaaagtgttgaactgcgccgccgcgtgcatgccggcctgaacaaaggtgaggcgcgcaactcgctggccagggcggtgttcttcaaccgccttggggaaatcagggatcggagcttcgagcagcagcgctaccgggccagcggcctcaacctggtgacggcggctatcgtgctgtggaacacggtgtacctggaacgcgccacccaggggttggtcgaggccggcaagccggtggacggcgagctgctgcaattcctgtcgccgctgggctgggagcacatcaacctaaccggcgattacgtctggcggcagagccgcagactggaagacgggaagtttcggcccttacggatgcccggaaaaccttag

SEQ ID NO: 479884 - DNA, 1326 bp, Shigella flexneri
atgagcgcgctcaactccctgccattaccggtggtcaggctgctggcgttctttcatgaagagttaagcgaacggcgacccggccgcgtgccgcagatcgtgcaactctgggtaggctgcctgctggtgattctgatctcgatgacttttgagatcccttttgtggcgttatcgctggcagtgctgttttacggtattcagtcgaacgcgttttacaccaaatttgtggcgatcttgtttgtggttgccacggtgctggagatcggcagcctgtttttgatctacaaatggtcatacggcgaaccgttgatccgattgatcatcgccgggccgatcctgatgggctgcatgtttttgatgcgcacccatcggctgggactggtctttttcgctgtcgccattgtcgccatttacgggcaaaccttccccgccatgctcgactatccggaagtagtcgtgcgcttaacgctgtggtgtatcgttgttggcctctatccaaccttgctgatgacgttaatcggcgtgctgtggtttcccaatcgtgccattacgcaaatgcatcaagcgcttaatgatcggcttgatgatgccattagccacctgacggacagcctcgcaccgctacccgaaacgcggattgaaagagaggcgctggcgctgcaaaaactgaatgtcttttgtctcgcggacgatgccaactggcgaactcaaagcgcatggtggcaaagctgcgtggcaacggtaacctacatttactcgacgctgaatcgctacgatcccacctcttttgctgattctcaggcaattattgaatttcggcaaaaattagcctcagaaatcaacaagctgcagcatgccgttgctgaaggtcagtgctggcaaagcgactggcggatcagtgaaagtgaagcggtggcggcacgggaatgtaacctggagaatatctgccagacgttgttacaactgggccagatgaacccgaatacgccgccaacgcccgccgccaaaccgccatcaatggtcgccgatgcttttaccaatccagactatatacgctacgcggtaaaaacattgctcgcctgtttgatctgttacaccttttacagcggcgtggactgggaaggcattcacacctgtatgctgacctgcgtgatcgtcgctaatccaaatgtcggttcgtcgtaccagaagatggtgctgcgttttggcggggccttttgcggcgcgattctggcgctgttattcacgctactggtcatgccctggctggacaatattgtcgaattgctgtttgtgctggcaccgattttcctgttgggcgcatag

SEQ ID NO: 479885 - DNA, 747 bp, Shigella flexneri
ttgtgcagcgaaatacgccgggcgtggaaccaaagtaggggctctgcgggggcgcgcacgctggctgaaatgctgacccaaaacggcgtcccgatgagccgttaccgtgccgggcgtctgatgaaatatctgaacctgagcagttgtcagcccggaaaacatcagtacaaaaatgctcgtcaggaacatacctgtctgccgaatctgcttgagcgccagttcgctgtgcccgagccagatagggtatggtgcggagatattacgtatatctgggcaggaaatcgctggtgctatctggcggtcgtcatggatctttttgcccgcagggttatcggctggagcctgtcagcgaatgccgatactgccctgataagcagtgccctgcggatggcgtatgaggtgcgtggtcagccgcgggacgtcatgttccatagcgaccagggaagtcaatatacaggactgaaatatcaacaacttctctggcgttacaggataaagcaaagtgtcagccgacggggaaactgctgggataacagtccaatggaacgcttcttccgcagtctgaaaacagaatgggtgccaaccgatggctacacaggcaaagacgtggcccggcagcaaatcagcagttatattctgaattattacaatagcgtcaggcctcaccattataacggagggctgacgccggaagagtcagagaacagataccatttttactgtaaaaccgtggccagtattacttga

SEQ ID NO: 479886 - DNA, 312 bp, Shigella flexneri; identical to SEQ ID NO: 29742

SEQ ID NO: 479887 - DNA, 1821 bp, Shigella flexneri
atgtatagaactcatcgacaacacagcctgttaagctctggtggagtgccatcgtttattggtgggctggtggtgtttgtgtcggcagcgttcaatgcacaagctgaaacctggttcgatcctgcttttttcaaagatgatccctcaatggtggccgatttgtctcgtttcgaaaaaggacaaaaaataacgccaggggtttatcgtgtcgatattgttctgaatcagacaattgtagatacgcgcaacgtcaattttgttgagataacgccagagaaggggattgccgcctgtttgacgactgaaagcctggatgcaatgggtgttaatactgatgcgtttccggcttttaaacaactggacaaacaagcgtgtgtgccattggcggagattattccggatgccagcgtaacgtttaatgtgaataaactccgtctggaaatttcagtaccgcaaatcgccatcaaaagtaatgcccgtggttatgtcccccctgaacgttgggatgaagggatcaacgcgctattactgggatattcgtttagcggggctaacagtattcatagcagcgcagacagtgattctggcgacagctattttctgaatttaaacagtggcgttaatttaggcccatggagattgcgcaacaattcaacatggagtcgcagtagtggccaaaccgcagaatggaagaatctcagcagctatttgcagcgggcggttattccactaaaaggcgaactgaccgtaggtgatgattatactgcaggcgattttttcgatagtgtcagctttcgtggtgtgcagctggtgtcagatgacaacatgctgccagacagcctgaaagggtttgcgcctgtggtgcgtggtatcgccaaaagcaatgcccagataacgattaagcaaaatggttacaccatttaccaaacttatgtatcgcctggtgcttttgaaattagtgatctctattccacgtcgtcgagcggtgatttgttagttgaaatcaaagaagcggacggcagcgtcaatagctacagcgtaccgttttccagcgtgccattactccagcgtcaggggcgaatcaaatacgcggtgacactggcgaaatacagaaccaatagtaatgaacagcaggagagcaaatttgcccaggccacgttgcagtggggcggaccgtggggaacgacatggtatggtggtggacaatatgctgaatattaccgtgccgccatgtttggtctgggatttaaccttggcgatttcggagcaatttcgttcgatgcgacccaggcgaagagtacgctggcagagcaaagcgaacataaaggtcagtcatatcgttttctgtatgccaaaacgctcaaccaattgggcactaattttcaattgatgggctatcgctattcgacgtcgggtttctacaccctttccgacaccatgtataaacatatggatggctacgaatttaatgacggtgatgatgaagatacgccgatgtggtcgcgttattacaatttgttttacaccaaacgtggcaaactgcaggtcaatatctcccagcaattaggcgagtacggttcgttttatttaagtggtagccagcaaacttgctggcataccgatcaacaggatcggctattacagtttggctacaacacgcaaattaaagatctctcgctgggggtttcctggaactacagtaagtcccgtggtcaacctgatgctgatcaggtgtttgcactaaatttttccctgccgctcaatctgttgctccccagaagtaatgatagctataccaggaaaaaaattacgcctggatga

SEQ ID NO: 479888 - DNA, 258 bp, Shigella flexneri
atgtcttttcatctggaagcgattctcggggaggtggggattaaggatgtacgggcgttacgtatacttggggcaaaaatgtgttggttgcgactgcggcagcaaaacagtctggtgacagaaaagattctgtttatgcttgaaggtgccattatcggcattcatgaagctgcgctcccggtggcacgccgccaggagcttgcagaatgggctgactctcttacgccgaaacaggagtttcctgcggagcttgagtaa

SEQ ID NO: 479889 - DNA, 684 bp, Shigella flexneri; identical to SEQ ID NO: 478773

SEQ ID NO: 479890 - DNA, 1467 bp, Shigella flexneri; identical to SEQ ID NO: 474953

SEQ ID NO: 479891 - DNA, 129 bp, Shigella flexneri; identical to SEQ ID NO: 474954

SEQ ID NO: 479892 - DNA, 873 bp, Shigella flexneri
atgaatatggaagaaattgtggcccttagtgtaaagcataacgtctcggatctacacctgtgcagcgcctggcccgcacgatggcgcattcgtggcagaatggaagctgcgccgtttgatgcgccggacgtcgaagagctactgcgggagtggctggatgacgatcagcgggcaatattgctggaaaatggccagctggattttgccgtgtcgctggcggaaaaccagcggttgcgtggcagtgcgttcgcgcaacggcaaggtatttctctggcattacggttgttaccttcgcactgtccacagctcgaacagcttggtgcgccaccggtattgccggaattactcaagagcgagaatggcctgattctggtgacgggggctacggggagtggcaaatctaccacgctggcggcgatggttggctatcttaatcaacatgccgatgcgcatattctgacgctggaagatcctgatgtgattttgctcggagagctacgtgacagtgagacaatccgtctggcgctgacggcggcagaaaccgggcatctggtgctggcaaccttacatacacgtggtgccgcgcaggcagttgagcgactggtggattcatttccggcgcaggaaaaagatcccgtacgtaatcaacttgcgggtagtttacgggcagtgctgtcacaaaagctggaagtggataaacaggaaggacgcgtggcgctgtttgaattactgattaacactcccgcggtggggaatttgattcgcgaagggaaaacccaccagttaccgcatgttattcaaaccgggcagcaggtggggatgttaacgtttcagcagagttatcagcagcgggtgggggaagggcgtttgtga

SEQ ID NO: 479893 - DNA, 219 bp, Shigella flexneri
atgctcgatacaataaagggtaaggccttagttttgaaaatacccaaatcacgcattcttacagaaacagatgggccatttgctaagtttcgtaatgacccactaatgccatgggatagtgggattgcagagaaacagttagccgcattatgggggattagtcagatggaggttaatgctcagctagttgataattttaaggtattatgtacatcataa

SEQ ID NO: 479894 - DNA, 138 bp, Shigella flexneri; identical to SEQ ID NO: 474971

SEQ ID NO: 479895 - DNA, 264 bp, Shigella flexneri; identical to SEQ ID NO: 478777

SEQ ID NO: 479896 - DNA, 1914 bp, Shigella flexneri; identical to SEQ ID NO: 475016

SEQ ID NO: 479897 - DNA, 576 bp, Shigella flexneri; identical to SEQ ID NO: 475039

SEQ ID NO: 479898 - DNA, 420 bp, Shigella flexneri; identical to SEQ ID NO: 478494

SEQ ID NO: 479899 - DNA, 303 bp, Shigella flexneri
atgttacctattttgacgggcaatgtcggcatcagcggcggaaatagtggcgcgcgtgaatcgacctataccattacgatagaacgcctaccggtgctggataatccggtcaaaacgtcaatctcctgcttcagctggacggatgctatcgatcatggcccgcaaatgacggcactccgcgacggtgtccggggcaaagataaactggatgtgcccattaagttcatctggaactacaaggacttgaagcggttactcgttagagtcacgagagaccttagtaggcctgaggtcctgcattga

SEQ ID NO: 479900 - DNA, 285 bp, Shigella flexneri; identical to SEQ ID NO: 461629

SEQ ID NO: 479901 - DNA, 291 bp, Shigella flexneri; identical to SEQ ID NO: 478793

SEQ ID NO: 479902 - DNA, 228 bp, Shigella flexneri; identical to SEQ ID NO: 475118

SEQ ID NO: 479903 - DNA, 201 bp, Shigella flexneri; identical to SEQ ID NO: 478509

SEQ ID NO: 479904 - DNA, 1554 bp, Shigella flexneri
atgatagttaagtttcatgcccggggaaaaggtggtggcagtggtccggttgattacctgctgggaagggagcgtaaccgggaaggggcaacggtgcttcagggtaatccggaagaagtccgggaactcatcgatgccacgccatttgcgaagaaatacacgtccggtgttctgtcgttcgcggagaaggagctgacgccgggaggacgtgaaaaagtgatggcgagctttgagcgtgtactgatgcccggtctcgaaaaaaatcagtacagcatcctgtgggtggagcaccaggacaagggacggcttgagctgaattttgtcattccgaacatggagctacagaccggaaaacgcctccagccgtactacgaccgcgcagacaggcctagaattgatgcctggcagacgctggttaatcaccattacgggctgcatgacccgaacgccccggagaaccgcaggacgctgacactccctgataatctgccggaaacgaaacaggcgcttgcagagagcgtcacacgcgggatagacgctctttatcatgtcggggagataaaaggccgtcaggatgtgattcaggcgctcacagaggcagggattgacgtggtcagggtgacgcgaagcagtatcagcattgcagacccgaacggcgggaagaatgtcagactgaaaggagcgttttatgagcaatcttttacagacgggtgcggagttcgagaaaaagctgaaagagagagccgaatctacagagaaaatgctgaacgacgagttcaggaagctcgaagaatctgtaagcaaggctgtgacatcaaacgagacgaaaatcaaagacgctatagccctgttcacagcttcgacagaggaatcactgaaaaaacaccgggaaggggtgaaagaggcgatgatgcagcacaggaaggacgtgttaaagctggcagggaatacgggcatgatgttactggggatggtcattttcctgtttaccgtgagtggcgggacgctctggtatcttggcgggatgatacaggcgaacctggaagaaatcaggaagcagaacgagagtctggagaagctgaacgcgaagacatggggcgtggagtttgtgcaggacgggaacaggaaatttctggtccttccttacgggaagtcagcagaggtgatttcctttcaggggaaggaatgggtacatctgaaggagtgacacagagtgacagagctggaaacacatttgctgaacgccttagagcagctgcaacaggactatatgcagcggctgagcgaatgggagagcgccttcgtggaattgcagaaaatgttttcgcttacgcaacgggacaacgcgatgctgaacgagcgggtcatgcagttgagtcagcaggtgtagcacttgagcgagcagacagaacgcttgagccagttatacagcgagaactggagataagggacgaacggctgatacaggaatgcgaacatgcgttatccctggagcgtgagcgacagctggaaatacaggaacggacactggatggcccttcgctgggatggtaa

SEQ ID NO: 479905 - DNA, 606 bp, Shigella flexneri; identical to SEQ ID NO: 478508

SEQ ID NO: 479906 - DNA, 360 bp, Shigella flexneri
atgcaactgagcaggctgacgctgagaagtaaaaagccggagcttgtggagcaagagctgtggggtgtcttactggcttataatctggtgagatatcagatgattaaaatggcggaacatctgaaaggttactggccgaatcaactgagtttctcagaatcatgcggaatggtgatgagaatgctgatgacattgcagggcgcttcaccgggacgtataccggagctgatgcacgatcttgcaagtatgggacaacttgtgaaattaccgacgagaaggggaagggccttcccgagagtggtaaaggagaggccctggaaataccccacagccccgaaaaagagccagtcagttgcttaa

SEQ ID NO: 479907 - DNA, 603 bp, Shigella flexneri; identical to SEQ ID NO: 475189

SEQ ID NO: 479908 - DNA, 651 bp, Shigella flexneri
atgtcaaaatttatatgcaaaaagaaagcagatgctttcagacaattggcaaattataaattaatcagtaaatctgaaaactgtgctggtatggcacttaatgttcttaaagcaggaaattctgaaatatactttccactccctgacgttaaattggttgctacacctaacgatgtatacgcgtatgcaaataaagttaggcaacgcattgaaagtctcaatcagtcttataacgaaataatgaagtatattgaatctgattttgatctttccagattgactcaattacgacgcagctatcttaaaagtttcaataaaattaaccttatccacacaccaaaaacattcaagcctttatcaatttcactttacaaacatcctactgaaaatgtatcttcagaagactttgatgtggtcatcaacgcttgccactcatacttagtaaaatcagcacccagcaatatgactcgtgtattaaacgaattaaaaaccgaagcaacagataaaaaagaagaaattatcgaaaaatcaataaaaattattgattattacaattctcttaaatcgccagatcttggaaccaaactttacattcacgacttattacagattaataagcttttattgaataactctcattctaatatatag

SEQ ID NO: 479909 - DNA, 249 bp, Shigella flexneri; identical to SEQ ID NO: 464355

SEQ ID NO: 479910 - DNA, 375 bp, Shigella flexneri; identical to SEQ ID NO: 475220

SEQ ID NO: 479911 - DNA, 285 bp, Shigella flexneri; identical to SEQ ID NO: 461629

SEQ ID NO: 479912 - DNA, 294 bp, Shigella flexneri
gtggcgcacgtcttcggtgaacgcactctggccacactggagcgtcttctgagcctgctgtcggcctttgaggtcgtggtatggatgacggatggctggccgctgtatgaatcacgcctgaagggaaagctgcacgttatcagcaagcgttacacgcagcgcattgagcgacataatctgaatctgagacaacatctggcaaggctgggacggaagtcactgtcgttctcaaaatcggtggagctgcatgacaaggtcatcgggcattatctgaacataaaacactatcagtaa

SEQ ID NO: 479913 - DNA, 366 bp, Shigella flexneri; identical to SEQ ID NO: 478820

SEQ ID NO: 479914 - DNA, 555 bp, Shigella flexneri; identical to SEQ ID NO: 474545

SEQ ID NO: 479915 - DNA, 1053 bp, Shigella flexneri
ttgatatgggtactgtcagaatccatcggcgctctggcactggtgccgctgggattgttatttaaaccacactatctgctgcgccatcgcaacccacggttgctttttgagtcgctgctcacgttagccatcacactgacgttaagctggctttcgatgctgtatctgccgtggccttttactttcattattgtgctgttgatgtggagcgccgtgcgcctgccacgaatggaagcctttttgatcttccttaccacggtgatgatggtgtcgctgatgatggccgcggatccctccctgcttgctacgccgcgtacgtacctgatgagccatatgccgtggctaccgtttttgctgatcctgctgcccgccaacatcatgaccatggtgatgtatgcctttcgtgcggaacgcaaacacatttccgaaagcgaaacccgctttcggaacgcgatggaatattccgctatcggtatggcgttagtgggcaccgagggacaatggctgcaatccaacaaagcactctgccagtttctcggttacagtcaggaagagctgtgcggactcacctttcagcaactgacctggccggaggatctcaataaagatctccaacaggttgaaaagctgataagcggtgaaataaacacctattcaatggaaaaacgctactacaaccgcaatggcgatgttgtctgggcgttgcttgccgtctcactggtgcgccacacggatggcacgccgctctattttatcgctcagattgaagacattaacgagctaaaacgcaccgaacaggtgaatcagcaactgatggagcgcatcacgctggctaacgaagcgggcgggattggcatctgggagtgggagctgaagccgaatatttttagctgggataagcggatgttcgagctgtatgaaattcctccgcatatcaaaccgaactggcaggtgtggtacgagtgcgtgctgccggaagatcgccagcatgccgaaaaagtgattcgttgcaatcacgctcgccctttaagctggaatttcgcattgccgtga

SEQ ID NO: 479916 - DNA, 684 bp, Shigella flexneri
atgtcccgttttgtcctcggtaactgcatcgatgttatggcccgtattcctgataacgccattgatttcatcctcaccgatccgccgtacctcgtcggttttcgtgaccgtcaggggcgtaccattgccggcgataaaaccgatgattggctgcaacctgcctgtaatgagatgtaccgcgtactcaaaaaagacgcgttaatggtgagcttctatggctggaatcgcgtcgatcgctttatgtctgcctggaaaaatgcgggattcagcgtggttggacacctggtcttcaccaaaaactacacatcgaaggccgcatatgtgggctatcgccacgaatgcgcttacatcctggcaaaaggccgtccacgtctgccacaaaaaccgctaccggacgtgctgggctggaaatattcaggcaaccgccatcacccgacggaaaagcccgttaccagcctgcaaccgctgattgagagcttcacgcacccgaacgcgattgtgctggacccgtttgcaggcagcggttcaacctgcgtggccgcccttcagtccggacgccggtatatcggtatcgagctgcttgagcagtatcaccgtgccggacagcaacgactggccgccgtgcaacgggccatgcagcagggggccgcgaatgataactggtttgaaccggaggctgcgtaa

SEQ ID NO: 479917 - DNA, 990 bp, Shigella flexneri
atggttacgctttggggaaattatgaggggatctctcagcgctttgctggtaaagaaaagatgctttctattggcgtataccccgatgtaacgctagccgatgctcgcgagaaacgcagtgaagccaggaaactcctcgctgctggaggcgatccaggggaggcaaaaaaggaagaaaaaatcgcgcagcaaatgagtctgaaaaatacgttcgaggctattgctcgcgaatggcaccagttaaaagctgatcggtggtcattacgctatcgtgatgaaatcattgatacctttgaaaaagacatttttccctacattggcaagcgccctattgccgaaatcaaaccaatggagttactggaagcactgcgtaaaatggaaaaacgtggagctctggagaaaatgcgcaaggtccgccagcgctgtggtgaggtgttccgctatgcaattgttactggccgggcagactataacccagcccccgatcttgccagtgctttagctacaccgaaaaaagtacattttccctttcttactgctaatgaacttccccacttcctcaacgatctggcgggttataccggaagtataatcactaagacagctactcagatcattatgttaaccggcgtacgaacacaagaactgcgttttgcacgctgggaagatatcgattttgagacaaaattgtgggagatcccggcagaagtaatgaagatgaagcgacctcatattgtgccgctctctgagcaggtcattatgctatttaagcagcttgaaccaatctcaaaacatcatcccctagtctttatcggtagaaatgatccccgcaaaccaattagtaaggaaagcattaaccaagtaattgaattacttggatataagggaagactcacagggcacggtttcagacacaccatgagtacaattctgcatgaacaaggctttaattccgcctggattgaaatgcagttagctcatgtggggtaa

SEQ ID NO: 479918 - DNA, 375 bp, Shigella flexneri
atgaaagcgctggaaatggcatgggaaacccgtggtaagcccggcggggtgatgttccacagcgatcagggcagtcattatacgagcaggcagttccggcagttattgtggcgataccagatcagacagagtatgagccggcgcggaaactgctgggataacagcccaatggaacgcttcttcaggagtctgaagaacgaatggatgccggtggtgggttacgtaagcttcagcgaggcagctcacgccataacggactatatcgttggatattacagcgcactaagaccgcacgaatataacggtgggttacccccaaacgaattggaaaatcgatactggaaaaactctaactcggtggccagtttttgttga

SEQ ID NO: 479919 - DNA, 348 bp, Shigella flexneri; identical to SEQ ID NO: 475245

SEQ ID NO: 479920 - DNA, 297 bp, Shigella flexneri; identical to SEQ ID NO: 479117

SEQ ID NO: 479921 - DNA, 195 bp, Shigella flexneri
atgctggagaatgagtaccctcagagggtggctgaccggctgaaagcatccggtctgagcggtgatgcggatgcggagagggaagccggagcacaggtgatgcgtgagactgaacagcagatttaccgtcagctgactgacgaggtactggccctgcgattgtctgaaaacggctcacaactgcaccattcataa

SEQ ID NO: 479922 - DNA, 294 bp, Shigella flexneri; identical to SEQ ID NO: 25632

SEQ ID NO: 479923 - DNA, 363 bp, Shigella flexneri; identical to SEQ ID NO: 478531

SEQ ID NO: 479924 - DNA, 348 bp, Shigella flexneri; identical to SEQ ID NO: 474091

SEQ ID NO: 479925 - DNA, 285 bp, Shigella flexneri; identical to SEQ ID NO: 461629

SEQ ID NO: 479926 - DNA, 522 bp, Shigella flexneri
atgtcaaagccaaaatacccttttgaaaagcgccttgaagtcgtgaatcactacttcactactgatgatggttacaggatcatctcggcacgttttggtgtcccccgaacccaggtcaggacatgggttgccctctatgaaaaacatggagaaaaaggcttaattcccaaacctaaaggtgttagtgctgatccagagttgcgtattaaggtcgtgaaagctgtgattgaccagcacatgtcccttaatcaggctgctgctcactttatgcttgctggtagtggttctgtagccaggtggctgaaggtttatgaagagcgcggagaagctggtttacgcgcgctcaagattggcaccaaaagaaacattgcaatatcagttgatccagaaaaagcggcatcagcattggagctgtcaaaagaccgacgcattgaggatcttgaaaggcaagttcgatttcttgaaacgcggcttgtgtatctaaaaaagctgaaagccttagctcatcccacgaaaaagtga

SEQ ID NO: 479927 - DNA, 225 bp, Shigella flexneri; identical to SEQ ID NO: 133446

SEQ ID NO: 479928 - DNA, 294 bp, Shigella flexneri
gtggcgcacgtcttcggtgaacgcactctggccacactggagcgtcttctgagcctgctgtcggcctttgaggtcgtggtatggatgacggatggctggccgctgtatgaatcacgcctgaagggaaagctgcacgttatcagcaagcgttacactcagcgcattgagcgacataatctgaatctgagacaacatctggcaaggctgggacggaaatcactgtcgttctcaaaatcggtggagctgcatgacaaggtcatcgggcattatctgaacataaaacactatcagtaa

SEQ ID NO: 479929 - DNA, 2190 bp, Shigella flexneri; identical to SEQ ID NO: 476963

SEQ ID NO: 479930 - DNA, 210 bp, Shigella flexneri; identical to SEQ ID NO: 475253

SEQ ID NO: 479931 - DNA, 495 bp, Shigella flexneri
atgctcaccgttaagcagattgaagcagcaaagccgaaagaaaaaccataccgccttctcgatggtaatggcctgtacctttatgtccctgtatccgggaaaaaggtatggcagcttcgctacaagattgacggtaaggagaaaatcctgaccgtcggaaaatatccgcttatgactttgcaggaggcaagggataaagcatggactgcgaggaaagacatctcggctggcatcgatccggtaaaggcgaaaaagtcttcgtctaacaacaattcatttagtgcgatttacaaggaatggtacgaacacaagaagcaagtctggtcagtagggtatgcgactgaacttgcaaaaatgtttgatgacgacattttacccatcatcggcggccttgagattcaggatattgagccgatgcaactgctggaagtaatccgcagatttgaagatcgcggtgcaattgaagtggtcaacaaaaactggccaccgagttag

SEQ ID NO: 479932 - DNA, 249 bp, Shigella flexneri
atgcgcacacaggttgtattgcaaaaatggggtaacagcattgcccttcgactaacgggaaaccttaaaaccgttccgggtttttcagtgggtgatatcgtcaacgttgaaattagtgaaaaggggctttttgtagaaaagcctgcacgccgtcgcctgagtgaagccgaactactcgccgggataacgccagttacagcgcacgctgacgaaattgccaccccattcaatgaggaggttgattactga

SEQ ID NO: 479933 - DNA, 345 bp, Shigella flexneri
atgtttgtacctaagcgtggtgatatttgctggctggattttgagccgcagaaaggaaaagagatcggaaagtatcgcccggcactcatactatcccatgagcaatataaccgactcaccgggcttgtcatatgctgccccataagtacgagcatacgaaatgctcccacagaagttccggtaacaaatctggacgcccccagcgtggtagcaaccacactcattcaaacccttgactggcgtcagcggaaagcgcgcttaatcacagaggcagaagatggggtatttaatgatgtgcttgaaagagtcataaccctgattggtggagagcatctgcttaagtaa

SEQ ID NO: 479934 - DNA, 1272 bp, Shigella flexneri
atgggcggtctgaatactccacatttgcacggcgctgatatagtgagccgactcaggggattaatgtcccggaatcgcctgaaagcaaacacagcaagcataagcgatgagacgcgtcgcgcgctggacaatgaatatcaaaaactggagcgtgagcttgagcttcacaccctgcatactgcaagcggtgggggtaataacgacggcattgagcgttataattgcactgctgattctgttgtatcacaacgaaatcaacaggctcagatggttttcaattgcgctatcgagtcgataaccggaaaacatccgaaggatttgcacttttctggtgacactgcgcgctattcgtcagaagttgaacccgttccccgccagagtgcaacgcttgccagtggatggcaggcaaatttccttgctgaaataactcccgtgcctgttacggatatatcaggtcgggttgtgctggtagacgcttcggggccgttggcacgtacatcgccacctcacgagcgccgttcgccactacaggcgcattcactggtttcaaggggctaccgctgcgagcaggttaattttgattttgcgctgaactacgacaatgttgatgctcacgcatccgcaaacggtcttgaaggaagcgcacgggctgcttttgaacgccggaaatggctggatttgattcagattggttttaacggtacgcactatgccgatacatcagatcccggaacatatccggggcgtgatgattgcggcgtgggctggttgcagaagtttcgaaatgaagcggcgggaagggttatcagcggcctttctgtttcatcaccgaaaagtaatacacgcggtacacaccatacgatagatgcgctcgttctggatgcctggcaatccatgattgatgaacagcggcaggaaggcattgtggccgtatgcagtcacaatacgctggtccgtaagcaatggcctttgataaaccgtcttgatccatcgcagatgaatcaggaaattttgcttaacgaggaaatcattaaaaatcccgttctggggaatctcccggctgtgaccgttccatttttcccggacaatgctgtattgatcacacctcttgccaatctgtgtctgtactggcagcgtggttccgttcgtggcctggtaaaaaacgagcctcagtataatcgcctcgcgttctatgagtcctgtaaccttgactgggtggtggggcaatatgaggcagggtgcttactggatgggattgactggaaagaatag

SEQ ID NO: 479935 - DNA, 711 bp, Shigella flexneri
atggatataactcaggcaagcgccgaacatcaggtatgtaaagcacagtttgatacagccatggcaaaactcagtgaacaggaatcattaatcaccaatctggaagcaactatcgaacagacgaaaggggagctggaatctctcgatcgtgactggcagaactcaatcctgtctgcgctgggcgtaaaaacggaagcctccgcgaaattatccattcaggcgggtgtggcgcgagaaaatcttgagcgtctgcgggtgctgcatgatgaggcgcgcatcaggctactggagtgtcgttataacgcggcagaggctggttgtgcttacgaaagcattgataataagttgcgggcagagatatttgcaaaagcacttcccgaactgattaacgagctgacccctgctctgttattgattcgtggtttatgtgagctgcttggccagccgctgtataacgcagaaaagaaaatatgcgaaacactgaaagcgacagatactgctgaaagtgtcgggatgattcgcggccggattaacgataccgaaagcgacacctccagcccgctgcgttattgcccggagaaactcccggattcggtaagccgcgcaatcaggaacgccccttcacctgtacaatggagcgcggcgcgacagaatccagaaaaaatgcgcgaccttgcggagggcagagaactctgccgggggtggcagtaa

SEQ ID NO: 479936 - DNA, 234 bp, Shigella flexneri
atgaaaaaacaaaagaaaatgcgatgcgtattacgctgtattcgtatcccgcacgaaatcgaccataaaataaatcagatatgtcaggacagagagatgaactactcccagtgcgtcagaatgtttatcagtcagggaattaaggccggggaaacgcaggaagaagactgcaacgggcgcaatgtagcgggggatgtgtgggcctgggcaaatgaccagaaccacacgacgtaa

SEQ ID NO: 479937 - DNA, 183 bp, Shigella flexneri; identical to SEQ ID NO: 22737

SEQ ID NO: 479938 - DNA, 138 bp, Shigella flexneri
atgaactactcccagtgcgtcagaatgtttatcagtcagggaattaaggccggggaaacgcaggaagaagactgcaacgggcgcaatgtagcgggggatgtgtgggcctgggcaaatgaccagaaccacacgacgtaa

SEQ ID NO: 479939 - DNA, 183 bp, Shigella flexneri; identical to SEQ ID NO: 22737

SEQ ID NO: 479940 - DNA, 1002 bp, Shigella flexneri
atgtcgatcagaaagatggatgatgggcgatggctgctcgatatcaggccccaaggggcgtacggcaaacggatacgtaaaatttttgtcaggaaagggagtgcggaggtcttcaaagaacatattttacagaatttccataacaacccatggctggctaaacctgctgatcgacggagattatcagagctgcttgatatatggtggatgcttgatggccgtaaccaggcttacggtgatacctacaggattcggatggagaaagtgattcgtgaaatgggagatccgcgtgccagccagatgacgcaaaaatttatgcttgagtatcggtcagagaaattacaggccggcttaatgccatccagcattaatcgtgacttgtgcgttctgtctaccatgttcacggtgctgattgaagctgaggtctttcacaacccgaaccctgtacgcggtatacgcaagctaaaaattcagaatacagagatggcctttctttctgatgatgagattgagcggcttcttgagcgactggagggtgatgcgcgtcgtgttgccattctgtgtctttctactggtgcccgatggagtgaagcatcggaactacgtggagagcacatcattggcaaccgggtgacgttctttaacaccaaaaacggaaaatcccgttcggttcctgtggctgattcggtcgtgccgctgattaagacccaccggacaggggtgttgtatcaggttgattatctgaagttccgggagatccttcaggaggtgaagccggatttaccgaaggggcaggctacgcatgtcatgcgtcatacatttgccacacactttatgatgaatggcggaaatattgttacgttacaacgaatcctggggcatgccacgattcaacagacaatgacgtacgcgcatttttctcccgactatctggcggatgccatgaggtttaacccgatagctaacatggcattcactgaacaagaagagccagcagagtaa

SEQ ID NO: 479941 - DNA, 2670 bp, Shigella flexneri
atgaaatctgacatcagaaaagagattattaaccgtcttatccgtgattacaacttcaaagaagaaaataactacctccgatatggtgtttgtccacaatgtggaaagaaagagctgtttaccagccttgagaagccgtacatcgtacactgcgggcgtgaaaataaatgcggtacagacctgctaaccaaagaactttacccggatgtgttttcatcatggtcagatcgctatatcagcacgaaagacgagccatatgcagcggcggcagcttatcttcaggaggcgcgcaatattgctgtggagccactgaaaggggtattcactcaggagcgataccaggacaaggaaagcggcgaacaggccgctaccgtgcgttttacactggctgacggcgtgtggtgggagcgcatcatagaccgaccggaacgcttcgaacggaaggcgaatttttccggcagctacaaggggctgtggtgggcttatccgggaacagatttaagcagggccaaggaaatctggatttgtgagggtgtctttgatgcaatcagccttaaccagaatggcattgcggccgtttctgtcatgtctgccgtgaattatcctgatgaggcgctggaagaactggcaaagcagtgcggagataatccccgtccggttattgtgtgggcgctggataacgggcgtgcaggtgagcgttacgcgaaaaaacatgcagaacgcagcgccgaagacggctggagaacggcggcggcgttaccgggtaaaaacagcaataaacgcgactggaatgatttacacaccgccggaaagctgcgtagccatgatgtaaaaagataccgttattacggtgatttattactggcgaaatccccaagagataaggcgctgataatattttccttttgtgagcggaaggaatttcattttacctttgataaccgtgttttctggttcaaactggacattgagcgctatatgaaggctgttgagcgtgccaagaatgagcgaaatgttgatgaggatgaagcgcgcaaaattgcacttaaggaatccggtactgtaaaagaaatcgcaaactgtaacccagcgccgctttattacattcgaaataatgacacggatgaagcatggtattacttccgcgttacgttcccggatggcgcgacggtgaaaaacacatttacatcaggacaattaacatccgcatctgaatttaaaaaacgcctgttgcatgtggcaaaaggcggcatttataccggaacaactgcgcaccttgacgcattaataaaaaatgaccttcccgcaataaaaagtgttatcggtcaggattttatcggatacaacaaagagattggcgcgtggttgtttaatgatatcgcggtttgtaatggtaaaacctacgaaatcaatgaagaggattattttgaaattgatggcgtaaacgcaaaaccattgaataaaaaaccaatattgcagattaactataaaaaaccgggtgaatttacaacgtcctgggtggaagatctctggctggcgtttggtgaaaagggaattattaccctggccttctggctgggttcgttgttcagcgaacaaatcaggcagaaaaacacgtcttacccttttcttgagattaccggagagcctggaacgggtaaaacaacgctgattgatttttgttggcgtttgtgtggccgtgacaactatgaaggtgttgatccaaccaaaggatcggaatcaggctggaagcgaacttttggacaggtcgccggattacctgttgttctgattgaagcagaccggggagacaatgcgcaaaaaagaggcgcgtttgacttcgataacctgaaaagcctctataacggtggtggtattggggtacgtggcgttaaaaccaatgataacgccacatatgaccccgtttttaagggggctgtcgtgattgcgcaaaatgccacggtaaacgcctcgtcggcaattattgagcgcctggtacgtgtatacaccgataaaaaacgccactcaccagatagccgactggcagcaaaacggctggagctttaccccgttgagcaggtatcaggttttatccatcgggcagtaagtcaggaacggacgattatggagacgtttatggcactctcggattctgagacaacccgcctttatagttgcgaaaatattcgtcatcagcgtattgccaaaaatcacgcgcaacttatcgcgctggtcagggcgctgaaatgcgttattgatatcccggatgaatggcttgatgccacatgtctggaactggagcgaatggcagaggaacaggctaaagcggtaatggatgacttgccggaagtgatggcgttctgggagacgttcgactatctggacggcatcacagcatacggcgtaaatcattttggcaagggacggcagaatgagtttgccatcagtatcccgcaacttgagcaggttgccgccgttcaccacgtgaagatccaaaccaatcccgaaatgataaagcttctcaaggctggccgttctcgatcgctgattggatacaagcccgtccgtagcgaggtatccagacaggcgaacgccgggaggggaatagccgaggccagagagaaggaggtattgaaatgctggatatttagtaacaaggagggggcttaa

SEQ ID NO: 479942 - DNA, 300 bp, Shigella flexneri
atgtctaaacgtgagaatagcgaaatttttttagatagagaatatgctggcttttttacagaaagtgcaaaggaagatctcacagatgtgattaatctcgtcagtttaatatctgtggtctttggcgataaaaatggtagagcatcagcagaaattataaatgaagaaattgtatctctgtctaacattatttatagggaattacaatcaataaaatctggtatgcattcatccggcggaattttttcatggcatagcgccgaaaccgccgggattgccaaagcaataagcaacgagtaa

SEQ ID NO: 479943 - DNA, 219 bp, Shigella flexneri
atgaaaagccgttcaatatcccgtaaaaataatggcagtggtgaaaaacgtttctttgtgttgggttatgccgttaataaacgtgggttaaccaaacatgcacatgcaacggtatacggaacaggaccgggcgaagccatacgccgcgcagccgaagggctggaagagctgggaatgacacatttcagggcattgaaggttacgcagctttccgcctga

SEQ ID NO: 479944 - DNA, 189 bp, Shigella flexneri
atgtacgagattcatattaaattgcgtaatgtggtaacaggagaggaagaaaacttctacacgatacgtaaatataaatcaaaaggaaaagcggcaagggacgctatcaggtatacggaagaaattgcgccgaaatatcaattgccagaagaagaactcacagcatcagtggtaaaggtgaagaaatga

SEQ ID NO: 479945 - DNA, 183 bp, Shigella flexneri; identical to SEQ ID NO: 22731

SEQ ID NO: 479946 - DNA, 522 bp, Shigella flexneri
atggcttttttactcttaaaaatcaatcactcagcgcaagtgagcaaaaataatttgcaatattgcttgactcgcttttttgtcatggcgtatcgtttgcccgcacctcataaagcgggtgccgggtttagcagcctgaacaatcaagcgggtagccgctatatttccgtaatgcggtttttttgtgcccgtaattccaccctaccccgtattatggcggggcgtaatgggggagcctttgcgctcgctggttccttgattgccagtctgctaaccctgttacgtcccgccaccatgtttagcagcgtgctggcgagactccgtaaacttaatcaaggagccgccaaaatggctatatcaacacgccctgattttatctggcgctttatgcagtgccacggtaaaaatattcgccttcataccgttaccgctgccagtgagcgcgaagcgcgcgccatgcttccggcatcccgtctggtctttgttgcccgtatccgtgtccgggaggcgtgccatgtttaa

SEQ ID NO: 479947 - DNA, 222 bp, Shigella flexneri
atgtcagcatactcacagaccagcgaaaggcggattcaaaaattaataagactccccagagtcattgaaatcacagggagatcaagagctcgaatttacgaagatataaaatctgatatcttccccaaaccaataaaaataggccctcgtgcggttgcatgggttgaagaagaaattatcgactggatagaagaaagaaaacaacaacgttttcaggcttaa

SEQ ID NO: 479948 - DNA, 1263 bp, Shigella flexneri
atgaaactgactgatgtagctgtacgtaacgccaaaccagataaggacaacaacaaaattaaaaaacttcgagacgggaaagggctgtatctctatgttcaccccaacggctcaaaatactggcgctttcgcaaggttatcaacggtaaagaaacgacccgagctttaggcatttatcctgccgtaacacttgcacaggcaaggaacgctcgtgatgaatatctggcgagcctggctaaaggcattgacccactgcacacgccaaaacctcaaatagtgctttttgaagacgttgccagagagtggcacagccggaaaaagggctggagcgaattacacgcgcaaaaagtcttaaaagacctggaaaaccacatcttccccattctaggtaaaaggccaattaacgagatcacaaccatggatctactgattcctttacgcaaaatggaagataaaggagtgcttgagacagcatcacgtaacaagcagcgaatgaacgccattatgcgctacgctgtacagaatggaatgattaaatacaatccagcgcaggagctaaacggtgcaatcgaaactaataaaaccaaacatcgccctgctcttccccttgagcgattacctgaattacttggcaaaataaatgattaccactataagatgaatggacggttattaacgcaatttgcactaaaattaaatttattaatttttattcgctcaagtgaattgcgttttgctcgttggaatgaaattgattttgataaatcaatgtgggtaataccagcagaacgcgaaaaaatagaaggcgtaaaatattcatatcgtggaacgaaaatgggaacccctcacgccatccctttacccactcaggccatgcagcttcttgacgatataagaaatatatccggtgatgaagtgtttattttccccggcgaccattaccagataaaaccaatgagcgaaaacaccattaacaaggcattacgccacatgggatacgacacaaaaaaagatatttgtggtcacggattcagggccatggcctgttcggcgctgacagagtcaggcaggtggacaagagaagccgttgagcttcagatgagtcacagggaaagaggcagtgtccgggctgcatacgttcacagagctgaacatatgcaggaacgccgccgaatgttgcaatggtgggctgattatctcgacacctgcaagacggcatatattgccccctatgattttaaatgggctaacgaaacagactga

SEQ ID NO: 479949 - DNA, 210 bp, Shigella flexneri; identical to SEQ ID NO: 476448

SEQ ID NO: 479950 - DNA, 1419 bp, Shigella flexneri
atgcatgtacaccccatttcaactttccgtttgttccaggaaggtcatctgctacgtaatagcatcgctatttttgcgctaaccacgctgttctattttattggtgcagagttacggctggttcacgaactttctcttttctggccgctgaatggcgtaatggcgggggtgtttgcccgctatgtctggcttaatcgactgcattactatgcgatcagttatgtggcgatgctggtttatgatgccataaccaccgaatggggactggtttcactggttatcaatttctccaatatgatgtttattgttaccgtcgccttactggtcgtgcgggataagcgtctggggaaaaataagtatgagccagtaagtgctttacggctatttaattactgtctgattgccgcattattatgcgctattgtcggggcgattggttcggtcagtattgatagtctggatttctggcctttgcttgcggactggttcagtgagcaattctcaacgggcgtgttgatcgtgccttgtatgctgacgttggctattcctggagtgctgccgcgctttaaagcagaacagatgatgcccgccatcgcgtttattgtgtcggttattgcctcggtagtcattggcggagcggggagtctggcgttcccgctgcctgcattaatctggtgtgcagtgcgctatacgccgcaggtaacatgtctgttgacctttgtcaccggtgcggtggaaatcgtactggtggcaaattcggtgattgatatctcggtcggttcgccgttctccattccggaaatgttctccgcacgtctcggtattgccacgatggcgatatgcccaattatggtttcttttagcgtggcagcgatcaatttgctaatgaagcaagttgcgctgcgagccgactttgattttctgactcaggtttactcacggtccggtctttatgaggcgctgaaaagtccatcgctgaaacagacacaacatctgacggtcatgctgcttgatatcgactatttcaaaagcattaacgataactatggacatgaatgtggcgataaagtgttaagcgtgtttgcccggcatattcagaagattgtcggtgataaggggctggtggcgcgcatgggcggcgaagaatttgctgttgcagtgccgtcggtgaatcctgtcgatggtctgctaatggcggaaaaaatccgtaaaggcgttgaactgcaaccattcacctggcaacaaaaaacgctttatctcacggtaagtattggcgtcggtagtggtcgcgcatcgtaccgaacgctgaccgatgattttaataaattgatggtcgaagccgatacgtgtctgtatcgctcgaagaaagatgggcgcaaccgtaccagcactatgcgttacggtgaggaagttgtctga

SEQ ID NO: 479951 - DNA, 267 bp, Shigella flexneri; identical to SEQ ID NO: 476582

SEQ ID NO: 479952 - DNA, 408 bp, Shigella flexneri
atggctgtctgcactgctgtcggtataggtcatcgtgacaccggtaaacaggtccacaccgtccagttcatgttttttgtcaaagccgacctgaacatgggtgtaattatcactgtaaccaccgtctgcagaaccggcaccactcatgatgcgcgcccaggcaccggcatcaccgtttgtgtcacgcaggtcacccatacgtttgttcagattgttaacttccgtcatgaagtttttatacccggcattcatgaaactgtcagccttcgcggcagcggctttatcagcctccgctttaaaaccatccagtatccacttcgtattgccaccactggtatcaacatgcagggttggggtcacccgactgaaacctgtcacccgggtgccggccttaaacatctctgctga

SEQ ID NO: 479953 - DNA, 534 bp, Shigella flexneri
atggaagtcagcgtctttcagcgacagtgttttcattgtaaactgacggttttcccagtctttctggttcaggctgaccggtgcactgccactgatggaggcatggataaccggatgtccctggaatatcagggtgccactgtcctgactcagggtaccttccggcaggttcacgctaccatcaaagattacctttcttccccccggcacctgtggaatggcgacatccatattcccggtcagctgaccatgaaagataacgggttgttttgcccgcccggccaggatcctatcttttactgtctgaactgctttgtttttgttcatgccaacaaactcccactgagccggatcattcaggctgttcccccacagagtgttaccatagctggcagatttcagaatatagaagcgggtctggctgttgagtatcatgctgtacaggtttcctggagtgccggtaccaccaaagggggatatatttccaatcgtcggttcactgacatttgtatcctgagccttaagatccagtaa

SEQ ID NO: 479954 - DNA, 279 bp, Shigella flexneri
atgcaagttgtcaccggcaacgccgttgaccttccaggttacattcgtccccttgtcagtaataatgccggcacccgtccatgtttttccggattcagcagatacggtgtaactgtctttaaattcgagataaccggcaccctgagtcacactgtctttcaggataattgcaccattctgcccgctgaataccagatttttaccggcattgaggtcattgtctttctgcccgtgcatggtccagtttttactgccctggctcagggtacctgtgcctga

SEQ ID NO: 479955 - DNA, 366 bp, Shigella flexneri
atgtctgaaatcacagcctctcgtccggaagtggtcaacgggcatacggacgttatctgctcaaccagtatccgccacattctggctgtacgaaagagtacattgctgcaaatcgacacacttatccgacaactggctgaagtatcagcaatgacagaaagtattagaggtaaaacggctctggactgggccatgaaacaggattttcgctgcggttgctggctgatggagaaaccggaaaccgcaatgaaagccatcacacgcaatcttgatcgcgaactctggcgtgatctgatgcaacgttccgggatgctgtctgatggatgcgcagacccgggacacatggtacaggtcactggaatatga

SEQ ID NO: 479956 - DNA, 1527 bp, Shigella flexneri; identical to SEQ ID NO: 16547

SEQ ID NO: 479957 - DNA, 354 bp, Shigella flexneri; identical to SEQ ID NO: 466835

SEQ ID NO: 479958 - DNA, 957 bp, Shigella flexneri; identical to SEQ ID NO: 476538

SEQ ID NO: 479959 - DNA, 198 bp, Shigella flexneri; identical to SEQ ID NO: 81716

SEQ ID NO: 479960 - DNA, 621 bp, Shigella flexneri
atgcgccagaatgcgctgttgcttgagcgaaaacctgctgtaccgccatcgaaacgggcacatacaggcagagtggccgtgaaagaaagcaatcagcgatggtgctctgacgggttcgagttctgctgtgataacggagagagactgcgtgtcacgttcgcgctggactgctgtgatcgtgaggcactgcactgggcggtgactaccggcggcttcaacagtgaaacagtacaggacgtcatgctgggagcggtggaacgccgcttcggcaacgatcttccgtcgtctccagtggagtggctgacggataatggttcatgctaccgggctaatgaaacacgccagttcgcccggatgttgggacttgaaccgaagaacacggcggtgcggagtccggagagtaacggaatagcagagagcttcgtgaaaacgataaagcgtgactacatcagtatcatgcccaaaccagacgggttaacggcagcaaagaaccttgcagaggcgttcgagcattataacgaatggcatccgcatagtgcgctgggttatcgctcgccacgggaatatctgcggcagcgggcttgtaatgggttaagtgataacagatgtctggaaatatag

SEQ ID NO: 479961 - DNA, 138 bp, Shigella flexneri; identical to SEQ ID NO: 474566

SEQ ID NO: 479962 - DNA, 327 bp, Shigella flexneri; identical to SEQ ID NO: 466843

SEQ ID NO: 479963 - DNA, 354 bp, Shigella flexneri; identical to SEQ ID NO: 476372

SEQ ID NO: 479964 - DNA, 327 bp, Shigella flexneri; identical to SEQ ID NO: 476461

SEQ ID NO: 479965 - DNA, 195 bp, Shigella flexneri; identical to SEQ ID NO: 464447

SEQ ID NO: 479966 - DNA, 195 bp, Shigella flexneri; identical to SEQ ID NO: 464447

SEQ ID NO: 479967 - DNA, 180 bp, Shigella flexneri; identical to SEQ ID NO: 474761

SEQ ID NO: 479968 - DNA, 366 bp, Shigella flexneri
atgctggaagcggccagagaggccagacgtcaggaaattgaagcatggcgcacagaacaggaggcgaagccgttcacgtttgaatggaacggtcgtatctggaatgctggccccgactcactgggccgcctgtccccggtagtcatgctggcaaaatctgtcacagcacaaacacatatggcgtggagcgatgccgataatcagcaggtgaaactgtcgatgccggaactggaagaactggcggcagcaatggtgcaggcgcaggtcgatcgcaacgatgagatttatcgccgtcagcgggagatgaaagaggagctgagcagtctggatgatttggcttcaattcgggcgtttgacgttaagtaa

SEQ ID NO: 479969 - DNA, 402 bp, Shigella flexneri; identical to SEQ ID NO: 474686

SEQ ID NO: 479970 - DNA, 483 bp, Shigella flexneri
atgttgaatttactgttccatttaaaaatgaatggacgacagttctgttggttgattgtggggtctggttcacctgaactgcgggaacatttacagtatcagattgacagtatgggcatgcatgatgatgtttttattgctgacaatgtttttcctgccgcccccgtatatcgggttgccagtctggtggttctgccttcagaaaacgaatcttttggtatggtgctggcagaagcatcggcattttctgtgcctgtagtggccactcagattggtggaatccctgaggttattcagaacaaccagaccgggacattgttaccagcaagtaataagcacgcatggatgtgcgccctgaatgatttttttaatgaccctgggcgtttttatcagatggctcgcctggcaaaacaggatatagaagagcggtttgatattaataaaactgcgttaaaaatactcacattagcgaagcaaaagtaa

SEQ ID NO: 479971 - DNA, 189 bp, Shigella flexneri; identical to SEQ ID NO: 470416

SEQ ID NO: 479972 - DNA, 207 bp, Shigella flexneri; identical to SEQ ID NO: 476087

SEQ ID NO: 479973 - DNA, 219 bp, Shigella flexneri; identical to SEQ ID NO: 478752

SEQ ID NO: 479974 - DNA, 210 bp, Shigella flexneri; identical to SEQ ID NO: 477043

SEQ ID NO: 479975 - DNA, 294 bp, Shigella flexneri
gtggcgcacgtcttcggtgaacgcactctggccacactggagcgtcttctgagcctgctgtcggcctttgaggtcgtggtatggatgacggatggctggccgctgtatgaatcacgcctgaagggaaagctgcacgttatcagcaagcgttacactcagcgcattgagcgacataatctgaatctgagacaacatctggcaaggctggtacggaagtcactgtcgttctcaaaatcggtggagctgcatgacaaggccatcgggcattatctgaacataaaacactatcagtaa

SEQ ID NO: 479976 - DNA, 348 bp, Shigella flexneri; identical to SEQ ID NO: 477554

SEQ ID NO: 479977 - DNA, 558 bp, Shigella flexneri; identical to SEQ ID NO: 478619

SEQ ID NO: 479978 - DNA, 207 bp, Shigella flexneri; identical to SEQ ID NO: 476087

SEQ ID NO: 479979 - DNA, 435 bp, Shigella flexneri; identical to SEQ ID NO: 476567

SEQ ID NO: 479980 - DNA, 222 bp, Shigella flexneri; identical to SEQ ID NO: 13320

SEQ ID NO: 479981 - DNA, 348 bp, Shigella flexneri
atgataacgctgccgaccggtaccaaaatctggatcatcgctggcatcacagatatgcgttgtggcttcaatggcctggcttcgaaggtgcagaacacgctgaaagatgacccgttctccgggcatatcttcgtcttccggggccgcagtggcaaaatggtgaaaatactgtgggccgatcgtgacgggttatgcctgttcgccaaacgcctggaacggggccgcttcgtctggccggtgacccgggaagggaaagtgcacctgacgccagctcagttatccatgctactggaggggatcgcgtggccacatcccaaacggacagaacggcctggcatccggatataa

SEQ ID NO: 479982 - DNA, 267 bp, Shigella flexneri; identical to SEQ ID NO: 462029

SEQ ID NO: 479983 - DNA, 327 bp, Shigella flexneri; identical to SEQ ID NO: 477049

SEQ ID NO: 479984 - DNA, 207 bp, Shigella flexneri; identical to SEQ ID NO: 24440

SEQ ID NO: 479985 - DNA, 315 bp, Shigella flexneri; identical to SEQ ID NO: 474620

SEQ ID NO: 479986 - DNA, 189 bp, Shigella flexneri; identical to SEQ ID NO: 470416

SEQ ID NO: 479987 - DNA, 354 bp, Shigella flexneri; identical to SEQ ID NO: 466835

SEQ ID NO: 479988 - DNA, 354 bp, Shigella flexneri; identical to SEQ ID NO: 476372

SEQ ID NO: 479989 - DNA, 306 bp, Shigella flexneri
atggaccgtctgtgcgaagactactgcggtggtatctggaatctgtacaccctgaacaacggcggggcatttatggcacccgaaccggatgacgatgatgacgaaacatgggtactgttcaatgccatgaacggtaaccgcgctgaaatgagtccggaagctgccggcattgctgcctgtctgatgacgtacagtcatcatgcctgtcgtacggagtgttatgccatgacggtccattattaccggctgcgggattacgccctgcagcatccggaatgcagcgccattatgcgcatcatcgactga

SEQ ID NO: 479990 - DNA, 219 bp, Shigella flexneri; identical to SEQ ID NO: 474644

SEQ ID NO: 479991 - DNA, 195 bp, Shigella flexneri; identical to SEQ ID NO: 464447

SEQ ID NO: 479992 - DNA, 210 bp, Shigella flexneri; identical to SEQ ID NO: 475253

SEQ ID NO: 479993 - DNA, 243 bp, Shigella flexneri; identical to SEQ ID NO: 464992

SEQ ID NO: 479994 - DNA, 288 bp, Shigella flexneri; identical to SEQ ID NO: 474636

SEQ ID NO: 479995 - DNA, 354 bp, Shigella flexneri; identical to SEQ ID NO: 474642

SEQ ID NO: 479996 - DNA, 219 bp, Shigella flexneri; identical to SEQ ID NO: 474644

SEQ ID NO: 479997 - DNA, 210 bp, Shigella flexneri; identical to SEQ ID NO: 475253

SEQ ID NO: 479998 - DNA, 306 bp, Shigella flexneri; identical to SEQ ID NO: 479989

SEQ ID NO: 479999 - DNA, 210 bp, Shigella flexneri; identical to SEQ ID NO: 476166

SEQ ID NO: 480000 - DNA, 240 bp, Shigella flexneri
gtgcgtcgagtgatagttgtcatagctgatgttaaagcctgcgaaatcagtctgatgctcctgactcatttcgccaatcatctgctccggggtgataccgagctgctgagctttcagcatgatcggtgtaccgtgggcatcgtcggcgcagatgaagttgacctcgtggccgcgcattcgctggtaacggacccagacatcagcctggatgtgctccagcatatggccgaggtggattga

SEQ ID NO: 480001 - DNA, 498 bp, Shigella flexneri; identical to SEQ ID NO: 475564

SEQ ID NO: 480002 - DNA, 270 bp, Shigella flexneri; identical to SEQ ID NO: 476990

SEQ ID NO: 480003 - DNA, 228 bp, Shigella flexneri
ttgtggcgcacgtcttcggtgaacgcacgctggccgctgtatgaatcacgcctgaagggaaagctgcacgttatcagcaagcgttacactcagcgcattgagcgacataatctgaatctgagacaacatctggcaaggctgggacggaagtcactgtcgttctcaaaatcggtggagctgcatgacaaggtcatcgggcattatctgaacataaaacactatcagtaa

SEQ ID NO: 480004 - DNA, 1056 bp, Shigella flexneri; identical to SEQ ID NO: 476765

SEQ ID NO: 480005 - DNA, 210 bp, Shigella flexneri
atgacggatggctggccgctgtatgaatcatgcctgaagggaaagctgcacgttatcagcaagcgttacactcagcgcattgagcgacataatctgaatctgagacaacatctggcaaggctggtacggaagtcactgtcgttctcaaaatcggtggagctgcatgacaaggtcatcgggcattatctgaacataaaacactatcagtaa

SEQ ID NO: 480006 - DNA, 174 bp, Shigella flexneri; identical to SEQ ID NO: 479522

SEQ ID NO: 480007 - DNA, 210 bp, Shigella flexneri; identical to SEQ ID NO: 9340

SEQ ID NO: 480008 - DNA, 123 bp, Shigella flexneri; identical to SEQ ID NO: 476814

SEQ ID NO: 480009 - DNA, 645 bp, Shigella flexneri; identical to SEQ ID NO: 474042

SEQ ID NO: 480010 - DNA, 312 bp, Shigella flexneri; identical to SEQ ID NO: 475598

SEQ ID NO: 480011 - DNA, 354 bp, Shigella flexneri
atgccactgctggataagctgcgtgagcagtacgggggcggaccgctatgcagcgaactgcatattgccccgtcaacgtattaccactgtcagcaacagcgacatcatccggataaacgcagtgcccgtgcgcagcgcgatgactggctgaagaaagagatacagcgcgtatacgatgaaaatcacaaggtatacggtgtaaagcctggcgtcagttgttacgggaaggtatcagagtggccagatgcactgtggcacgtctcatggcggttatgggacttgccggtgttctccggggtaaaaaggtccgtacgaccatcagccggaaagccgttgccgcaggcgaccgcgtaa

SEQ ID NO: 480012 - DNA, 501 bp, Shigella flexneri
atgaacctgacaacgaagggtgatttagttcttgcggcattacgtaagctcggtgtggcatcaaatgccacgttaaccgatgtcgaaccgcagtctatggaagatggcgtcaacgaccttgaaatgatgatggctgaatggcttggcggtgatgtgtcacctggtatcaacgttggctacatttttgctgatgcagatgtcgctccagatccgggagatgagcacggattatcaaataacgctataaatgccgtcattttcaaccttgcctgccgcattgctccagattatgcgctggaagcgtcagcaaaacttataacgactgccagatacgggaaagagcgactcgtcaaactgtctgcaatggacagagcaaaagccgctaaatgtaagtcaggttatccaaaccgtatgcctgttggtagcggtaatcagttggcgaagtggaacggttggaattacttccatcggaaggaaccttgcgataacgggagcgaataa

SEQ ID NO: 480013 - DNA, 189 bp, Shigella flexneri
atgagcagaaaaacccaacgttactctaaagagttcaaagccgaagctgtcagaacggttcttgaaaatcaactttcgatcagtgaaggcgcttcccgattatctcttcctgaaggcactttaggacaatgggttcccgcacgctggctgaactggaatctgaaattctgcaactgcgtaaggcgttaa

SEQ ID NO: 480014 - DNA, 141 bp, Shigella flexneri
atgggttcccgcacgctggctgaactggaatctgaaattctgcaactgcgtaaggcgttaaatgaagctcgccttgagcgagatatattaaaaaaagcaacagcgtattttgcacaggagtcgctgaaaaatacgcgttaa

SEQ ID NO: 480015 - DNA, 927 bp, Shigella flexneri; identical to SEQ ID NO: 476046

SEQ ID NO: 480016 - DNA, 207 bp, Shigella flexneri
atgcttccatcggaaacgatgatctggcagcctgagttcacagataaaacactctccaggaaacccggggcggttcagctggtcacctgcaaacggaacgaagtggagccggaggactggttgcgcgaagtgatcgagaagctcaatgactggccgtcgaaccaagtgcatgaactgctgccctggaacttctcgtctgtaaaataa

SEQ ID NO: 480017 - DNA, 354 bp, Shigella flexneri
atgccactgctggataagctgcgtgagcagtacagggtcggaccgctatgcagcgaactgcatattgccccgtcaacgtattaccactgtcagcaacagcgacatcatccggataaacgcagtgcccgtgcgcagcgcgatgactggctgaagaaagagatacagcgcgtatacgatgaaaatcacaaggtatacggtgtaaagcctggcgtcagttgttacgggaaggtatcagagtggccagatgcactgtggcacgtctcatggcggttatgggacttgccggtgttctccggggtaaaaaggtccgtacgaccatcagccggaaagccgttgccgcaggcgaccgcgtaa

SEQ ID NO: 480018 - DNA, 288 bp, Shigella flexneri; identical to SEQ ID NO: 474636

SEQ ID NO: 480019 - DNA, 456 bp, Shigella flexneri
atgattacattcaaaccaacgcgaaacatcgacctgatagaagcagtcggaaatcaccctgacattatcgccgggagcaacaacggtgatggatacgactacaagcctgaatgccgttactttgaggttaacgtgcacggtcagtttggcggcattgtttactatcaggagattcagccgctgacattcgattgccacgccatgtacctgccagaggttcgtggattcagcaaggaaatcgggctggcgttctggcgatacattctgactaacaccaccgttcagtgcgtcacatcgttcgctgcacgcaaattccgacacggtcagatgtactgcgcaatgattggccttaagcgtgtaggaaccatcaagaaatacttcaaaggcgtggatgacgtgactttttacagcggcacacgcgaagaactaatcgacttcctgaatcacgggagatag

SEQ ID NO: 480020 - DNA, 354 bp, Shigella flexneri; identical to SEQ ID NO: 466835

SEQ ID NO: 480021 - DNA, 261 bp, Shigella flexneri; identical to SEQ ID NO: 475838

SEQ ID NO: 480022 - DNA, 270 bp, Shigella flexneri
atgctctccggctatcttctcgcggtctttcagtatctgcgtgcaggtgatgatcgacttatacacacgccgacgcttcaccttgcgctctgctaccttaatgaatccacgattagccaggtcgtcgatgacgtctttgatatcctgctggtaatagctgactggctcacctgtcagcgggtcgcggtagatgaagactttctctttcttctcttcgacctcgtaatactcagcgacgtagacgacatcattcgacacccacgggaatag

SEQ ID NO: 480023 - DNA, 429 bp, Shigella flexneri
atgcgtgattctgaacacttcttctttgatctgccctctttcagcgaaatgttgcaggcatggacccgcagcggtgcgttgcaggagcaggtggcaaacaaaatgcaggagtggtttgaatccggcctgcaacagtgggatatctcccgcgacgcgccatactttggttttgaaattccgaacgcaccgggcaaatatttctacgtctggctggacgcaccgattggctacatgggttctttcaagaatctgtgcgacaagcgcggcgacagtacagcttcgatgaatactggaagaaagactccaccgccgagctgtaccacttcatcggtaaagatatcgtttacttccacagcctgttctggcctgccatgctggaaggcagcaacttccgcaagccgaccaacctgtttgttcatggctatgtga

SEQ ID NO: 480024 - DNA, 219 bp, Shigella flexneri; identical to SEQ ID NO: 476074

SEQ ID NO: 480025 - DNA, 219 bp, Shigella flexneri; identical to SEQ ID NO: 474644

SEQ ID NO: 480026 - DNA, 219 bp, Shigella flexneri; identical to SEQ ID NO: 474644

SEQ ID NO: 480027 - DNA, 375 bp, Shigella flexneri; identical to SEQ ID NO: 13405

SEQ ID NO: 480028 - DNA, 882 bp, Shigella flexneri
atggcagccgcacaaccgctggtatttgatgcagaactggacaccgtgcgtgagcgtcttggtagcgtaaaaggcgttagttacgatacggtgatgtggagttcggcaattaacacccgcaacaacgtgaccactgatgcgggagctggttttgagcaaacattgacgggcctgacgctcggtatcgatagccgtttctcccgtgaagaaagcagtacaattcgcggcttgttctttggttactctcattctgatattggttttgatcgcggcggaaaaggtaatatcgatagctataccctgggggcttatgccggttgggagcatcagaacggtgcctatgttgatggggtggtgaaagttgaccgttttgccaacaccatccatggcaagatgagtaatggggcaacagcgtttggcgattacaatagtaacggcgcgggtgctcatgttgagagcgggttccgttgggttgacggattgtggagtgttagaccctatctggcctttaccggctttaccacagatggtcaggactacacgttatcaaacggcatgcgcgcggatgtgggaaatacccggatattacgcgctgaagcgggaacggcggtaagctatcacatggacctgcaaaacggtacgacgctggaaccctggctgaaagccgccgtgcgtcaggaatacgccgattctaaccaggtgaaagttaatgacgatggcaaatttaataatgatgtggctggaaccagtggcgtttatcaggctgggataaggtcatcgtttaccccgacgttaagcggtcatttgtcagtcagctatggcaatggcgcaggggtagaatcgccgtggaatactcaggcgggtgtggtctggacgttctga

SEQ ID NO: 480029 - DNA, 216 bp, Shigella flexneri; identical to SEQ ID NO: 5123

SEQ ID NO: 480030 - DNA, 378 bp, Shigella flexneri
atggacgaacagtggggatacgtcggggctaaatcgcgccagcgctggctgttttacgcgtatgacaggctccggaagacggttgtggcgcacgtcttcggtgaacgcactctggccacactggagcgtcttctgagcctgctgtcggcctttgaggtcgtggtatggatgacggatggctgtccgctgtatgaatcacgcctgaagggaaagctgcacgttatcagcaagcgttacactcagcgcattgagcgacataatctgaatctgagacaacatctggcaaggctggtacggaagtcactgtcgttctcaaaatcggtggagctgcatgacaaggtcatcgggcattatctgaacataaaacactatcagtaa

SEQ ID NO: 480031 - DNA, 210 bp, Shigella flexneri; identical to SEQ ID NO: 475253

SEQ ID NO: 480032 - DNA, 1017 bp, Shigella flexneri
  misc_feature (26)..(35): n is a, c, g, or t
atgaggcgcagctcaagccatatttnnnnnnnnnngctaaagccatattttgaattaaacacggtgttaaatgaaggtgtattctggaccgcgaatcagctcttcggtattaagtttgtcgaacgttttgatattccggtctaccatcctgacgttcgtgtgtgggaaatttttgatcataatggcgtgggactggcgttattttacggtgatttcttcgcccgtgattcaaaaagcggcggtgcatggatgggcaattttgttgagcaatcaacgcttaatgaaacgcatccggtaatttataacgtctgcaattatcagaaacccgctgccggtgagcctgcgttgttactctgggatgatgtaataaccttattccatgaatttggtcatacgctgcacggcctttttgcccgccagcgttatgccacgctttccggcaccaacacgccgcgtgattttgtcgaatttccgtcgcaaatcaacgaacactgggcaacgcatccgcaggtattcgctcgctacgcccggcattatcagagcggggcagcaatgcctgacgaactgcaacagaaaatgcgtaatgccagcctgttcaacaaagggtatgagatgagcgaactgcttagcgccgcacttctcgatatgcgctggcattgcctggaagaaaacgaagcaatgcaggatgtcgatgattttgaattgcgggcgctggtggcggaaaatatggatcttcctgctataccgccacgctatcgcagcagttatttcgcccatatttttggtggcggatatgctgcaggttattacgcttatctgtggacgcaaatgttggccgatgatggttaccagtggtttgttgagcagggcggattaacgcgtgaaaatgggcagcgttttcgcgaggcgatcctttccagaggtaacagcgaagatctggaacgcctgcatcgacaatggcgtggtaaggctcctcagattatgccgatgctgcaacatcgtggcttgaacatataa

SEQ ID NO: 480033 - DNA, 1056 bp, Shigella flexneri
atgaaacgaacgcctgtcctgattgatgtgaacggcgttccgcttcgtgagagtctcagctacaacggaggcggcgcaggatttggcgggcaaatggcagagtggttaccaccggcgcagagtgccgatgcggccctgttgcctgcattgcgtctggggaatgcccgggcagatgatctggtgcgcaataacggtatcgcggctaatgcggtggccctgcataaggatcatatcgtcgggcacatgtttcttatcagctaccgtctgaactggcgttggctggggatgcgggagaccacggcaaaaagttttgtcggggaggtggaagcagcctggtcggaatacgcagaaggaatgtttggcgagatcgacgtggaagggaaacgcacgtttacggaatttatccgtgaaggggtgggcgtgcatgcctttaacggcgaaatctttgtgcagccggtctgggatacggaaaccacgcagttattccgtacgcgttttaaagccgtgagtccgaaacgggtggacacgccaggacacggtatggggaaccactttctgcgggccggggttgaggtcgatcggtatgggcgggcgattgcgtaccatatctgtgaggatgattttccgttctctggtgccggacgctgggagcggatcccgcgtgagcttcccaccgggcgtccggccatgctgcatatttttgagccggtggaggacgggcagacccgtggggccaatcagttttacagcgtaatggagcggatgaagatgctggactccctgcaggccacgcagcttcagtcggccattgtgaaggcgatgtatgcagccacaatcgaaagtgaacttgataccgaaaaggcatttgaatatatcgcgggggcaccgcaaggtcagcaggataatccgcttattaatattctggagaagttcacccgctggtatgacacgaataacgtgacgctgggcggtgttaaaattccgcaccttttttcctggcgatgcgctgaacctgcagacagcgcaggattcagacaatggattttcggcgcttga

SEQ ID NO: 480034 - DNA, 150 bp, Shigella flexneri
atgatgatttgccattattttgtatttggggtcatagaaacatacaggataatcttttatcccgtcgtaggtatcctcatcaagtggtttcatgcgcgtgaagttttgcatatagttaccattgcaattcgtttcatgatttccagctaa

SEQ ID NO: 480035 - DNA, 525 bp, Shigella flexneri; identical to SEQ ID NO: 479517

SEQ ID NO: 480036 - DNA, 294 bp, Shigella flexneri; identical to SEQ ID NO: 479211

SEQ ID NO: 480037 - DNA, 210 bp, Shigella flexneri; identical to SEQ ID NO: 9340

SEQ ID NO: 480038 - DNA, 210 bp, Shigella flexneri; identical to SEQ ID NO: 9340

SEQ ID NO: 480039 - DNA, 2085 bp, Shigella flexneri
atggctaactattttattgatcgcccggtttttgcctgggtacttgccattattatgatgcttgcaggtggtctggcgatcatgaacttaccggttgcgcagtatccgcagattgcgccaccgaccattaccgtcagcgctacctatccgggtgccgatgcgcaaacggtagaagactcggtcactcaggtgattgagcaaaatatgaatgggcttgatggcctgatgtacatgtcttcaaccagtgatgcggcgggtaatgcctctatcactctgaccttcgagactgggacatctcctgatatcgcacaggttcaggtgcaaaataaactgcaactcgctatgccttcattacctgaagcggtgcagcaacaggggattagcgtcgataagtcgagcagtaatatcctgatggtagcggcgtttatttctgataacggcagcctcaaccagtacgatatcgcggactatgtagcgtctaatatcaaagacccgctaagccgtaccgcgggcgttggtagcgtacagctctttggttccgagtacgccatgcgtatctggctggacccgcaaaaactcaataaatataacctggtaccttccgatgttatttcccagattaaggtgcaaaacaaccagatttctggtggtcaactgggtggcatgccacaggcggcagaccagcaactaaacgcctcgatcattgtgcagacgcgtctgcaaacgccggaagaatttggcaaaatcctgttgaaagttcagcaagatggttcgcaagtgctgctgcgtgatgtcgcccgcgtcgaacttggggcggaagattattccaccgtggcgcgctataacggcaaacctgctgccgggatcgccatcaaactggctgccggagcaaacgccctggatacctcgcgggcagtcaaagaggagctgaaccgcttatcagcctatttccccgcaagtctgaagacggtttatccttacgacaccacgccgtttatcgaaatttctattcaggaagttttcaaaacactggttgaggctatcatcctcgtcttcctggtcatttatctgtttttgcagaatttccgtgccaccatcatcccgacaattgccgtaccggtggttattctcgggacgtttgcgatcttgtcggcggtcggtttcaccatcaacacgttgactatgttcgggatggtgctggcgatagggttactggtggatgacgccatcgtggtggtggagaacgtcgagcgtgtcattgcggaagataagctaccgccgaaggaagcgacgcataaatcgatggggcagatccaacgtgcgctggtcgggattgccgttgttctttctgcagtgtttatgccgatggcctttatgagcggtgcaaccggggagatctaccgccagttctccatcacgctgatctcctccatgcggctttcagtatttgtggcaatgagcctgacccctgccctgtgcgccaccattctgaaagccacgccggaaggcggtcacaaacctaacgccctgttcgcacgcttcaacacgctgtttgaaaaatcaactcagcactataccgatagcacccgctcgctgttgcgttgtaccggtcgctacatggtggtctacctgctgatttgcgccgggatggcggtgctgttcctgcgtacaccgacctctttcttaccagaagaggatcagggggtatttatgaccaccgcgcagttaccttccggtgccaccatggttaacaccacgaaagtactgcaacaggtgacggattattatcttacaaaagagaaagataatgttcagtcggtgtttaccgttggcggctttggcttcagcggccaggggcaaaacaacggcctggcgtttatcagtctcaagccgtggtctgaacgtgtcggtgaggaaaactcggttaccgcgatcattcagcgggcaatgattgcgttaagcagtatcaataaagccgtcgtcttcccgttcaacttacccgcggtggctgaactgggtaccgcgtcaggttttgatatggaactgctggacaacggtaacctggggcacgaaaaactaacctag

SEQ ID NO: 480040 - DNA, 210 bp, Shigella flexneri; identical to SEQ ID NO: 9340

SEQ ID NO: 480041 - DNA, 171 bp, Shigella flexneri; identical to SEQ ID NO: 478928

SEQ ID NO: 480042 - DNA, 210 bp, Shigella flexneri; identical to SEQ ID NO: 475853

SEQ ID NO: 480043 - DNA, 210 bp, Shigella flexneri; identical to SEQ ID NO: 475253

SEQ ID NO: 480044 - DNA, 339 bp, Shigella flexneri; identical to SEQ ID NO: 473924

SEQ ID NO: 480045 - DNA, 480 bp, Shigella flexneri
gtggcggacctgacgtatgttgccacacaggagggatggttgtacctcgctggcatcaaagatgtttatacgtgcgaaattgtcggctacgccatgggagagcgcatgacaaaagagctgacaggtaaagccctgtttatggcgctcaggagccagcgcccacctgccgggctaatccaccactctgatcgaggttcacagtactgcgcatacgattaccgggtcatacaggagcagtttggtctgaaaacatcaatgtcgcgtaaaggtaactgttacgacaacgctccgatggaaagcttctggggaacgctgaaaaatgagagcctgagccactatcgttttaataaccgggatgaagccatctcagtaatacgggaatacattgagattttctacaatcgtcagcgtcgtcactctcgtctggggaatatctcctcggcagccttcagggaaaaatatcatcagatggctgcttaa

SEQ ID NO: 480046 - DNA, 216 bp, Shigella flexneri; identical to SEQ ID NO: 474400

SEQ ID NO: 480047 - DNA, 1401 bp, Shigella flexneri; identical to SEQ ID NO: 474418

SEQ ID NO: 480048 - DNA, 627 bp, Shigella flexneri; identical to SEQ ID NO: 479864

SEQ ID NO: 480049 - DNA, 210 bp, Shigella flexneri
atgacggatggctggccgctgtatgaatcacgcctgaagggaaagctgcacgttatcagcaagcgttacactcagcgcattgagcgacataatctgaatctgagacaacatctggcaaggctgggacggaagtcactgtcgttctcaaaattggtggagctgcatgacaaggtcatcgggcattatctgaacataaaacactatcagtaa

SEQ ID NO: 480050 - DNA, 825 bp, Shigella flexneri; identical to SEQ ID NO: 478357

SEQ ID NO: 480051 - DNA, 267 bp, Shigella flexneri; identical to SEQ ID NO: 463627

SEQ ID NO: 480052 - DNA, 480 bp, Shigella flexneri
gtggcggacctgacgtatgttgccacacaggagggatggttgtacctcgctggcatcaaagatgtttatacgtgcgaaattgtcggctacgccatgggagagcgcatgacaaaagagctgacaggtaaagccctgtttatggcgctcaggagccagcgcccacctgccgggctaatccaccactctgatcgaggttcacagtactgcgcatacgattaccgggtcatacaggagcagtctggtctgaaaacatcaatgtcgcgtaaaggtaactgttacgacaacgctccgatggaaagcttctggggaacgctgaaaaatgagagcctgagccactatcgttttaataaccgggatgaagccatctcagtaatacgggaatacattgagattttctacaatcgtcagcgtcgtcactctcgtctggggaatatctccccggcagccttcagggaaaaatatcatcagatgactgcttaa

SEQ ID NO: 480053 - DNA, 303 bp, Shigella flexneri; identical to SEQ ID NO: 473532

SEQ ID NO: 480054 - DNA, 210 bp, Shigella flexneri; identical to SEQ ID NO: 475253

SEQ ID NO: 480055 - DNA, 300 bp, Shigella flexneri; identical to SEQ ID NO: 479204

SEQ ID NO: 480056 - DNA, 513 bp, Shigella flexneri; identical to SEQ ID NO: 476861

SEQ ID NO: 480057 - DNA, 153 bp, Shigella flexneri; identical to SEQ ID NO: 474734

SEQ ID NO: 480058 - DNA, 288 bp, Shigella flexneri; identical to SEQ ID NO: 474636

SEQ ID NO: 480059 - DNA, 288 bp, Shigella flexneri
atggatgaagaatatcgtaaagacctgcaactgtggtttggtcttacgcatacgtcgttctgcgtgatgccgcgagtattcatggaggctatgcctccagaatggcaagagaagatggctcagttgctttttgagtatagcgacacgatcaaaacggatgtctgcggagttcacagctgttttgttactgccaaagacggcaacaaccgctttatgaggatgccagaagatattctgaactatcgtcatcctcgacgtgaattcatcgaatcatttctgaagaagtag

SEQ ID NO: 480060 - DNA, 225 bp, Shigella flexneri; identical to SEQ ID NO: 133446

SEQ ID NO: 480061 - DNA, 879 bp, Shigella flexneri
atgaccctgaagcagcggtttgctgatacctggcaagcgacactgaatgccacccactctgaagtcgaatttgacagcaaaatgatgtatgtcgatgcctatgtaaacaaagcggatggtatgctggttgggccatacagtaattatggacctggctttgatcatgtcggcggcaccggttggaacagtggcaaacgtaaagttgatgcgctggatttgttcgctgacggtagttatgaattgtttggtcgtcagcacaatctaatgtttggtggcagttacagcaaacaaaacaatcgttacttcagttcatgggccaacatcttcccggatgaaattggcagtttctacaactttaatggcaatttcccacaaaccgactggtcaccacagagcctggcgcaggacgataccacacatatgaaatcgttatatgctgccactcgtgtcacccttgccgatccgctgcatctgatcctcggcgcacgttataccaactggcgggttgatacgctgacttacagcatggagaaaaaccacaccacgccttacgctggtctggtgtttgacatcaatgacaactggtcgacctacgccagctatacctctattttccagccgcaaaatgatcgtgacagttcaggcaaatatctggctccaatcaccggtaacaactacgagctgggtctgaaatcggactggatgaatagccgtctgaccaccacgttagccatcttccgtattgagcaggataatgtcgctcagtccaccggtacacctatccccggcagcaacggcgaaaccgcctataaagcggtggatgggacagtcagtaaaggggtggaatttgaactcaacggcgcaattaccgacaactag

SEQ ID NO: 480062 - DNA, 627 bp, Shigella flexneri
atgacgatttttgataattatgaagtgtggtttgtcattggcagccagcatctgtatggcccggaaaccctgcgtcaggtcacccaacatgccgagcacgttgttaatgcgctgaatacggaagcgaaactgccctgcaaactggtgttgaaaccgctgggcaccacgccggatgaaatcaccgctatttgccgcgacgcgaattacgacgatcgttgcgctggtctggtggtgtggctgcacaccttctccccggccaaaatgtggatcaacggcctgaccatgctcaacaaaccgttgctgcaattccacacccagttcaacgcggcgctgccgtgggacagtatcgatatggactttatgaacctgaaccagactgcacatggcggtcgcgagttcggcttcattggcgcgcgtatgcgtcagcaacatgccgtcgttaccggtcactggcaggataaacaagcccatgagcgtatcggctcctggatgcgtcaggcggtctctaaacaggatacccgtcatctgaaagtctgccgatttggcgataacatgcgtgaagtggcggtcaccgatggcgataaagttgccgcacagatcaagttcggtttctccgtcaatacctag

SEQ ID NO: 480063 - DNA, 396 bp, Shigella flexneri; identical to SEQ ID NO: 474911

SEQ ID NO: 480064 - DNA, 1326 bp, Shigella flexneri; identical to SEQ ID NO: 474914

SEQ ID NO: 480065 - DNA, 192 bp, Shigella flexneri
ttgctcaaagccatcctggtgatgattatggtggtcattgcgctggctaatcgttatgttcttgtaccgcgcatgaggcaggatgaagatcgtgcggcaccctggtttgtgtggatgactaaactcgaatgggcgataggtgcggtagtgctggtgatcatcagcctgcttgcgactctcgaacctttttga

SEQ ID NO: 480066 - DNA, 678 bp, Shigella flexneri
atgcgcgccggttctaccggtagccagaaatactccaccatgatgtgggcgggcgaccagaacgtggactggagtctcgacgatggcctggcgtccgtagtcccggcggcgctgtcgctggcaatgaccggacatggtctgcatcacagcgacattggcggttacaccaccctgtttgagatgaagcgcagcaaagagctgctgctgcgctggtgcgatttcagcgccttcacgccgatgatgcgcacccacgaaggtaaccgtcctggcgacaactggcagtttgacggcgatgcggaaactatcgcccattttgcccgtatgactaccgttttcaccaccctgaaaccttatctgaaagaggccgtcgcgctgaatgcgaagtccggtctgccggtcatgcgcccgctgttcctgcattacgaagacgatgcacatacctattccctgaaatatcagtacctgttaggccgcgacattctggtcgctccggtacacgaagaaggtcgcagcgactggacgctctatctgccggaggataactgggtacatgcttggacgggtgaagcgttccggggcggggaagttaccgttaatgcgcccatcggcaagccgccggtcttttatcgcgccgatagcgaatgggcggcactgttcgcgtcgttaaacagcatctaa

SEQ ID NO: 480067 - DNA, 372 bp, Shigella flexneri
atgaaacgagctattaccctgtttgctgtactgctgatgggctggtcggtaaatgcctggtcattcgcctgtaaaaccgccaatggtaccgctatccctattggcggtggcagcgctaatgtttatgtaaaccttgcgcctgtcgtgaatgtggggcaaaacctggtcgtagatctttcgacgcaaatcttttgccataacgattatccggaaaccattacagactatgtcacactgcaacgaggctcggcttacggcggcgtgttatctaatttttccgggaccgtaaaatatagtggcagtagctatccatttccgaccaccagcgaaacgccgcgggttgtttataattcgagaacggataagccgtag

SEQ ID NO: 480068 - DNA, 669 bp, Shigella flexneri
gtgtcgcatccaataatcaatgttggtcgttatcatggtggttctgatgactggcgtacaccgtatcgtttatttcataacctgcatcgtgagtttaacttcagtctagatggtgctgcaactgagtatgacgcattgttgccacggttcaccgatgatattcacaatcaatcatgggttggtgaacgggtcttcgttaacccgccgtttagcatggctgaaaagttcctcttaaaagcccctgaagctgatgtgtgtgtatgtctggttccgctcaggtcaaagacaacttactggcttcggtgtgtatatacaaaccccttcctgcatgagattcgaacgttacaccgagcagtcaaataccttccaccagcaggaaagagaggtgttgtagtgcgctcaccgtttccaagttgcgttttgatatacaggaacacaccccgcaaaccgaaagttgaagttacccagacaatctattgtggtgacacaatgcttttacttgccgtggttaacaggggtggtttacgtggaagacctcatatgcacgatgcacagacgcttgacaggttgattaaaatgtatgaccaagggcaacccatcaagagcatcgcagaatcgctaagaatacctctaagcaccacttacaggattgttcaaaggttgggctga

SEQ ID NO: 480069 - DNA, 234 bp, Shigella flexneri
atgaatgactgtccacgacgctatacccaaaagaaagcggcttatcggtcagtttcacctgatatacgtaaaaacccgcttcggcgggtttttgcttttggaggggcagaaagaagaatgactgtccacgacgctatacccaaaagaaagcggcttatcggtcagtttcacctgatatacgtaaaaacccgcttcggcgggtttttgcttttggaggggcagaaagatgaatga

SEQ ID NO: 480070 - DNA, 255 bp, Shigella flexneri; identical to SEQ ID NO: 145974

SEQ ID NO: 480071 - DNA, 726 bp, Shigella flexneri
atgaataccaacgaagttagcgtcatcaaccttgaccagcttgtgtctatgagtagctacgatttcttgactaaggtcatcaacccggctcgtgtggaggctggggagaagcctgtccgtaacaacgactttgtgtcccgtattgaagatgagctggacggtcaaaatgtagcctacgaaattttcgtaagcttcgggcaggacgttaaaagctataccctcaacactgaccagcttctactggtcgggatgcgtgagtctaaagctgtgcgtcgtaaggtcctagcctatacaggcgccacgcctaccgaggttattaaagctctggaccttaagttgaccagctctaagatgctgacagctagcgtcctgactggatatctgaagaccctgtgtcgtcctaacccattctacaccaagcgtgttactgagtttggcactacggatatagacctatcgaccggacgtccacgagccatcttcaataagaaaggtgagaccaacggctactatcgtctacagccacagcctaacgacaaagagcctaccatcaagattctacgcaagggttatgactggctgaaggataactggaaggatatcgctcatgacatgcgcacatccaatatcaaggttgtccgtcgtctggtggattctcacctgaatggtaaggctacaaagtcccagaaagcagcagcgggcaaggggtctgactatgggttctaa

SEQ ID NO: 480072 - DNA, 366 bp, Shigella flexneri
atgaccacccgctatgggcgcggtccggtgatgttgttttcgacgggagttatgccgtttggtttactgatgaccttatttagctcgctgtggctgatctttgccggaatgttactcttctcagccggattcttcgcagcccactcagtagccagcagctggatcggcccccgcgcaaaacgcgctaaaggccaggcctcctcgctgtatctgttcagttactatctggggtcgagtattgccgggacgctgggtggtgttttctggcataactatggctggaacggcgtcggcgcatttattgctctgatgctggtcattgctctgctggtcggggcgcgtttgcatcgtcgtctgcacgcctga

SEQ ID NO: 480073 - DNA, 357 bp, Shigella flexneri
ttgcaggcccgtctgcgcgtcgctttacgccgccactccgccaccgccgcgcccgatccgctggtgaaattttccgatgttaccgtcgatttagccgcccgcgtgattcaccggggtgaggaagaggtgcatctcacaccaattgagttccgcctgctagcggtgctgctcaacaatgccggaaaagtactcacccagcgccagctccttaaccaggtgtgggggccaaacgcggtcgaacacagtcactatttgcgtatttatatgggacatctgcgacaaaaactggaacaggatccggcccggcctcgccacttcattactgaaaccggtattgggtatcggtttatgctttga

SEQ ID NO: 480074 - DNA, 258 bp, Shigella flexneri
gtgaataatctggcgttattaggtaaggagttaattacccggccttatttaacgttaggaattatcagctgggttattttgcttgctttagcgttcacttcaacccagtcgatgcagcgaaaactcggcaaacactggcaacagttgcataacttcgtctatcttgtcgcgatcctggccccaatacattatctgtggtcagtgaagattatttcaccgcagccactcatctacgctgggctggctgtactgctttag

SEQ ID NO: 480075 - DNA, 1008 bp, Shigella flexneri; identical to SEQ ID NO: 474930

SEQ ID NO: 480076 - DNA, 558 bp, Shigella flexneri; identical to SEQ ID NO: 475069

SEQ ID NO: 480077 - DNA, 213 bp, Shigella flexneri; identical to SEQ ID NO: 462242

SEQ ID NO: 480078 - DNA, 714 bp, Shigella flexneri
atgtccggcagtgcttttgccgttacgcaccacgccttcagtagcggagcaggaaggacatctgatggaaatggaagccacgcaagcaccttaaaatcaccatcatacactaaatcagtaagttggcagcattaccgtcttgccgaagaagatccagcttctgcaaccaggccattcagaactgaagtgaagcgcagtcgactgttaattgacgagtatctgttaatcaggaaaatagcagacgtccagaacgaatggttcggcctttgcatggatcttgcactggtaacaggacagcgcgaaggagatctggcggctatgagatgggaggatataagagatagcaggctatacgtggaacaacaaaaaacaggggcaaaaattcgcatttctctccccaccacgatttccagattgaatttaacacttgccgatgtactggataacttgaaaaaaataaacggtaaaaacgaaaagttactcggagggaagacagccaggacaatcgcagcacagttcaggattgcccgagacacatccggattgaaatgggaaggtgacccaccgccatttcatgaaatccgaagtttatccggtcgcctgcactcagcagaaaaaggcagtgatttcactcaggcgcaccttggacatcgttcatccagcatgacggataaataccgtgacggacgagggagggaatggaaagacatttag

SEQ ID NO: 480079 - DNA, 228 bp, Shigella flexneri; identical to SEQ ID NO: 475144

SEQ ID NO: 480080 - DNA, 384 bp, Shigella flexneri
atgccaaccagaaagagcacgaagaacagcatcaaaaattatttgaataacttcgacagctacgagcaactaccaagtaagcttgatgatattttcattggattctgtagaggtgaaggccacccgaaatacaacaaaaaactattttatcttctaaagaatcttgacgaaattaacgcatccagcgtgacaaatcgtcttcagcgtcaagcaaccagacttagctacgaattaccaaccgatgcctattgtgcattgcttgctgtaatgtgtgcaaagctaattggtattgttgaacatcatattgctgttggtaatattgagccaatggaaaacgagcaaccagactttgagtttgacccgtatattttggaggaattttaa

SEQ ID NO: 480081 - DNA, 282 bp, Shigella flexneri
atgggaaataaacacacattaaccagagttacaaagacagcctttgaagaacttaaccgaatcaaaaacattacaggtctgccacactcagcagtgatgaagcttgcaattaaccgtgatattaacgaacaagatttgcttaatagtcgcttagaggcagcaagacaccatatcaggattaagcaagatgaccttgatagtctgaaatctttaaatgcttttggactggatttagcaaggttactaagtatcaaaattcacaaattagcgatggaggtttaa

SEQ ID NO: 480082 - DNA, 387 bp, Shigella flexneri
atgtatgacttttataaacatcgtgaccatttggtaagatttgacggtaaggtctggaaagacgtaacacaaaccaataagcccaagtttacccaccagcaattagcctcaagatttgatatctgggctgaagcacaaaaagataatggtgatttcgagtttatcagaggttttgattatgcttacgaaagcgaccttaaagacgccattgaattaatggagaacttcaactctattaaaaatagtgacaagcacaaagccaacggtaacagatacgataaagatttaatcattgatgcaatcaccaaaggacaatcacaaagttatatttctgagaaatacggcttatcacgtagtcaatactacaagattaaagcgtctgtgtaa

SEQ ID NO: 480083 - DNA, 324 bp, Shigella flexneri
atgaataatttcccactacagatttttattgataccgacaccgccatgatgattcaggctttcactgatgtaggtgttagcattgactttgataagttgttagagttaatggctgataatgcggaaagcatctctgactttattcactcggtggagtttaacgagcctcgaatgatgttaccaattacagacagtaatatgaaaagattggttattgagcaaacgaacaaatacagtatttccccagagcaatttttgaaaggtgctgtgacaatcctgtacagcgataatattttggttacggattccgtgagggttcactaa

SEQ ID NO: 480084 - DNA, 741 bp, Shigella flexneri
atgtctatccgtgatgaacatgaagcgattgttgatagaaaaccttgtgcatatgatttgcattttactgatgaaggagatgagtatgcacatatgaaaccttatcacaaaattattgccaagcttgcagatgaagaggccaaaaaagaaaggctgcgaaagattgttccagccaataatcttgaatatatcaatcctgagcctctggaaatgactgatgtttgcaagacagaagctctgattgcacttgagaggaagtactatccactactaaaagagcagcgcatcaagcttgataatgcttatgatgttgtcaaaaacttcgaagaaactcagaaaccttcagaatatgatattgaatatgagcttaagacaaacccgtttatctattacgaaggaaattacaacaatggtttcggtacagcaagagagaatgttccaaaagtgcttcaaagtattcctgacggttttcgattaatggatgtcagacaagcttcacgtggtacaggctcatatatcctgatgactaacaaaacagatgaagagattcttcagttagctgaagctaatctgactaagcattactccgataagctggataagttaaagcaaaagcttaaaaaagagcttgatactatgaaagagcttgttagtgaatatgaatcacagaagaaaattgctatgcaggctgatattgagcagttagtgaagatttctcagaaatatgcaaaggcactttaa

SEQ ID NO: 480085 - DNA, 204 bp, Shigella flexneri
atgattgatttaacagaacgctatgagcttattaaagcaattagtgaacgattgaaagaacaacccaacaaaccaaaacgaatcaaatcatccacctctaagcaaaagaatagaatcagaagaatcgctaaatggtgtcttgataaattaccaagtgattgtcagattgtcggtgaagatggtaattattatctggttaggtaa

SEQ ID NO: 480086 - DNA, 1374 bp, Shigella flexneri
gtgagtgggttcactggtaagcacttgaaaggtggcttaggtgactttttaaccgctatcgagaaagggcttgttaaagctggtgatacgctcttgatagaatctcttgaccgtctgtcacgtcaagatgtagaccaagcaagtgagctactcagaaacattcttcgctctggtgtagatgtggtcaccttgtccgatggtgaacattacacacgagaatctcttaaagacccgttagctctgattaaaagcattctgataatgcagcggtcgcatgaggagagtttgaggaagtctgagcgtatacaagctgcatggaaccgtaaaaaagaactcatctctgaaggtatcaagatttctaaacgttgtcctgcatggcttaagcttaatgatgaccgtaaaagcttctctgtaatccctgagaaagtggagactgtgaagaggtgctttcagctacggttagagggtaagtctatctgggagattgtcaggactcttaatgatgaaggtcaccagacgcttaaccaatataaagcgggttcatttggtcaaacctcagtacaagaccttctgaaaaatcgctctgtaattggttacttcacacctaaaggctgtgaagagatagctgattattatcctgcaattatagatgaaacaacattctacaaagtccagcaactatcatatgctcgttacggtagaaaacctgcttcagataagccaatggctgtgaatcttttcaaaggtgttatccgttgctctgaatgtggtcatgctctgattatcacaggctttagcgatacaagaaacgggatttatcgctgtccccttcgtaatgaaaaccgttgtagtgctaaagggctgtcacgtaagcaaaccgatggtacattgcttaccctgctatctcgtcttgaccgatttgatagcgatacgacgaataccatcgatacactgaagttacaccgtgaacacatctcaagcaatattgagaagctggtacagctatcacttgaaattgaagatttgtcagctattaccagcaagctaaaacaactaaagaatgagctatcacaggttgatgcggatatcgagaaggagacacaacgccttaaatctattgatgtggggtgtttgtctgattgtgacttgactacaaaggcgggaaggattgaagcacaactgataatcaaaagtgctgttaaagaggtcgttttaaatactgctaaacgtcgatgtaaagtgacttttcacaacggtaaggtaattgacctaccaataacagaaaacccctcagacaacgttacagaggctatacagtcgctttctgaagtcactgagaggggtttaatagatgttgatgaggttatcatatag

SEQ ID NO: 480087 - DNA, 333 bp, Shigella flexneri
atggagttactggaagctctggctgaagctggcgtgaccattggtaacttcttcagtaatgacctgatgaccgcctaccaacgccgccagatgaacaaacgagctgaagctgagcgtatcgctaaagagctagcgtctcagaaagagcgtacccgcgaaatgttcatgaccgaagacgaatggcaaaaagagctacagcgccgcgaacaggtcaaagctgaacgccggacctatggtgaaaacctccgcagcgctactcattccgctggtcgctcacgtgccgctatcgtcgctgaccttgagtcaggcggtaactggatggacagcttgtaa

SEQ ID NO: 480088 - DNA, 1914 bp, Shigella flexneri
atgcagcgtactttctcttctcagtcacggcagaatgtgactcaggcattacccgaattacatctcggcaatgccattattaaaccttcccgttatgtacagaacaaccagttttccccgctgaaaaaatatcccttggtggaacagttccgttatccactatggcaggctaaaccggtcgagccgcagcaagggataaaactggaaggcgcatccagcaatttcatctcgccgcagccgggtaatatttatattcctctcggccaacaagagccggggctgtacctcgtcgaggcgatggtaggtgggtatcgggcgacgacggtggtgtttgtttccgataccgtggcgcttagcaaagtgtcaggtaacgagcttctggtatggaccgcgggtaaaaaacagggtgaagcgaagcccggctcagagatcttgtggactgacggtcttggcgtgatgacccgcggggtgaccgatgacagcggtactttgcagttacaacatatatcgccagaacgttcatacattctgggtaaggatgctgaaggcggcgtttttgtctccgagaacttcttctacgaaagcgaaatctacaacacccgcttgtatatttttaccgatcgcccgctatatcgcgcaggcgatcgtgtcgatgttaaagtgatgggccgcgagttccgcgatccgttgcattcatcccccatcgtcagcgccccggcgaagctttcggtgctggacgctaacggcagtctgttgcaaaccgtcgatgtcacgctggatgcgcgcaatggcgggcagggaagtttccgcctgccagaaaatgccgttgccggaggttatgagttacgtcttgcttaccgcaatcaggtctatagcagcagttttcgcgtggcaaactgcatcaagccacatttcgagattggtttagctctcgacaaaaaagagttcaaaactggcgaagcggtcagcggcaaactgcaactgctctacccggatggcgagccggtaaaaaatgcccgcgtgcagttaagtttgcgcgctcagcaattatcaatggtcggtaacgatttgcgttatgccggacgtttccccgtgtcgctggaaggcagcgaaacggtgtccgacgccagcggtcatgtggcgttaaatctccccgccgccgataaaccgagccgctatttgttaaccgtctccgccagtgacggcgcggcgtatcgcgtcaccaccaccaaagagatcctcattgaacgcggcctggcgcattactctttaagtaccgccgcacaatacagtaatagcggcgagtcggttgtgttccgttatgccgcgctggaatcttcaaaacaggttcctgttacgtatgaatggttgcgtctcgaagaccgcacgagccatagcggagagctaccgtcaggcggcaaatcctttaccgtcaatttcgctaaacctggcaactacaatctgacattacgcgataaagacggcttaattctcgctgggttaagtcatgccgtcagcggtaagggcagcacggcgcatactggtacggtagatatcgtggcggataaaacgctgtaccagccaggcgaaaccgcgaagatgctgattactttcccggagccaattgatgaagcgttattgacgctggaacgcgatcgcgtggaacagcagtcgctgctttcgcatccggcaaactggctaacgctacaacgtttaaacgataccctgtatgaagcccgggttccagtgagcaattcctttgcgcctaacatcactttttcggtgctgtatacccgtaatggtcagtacagttttcagaacgccgggatcaaagttgccgttcctcagcttgatatccgggtgaaaacggacaaaacccattaccagcctggtgaactggtcaatgtcgaatga

SEQ ID NO: 480089 - DNA, 282 bp, Shigella flexneri
atgggcattggctgggcgctatttgaagagatgatcatcgatgctaaaagcggcgtggtccgtaaccccaatctgctggattacaaaatgccgaccatgccggatctgccacaactggaaagcgcgttcgtcgaaatcaatgagccgcaatccgcatacggacataagtcactgggtgagccacccataattcctgttgccgctgctattcgtaacgcggtgaagatggctaccggtgttgcaatcaatacactgccgctgacgccaaaacggttatattga

SEQ ID NO: 480090 - DNA, 1755 bp, Shigella flexneri
atgcgcgtcgattccattgctaaggtcaccgggcgggcacgatatactgacgattatgttatggcgggcatgtgttacgcgaaatatgtacgtagccctatcgcacatggttatgccgtaagtattaatgatgaacaagccagaagtttaccgggcgtactggcgatttttacttgggaagatgtgcctgatattccattcgctacagctgggcatgcctggacacttgacgaaaacaagcgcgataccgccgatcgcgcactgctaactcgccatgttcgtcatcatggtgacgccgttgccatcgtcgtggcccgcgatgaactcacggcagaaaaagcggcgcaattggtcagcattgagtggcaagaattacccgttatcaccacgccagaagcggcgctgacagaagacgctgcaccaatccataacggcggcaatttactgaaacaaagcacgatgtcgacgggcaatgtccaacaaacaatcgatgccgccgactaccaggtacaggggcactatcagactcccgttattcaacattgtcacatggaaagcgtaacatcgctggcgtggatggaggatgactcgcgaattaccatcgtttccagcacccagatcccgcacattgttcgccgcgtggttggtcaggcgctggatattccctggtcatgcgtacgagtcatcaaaccgtttgtcggtggcggttttggtaataaacaggatgtactggaagagccaatggcggcattcctgaccagcaagcttggcggcattccggtgaaagtttcccttagccgtgaagagtgtttcctcgcaacccgtacccgccacgcttttactattgacgggcaaatgggcgtgaaccgcgacggaaccttgaaaggttatagtctggatgttctgtctaacaccggcgcttatgcatctcacgggcactccatcgcttctacgggggggaataaagtcgcttacctttatcctcgttgtgcctacgcttacagttcaaagacctgctataccaacctcccctcggctggtgcgatgcgtggttatggcgcgccacaagtcgtatttgcctttgagtctatgcttgatgacgccgcgacagcgttaggtattgatcctgttgaaattcgtttacgcaacgccgcccgcgaaggagatgctaatccgctcacgggcaaacgtatttgcagcgcagggttgccggagtgtcttgaaaaaggccggaaaatctttgaatgggaaaaacgccgtgcagaatgccagaaccagcaaggcaatttgcgccgcggcgttggcgtcgcctgttttagctacacctctaacacctggcctgtcggcgtagaaatagcaggcgcgcgccttctgatgaatcaggatggaaccatcaacgtgcaaagcggcgcgacggaaatcggtcagggtgccgacaccgtcttctcgcaaatggtggcagaaaccgtgggggttccggtcagcgacgttcgcgttatttcaacacaagataccgacgttacgccgttcgatcccggcgcatttgcctcacgccagagctatgttgccgcgcctgcgctgcgcagtgcggcactattattaaaagagaaaatcatcgctcacgccgcagtcatgctacatcagtcagcgatgaatttgaccctgataaaaggccatatcgtgctggttgaacgaccggaagagccgttaatgtcgttaaaagatttggcgatggacgctttctaccacccttaa

SEQ ID NO: 480091 - DNA, 402 bp, Shigella flexneri
gtggagggcaacaccacgctttacgccctgccgaaacccgaggttgtcctgcgctggcgtgaacagaccacagatgacttccgcttctgttttaagtttccggcgaccatttcgcatcaggcagcattacgacattgcgatgatttagtgactgaatttttgacccgcatgtcaccgttggctccgcgcattgggcaatactggctgcaactgcctgccacattcggcccacgggagctgcctgcgctttggcattttctcgattctctccctggcgaatttaattatggtgtggaagtccgccatccacagtttttcgccaaaggggaagaggaacaaacgcttaatcgcggtttacatcagcgcggcgttaatcgggtgattttcatcagacacgtttaa

SEQ ID NO: 480092 - DNA, 375 bp, Shigella flexneri; identical to SEQ ID NO: 475220

SEQ ID NO: 480093 - DNA, 285 bp, Shigella flexneri; identical to SEQ ID NO: 461629

SEQ ID NO: 480094 - DNA, 414 bp, Shigella flexneri
ttggaggatgcgattaaagcatctaattatgaagagattaacaataaagtgactgataaaaaaatggctcatcaggcccttgcttattctttaggcgataaaaaagctgatatagcactttatttactatctaaatttaattttacaaaacaagatgtcgcagagatggagaaaatgaacaacaatatatattgtaatctgtatgatgttgaatacttacttagtaaagatggtgccaactataaagtgctagaatattttatcaataatggattggttgatgtaaacaaaaaatttcaaaaagcaaatagtggggacactatgcttgacaatgcaatgaaaagcaaagattcaaaaatgattgattttttattaaaaaatggagcaatattaggcaaacgatttgagatatga

SEQ ID NO: 480095 - DNA, 285 bp, Shigella flexneri; identical to SEQ ID NO: 461629

SEQ ID NO: 480096 - DNA, 1068 bp, Shigella flexneri; identical to SEQ ID NO: 479105

SEQ ID NO: 480097 - DNA, 777 bp, Shigella flexneri
atgacattaaccgatcactttgataatgctattccacctgttttttaccatgagcaccaatcatttttcttagataactttaaagaggttgtggatgaagttagcaggtatgtgcatggtaatcaggggaaaactgatgttccaatatttaacactaaagatatgaggcttggaattgggttgcatcttattgattttataagaaagagtaaagatcaaggattccgagagttttgttataacaaaaacattgatcctgttagtctggatagaattataaactttgtgtttcagcttgagtatcatataccaagaatgctaagtacagataacttcaaaaaaataaaactcagagacatatctttggaggatgcgattaaagcatctaattatgaagagattaacaataaagtgactgataaaaaaatggctcatcaggcccttgcttattctttaggcaataaaaaagctgatatagcactttatttactatctaaatttaattttacaaaacaagatgtcgcagagatggagaaaatgaacaacaatatatattgtaatctgtatgatgttgaatacttacttagtaaagatggtgccaactataaagtgctagaatattttatcaataatggattggttgatgtaaacaaaaaatttcaaaaagcaaatagtggggacactatgcttgacaatgcaatgaaaagcaaagattcaaaaatgattgattttttattaaaaaatggagcaatattaggcaaacgatttgagatatga

SEQ ID NO: 480098 - DNA, 213 bp, Shigella flexneri
gtgtatgatggtgattttaaggtgcttgcgtggcttccatttccatcagatgtccttcctgctccgctactgaaggcgtggtgcgtaacggcaaaagcactgccggacatcagcgctatctctgctctcattgccgtaaaacatggcaactacagttcacttacaccgcctctcagccctgtacgcaccagaaaatcattgatatggccatga

SEQ ID NO: 480099 - DNA, 744 bp, Shigella flexneri
atgtccggcagtgcttttgccgttacgcaccacgccttcagtagcggagcaggaaggacatctgatggaaatggaagccacgcaagcaccttaaaatcaccatcatacactaaatcagtaagttggcagcattaccgagttgaacatggttactttaatgaatcaccaaacatatatgacaagaagtatatctctggtataaccagaagtatggcacaattaaaaatagaggagtttattaatgagaaatccagacgacttaattatatgaagacaatgtattctccatgtccggaagattttcagcctatttccagagacgaagccagtacaccggaaggaagctggttgacagttatatctggaaaacgtcctatggggcaattttctgtggatagtttgtaccatcctgacttacatgcattatgtgagctcccagagattagttgtaagatcttctctaaagaaaatagttattttttgtatataattgttgtattcagaaatgattctccccaaggagaactacgggcaaatcggtttatagaactatatgatataaaaagagagattatgcaagtgttaagagatgagtcgccagagttaaagtctattaaatctgagattattattgctcgtgaaatgggagaactttttagttatgcatcagaggaaatagatagctacataaaacaaatgaatgacaggctttctcaaatcaaggctcgaatgcctgttacttaa

SEQ ID NO: 480100 - DNA, 336 bp, Shigella flexneri
ttgccgtctgcggggattgtgtggcgaagggctgcgccaactctgcgtatccgtgacccgcataaagatgaaaagatggcagcaatccataaagcactggacgaatgcagcgcagagcatccggtcttttatgaagatgaagtggatatccatcttcatcccaaaatcggtgcggactggcaactgcgcggacagcaaaaacgggtggtcacgccgggacagaatgaaaaatattatctggccggagcgctgcacagcgggacaggtaaagtcagctatgtgggcggcaacagcaaaagttcggcgctgttacatcagcctgctgaagcggcttaa

SEQ ID NO: 480101 - DNA, 255 bp, Shigella flexneri
atgtttgacacaaagcaaattagatactcaggtaaagatggtatctattttcaccttagagataatgtagaatcttttcttgccttaacagctactgaacagatggactatgactcaccgatgatggtgacaactcaggctatgcaatcggggcaaactatcactgataatgttcagagagcacctaagaccatctctattagcggtgttgtagtggttgattcgacgggttcagttgaatcgccacgggtttaa

SEQ ID NO: 480102 - DNA, 294 bp, Shigella flexneri; identical to SEQ ID NO: 476979

SEQ ID NO: 480103 - DNA, 213 bp, Shigella flexneri; identical to SEQ ID NO: 462242

SEQ ID NO: 480104 - DNA, 234 bp, Shigella flexneri
atgtttgattttgcttcttaccatcgcgcagcaacccttgccgatgccatcaacctgctggctgacaacccgcaggccaaactgctcgccggtggcactgacgtactgattcagctccaccatcacaatgaccgttatcgccatattgttgatattcataatctggcggagctgcggggaattacgctggcggaagatggctcgctaggtaatgctgccaacttactgatttag

SEQ ID NO: 480105 - DNA, 276 bp, Shigella flexneri; identical to SEQ ID NO: 478553

SEQ ID NO: 480106 - DNA, 327 bp, Shigella flexneri; identical to SEQ ID NO: 462700

SEQ ID NO: 480107 - DNA, 132 bp, Shigella flexneri
atgatgccaggctcgtacatcaccggtgtacgtgcgaaaggcgtctcgccatacaacaaacgcacatcgggcaacagttctgacaaactattttctttatttttcggtaatgctgccaacttactgatttag

SEQ ID NO: 480108 - DNA, 213 bp, Shigella flexneri; identical to SEQ ID NO: 462242

SEQ ID NO: 480109 - DNA, 294 bp, Shigella flexneri; identical to SEQ ID NO: 476979

SEQ ID NO: 480110 - DNA, 294 bp, Shigella flexneri; identical to SEQ ID NO: 476979

SEQ ID NO: 480111 - DNA, 294 bp, Shigella flexneri; identical to SEQ ID NO: 25632

SEQ ID NO: 480112 - DNA, 219 bp, Shigella flexneri; identical to SEQ ID NO: 478904

SEQ ID NO: 480113 - DNA, 294 bp, Shigella flexneri; identical to SEQ ID NO: 476979

SEQ ID NO: 480114 - DNA, 294 bp, Shigella flexneri; identical to SEQ ID NO: 476979

SEQ ID NO: 480115 - DNA, 1524 bp, Shigella flexneri; identical to SEQ ID NO: 479173

SEQ ID NO: 480116 - DNA, 1215 bp, Shigella flexneri; identical to SEQ ID NO: 476539

SEQ ID NO: 480117 - DNA, 381 bp, Shigella flexneri; identical to SEQ ID NO: 458903

SEQ ID NO: 480118 - DNA, 579 bp, Shigella flexneri
atgttcgatacagggcgttacaggcgtaaaaaaatccggtaccgcgatgaagtgactggaaaaatgataacgcgggataatccaccaatcccgggaaagcaatcgctggcgaaggggacgtcaattcctctggtcagtccggttgagttttcgacatcatcgtggcggcgggctgttctgtctcttgaagagcactataaagcctggttgttgtggtgttacagcggaagtatttgctgggagtatcagatcaccataacccactgggcgtgggaagagtttaaggctcattctggcactaggaaaattgcagagaaaacacaggaacgcctgaaaaaattaatctggctggcggcgcaggcggtaaaagcagaactttttggtggggaaggttatgaatatcaggagctggcattactggcgggagtaacaaccaaaaactggtccaaaacatttactcgtcactgggttgcaatgaaacacatttttcaccgactggatagtgaggctttattgtttgtaatgagaacacgttcaaaaaaaagacggcattttcaaagcaaagtgttgcaaaagtag

SEQ ID NO: 480119 - DNA, 579 bp, Shigella flexneri; identical to SEQ ID NO: 480118

SEQ ID NO: 480120 - DNA, 627 bp, Shigella flexneri; identical to SEQ ID NO: 479864

SEQ ID NO: 480121 - DNA, 276 bp, Shigella flexneri
gtggcttctgtttctatcagctgtccctcctgttcagctactgacggggtggtgcgtaacggcaaaagcaccgccggacatcagcgctatctctgctctcactgccgtaaaacatggcaactgcagttcacttacaccgcctctcagcccggtacgcaccagaaaatcattgatatggccatgaatggcgtcggatgtcgcgccagtgcacgcattatgggcgttggcctcaacacggttttacgtcacttaaaaaactcaggccgcagtcggtaa

SEQ ID NO: 480122 - DNA, 825 bp, Shigella flexneri; identical to SEQ ID NO: 478357

SEQ ID NO: 480123 - DNA, 270 bp, Shigella flexneri
atgagcacaaaaccactcttcctgttacggaaagcgaaaaaatcatccggtgaacctgacgtcgtcctgtgggcaagcgacgattttgaatcgaccagcaccactctggactatctgctcgttaagtcaggtaaaaaactgagcaactattttaaagctgttgccacaaattttcctgtcgttaatgaccttcccctgaagtggtcaacaaaaactggccaccgagttagagtttttccagtatcgattttccgattcgtttgggggtaa

SEQ ID NO: 480124 - DNA, 654 bp, Shigella flexneri; identical to SEQ ID NO: 476062

SEQ ID NO: 480125 - DNA, 303 bp, Shigella flexneri; identical to SEQ ID NO: 473532

SEQ ID NO: 480126 - DNA, 303 bp, Shigella flexneri; identical to SEQ ID NO: 473532

SEQ ID NO: 480127 - DNA, 300 bp, Shigella flexneri; identical to SEQ ID NO: 84330

SEQ ID NO: 480128 - DNA, 300 bp, Shigella flexneri; identical to SEQ ID NO: 478434

SEQ ID NO: 480129 - DNA, 366 bp, Shigella flexneri
atgattgatgtcttagggccggagaaacgcagacggcgtaccacacaggaaaagatcgcaattgttcagcagagctttgaaccggggatgacggtctccctcgttgcccggcaacatggtgtagcagccagccagttatttctctggcgtaagcaataccaggaaggaagtcttactgctgtggccgccggagaacaggtcgttcctgcctctgaacttgctgctgccatgaagcagattaaagaactccagcgcctgctcggcaagaaaacgatggaaaatgaactcctcaaagaagccgttgaatatggacgggcaaaaaagtggatagcgcacgcgcccttattgcccggggatggggagtaa

SEQ ID NO: 480130 - DNA, 366 bp, Shigella flexneri; identical to SEQ ID NO: 462994

SEQ ID NO: 480131 - DNA, 366 bp, Shigella flexneri; identical to SEQ ID NO: 462994

SEQ ID NO: 480132 - DNA, 366 bp, Shigella flexneri
atgattgatgtcttagggccggagaaacgcagacggcgtaccacacaggaaaagatcgcaattgttcagcagagctttgaaccgggaatgacggtctcccttgttgcccggcaacacggtgtggcagccagccagttatttctctggcgcaagcaataccaggagggaagtcttactgctgtggccgcaggagaacaggtcgttcctgcctctgaacttgctgctgccatgaagcagattaaagaactccagcgcctgctcggcaagaaaacgatggaaaatgaactcctcaaagaagccgttgaatatggacgggcaaaaaagtggatagcgcacgcgcccttattgcccggggatggggagtaa

SEQ ID NO: 480133 - DNA, 303 bp, Shigella flexneri; identical to SEQ ID NO: 473532

SEQ ID NO: 480134 - DNA, 366 bp, Shigella flexneri; identical to SEQ ID NO: 462994

SEQ ID NO: 480135 - DNA, 366 bp, Shigella flexneri; identical to SEQ ID NO: 462994

SEQ ID NO: 480136 - DNA, 303 bp, Shigella flexneri; identical to SEQ ID NO: 473532

SEQ ID NO: 480137 - DNA, 381 bp, Shigella flexneri; identical to SEQ ID NO: 458903

SEQ ID NO: 480138 - DNA, 480 bp, Shigella flexneri; identical to SEQ ID NO: 464883

SEQ ID NO: 480139 - DNA, 219 bp, Shigella flexneri; identical to SEQ ID NO: 474644

SEQ ID NO: 480140 - DNA, 219 bp, Shigella flexneri; identical to SEQ ID NO: 474644

SEQ ID NO: 480141 - DNA, 204 bp, Shigella flexneri; identical to SEQ ID NO: 475480

SEQ ID NO: 480142 - DNA, 381 bp, Shigella flexneri; identical to SEQ ID NO: 458903

SEQ ID NO: 480143 - DNA, 381 bp, Shigella flexneri; identical to SEQ ID NO: 458903

SEQ ID NO: 480144 - DNA, 228 bp, Shigella flexneri
atgaagcgtggctacgtgaccgttaatctcggttctgattttgatgccagcaccatcaaaaaaggcgacccggtatacgttgtcgtctccactgatgaatccatcaaagtgccgctgggtggattcatgtccacgtcagtcagtggcaaaaatgtggtgctgaccaacgctgaattcacaggtgccggtgatgctaacggcaatgcagaaatttcctggaagatttaa

SEQ ID NO: 480145 - DNA, 354 bp, Shigella flexneri; identical to SEQ ID NO: 476372

SEQ ID NO: 480146 - DNA, 294 bp, Shigella flexneri
gtggcgcacgtcttcggtgaacgcactctggccacactggagcgtcttctgagcctgctgtcggcctttgaggtcgtggtatggatgacggatggctgtccgctgtatgaatcacgcctgaagggaaagctgcacgttatcagcaagcgttacactcagcgcattgagcgacataatctgaatctgagacaacatctggcaaggctggtacggaagtcactgtcgttctcaaaatcggtggagctgcatgacaaggtcatcgggcattatctgaacataaaacactatcagtaa

SEQ ID NO: 480147 - DNA, 294 bp, Shigella flexneri
gtggcgcacgtcttcggtgaacgcactctggccacactggagcgtcttctgagcctgctgtcggcctttgaggtcgtggtatggatgacggatggctggccgctgtatgaatcacgcctgaagggaaagctgcacgttatcagcaagcgttacactcagcgcattgagcgacataatctgaacctgagacaacatctggcaaggctggtacggaagtcactgtcgttctcaaaatcggtggagctgcatgacaatgtcatcgggcattatctgaacataaaacactatcagtaa

SEQ ID NO: 480148 - DNA, 129 bp, Shigella flexneri
atggcggaaaatcgtgttgaggccaacgcccataatgcgggcggttgcccggcatccaacgccattcatggccatatcaatgattttctggtgcgtaccgggctgagaggcggtgtaagtgaactgtag

SEQ ID NO: 480149 - DNA, 453 bp, Shigella flexneri
gtggatgcggtaattgccgccaccggactgcgcccggaaacagccctggcacgacgcgccgggctgacgattaatcgcggcgtttgcgtcgatagttatctgcaaaccagtaatgccgatatttacgcgctgggcgattgcgcggaaattaacggtcaggtattgccgttcctgcagccgattcaacttagcgggatggtgctggcaaaaaatcttctcggcaataacacgccgctgaaactaccggcgatgctggtgaaaatcaaaacgccggaattaccgctgcatctggcaggcgaaacccagcgtcaggatttacgctggcagattaataccgaacgccagggaatggtggcgcgcggcgttgacgatgctgaccagcttcgcgcctttgtggtcagtgaggatcggatgaaagaggcatttgtattgttgaaaacgttgccggtgtag

SEQ ID NO: 480150 - DNA, 1182 bp, Shigella flexneri; identical to SEQ ID NO: 470368

SEQ ID NO: 480151 - DNA, 1098 bp, Shigella flexneri; identical to SEQ ID NO: 473276

SEQ ID NO: 480152 - DNA, 276 bp, Shigella flexneri; identical to SEQ ID NO: 5786

SEQ ID NO: 480153 - DNA, 768 bp, Shigella flexneri
ttgcgtggtatcggtgccggtattgagaatacgccagcaggaatgcagagtcaggtgctgctggcggcagacaggattgcgatgattaatcctgcgaatggcaacacaaagccgatgtttgttggtcagggcgatcagatattcatgaacgacgtgttcctgaaacgcctgacggctccgaccattaccagcggcggtaatcctccggcattttccctgacacctggcggacggctgacggcgaaaaatgccgatatcagcggtaacgtgaacgcgaactccgggacgctcaacaacgtcacgattaataagaactgtcgggttctgggaaaattgtccgcgaaccagattgaaggcgatctcgttaaaacagtgggcaaacctttcccacgggactcccgggcaccggagaggtggccatcagggaccattaccgtcagggtttatgacgatcagccgtttgatcggcaaattgttattcccgcggtggcgtttcgcggtgctaaacatgagcggaagaataacaatatttattcgtcatgccgcctgatagtgaagaaaaacggtgctgaaatttataaccgaacgaccctggataatacgctgatatatacgggtgttattgatatgcctgccggtcacggtcacatgacgctggagttttctgtatcggcatggctggtaaatggctggtatcccacagcaagtatcagcgatttgctggttgttgtgatgaagaaatccacagcaggtatcagtatcagctga

SEQ ID NO: 480154 - DNA, 210 bp, Shigella flexneri; identical to SEQ ID NO: 479175

SEQ ID NO: 480155 - DNA, 294 bp, Shigella flexneri; identical to SEQ ID NO: 479211

SEQ ID NO: 480156 - DNA, 303 bp, Shigella flexneri; identical to SEQ ID NO: 473532

SEQ ID NO: 480157 - DNA, 282 bp, Shigella flexneri
atgttacctattttgacgggcaatgtcggcatcagcggcggaaatagtggcgcgcgtgaatcgacctataccattacgatagaacgcctaccggtgctggataatccggtcaaaacgtcaatctcctgcttcagctggacggatgctatcgatcatggcccgcaaatgacggcactccgcgacggtgtccggggcaaagataaactggatgtgcccattaagttcatctggaacttcaaggacttgaagcggacccttagtaggcctgaggtcctgcattga

SEQ ID NO: 480158 - DNA, 168 bp, Shigella flexneri; identical to SEQ ID NO: 473920

SEQ ID NO: 480159 - DNA, 627 bp, Shigella flexneri; identical to SEQ ID NO: 479864

SEQ ID NO: 480160 - DNA, 612 bp, Shigella flexneri; identical to SEQ ID NO: 15986

SEQ ID NO: 480161 - DNA, 480 bp, Shigella flexneri; identical to SEQ ID NO: 480052

SEQ ID NO: 480162 - DNA, 216 bp, Shigella flexneri; identical to SEQ ID NO: 474400

SEQ ID NO: 480163 - DNA, 210 bp, Shigella flexneri; identical to SEQ ID NO: 476166

SEQ ID NO: 480164 - DNA, 228 bp, Shigella flexneri; identical to SEQ ID NO: 480144

SEQ ID NO: 480165 - DNA, 213 bp, Shigella flexneri; identical to SEQ ID NO: 26386

SEQ ID NO: 480166 - DNA, 1182 bp, Shigella flexneri; identical to SEQ ID NO: 26385

SEQ ID NO: 480167 - DNA, 330 bp, Shigella flexneri; identical to SEQ ID NO: 26384

SEQ ID NO: 480168 - DNA, 909 bp, Shigella flexneri; identical to SEQ ID NO: 26383

SEQ ID NO: 480169 - DNA, 960 bp, Shigella flexneri; identical to SEQ ID NO: 26382

SEQ ID NO: 480170 - DNA, 255 bp, Shigella flexneri; identical to SEQ ID NO: 26381

SEQ ID NO: 480171 - DNA, 228 bp, Shigella flexneri
atgaacgaaaattctgacgcagtagtgagtgccgctacttcctgcctgctgtatgtgcgtgaaatcgaaaggtcaggccccggtgaaatgccggtgtcatattcaaatgagcttatccagagatggcttagttcggctgaacgtcgtaatttgcattcccgccacagcttgcgttcgattcgtacaattctgaagcacgcaaggaagagccgtcagcctgatttttag

SEQ ID NO: 480172 - DNA, 390 bp, Shigella flexneri; identical to SEQ ID NO: 26380

SEQ ID NO: 480173 - DNA, 537 bp, Shigella flexneri; identical to SEQ ID NO: 26379

SEQ ID NO: 480174 - DNA, 258 bp, Shigella flexneri; identical to SEQ ID NO: 26378

SEQ ID NO: 480175 - DNA, 591 bp, Shigella flexneri; identical to SEQ ID NO: 26377

SEQ ID NO: 480176 - DNA, 270 bp, Shigella flexneri; identical to SEQ ID NO: 26376

SEQ ID NO: 480177 - DNA, 957 bp, Shigella flexneri; identical to SEQ ID NO: 26375

SEQ ID NO: 480178 - DNA, 936 bp, Shigella flexneri; identical to SEQ ID NO: 26374

SEQ ID NO: 480179 - DNA, 921 bp, Shigella flexneri; identical to SEQ ID NO: 26373

SEQ ID NO: 480180 - DNA, 936 bp, Shigella flexneri; identical to SEQ ID NO: 26372

SEQ ID NO: 480181 - DNA, 879 bp, Shigella flexneri; identical to SEQ ID NO: 26371

SEQ ID NO: 480182 - DNA, 525 bp, Shigella flexneri; identical to SEQ ID NO: 26370

SEQ ID NO: 480183 - DNA, 1233 bp, Shigella flexneri; identical to SEQ ID NO: 26369

SEQ ID NO: 480184 - DNA, 222 bp, Shigella flexneri; identical to SEQ ID NO: 26368

SEQ ID NO: 480185 - DNA, 2013 bp, Shigella flexneri; identical to SEQ ID NO: 26367

SEQ ID NO: 480186 - DNA, 1128 bp, Shigella flexneri
atgactttcaatacttctaaacttaataaagtttctgcaaaggaaatcagtgaaaactttataaaagcatatcctgacttgcaggaaggtgctgttataacaaaaattgaaattagtgggtgtcagggctctcggcgaactgataaaatcgaactgtcctatggcggtgatgatataacagaccagaagagcgtgtctaaaagcgaagttcgctggatagacataaaggcactgagtttcaaaagcactatcactagtcgaatttcaaccctttgttcacggttgtgcatccgctatagcaatatgtggatactgccagttgaaaggatggaggagtttctcgaagaggcacaagaaatcgaacgtgaatttcaaaccggtatccagaacgtggttgataactatgacactcatattcaggctgagaaagatcgcagtccgttgatgtcagatttaattgaccagttgaaattgactaaagatgattttgttaaatcattccggtttaatctggcacatttcattccgttttcaccgattagtgtggagggggatgaaacgcaggacttttatcaagaacaactgataactgacttggccgatgaagctatgaaggtttatacaaaaatcagcaaaaatgataatttgcgttccagcacgattgaccgattaaagcagatgcaggataaaataattagcttcatgttcattcataaagaggctgttgttcttgcagaagctattaagcatatcatgaataatttaccaaaaggtgccatttcttctccccgtgatgttgcggtattaaagcagtggttctatttcatgagcgatgcgtcaatgctgaaacgtattatctccggtgaacaaaaggtaaccgactggctggattccataacccggtcattcaatatcgattcacaggttacagcggctaactctctgaatactgctgaggatgatgttttttcttcagcaaatgttttcagagaagacccggttgaagatcttgagaacaaggcagtgaatgcacctgagcctgctgttggccctgatgaagatgtttctattcaggccagtggtagtaatagagcatttgactgcgaactcgaattgaccggttggtaa

SEQ ID NO: 480187 - DNA, 270 bp, Shigella flexneri; identical to SEQ ID NO: 26365

SEQ ID NO: 480188 - DNA, 1053 bp, Shigella flexneri; identical to SEQ ID NO: 26364

SEQ ID NO: 480189 - DNA, 987 bp, Shigella flexneri; identical to SEQ ID NO: 26363

SEQ ID NO: 480190 - DNA, 378 bp, Shigella flexneri; identical to SEQ ID NO: 26362

SEQ ID NO: 480191 - DNA, 876 bp, Shigella flexneri; identical to SEQ ID NO: 26361

SEQ ID NO: 480192 - DNA, 1785 bp, Shigella flexneri; identical to SEQ ID NO: 26360

SEQ ID NO: 480193 - DNA, 873 bp, Shigella flexneri; identical to SEQ ID NO: 26359

SEQ ID NO: 480194 - DNA, 2448 bp, Shigella flexneri
atgttcaatgcgggtcgaaacgaaataggaaatgctgtagctggtacaggaaactggctacagaattgtaatacggaaacatcaaaacaaacaattactacgcactatccagattacaaagagttttactgcaattcacccaagaaagataactttaacagttgcacgataactcgtgatttttccgtgccggtttatatctcaggtggtaatggtgatatgtccatgtgcggagataattgtgtgagagtctggtttggcagaagggacgacaactattggaacgatggagtctatgacaactcattaaccttaaaattccatccagatgcaaagctcgcaactgcgaaaataattaacgcagagtgggatgaccatatgagggtcacgcttgatggtacacagatttttgctcatatagatggagcatatagaagtagcaattatccatctccacaaggtcaatgggagttaaagaaatcctggaagctcgataaagtctacgatattactgaacaagtaaaaacctctgtatatcaggagcaggatcgtgaagtgactatggcttcgcgcgtatgggttggcggtggtggggaaggctattttgaagttgagatgacttttgaaaatatgaagttggaggataaacatatacaggagcccgcaggatgttttgatgcagtacaaacgccgaattcattctgtcggtttgacaggtttgtcaacatggatgttggtacaaagcgactcccggaaagtgtgcttaagatggccacaccgctttacaaaggtgatacaggatacttaacctggaaaacaaaccttgaaggctatttctgtgatcccctggcgaaggaaaaactgtgctcttatgatgcgaagggaaacatcatgaaagaccccacaggcaaagacctttgctacaactacgacgatataaaaaatatgcctgacgcatgcagcacatataaaaatgatgctgcgtgtgtgctagataatcagacatgtgctgaaggttggttcgatgaaggcacaaatacttgctacatgtatgagcagaaatatacatgtgacagagggaaagacgtagtcagagaggtagagtcacagactaactcctgtgtaggtatgatcccatgttctggcggaacatgtgaaacaggcccaaaagaagaaaacaaagattttgggaaagtggccgcgtactccaatatggttcagtacatgcaaggtgaagcaaaatgcgaagatccaaacgaccctaactcctgctctgtctttgaggggaaagcagagtggtgcggcaggtccgttggttttgtgaacggactggccaaaacagattgctgcgaaaagccgcagggtgctgctgggtcactggaggcgataatgctggccgggtcgatgatccgaaacacgaactggacccgagtgaatgctcaactggtaaactggactggaggggagagcggaacctgggcatcaatggctaactcagtgggtgaatggactgcatcggcaggtaaaactgtcggacaaatgtggaacaatgtgaccagttcaataaccagcgtttacgaaaacgtggccggtaaccttggccgaacagtaggatcatccgctgctggtgaaagtggtcagcttgctaaggagactatgagttcattcgggcttggtaaacttaagcagatggccatggaaaaagcctatgacctgcttcccgatacagttcgagacttcgtatttaaaaatgtagcgacaacgggtggagaaatagtcttttctgctgctgttcaaaactttatgcttgcattaaatgtaatcggctggatttatacggcatatcaagtcacaaaaatgctgcttgaaatgctggtggcctgcgatcaaaaagaaatggaagcatctattcacaaaaatcagaaatcctgttttacactggatacaaaccgttgtgttaaatatctgaatctgggatttacaaagaaatgtgttaaaaaagcaacagacatgtgctgttacaattcaatgttatctcgcgttattatgcagcaggcctacccgcagcttggaatagacccggttacttcaaactgcgttggcttatcaatagggcagatccaaaagttagattttgacaagattgatttaacagaatggattaacgatgctgttcaggtcggagaagtaccggaccagtacgctacattctcagaatcgtcaataacagcaaatttgccatttaaaaacgagaattatcaacttccatcagaaagaacaaaagatgcaatgggaggagaggagaatatgataaaagccagacaggaaaacgctcaggccattaaagaggagaacgtagactgtagctatcttccacgccctgcgatttgtgaagttgggtcaacttatgtagatccaattacaggtaaggaaataccaaaatattaa

SEQ ID NO: 480195 - DNA, 747 bp, Shigella flexneri
atgaaacatagaaaaataatttcttcagcaattattgcgtctatgatagctaatactatgagttgggcattttacgtgtcgctcataaacattgcgttaacgcctaaaatatttgcggcagatgcgatttttgaccagcttgaaaacaattttaaccttgccaatcccaacgccaaccggaacgcaaccaccagtgctcaggatattgtggaaaagtataaaaatgctgattccggggaaaatctgagcggcaaaatttccgagaaatatgttggtaaagcagagtcaacaaacctaaatgttgggaagtacgggacgccgaactcaaatgaaagtgttatgagtaatgcggtgtccgacgggaaatcgatcggtaaggctgtacaattacctagcatgtcgggcggtacaattaactcgaattatacgaaagagggggcaaagttactttctagggacagcagcggtaatattggaataagtaacaacccgaatacaacggcaggtaccaaaaccagtacaggggaactattcagctcagagcagaagcacagtgatgttcagttcaatgctggtggccggtatggagatgaaaatggcttcatcaatgacatcaaaaatcgaaaaagtcagctgtttgaagcgcaaagttatgatggagtcgcctaccgtatgcaaataaagaaaacccagcatctactattaaacctaacgaccctatgttcaatgcgggtcgaaacgaaatag

SEQ ID NO: 480196 - DNA, 1053 bp, Shigella flexneri
gtgaagaagctaaaaaagttacttttggaaatattgatcgctgtcatgctgtcgctctcgctgcctgcaatgacaatggccgcagataccggtgtcccgggagcaatgtgccagtcagcgggagtatggcagggcctaatcaaaaacatctgctggagttgtatcttcccgatgcggatcatgggaattggagcagcccctgaaggtgccgccccctcacgccctggttgctattgcacggatcaaaatgggataccagaaatcggatggcagctaagttttttccaaccagtaaaaattgttgaagtggtgaaaagtccgtggtgcagcccatttttagagggaaccatgctgcaaaaatcacagttcgacatcggcaagagcaatactaaccagcctatgaccgcaacagaagccggattctacgacgtacatctctgggaattcccaatcatgacgatgttgaaattgctggttattggtgaatgtacagcagaaccttatgttgatgccagtctgacgtatatcagcgaagtagatccgatgtgggaaagtgacctattgacgctcgtgctaaaccccgaagctgtggtatttgcaaaccctatcgcctcaatggtatgtgcagctgactgcgtggccgtgactgccgggaaggataatttggctgcatatttttgtgccgggtgtgatgggaacctttatccgttaactggacacatctatgcgaatgatgatgccgtcagaaccagctcacttataactcagcgtctactgacgaagttacataggcagggaatgcttatgagaacaatgggagctgacgcaatgtgtgaaaaaacgtgggaatacttcactcctcgatctcaataccgactttcaatgctttacccaacgccggaggcgaatggtccggattgctgtcatcgcctaggcgattctgtccatgactggtcaacgcttaaaggtggacggaaaaaaatcggcatagataactatgtttacatgctgtggcgctataatgattgctgcgtcaggtatatacccaactaa

SEQ ID NO: 480197 - DNA, 132 bp, Shigella flexneri; identical to SEQ ID NO: 26353

SEQ ID NO: 480198 - DNA, 1509 bp, Shigella flexneri; identical to SEQ ID NO: 26352

SEQ ID NO: 480199 - DNA, 513 bp, Shigella flexneri; identical to SEQ ID NO: 26351

SEQ ID NO: 480200 - DNA, 4221 bp, Shigella flexneri
atgatttccggaaaactccaggctgatatgcctgccgtcacgtttaatcccggcccgggcgattttgttgcattcgtcaacaataatacaattactgcttcaggtactggcaacgcatgcaatgtgacggttgatgatcgtgcgacatcaagcgtagataacttggtctgcttttttgaatggcttccaaatacctctggctttacagcaaacggattcaatttaacagggatacccaatgcggcaggagaactaaaactgccgtataaaatttcttatttttctggatcagaaaggcagaaagtagaagtggttaatggggagtatacagttaatgctcttgtaccggttaaaccgacgataacgggcctgaaatcgtctatgaatggagtggttcaggatggttacactcttaaatcctatcttaaggatgaagcaattaggaatgtcactgtctccgtagagcctcgcaattatgtgcaatatatctctatcgggtctggatcagcttgcgaagtcgcaattggtgggaatggctgcacgatcgatgttggaagcatcaaagtaagtgattcggatttgctgatgggttcacgggaaatcacggtcactgccaattcgaaaaataattactttgcccctcctgaagcgcagaagctaacgctgacctgggattaccgtcctcctgttgttgaccatactctctggaatttcacggatgaagctaaaacaataagtattggtggacaggagatctatacaggagctagaacggtggccgtagccgtcaaagtgcctcaggaagaaactgagggtgagtggtggttaccaaccgctatgacgctaacgatgaatcctgatggggtgtttaagccgacaacaaaagttactttagaagatggtacggttatcgactttaagcaatcctgggcaacaccgctacgtcgtactcttcagcccgtgagcgggccacagaaagtcggcgatgaatatctgtatatctttgacttaacagacttgacgaatggttcttatgccgcctcgttcacggtagagaacaatagcaagaatacctctacgtacaatgagcctgaaagcaaactgatgctttctgataacccaacactgatggtgcttaaggacggtgcagctctggccaaacgagctcctgtgtatttcttaaatgaaattattgttgccgcattccagggccaggccggagtcgcggatattaaagctgttacgatagataacaaacttgttgagctcacccccacgaaccacaaaggcatttattatctgccggttggggatgatctagaagtgaatgctgaccatgaaatcacggtcatagctgaaaacctgtacggcaagattgtgacatttaatactactttcacgtatcaaccaacaggattcacgcttaaaaactttgagaaagacatcacattgtactcacgagttcggcagtataccgatctcatgagtcagacggccggtgataaatgcactctctttactacagaagagaacgcactggcataccttgaatggtatggtgacaaatctgatatcaccgcctgttaccctcagtggaacaatgtgcctgacgggcttgaattttactttaaaggccggacgccaggcctgacagggttcttcaataaaacaggcgataacctgctcgactatcaggtctatatgataaacggcaagggctctaaagctgtatcgtccagaaaccgccatgtgctgattacgcagttaccttataacccggtccttacctacaagaaaaacaaggtgttgacggggattaacgataacaccgcactggcgtataccactggcggggaagcagctcgtctattggcaaaagtggttcctgctgatgtgacagtctatgtttcacaaaacgggggggaaagcgtaaaaacgacgtttaagaaccgttcatcaaataacgatgcaacgacgtttgttcaacgtcttaaagtggcatcagccccgttgtggacgaagaatgtcttcgacatagctgtcgagtactcgaaggaaccgactatgcgaaccgttgatacgctcaatgtgtatacggtacccgactttaacattagagcggcaatggaaattgaggacaaaaagactgctaccacgatggaattgccattgaaggtgtctgttggccgctataacaattcaacccgcaaaagttcatttagtcggacaacaatgggggactgggatgtaaccatttacgctcagaaaagtgtttatggaaaagatccagaaacaggccgatataaaacgacgtatgaacgtacacccctaaccgaagcactgcccgtgaatgatgccggggtggttgaaaccaagatcaagatagaaaatatggacctcgggaacgtgcgacttgtcgggattgctaaagtacgatcgcctttcgcagatttcgaactgacccgggaaaccagtgcagttagcatccgtgtttataagggcgaagagctagaaggtaatctctcaaagagtctgattatcggacgtatcccgctcagtacgcttgttaacttcaaatcggccagtacagctaactccgatgcgctggcgcctaccgagtggcaggagtcttctgataatggacagacatggactatgcttcaggacatgacagggaagcgaagcatttcgatcaggaaaactgaggttggtaaatggctttacagggcaaaaatgaccaacaagtttacgtcgaaagagtcttatagcgacgttctgacggttgtaacgtacaaacagcctaagctgagcatcgatgttgctgaaattctcgaaggcgatgatttgcctgtcacgctgctggataacgatgaaccaattccgcagggtacggccgaagtgatgtggtcggaggataaagtgaattgggttcagggtgacactacctataacgtatcggccgctgatacgctacctccgaccatttacgcccgaatgcgttacctggattctgatgagttggctgaagagtcatcctggaaagagacgtctgcccggttaaccgtcgctaaacccaagcgcctatctgtttcagtaagtggtatttcaagcgtcgaggtgggaagtaaagttactttagatggtaaatacactaacccgaacagccgattcaagaacggaaatgacgtcattgaagaatggactgcccctgacggacaaaaaatcagaggtgcgaatctgtcgataactttgactgagcagatgctggataagcaaggatatgcggcatttgaatacagtgcatggcttgctgacagtaaggacagtactatttccacgcggaaagtatctgttaaatcttgggtgtataagtttcctgagatgaaagtcagtacaaagcttaaatacaccatggccccgtcgaccttacatgttgcgctgagcggaataaaagacggtggctatcctggggtaacttattctcgggaatggatctacgataaggacaatatctcagttttaaaagatgatggtgatacgaaagaatttgcaattgcgaagccggggaaatatacgttggtaatcgttttccgtgataaccgtaacaacgaacagcgtattgaaaataccttcgtagtcgatgagcaaacgcccatgactgtagaaatgacaccgaaattctctaataagttcatgagggcgcctcttgatgtcacgctaagatctaacattaaactggcgcactctgctgacagtattgatactgtgacatacaaagtaaacggcgaggttgttcctggtagtaaaaactattgggctcagttaatttctggtcttactgagaagaaatacgaagtcacgctggatgttgtcagtaaaatgggccaaagaggtaccgcatcagttgattttgaggttgttaaaaacgcggctccgcaatgtgcattaagctacacagagtctaatatgagctggagtttcacaaacaaatgtattgacactgatggcaagctggttcgatatgaatggtatatcaatgatgagctaaggaatgttttcggcagcactgcgacactgtccaaaaaccttaatcgtgggaagcaagatatacgagttgtcgcgtatgatgatagtggggattcagcaactcagcgtacgaccgtttatggtccggatgagggcgcgtcaaagtccgtagattcaattgaaacctcgcagtaa

SEQ ID NO: 480201 - DNA, 558 bp, Shigella flexneri; identical to SEQ ID NO: 26349

SEQ ID NO: 480202 - DNA, 435 bp, Shigella flexneri; identical to SEQ ID NO: 26348

SEQ ID NO: 480203 - DNA, 453 bp, Shigella flexneri; identical to SEQ ID NO: 26347

SEQ ID NO: 480204 - DNA, 678 bp, Shigella flexneri; identical to SEQ ID NO: 247158

SEQ ID NO: 480205 - DNA, 1035 bp, Shigella flexneri; identical to SEQ ID NO: 26345

SEQ ID NO: 480206 - DNA, 150 bp, Shigella flexneri; identical to SEQ ID NO: 26344

SEQ ID NO: 480207 - DNA, 948 bp, Shigella flexneri; identical to SEQ ID NO: 26343

SEQ ID NO: 480208 - DNA, 840 bp, Shigella flexneri
atgcttaaattagaactgataattttgccgttgctggcatttttaggtccatccaacattacaaatgcatcgactaaaaccccgataccgtcgtcccagctatctgatgccaaaactggggttaactatgaatttattactattgctgcaaattacgtcaacggaatgtggcttgttgatggtcgacaaagaccagtaattaaaacaagcatgactaagcgtaactatcttcagattgaaaacgactctgcttcaactcctttaaatcttgtaatacccaaaattgaattttccatcattgcaaaaaatggcgtgtttatatcaaaatttatctcccttgatgaagatgcatccgggaaacgaattctctggttagaacctggttccagcatgacaatttcattcgtcaatgatctatccagtaccccgttacaggcgttagtgtccgtaacaaagcagaaaaaagaggttattgccatttttggcccagatcagggtaaaaaattcaccctgcccctaccgtcagattcacaacaatcgtcaatcgactatgtcccctctccagaaatcgcattacgtatcaatgcccccaaaaaacttcaacccgctatcgcaatccctgaggacgctagtgcatctttattaccttcacatacctacaagatcagagcggcagaaaaagtaaggacttttaagttttcgtcgttcgtttgggttggaaagcgtaacaacctcctcggtggttcagattatttcagcaaagagttgaaaatttacccaggagaaaacttcgatatcagtaccatacagaaaacgactatgaggactgaaaatgattag

SEQ ID NO: 480209 - DNA, 522 bp, Shigella flexneri; identical to SEQ ID NO: 381598

SEQ ID NO: 480210 - DNA, 393 bp, Shigella flexneri; identical to SEQ ID NO: 26340

SEQ ID NO: 480211 - DNA, 1008 bp, Shigella flexneri; identical to SEQ ID NO: 26339

SEQ ID NO: 480212 - DNA, 1254 bp, Shigella flexneri; identical to SEQ ID NO: 26338

SEQ ID NO: 480213 - DNA, 2682 bp, Shigella flexneri; identical to SEQ ID NO: 26283

SEQ ID NO: 480214 - DNA, 951 bp, Shigella flexneri; identical to SEQ ID NO: 26284

SEQ ID NO: 480215 - DNA, 564 bp, Shigella flexneri
atggacattcttcagagaaagtcagtgttatcagtagaggatatacgaaagtcgttctttattaatttagacgacgcccctttccctcttgaaactgtggcatcgatacctttaggaaacccaaaactcaaacgtcaagcggcaatatttattacgcttgattgtgacggttgtcaggatttaataaagaaattctatgatgaacgcgaaaagtatcgggtcgatatagttttaatcccctcccccggcgagccaaagcaggaattgcgtcaattatggtgcagtaaagaaaaaggcaaagtgaatgatcttgatatcttgcgttggcttatgggtaataaggccgatatagaaaaacgactcctgacgaaagaagaggcagaagcatgtccggctgaaccgttagtcgcgtcattaatgctggctggcatttataaattacagggagtcccctcagttgtaagacaggatggactcgctggtaatggcataccgaaagattttgattactggttaaaacaaagtgtcgaacccttactcaaaaacccatttgatactaattaa

SEQ ID NO: 480216 - DNA, 156 bp, Shigella flexneri
atgaccggcgcctgtgtcagggactacaccgttttggctgcagctggtttactgaccaacgccagaaaatcatataactgcgtcaatgtcagcgtatccagcgcggcactgttgcaaatagtcggtggtgataaacttatcatccccttttgctga

SEQ ID NO: 480217 - DNA, 237 bp, Shigella flexneri; identical to SEQ ID NO: 5228

SEQ ID NO: 480218 - DNA, 672 bp, Shigella flexneri; identical to SEQ ID NO: 5292

SEQ ID NO: 480219 - DNA, 369 bp, Shigella flexneri; identical to SEQ ID NO: 5354

SEQ ID NO: 480220 - DNA, 345 bp, Shigella flexneri; identical to SEQ ID NO: 5105

SEQ ID NO: 480221 - DNA, 480 bp, Shigella flexneri; identical to SEQ ID NO: 229897

SEQ ID NO: 480222 - DNA, 861 bp, Shigella flexneri; identical to SEQ ID NO: 5113

SEQ ID NO: 480223 - DNA, 255 bp, Shigella flexneri; identical to SEQ ID NO: 5118

SEQ ID NO: 480224 - DNA, 834 bp, Shigella flexneri
atgaaaacatgttggcaaatcctcgaaattgaaagcacgacgcaaatagacattatccgccaggcttatcttgctcgcttaccgttgtgtcatcccgaaaccgatccgcaggggtttaaagcattacgccaggcctatgaagaggcgctgcgactggcggtaaatcctgtcgaggaagcagatgatgaagaaaaagatgccaccgctgaacatgaaatactacgtgcattcaggacattactggattcagaaagtgatcgttttcagccctccgcctggcagaaatttattcagcaattaaatacctggaacatggaggatgtcgatcaattacgctggccgctgtgtgcaatcgctatagaagcgcgatatctgtcattaaattgtgcttctttgttggcagagcgtttgaactggcattcgtttaatgacagcgaaggaatggatgaggaagaaagggaggcttttcttgaggccattcaggctggtgattgtttcgatttccttagccttctggaatatcccgtcgcgttacagaaccagactgttgaatattacttcgcgctggaacgttgctgccgttaccatcctgactatgtcactgcgtttttggcgatggaaggaccgtggttcattcctgatgatgcaaagttacatcgcaaactgttgcgctggtacagctcggtgcaaacaggtatggtggaactcattcctgtagccaaacagtggcaagcggaagaaccagaaagcgaagatgcccggtattaccagtgtgcacaacgtttgtactgcggcgagggggaaagcctgcttgctgatctcggcgcgtactga

SEQ ID NO: 480225 - DNA, 855 bp, Shigella flexneri; identical to SEQ ID NO: 479145

SEQ ID NO: 480226 - DNA, 807 bp, Shigella flexneri; identical to SEQ ID NO: 26387

SEQ ID NO: 480227 - DNA, 1398 bp, Shigella flexneri
atggctatacatgacgccgggatgttcaccgtgaaagaaatcaaccgcctcaaaattcttcaggatgtcgttgaacgtaacctgcgtcctggccaggctgccgagatgctcggcatcacgccacgtcattgcagccgtctgctgaagcgttatcgccagtccgggccgcttggtatgaacaaccagagtcgcggtcgcactggcaaccgcctgttgcccacatcactgactgaccaggcactgagtatcatacgagaacgctaccgcgattttggccccacgctggcccgggaaaaactggaggaagttcacggtctggtcctgggcaaggaaaccatcagacgccttatgataaaagccggactctggatcccccgaagacaacgcgcaccgaaaattcatcagctccgttaccggcggccctgtactggcgagcttatacagattgacggctgtgaccatcactggtttgaaaaccggggtcggccttgtacggcacttgtatatgtcgacgatgccaccagtcgtctgatgcacctgctgtttgttaaatctgagtccacctttagctattttgaagcgacccgtggctatatcgagaaatacggtaagcccatgatcctttacagcgataaagccagcgtattcagagtcaataataagcacgctaccactggtcccggtgaaacccagtttgcccgagccatgcgctgcctcaacattaccccgctatgtgcggagaccagccaggcaaagggccgtgtggaacgcgcccacctgacacttcaggaccggctggttaaggagctcaggcttaaagggatcagtacgatagaagccgcgaatgcatttgctgaggaatacatggcggattataaccggcgcttcgccaaagcccccctgcatgattttaacgcacatcggccgctggcattagacgatgacctggatgcggaatttacctggcgagagccccgtcgtgtatcaaaaagtctgaccgtacaatatgacaaaatgctctatctgattgaagacagcgaatacagtagaagggctatcggcaagtatattgatgtctggcactatcctgacggacataaggaactgcggttgaatggcgtgctactgccctactccacctacgaccgattgtctgaagtcgatcctgtcgcgattgttgataacaaaagactgggccatgtattggatgttgcccgccaggtccagaaaaaaagggacaataatcgctcccagtcgctaccttcaggagatgagccttcccgcagacgacatgctccaggcatcaacaaatcccagcgctcgctgaacgaagatgacctgcttgaagccataataaagcttcaaggaagctctgaggccatctttggtaaaaggtga

SEQ ID NO: 480228 - DNA, 927 bp, Shigella flexneri
atggaacttcgccagttacgttattttgtccgtattgtggaaaccggcagtatgggcagcgcggcgcttgatctcgacatcggtgtctcagcgctcagtcaacagatgacaaggctggaaaatgaactcgccattcgtctgttgcaacgaacctcgcgtggtgtaacgccaactaactcgggtctggccttttactcacaggcacagctggcgttgcgtcatgctgatgatgccattcttgctgcgcgcgatgcgcgtctgtccggacacgtcagcgtcggtatggcccccagtacagcctccgtcctgggtgtgccgtttattcatgccatgcgggcacattacgccgacgttcgcctgcatgtggtggaaagcctgtcaggtaatctggaacggatgatcaacacccgtcagattgatctggccgttgtttttcggaaagaaaagcacctgcgctggagcgccaggccagttctcgaagagcagctttttctgattggcacacatgatctgctgacggatattccggatgacaccataacccctgctcaactggcgaatattcccctgatcatgccaagctcaggccacggcttgcgcggcctactggaggctattagtcaggaacacgggctgaaggttgatatcgccacggaaattgacggcctggcgttactgatgcgcgccgttggcagcggactcggcgcaacattacaacccggagcagccatttcgcatcttgagagtgaatcattaagagtgatcggcatccataatcccatactcagtcgccccaattttctggtcagcctatcggacgatgaactcccacccgccgctcttgcagcccgcgtgatacttacaaaagtcatgcgtaaacttgttgaaatcggccattggccgggcgcaaccatttacgctccctaa

SEQ ID NO: 480229 - DNA, 1404 bp, Shigella flexneri
atggttgatgtactggtgattggcggtggtaatgccgcgctatgcgccgccttaaccgctcgtgaggcaggagcttccgtgctgctgttagaggctgcgcctagggaatggcgcggcgggaattcccaacacacgcgcaatttacgctgtatgcacgatgcaccacaggatgtgctggtcgagagttatcccgaagaggaattctggcaggatctctggcgtgtcaccgaaggcaataccaatgaagcgttggcgcgcttggtgattcgaacctcttcccagtgtcgtgactggatgcgtaagcatggggttaattttcagcctccgctttccggcgcgctgcatgtggcgcgcaccaatgccttcttcatgggcggtggtaaagccctcgtgaacgcctattaccgcagtgcagaaaagctgggggtacagattcgctacagcacgccggtacaggcgcttgaattgcacaacggcaaattcgtcgcagccctggcaggtcacgaacgcattgaggcgaaagcctgcgtactcgccgccggcgggtttgaatccaaccgtgaatggctacgcgacgcctggggagagaacactcgtggcgaatggccagccgataatttccttatccgcggcacccgctttaatcagggcgtcttgctcaaatttatgatcaatgccggggcagacattatcggtgatccgtctcagtcccactgtgtggcgatcgacgcacgggcaccgttgtacgacggcggaatttgtacccgcgtggattgtgtctcactgggtgtggtagttaaccgggatgcagaacgcttttacgatgaaggggaagatttttggccgaaacgctatgccatctggggacgactggttgcccaccaaccggggcagattggctactccattatcgacagcaaagcgatcggtcactttatgccgccagttttccccggcgcacaggccaatacgctaagagatctggcccgccagttggggctggatcccgaacactttacccacaccgtggaacactacaatcaggcctgtcagctgggtcagtttgatcacactaagctggacaactgcgcgacgcagggcctgacgccaccgaaaactcactgggcacggcctattgatacccccccctactacggttatgccctgcgaccagggatcacctttacctatctcggactgaaagtgaatgaacacgctgcggtccatttcgcaggcacgcccagctgtaaccttttcgttgccggtgaaatgatggctggcaacgtactgggcaagggctataccgccggggtcggcatgtccattggcaccacgtttggtcgcatcgcaggtaaagaagccgcgcaggcagcacgcaaggaggcgcatcatgaagcagcttga

SEQ ID NO: 480230 - DNA, 1140 bp, Shigella flexneri
atgaagcagcttgaaaagttgattatcgaggccaaaattctcaccgaaccagaggctgaagtcgagcgggtgatgcaggtttgtaacgcatgtcgctactgtgaaggattttgcgccgtgttcccggcaatgactcaacgactggaatttggcaaagccgacattaactatctggcaaacctgtgccataactgcggcgcttgcctgcacgcctgccagtatgctccaccccatgagtttgcgatcaacgtgccgaaagcaatggcggaagtgcgtctggaaacgtatcaacactacgcgcaaccggcggccttcggagcgctgtatcgccaggctggcgttaccgtgacgctggcactggtctttagtctgatcctctttttactcctcgcgatggggctaaagggatcgctactccatccgccgctggccggtgatttctaccaaatcttcccgcacaacctgctggcatggatgtttggatcggttttcatgctggcgatcggtttactaatggcaggggtgatccgcttctggcgcgagatctctcccgtcgggccgcgtccggcggaaattgccgaagcgtcgcacaacgcgctgacgctgaaatacctcgacggcggacatggaaaaggctgcaacgaggcggacgatgctttcacattgatgcgtcgtcgtttccaccatttcaccttctacggctttatgctctgtttcgccgcgaccgtggtggcgacgggttaccactacttcgccggctgggaagccccctacccgttcttcagcgtgccggtcatgcttggcacgctcggaggaatcggtttaattgtcggcccggcaggcctgctgtggttaaaccttaagcgctcgtcactgcatggcgacgcgcgacagaaaccgatggatcgcggttttattttactgctgctcctgaccagcctgaccggtataggtttgctggcgggaagagacacctcatggatggggatcctgcttgccatccatcttggtgtggtcatggcgctttttttgaccattccatacggaaaatttgcccacggattttaccgctgcgcgtctttactcaaatgggcgattgagaagcgacgtggaaaacaggcgggggtcgcaggcgactaa

SEQ ID NO: 480231 - DNA, 1296 bp, Shigella flexneri
atgactcaacaaccatcgcgcgctggcacgttcggcgcaatactgcgtgtgaccagcggtaattttctcgaacagttcgattttttcctgtttggtttttacgccacttatatcgcaaagacgttttttcctgccgaaagtgagtttgccgcattaatgcttacttttgccgtttttggctccggatttttaatgcgccctatcggggccgtggtgttgggcgcatatatcgacaggatcggccgacggaaagggctgatgatcaccctggcgattatgggctgcggcacgttgctcatcgccctcgtgccgggttatcagactatcggcctgctggctcccgtgctggtcctggtggggcgtctgctacagggattttctgctggcgtcgaactgggcggcgtctctgtttatctttctgagatcgccacgccaggcaataaaggcttttacaccagttggcaatcggccagccagcaggtggcgattgtcgtcgcagcgctgatcggctacggtctgaatgtcacgctgggacacgatgaaatctccgaatggggttggcgaatcccgttcttcattggctgcatgattattccgctgatttttgttcttcgacgttcgctacaggaaactgaagcctttttacaacgtaaacaccgtccggacacccgggaaatttttaccaccattgctaaaaactggcgcatcatcaccgcgggtaccctgctggtggcgatgacgaccacgaccttttattttattactgtctatacccccacttacgggagaacggtgttgaacctgagcgcacgtgacagcctagtagtcaccatgctggtagggatttctaacttcatctggctgccgattggcggcgctatctctgatcggatcgggcgacgcccggtgctgatgggcatcaccttgctcgccctcgtcaccaccttgccggtgatgaactggcttaccgctgcccctgacttcacccgcatgacgctggtgctgctctggttctcgttcttttttggcatgtataacggcgcgatggtggcggccctgactgaagtgatgccggtttatgtccgaactgtgggtttttcgctggcctttagtctcgccacggcgattttcggcggcctgacaccagccatctccaccgcattggtccagttgactggagataaaagttctcctggatggtggctaatgtgcgctgcgctgtgcggactcgctgcgacgacaatgctgtttgctcgtctcagtagtggttatcagacagtagagaataagctctga

SEQ ID NO: 480232 - DNA, 207 bp, Shigella flexneri
atgttctgtggccctgacaaagcctcagaagcgccccacggcattttcagcagtttacagtacccggggtatcactatgagccgtttaagccagcaccgggtaatcggctaaatccaaatttactcgatttagttaccgatggtttcgcctcgaagatctgcatccctgactctacgttgtcatggtattcgacaggaaaactataa

SEQ ID NO: 480233 - DNA, 156 bp, Shigella flexneri
atgctaaaaatagaaaatgtactgccgccaaattttagagtattcctggtccgcgaaggtttcattttcccgggcgaatcatgggtgtgtggttccgggtactggttgcctgaaagtgaagtactcaaaaacggaatcaactcattgcttgtttaa

SEQ ID NO: 480234 - DNA, 426 bp, Shigella flexneri; identical to SEQ ID NO: 26390

SEQ ID NO: 480235 - DNA, 222 bp, Shigella flexneri
atgccaaagaagaatttatactctgaagagattgtgattgccaaaaagcaactcactcagctttcaacactaaaagataaagtccgcctgctaacccgtcagtgggaaggtgatattggcgccaatctgcctggttacactgagctattagctcatgtggaaagaattgaaaggcagattcatgaacaaattggcagctggaaaaaaactcctgtaatgtaa

SEQ ID NO: 480236 - DNA, 429 bp, Shigella flexneri
atgggggacctggtcagtaaaaataatatcgatcgccttgaacgatttcattctctgctggcagggcagtattggtctgcgctcgtcgatattccggctgaggcgattgtggccggggacactctcctcattaactcgttgcggtacgtggataacaatctgcataccgtcatccttcgcgctcacccccggcattacggggaatgggtaagcgttgaaatcgtcgctgagaacggttcaaaatcaacgaaagacaagagactgaatgagcatcggtttctgacggccgatttcctcgcgttgtttgaatatcagcccgaccatgaaattatccgtcagtcggagctcaaaggcattcaggatgaggtcgctgacctgcaaatgcgtcttacggaaactctgcaagatccctctgcactccgggaatga

SEQ ID NO: 480237 - DNA, 354 bp, Shigella flexneri; identical to SEQ ID NO: 26395

SEQ ID NO: 480238 - DNA, 615 bp, Shigella flexneri
atggctatcgataccgacgataacgatccggtagacgcagaggcgtgcgagaagtacctggcacagttacgggaactggaggcatacagggcgtaccgaacgacagctgcgattgactggttctttgaccaggctacccgggccattcacggtgagttgtggctagccgcctgtacgactttcctgaacgggattgagacctcactgagggtgacgatgaagctgaaggcgtcgcaggcacaaccgcaggcaccaacaccgctggtggacttaagcgatatggccacactcagtaatgctctgctaagaagggctcaccaggccggtatgccggtgacactgctggcctttcccgacgagcaggatctgctgaccaagattgcggacggcgccccgaaactaccctatgcggaaatcgtgagggttcggcacaatttatgtcacgggaacatcctggagcacatcatcactgcgagtgacggtatgggggagccagtccggttattcacacctgaatgtatgcgtgatctggcgcagacgctgtcggcagtctcgaaagtatggattgcaggcctgcatcaatattggtgtgataacaatttatctatgccttga

SEQ ID NO: 480239 - DNA, 435 bp, Shigella flexneri; identical to SEQ ID NO: 26397

SEQ ID NO: 480240 - DNA, 1260 bp, Shigella flexneri
atgtacatgcacgttgatatcaatggagcctacgcggcatttgaatgcgccatggaccccaaacttgccaaatccccgctcatcatcgcgagcaacaacgatgccaccattatcgccatgaacaggctcgccaaaaatacagggctcaaacgcgggatgcctatcttcaaatgccgggatctgattgagcagcatcatattgcggtacggagctccaactttacgttgtacgaagattattccaaccggtttcatgaaacgctggaggggtttgccgaggataccgatcgttacagcgtggatgaaagcttcatgctactgaaaaacatggacaaaatagtagattttgaagagtacggatgcctgatcagacgaacgctgctacacaatctttcgctcacctgcgggattggagtatcgaccacgaaaacgctcgcaaaattatgcacctacgccagtaagcgatgggcagcaactggtggtgtggtcgtccttacagacccattccgaattaaaaaactgctgagtctcatcagtacccgggaaatctggggcattggccgcaaaatcagtgagcggctggctgcgtacgggatcatcacggcctgcgacttttatgacagcgatgtgcggtttttacgaaaggcattcggtgttgaaatggaacgtacctggcgggagctgcatggcgagtcctgtttccggttgcatgaatcccctcctgtcagacaacaaattatcgtctcacggagctttggccagcgccttaatacattcagcaagatgcatgaggcagtgtcattctttaccggccgtgccgctgaacagcttcgaaacgatggctcctggactcgccaaatcaccgtgtttatccagagcagcccgtttgccagagctgaaacccggtacagcagctgcggtattgagccgcttactgcgacgcaggacacccgcgacctggtcagtgcggcaggcgccatactgacccgaatctacaaacccggcatagattatgcgaaggcgggcgtgatgctttcgtcaatgaccgatggcactgagcagctatccctgttcgatgaacgtcccgccaggcgaggcagtgaagcactgatgaaggtgatggatcggtttaacaaagagcatcgaggttctctgtttctggcttgcgaagggattcatcaggatttccgggggaagcaggccatgctgtccccacggtataccactcgctggaatgagttacttgtcgtcaaagcctga

SEQ ID NO: 480241 - DNA, 810 bp, Shigella flexneri
atgattaaattaaattatttaaaacccgtggcgtctgttttaatttctgcggtgattgcgacggctggctctgtgtatattacgtcgaaatatctaaaacccgatgtaccgggtaacgacgaaataggacgagtagctgcttcctatctggtaaaaaatccccagtatcttctcgaagcaggtaaggcgctagaaaaagaaaatactaacgcttcccttgagcggattatcccctacgcaccggcactcttcgagaccaaagagacacccaatatcggacctgataatgcggccgtcgctgttattgagtttttcgactaccagtgtcatttctgtatgcaggtagcgccggttgttgaatctgtgttgagccaaagcactgatgtaaagttcttctttaaagaatttccgatcttcgctggctcaaaacctgtttccgcaatgggggcggcgacaggcctgcatgtgtatcagacattcggtgcggaagcgtatcgtaagtatcacaacaatctgatgaccagtgcgtatgtattcttcaacaaccagcgtgcgtttacactcaatgatttagacatggttgtgaacaaatccgggttcaacagctcattcggcgatcgggagaaaagccgctatgagaacgttatctccggaaacatgcagctgggggaagctctcgggattaacggtacgccagggttcattattatgaacatgcaaaaacccgacgctgcaacgacgtcattcatcccgggcgctgttgacgaggccaccctgaaatacgcaatccagaaggcccgtggaggctaa

SEQ ID NO: 480242 - DNA, 612 bp, Shigella flexneri; identical to SEQ ID NO: 381416

SEQ ID NO: 480243 - DNA, 423 bp, Shigella flexneri; identical to SEQ ID NO: 26401

SEQ ID NO: 480244 - DNA, 393 bp, Shigella flexneri; identical to SEQ ID NO: 26402

SEQ ID NO: 480245 - DNA, 750 bp, Shigella flexneri; identical to SEQ ID NO: 26403

SEQ ID NO: 480246 - DNA, 516 bp, Shigella flexneri; identical to SEQ ID NO: 26404

SEQ ID NO: 480247 - DNA, 567 bp, Shigella flexneri
atgctccagtcaatttataaattcctgttcaatttatgcagttcaccgcagctgcccaaaaataaagacgtggatgggatattgtctcatgaagaaataaccgctggattatggggtcctctgccatcaatccatgttgttcttttcctggattttgatggtgtagtccacaaatgtcagaatgaatcgttcgagaggatgcatttgattgagaggttacttgacgcgagtccttcaatgttcatcgttatatcaagctcatggagagagtgcggcagtatcacttacctaaagtcacttttccgctcgccatacagagacagggtaattggagcaaccccatccctgtatctcccctcaggaagtataggagtccgtgcagctgaatgtgaggacttcgtcaccagacacaaagtaaaagcctttatctgccttgatgacgatgcgaccctgtttcctccagagtacccgcacctgtttcgtacagattattacaccggggttaatgaaaaggatctaacggacctgatagccagatataatgtgctgatgacccgcttttattga

SEQ ID NO: 480248 - DNA, 3990 bp, Shigella flexneri; identical to SEQ ID NO: 247217

SEQ ID NO: 480249 - DNA, 1416 bp, Shigella flexneri; identical to SEQ ID NO: 26407

SEQ ID NO: 480250 - DNA, 1047 bp, Shigella flexneri
atgactcgattaacgttaataccttcaaagatgttagtgctgctgtctttgtttattactggggtccatgcaaatgaagagcaggcccttatcaaagacactccctttgtatcaggacaggccttcaagaaaggctttttctggtatgacgacccgacaaggaaaactgaggaagaaattacagagaccaagcctcctgttgcatcttcgacccagccagaacaagaagaaaagattgagcttaattcaaagtggctaaaggacaatatgcctcagcttttgactaaggctatggataatccgacccctgaaaatttatcgagattttatacagcacaacgtttaatgctggatatcggtacgcggttttcggataaatcgaaagattatttccttaaaaatccaatgatgtctgaaaaacgcaggcaaccggttgaaaaggtagcgctcgatgcacatcgtacggtggtcgagaaaaatcagcagtcggttatgaaagatattttcactaaatccgggctgtttttctttttccagagtacttgtcagttctgccacgaagaaagtcaaatactccagtttatggagaattactattctgtcgacattcttcctgtcagcatggacggcagaccactacagaatgggttgttccaggatttctctgtacctaatgcgcagattattgatcaatttaaaatccgtgaagttccaactattttccttgtctcaaaagatgggtcatcagcgcaacgaataagcgaaggcatgatcactgctgaggagctcaagaatactattattctggctgcaaaaggcatgaagctgattgatgatgcctctttccagtccactttagatattaagcgccaatataccattggcgaggatggcgtaattactgtgaataaatcagaaatggactctgatccgttcttattgcaacgaataatggataagaaactggaagggtacgatatgccaacggcggacccagtgaactatctgaatgtgggtggaagtttaggaggtgcatatgcgcgctga

SEQ ID NO: 480251 - DNA, 513 bp, Shigella flexneri; identical to SEQ ID NO: 381423

SEQ ID NO: 480252 - DNA, 801 bp, Shigella flexneri; identical to SEQ ID NO: 26410

SEQ ID NO: 480253 - DNA, 486 bp, Shigella flexneri; identical to SEQ ID NO: 26411

SEQ ID NO: 480254 - DNA, 723 bp, Shigella flexneri; identical to SEQ ID NO: 26412

SEQ ID NO: 480255 - DNA, 3036 bp, Shigella flexneri
atgaatttcagggcactcttcttaagtatgcaacgagtttttggcattttctccagaagggagaatgatgtatctgagttaatgatgaaggatgcagcgaacttctcgccatttgctcagattataggagagcagaaatacactgtgccggaccacccgaatcctgaagtcctgaaattcattgaatacccaaccaggcctgcggggatacagacatttaatgagcagtctattctttcgttgtacagagacaagctgcactctatttctatgatgctggcaataagtgatggagacattcgggaggatgcctataccttcactaatctggtgttaaaaccattgattgaatacatccgctggattcatttacttcctgcgtcagagaatcatcaccataatggtattggaggattgttgtctcacagcctggaagtggcgatgatctctttaaaaaatgccaatcactctgaattacgtccgattggctatcaggatgaagaagtggttcgccgaaaagtttatctgtatgccgcttttatctgcggcctagtacatgatgcagggaaggtatatgaccttgatatagttagtctcaacttgagtgaaacattaacatgggcgccaagctcgcaaagccttcttgactgggcacgagaaaacaatgttgttgaatatgaaatacattggcgaaaacgtattcataaccaacataatatatggtccagcgtatttcttgagaggattttagatcctgtctgtatgtcattccttgaccgagtcaaaaaggagcgtgtctatgcaaaaatggttacggcacttaatgtctataacgacggcaatgactttttatcaaaatgtgtaagaacttctgattattactctacaggtactgatcttaatgtgttgagggacccgataatgggtcttcgttcgaatgatgctgcggctagggcaataggtaccattaagcataactttactagcattaatattaataactataaaactaaacccatgcacatcattattgtaaacggtgaagtttacctcaatgaaaacgcctttctcgactttgtactgagtgattttgcagcccataagttcaacttcccgcagggagatgcaggcaaaacagtacttgtcgaatctctggtgcaacggggttatgttgaaccttacgacgatgaacgtgtggttcattactttattcccgggacatattcggaaaatgaaattgcaagcatcttccggaacggtattggtaagctggaattttataacctcttaaaactgcgttggatcgggttaatttttgattcatataaaatcccggattcagttcctggtctgttcagcgttaatgcgaataaagatttcatctatattgatgagcagaaaactgtaacggaatacagaaggccggtcccgggtcgtgagtctgttaccagagtaacggacactgtcaatgacgccattgagaataccccacagtatggacttcagctcgtaaacggccctgatgccgacagtaacaatattattagcagtgaaaatactgaatccattacggatagtttggaagagtctggcgcggatatctcaaacgagatttttgaaacgcaagttgttacggcaattgatactgccgaaacggtaaacgcggatgagccagaacaggtagaagagcatgacgaccggagccagattcatctggttgaacaacttcatgaaatgctgttgagcgccccactgccccatcatgccgtcattaatattgattccgtaccttacctggatctcgatgctgcgattgcgttaatcccgggtatagatgaggcggcattttgtaatgggccatttttccagttgacataccgtgatgggtctctagatggtatgtggatagtccgtgatgtaaacaatctacgcctgatacagctgggggataactgcgccggtatgcaagtaagcacatcggaaccacgaaacacgtcatcgctgaaatcactatttgatacgtcaatgtaccaaccgttggatatccctgaagctccatcagtaaacgaagctgcttcgcctccacaaacaccgcttgaactcccccaaccacgactgaatgcacctgtggctgaagaggccagctcggtagctgaacagactaacgcccactccgaaccggattccgtcatcgctactgagtatgagcaatatggtcatttgctggaagagacccttgatagcgatggtgaggcatattctgatttaattgcctctgacagtactgaggcagaataccccgccactgatccgcagagcagcgattttgcccaattacctcgtgaaacggccctgtccgttgcgcccggtgatttggattactcagagggtgccattaagccaccagcacccgatgcaaccggaaaagaaacaatactaacaagtcctgaaccagcagaggatgtccgagaaacggtagccgccgtggagaaagcgagtcatctttctccggcattggctcgactctttgctgtaagcacccatgctgagaagaagcatgaaaaaacgcaggaaccctcccctgttaaagaggttaaaaatccaacctcctctaccacagttaaggctcctatttccattgaaccaccaggcgctgaagagaaagaggcggtggaagaattcaccctgttaaacgacggtgaagtcacagaactcgaatatgtcgagattgccaccatgctccaccaaattctgacgaagttatctgggtcgttcaaaagaaagaggaaaaaccggttcatggttttgacccagaacaccttttatctgacgcagtcatgtattgaaaagtacggaacgcagctaaatgcgcctgagctttttaaccaacttcctcagtaccaggtcacatccggtgccgtagtcaatacaaaatgcattgcattcaacataccaactctggtcgccgcatcagaccgggcaaaggtcgatattgagttaattattaacaagctaaaagaggtcgggaatctgtaa

SEQ ID NO: 480256 - DNA, 2085 bp, Shigella flexneri
atgacaaaatcaaaaagaaccaacctgcacgctcaggaaaacttttacaggccgatactggagtacagaagtgcctcagtgcttttaatttgcgccgtcataatgctggttatgggctttcgttcagatggggtgaatattgcccctatcattctttataccgctgttttcctgcttttggtttgtttgtaccgttgtaaaacggcacacccctatttgatggcacactggcgcgtatttcagcgccagataatgtttattagcctcaagtcgctcaggacgatcaataaaagtaactttttctcgaacgagcgaaagtatcgccagctggtacaagagtataaaaaaaataaccgaccagtaccggatagaaaaacctacttttgtaacggctttgaatggggtcccgagcatgcagaccgcgcatatcaaattgctaatctctcaagtgacaaaagagagatagccctgccatttgttctaagccctatagcgcgacattttgaaacaatggccagatccatggggggcaataacgccatctttgctgttgaccggcgggcacccatttttgtgaccgaagataactggttcggacataccctcattaccggaaacgtcggtaccggtaaaacggtacttcagcgcttactaagcatcagcatgctgcatttgggccatgtcattgtggttattgacccgaagaatgacgctgagtggcgacagtcactgatggatgaagcgtcagaactggggttgccattttataaatttcacccagcccagccgtcttcatcggtgtgtattgatgtatgcaatgcttacacaaatgtttcggacctcacctcacgacttcttagtctggtttcggttcccggggaagttaacccattcgtgcaatataccgaagctctcgtctcaacggtgatcactggtctgtcttacacggataaaaaaccgtcgatatatctcatccacaaaaacatgaaaagccatatgtctgttgtgaacctaacgataaaagtaatggaatgctgctttgcacgacactacgggcctgatgtctggatggaaaaggtgaaatacgcttcgaatgacactcttcaggttcgatttaagcgcctgacagaatggtttaatgcccattttcttaattatgaaggcgccgagcccattgaatggattgataccgtcggtcggttagtggattactccatgtctgatcctgaacacatgtctaaaatgacggcgggtattatgccgctatttagtcgactgactgaacaaccactgaatgaattgctttcgccgtctcctaatacactcacttcgcgtgaaatagtcacttcagatgggatgttcagtaccggcggagttctgtatatctcgctcgatggcctttccaacccggaatcagcccgggccatttcgcagttgataatgtcagatcttacgtcttgtgcgggtagtcgttataacgctgacgatggtgatatgtcttcccattcaagaatcagtattttcgtcgacgaagcacactctgccataaacaattcaatgataaacttactcgcacagggtcgtgccgctcaaattgcattatttatctgcacgcaaactatttccgactttattgcagcagcgaacgctgagacggcaaaccgtattacaggtctatgtaacaactacattagcctgcgggtaaacgacacaccaacacaaacgctggtcgtagaaaactttggtaagagtccaattagtacaaatatggtcacgtatacgacaggatctgaaaccactttgccgcataataacttctctgggtcaatatcagaaagaaagcaaacaacgctggaagaaagtattccaaaagagcttttgggccaggtccccaaattccatattgtggccagacttcaggatggtcgtaaagttgtcgggcagatcccgattgccgtaagtgaaaaagcgatgaaacccaatacgacgttactggagatgttcctgaaacccgccggaaaagtaactttgcgccagaatgtgggtttaagctatttaaataaatatctaaggaaattgcattga

SEQ ID NO: 480257 - DNA, 1104 bp, Shigella flexneri; identical to SEQ ID NO: 381429

SEQ ID NO: 480258 - DNA, 663 bp, Shigella flexneri; identical to SEQ ID NO: 26416

SEQ ID NO: 480259 - DNA, 1182 bp, Shigella flexneri; identical to SEQ ID NO: 381431

SEQ ID NO: 480260 - DNA, 729 bp, Shigella flexneri; identical to SEQ ID NO: 26418

SEQ ID NO: 480261 - DNA, 357 bp, Shigella flexneri; identical to SEQ ID NO: 26419

SEQ ID NO: 480262 - DNA, 315 bp, Shigella flexneri; identical to SEQ ID NO: 26420

SEQ ID NO: 480263 - DNA, 234 bp, Shigella flexneri
atgttactcaatattgcattaatcctctatgttgctgtttgtctttacctctgtctccgtaataaaaaggcactttaccgtttccagggcggagggcgtcagtttacgcagtccagtaagagtggagcgaacacaggcgaaagtggtttcttcttaatctccggctattcagacactggcgttgggggcgacagtggggacgctggtggcggatgtgggggcggtggtgattga

SEQ ID NO: 480264 - DNA, 237 bp, Shigella flexneri; identical to SEQ ID NO: 26422

SEQ ID NO: 480265 - DNA, 546 bp, Shigella flexneri
atgaaaactttaaatattcaggttaatgacatcgcagcaattagcgcacttggcggctcaatgttggcggatattatcgccgcgcaatataaagtgattgatgataccaaagacgcatctgaaatggccatgccgtgcattgcttacgggcagatccccgcaaacatcggcccgggcgtctttatcaatcgcgtgtacagcatggacagccagtcactgagtgccagccagcgttacgagctctttaacggacttgcaacccaggcgtttaccttctttttccagtcgggctggtatggcgcattccgtgttgtgtctttccgtgataacggtcctgccggactccttaatatcggcattgtccatgacaaggtgttaaacgaattttgcgatgattttccacgggctaatgtcagcgaaactggcttcaactgcggcatgacgtttgaccagatccggatgtttatttcggacctggcctatcagatgcctttgtacaacaaccaagaccacttcgttaaactcgccaaacacctcgcggcctga

SEQ ID NO: 480266 - DNA, 438 bp, Shigella flexneri
atgtataaatatgacaggaaccggcagacgttcaacttgatcaatgcgcttcagccggtctatcgcaacaatggtggcggtttgtttgagttcgaccgcaggaagcaacatgaaacagcagatctgatcttcgaggcactgactttctccccaacgcccgaactggagctggcgaaatttgtccgtctcaaatcagtgcgccggattgcacagtttgatgacggggaagtacgttatggggttcacgtggaactagacgaagctgttaatattaattccttccgcatttttaaggatgataatacaggcgggtttgatttttatttgttttctgttttaggtaataatgcagagcttgtccagattaatctggatgccagcaatattcatttgcaggacatttttgaacggtctaccggtttgtgtttgtcctactga

SEQ ID NO: 480267 - DNA, 141 bp, Shigella flexneri; identical to SEQ ID NO: 26425

SEQ ID NO: 480268 - DNA, 282 bp, Shigella flexneri; identical to SEQ ID NO: 26426

SEQ ID NO: 480269 - DNA, 1206 bp, Shigella flexneri
atgtccactgtcgaaaatgatgtaaaaaccgctaacaacgatatcagcctgcgcacctacctggagcgtaccggtaacggcgcacgcaaaagcaatggtctagtcattaacccggcagtggtcgaagaggaagaggggtttaacacccgtactgctggcattggggagagttactactcattacctgacgtggtagcccacctgaacagcctgaaagagtcctacaagatcgatcctttaagcgtacaagctattgtcgtacagattctgaatggccgtccggtcctgcgccagggagcatgccgtatccgtgccgtcgcgatggcaaacatcgagctggcagatgaagggcgtgaattgatcacgttaattcgatgcgaggagtttcgcggtagccgcgccagtgccgagcagtttacgctggacggtaactcaaatctggctctgtctgtcgtagctgaggcgctctccatcaaacggatggttgaagacgcggaagaacccaaaacgttcgctgaactggcgaagcgtcgcggtaaaaccgaacagcacctgcgtcagatggttcgcgtcctggatctgcctgaagccctccaggccatgttggtgaagggtgaagtgagtatgtatgtcgcgctggatgaatacctttacagcggcgatgaagcggtcaacaacatcaccaaagccattgatgtttatggtaaggcgacggccaaaaccctgaaattcgtcaaagctggcaacattgatgcagcgatgaagccgaaagcagccatcgtgccggacgcaaatgcgacccccccggaaaccaccgtgactgaacaaacgtccggcgaaggtactaacgatgagaccaccccaccgcagctggtggacgggagtgcgggcactaacccggagccgaccccggaaaggaccccggcaccgcagatgaaagacccggtcaaaacgccagagcctaaagctgtgtcggtctccagcgtactgaacaaaaagaccgtgacgacgattgcggacacggcaatcccgctgttttcgcgtattgcggaagaagctaaacaacgggccgctaagaacctcagcgacgatacttacactctggtgctgaccaatgacgagatgaatgccatttgtgaagctcacggcgatctgacgcagtacctgcgtaaacatgctgaaaagcagaacaagggccaggcatga

SEQ ID NO: 480270 - DNA, 201 bp, Shigella flexneri; identical to SEQ ID NO: 26428

SEQ ID NO: 480271 - DNA, 216 bp, Shigella flexneri; identical to SEQ ID NO: 381605

SEQ ID NO: 480272 - DNA, 606 bp, Shigella flexneri
atgaatcaaacagaaacgggcccgtccggatttaccgaaacaacggtcgatgaagaacgcatagccatcagggtaatgattggtgatgtggtcggccgctaccgtaagcaggtgccgcctgatcgcgtccagaaagctacttttgaagtgaacggcgggctgctcatggcgctgttactggctctgctgatgctggtctgtattattcagcgtctggcaactggcgaccgcctaatgagctttaccggagagcctgacgtccgggatattcagtttaccctgatgctggtcatcgagttcgcacttggcatggttgtctggtttctgattgcaacgggggagttttcccgcccctggctctaccgccttactccggcaaaacccgtctggctttttgatgaagtggaggatgcagacctggtactgctttccggcaatccctttatcaaacgctggcttcacaaggaaatcttgaaaatcaggaggctgacgtatacccgcctcgatgaggaactggagaaaatcgcccattacccggacagcctccggcacagtagtgttcgtgctcaccgtttgtcactgatcgctggtacgaaaacggactga

SEQ ID NO: 480273 - DNA, 282 bp, Shigella flexneri; identical to SEQ ID NO: 26431

SEQ ID NO: 480274 - DNA, 171 bp, Shigella flexneri; identical to SEQ ID NO: 381608

SEQ ID NO: 480275 - DNA, 324 bp, Shigella flexneri; identical to SEQ ID NO: 26432

SEQ ID NO: 480276 - DNA, 423 bp, Shigella flexneri
gtgcaagtcaatgaagtcgatgcgttgtacaccaaccccgcacaggcgcgtgaatttgccgaggcaaccgggattgattccctggcggtcgccatcggcacggctcacggtatgtatgccagcgcaccggtgcttgatttttctcgactggagaacattcgccagtgggtgaacttaccgctggtgctgcatggcgcgtcaggattatcgactaaggatattcagcaaaccatcaaactggggatatgcaaaatcaacgttgcaacggagctgaaaaatgccttcttgcagtcgttaaaaaattacctgaccgagcaccccgaagcgaccgatccccgggattatttgcagtcggctaaatccgcaatgcgcgatgtggtgagcaaagtgattgccgattgtggctgcgagggcagggcataa

SEQ ID NO: 480277 - DNA, 207 bp, Shigella flexneri; identical to SEQ ID NO: 26433

SEQ ID NO: 480278 - DNA, 225 bp, Shigella flexneri; identical to SEQ ID NO: 26434

SEQ ID NO: 480279 - DNA, 207 bp, Shigella flexneri; identical to SEQ ID NO: 381477

SEQ ID NO: 480280 - DNA, 261 bp, Shigella flexneri; identical to SEQ ID NO: 381478

SEQ ID NO: 480281 - DNA, 492 bp, Shigella flexneri
atgaccacattaacattcgaaattgctggggtaaaaaagctcctcgaagaactccgctcggcggaacggttcaatgcaaccattgaacagctttttgaaccgtcaaattaccccggcggtactcctctcaacgaagagggcaaaacagaagtggaaatgaaccagacggggggaattttctggccatcatccaaacacattgacccggcccgcctgactccacagatccttctggtaaaagatcatggcgtctatctgattaccaatgcatctctggatggaacccctgtttcccgtgatacggttgtctatgcccgtgggatgaatccgtctgttgatgatgaatggtatgacgaggcagaggaggcattgggcggcgatgatagttcggtctctatcccggtggcgtggtttgaactcgctcttaaaaagaaatttaatgcttttagtatcaaagtatcccccacaaaaatcactctggtgaatggataa

SEQ ID NO: 480282 - DNA, 309 bp, Shigella flexneri; identical to SEQ ID NO: 26336

SEQ ID NO: 480283 - DNA, 381 bp, Shigella flexneri; identical to SEQ ID NO: 26335

SEQ ID NO: 480284 - DNA, 249 bp, Shigella flexneri; identical to SEQ ID NO: 26334

SEQ ID NO: 480285 - DNA, 222 bp, Shigella flexneri; identical to SEQ ID NO: 26333

SEQ ID NO: 480286 - DNA, 354 bp, Shigella flexneri
atgtcgttgctcaggctgacagatatctcaatggatatatatgacatgactgaaaaagaggttcgaatggacgaagataaggtactgagtttcataaacagcggggacggcgacgccggagatctccttgatgatgcaatgccgactgccgcacgtcgattctaccgactgactcagtcgatgcacacattgctgggggaagtcagagagcattttcctgatgctatgttttattccgctaacggcaaggtgagcctactgcttgggagtagtcataacaagcatgaccagccaatgcaggaaatggtggctgtttctgcgacgcaacttcatatcgaaggtggtgactggtag

SEQ ID NO: 480287 - DNA, 609 bp, Shigella flexneri; identical to SEQ ID NO: 247109

SEQ ID NO: 480288 - DNA, 525 bp, Shigella flexneri; identical to SEQ ID NO: 26330

SEQ ID NO: 480289 - DNA, 312 bp, Shigella flexneri; identical to SEQ ID NO: 26329

SEQ ID NO: 480290 - DNA, 699 bp, Shigella flexneri; identical to SEQ ID NO: 26328

SEQ ID NO: 480291 - DNA, 225 bp, Shigella flexneri; identical to SEQ ID NO: 381486

SEQ ID NO: 480292 - DNA, 456 bp, Shigella flexneri
atgaccgatattaaggagaaacaaaatcactttagtaaattaaagtgtattgcaatttcctggcattttaataaacctactgggaaggagcaccttcttttatttgttgccattgtggcatggattttcccaggactggtgtttttcaaacattctctatggggcggactcctgttctttttttttgttgcaggtagttatgcattcctggcttttcctcattttactcatcggaagaaaatctggaaggaaaggcttgaccagtcgctgaaagagtatcagccgcttgatctgcaagcctgggcgtattttaaggaccgcgttagagaggaaggcatgacttataaagcctgtgagtcatggatgagtactgaggctagtgcattatataaaagccccaaacaagaatggtcatttctcgacagcacttcggttggagaaaatgataagtcataa

SEQ ID NO: 480293 - DNA, 2376 bp, Shigella flexneri
atgtatatcgaaatgaaagaaacattccttgaattaccctcagaaattcaattttctgaggcggctaacgctgccattctgacgcaggataaatggggcgatgtctggcagacactgaagaccgatgcggatctgaattatactgatgccggtgagccggtcagtctcgcttcgcgcgtgacgacggcaaccagtgccatttatcatgcgattaccgaaggctggaccatgtgcgtcggctacagcggcgggaaagactctcactcgctactgcacttgttccttatggccttgatccgtgcagtacgaaacgggtcgaacgtcagccagcaccacttcattcagatgtctgacaccctgattgaaaaccctgagatgcatcatcaggccacgcaggttctcagccagctcagagcctttattgccgaacaagaactgcctttgaccgtccttgtggcccgcccgtccatgacccagagctgggtcggacgcattctgaccgggcgtggacttccaacctggacaaattcttctacgcgtcaatgcgctacagatctaaagcgttctccactgcgccaggccaaagcccgttatctgaaaaatgcacctgcttctgtccgcaacaaagtgtgcctgatgctgggttcccgcgatgatgagagcgcccgtcgggcagacaacatcctaagaatgggcgggcaggcggacagcgtctcgctcacggagcacggcggcgaactgtacccggtgaaagagtggcgggcacaggatatctggtcatttctgatggcctgtggttctctggcgcgatttccgctgccaagctttttgccggacaacttcagcctcgccacgctttacaaagacgcgaccggggaatgtatctggacgccggagaaatccactgtccggtcttctgcctgcggcgctcgctatggatgctcgctatgctgcgccgtcggcattgatcactcgatggaaaccttactccgcactgaccctgagaagtacggctaccaggctggtctcaaccgccttcagcgtttcctgaccaaaattcagtacgactggagccttcgggattatatcggacgcaaagtgtttgagggcgggtatgtgcgtcttcagcccaatgtgttctcgtcgtccctgaccgaaagactgttccatatctgttgcagcctcgattacgtggaggctcagcgggccgcagcggtgcatgaaaagttactttcaggcgagatcgaagataccgcgcataaccgccgcatgtcggagccgcagtttcgactggtgcaggaggctaacgtgctgcatatcgactttctctggtcactgcattgctttaacccgcgcccatttcgtgccattgaactttaccgccaggtgtgggaagggggggcactggatcttctcgacgatgagccagctatgcaaccagtaccccgcacgccgatgccagcaccacgctggatgaagttgccggaaggccgtatcgggacgtcatttgacgggctgtccgatccgtcatccgaaatagcctattttgacggtcgggaggatgagcgagcttcccgcagtctgatgagtagcggggaaggcctgaacatcgttgcattcgaagaagaggatgagctgacggtcgatgaagacacggcatcctggattatctggcatgaatatgacggattacgccagcgtgtgtctgacggtgagtttacccctgtggcggcggcacagtacctgcttagatacggcgccgtccgaatttcgcgggggaaaggtgcggtgtaccatcgactcgctcaacgcgggcaggcctattcacgtcttggcattaacgaccagacgccgctgccgtctctgctcgccagccgccgtttcaagatcctgaccgacagcgattatcgcttgctcgtagcccgcaaactgcgggggcagcggcagaaactgcgcttctggtgctgtgttgcggcctgtgtggcactgcacacctacaacaaaacccctctgggggggtggataacgacgcaactggagacagaacaacagctacatctggcccggacgggagacgaactgaaggcaaggactcttgacgctgtcctgaccctctgtaacctgcggatttcgtcacagcaaccggaagaacgtctgtattaccgggccgtaagaaaacgctttctggagacattagccgggtgtatttcgccggagcgcgaaggaaccttacgggaagtcatctgggagctgcggatgttatccggcccccagtcttcgaaaaagacggggttccggcatgtggatgaatgccgggagaggacggcggcgttgttaaggcctctgttgaaacgtatggtccgcgtgctggcgtga

SEQ ID NO: 480294 - DNA, 447 bp, Shigella flexneri; identical to SEQ ID NO: 26324

SEQ ID NO: 480295 - DNA, 225 bp, Shigella flexneri
atgagctgcaaaaaatcagaatcggcttatgacgttgcacgccaccgcctggcctctgacgagagcacgcccgacaatcctggtgaggatggagttatcattctcagcgaagaagacaataccagcatggcgcttcacagcgtcactgaattgatgcccgtcgtgtacgaaagcctgagcaaattactgccttcacttgacgaattgtgccccgtgactgcctga

SEQ ID NO: 480296 - DNA, 1104 bp, Shigella flexneri
atgaaattttgccgacgtccgttgattgtcgccgtctatacggcactgctgttcccgctttacagccaggctcagctttacaactattcgtataccgacacacgcggcacgaaagtgaatgctgaacccaccagagagtatctcaacccgggcagcgcaattacgctgaatctgatatctggtctcgaccgctacgagcgcgttaccgtgacacgttcatccgataatgtgcagatgttccagagtgtcaccggcctggtgacagtggccgacaggatcactgccgctgatggtagtgagtactacggcaagtccatgacactgccggtactgggcgagggtactttttctcttaaatccgaaacactcgacaataagtcgaatgtcgtggcgacaaccagctactctttcagcatcgatatcactcctcccgttctaccagatccgatgcagtggatcagggctggttttcagtacggaagtctggatattttcggcgacaggaccgcaacccaggccatttcgttatcgaacgtctctgatgcgaggtcaggactggataaagcggagtggtttgctattgacagcagcggtgtccgccggactgtaaatgctcagctgaatgcactcacgggggtggtccaggcactggcggcggtggcggcaggaagcacggttgcgcccgtcagtccggcatattacaccgtaggttttcgggtttatgacaaagccgggaactggacagaaacatcacatcgctctggtattgatcgtacaatacccagctacattcaacatcaggtgcggaatgcgaaaacaggcgtctgggaagattatgttcctggcatgactattttcgagaacccagtcaaattcaggtacaaacgccttaaatcggactcaaccaattttaacgggacagacttcggctgggtcgatcagattaccaactccgacaatacctatttttatactgaagccacggtgagctacccggaaacctatatgtactacgagcttcatactaaagcgggccttaacgtcaacctccagtacaaaacgctgaaatttactccgggtacacatacactcaatgctatctga

SEQ ID NO: 480297 - DNA, 603 bp, Shigella flexneri; identical to SEQ ID NO: 26308

SEQ ID NO: 480298 - DNA, 297 bp, Shigella flexneri; identical to SEQ ID NO: 26307

SEQ ID NO: 480299 - DNA, 597 bp, Shigella flexneri; identical to SEQ ID NO: 26306

SEQ ID NO: 480300 - DNA, 882 bp, Shigella flexneri; identical to SEQ ID NO: 26305

SEQ ID NO: 480301 - DNA, 516 bp, Shigella flexneri; identical to SEQ ID NO: 26304

SEQ ID NO: 480302 - DNA, 204 bp, Shigella flexneri
gtgatccactttgcggagcgtgaggctcgggagcgaaaagcccatgcctcgtcaggaccgatagtgacgctttcctccgtcattgaggcgttttttggcattcgctttacgccggtacagaatgacggtaacttttctaaggcagcggatgattacaaacgcagtctctcaaaactcgtacaaaatggagccccaaaagaatga

SEQ ID NO: 480303 - DNA, 2457 bp, Shigella flexneri
atgcgtaaaattctgacaggctgtatcattgccacggccatagcttcagtttatccggcggcggctcagattttcagctattcgtatactgacaccaatcagctggcaaagacgcttaagcctgccacgcagagctaccttaatccggcaagcacaatgaccctgaatctgatctccggccttgaccgatacgaacgagtgagtgtgaccagggacagtgacaaaaaggtcatgtattccgcagtgacaggaaagataagcgtcgcagatcgcattgttgccgcagacggcacggaatattacggaaaggacttggcgttacccgcactcggtgaaggggccttcaccgtcatcaacgatactctggatctccagcaggctgtcgtcagctcttcaacgtatcatttcacaatcgacactacagtgccaaagtataccagcatctacccgagccagaacgcaggctatgaaatggtcctgagtggcccagtttgggggcttgggcgcggaggatctggccagttttccatctttgctgatggagttgatgatgcgaatggcatagacaagatccgtctggtcatcaagcgcggaaatggcacagtcgtgtccgacaacacactcagttacgatacggcggcaaaacgtgccttttacccctggatcaaggactcggtcactcaacccggtatgcccaccagcgatctcaatgaagaatttaccttcaattttatcatcacagataaagccggaaacacgctgaatattccgccgcagcgctttttatttgatgaccagataggtgaatacaccccctttgcggttcatgactcacgcgtcagtacgagtgtggtcccggggatctcttcagggtacgtcccgtttgttcgggggctatctgtactcgaaaacccataccgtatggtcatccgtatcccccgaaccaactggaagccataccgtaacggcggcatcaccattcttaacaattatggcggtgctaaggttatttcagaagacacgacctatgtgtacgtcgaggtgaagcttccccagggcgctctggatataaactactatcgcccagtgaacacgtaccaatggtccggaggcgatctgactcaatacgcctcctggctgaactgggacccggcttcggtaaaaagtcctgcatgggggagtccggcgattgagcgacagatgtccgatggtacctggtttaacagcgtcaattggaaatacttcaaggcttcagatatgccggtgaacctgacccagatccgtttcaatgtgcaggcaaggccctacgaccaaaaaattactggcggtgccacctgcaacatccctgccgggtcaacgtcgtgtaccgtcgccctgacacaggcgattacaaacggcaccaccggctatctgcatagtggttatgaggtacgttccacaacagaatccaccttcttcatgcctatctgggaaaacgtcgtctggcatacgctggggccttcggtcactggctatgactacaatgatacgaccaacatccttcaggtttacatcaaccagccgggagacggatcgtatttcgataccgttaaactgagccgggtgtggctgtccgacaaatcccgcaataacgcggatatcaatgtgaccggaacactaacggggcgtaacacagcaaccgggaattatacatacgagttcaacctgaaactaatcccggagggcagctataacgtgcagctcaacgcccaggattcgttcaacaatacgggtagtctggactataagactgtgacggtcgataacacgccgccgtccatcagtatcagctacgaaaccaaacctatcaccagcagtgtaacggtgtatggactggagaacattcgtattcagctcgcagataccctgaccaagccctctttaacgcgaatgacgcttcgcggtggcccggtatctgatgctgttgagttgtcgtgggtaaacctcggaaataatctttatgccccgaattacccgaagatctttccttcacttaacgacggcgaaacttacacgcttaccgtgcaggccaaagacgagatgaacaacgttaaagaaagcgccgtcgaatttagttacttgccgaacaacctggttcgtctggaaaaccttaagaccatctccgttagtaccgcgctgaaaacgtccgatgacacaccgctggcggttctttatgccagccagctgcgtaagaaggacgggtctatcgcaaccgggaaacaggacgcgatactgacggtgcgtaaggatgcagccttcggcgtcacggtgaatggggtttccgcagctcctggggagagcaaaaatgttcagttggatctgggtctgggtgacagccgcagcttccctatttttccttcgacttccggcgtcgttggaacttctgaatttatgctgaatatagaggaactgaagtaa

SEQ ID NO: 480304 - DNA, 177 bp, Shigella flexneri; identical to SEQ ID NO: 26302

SEQ ID NO: 480305 - DNA, 1677 bp, Shigella flexneri
atgtctgctgttgaatctgattccctgccaatgggtgcccctgggagttctctggttgcttatatgcctcatactggcctccttattaacgacgataacttcctgcccgaaatgcgggaagagctcgatgtcattaacaggcaggtcgaatcatataacgatgagcttagcttactgaggtccatgtccgctcagttcctgaaatgcgggaatcagaagctctattcatacctctccggatacaatcatctcatttcagaagcggatgccagctacgcagaaaacgcgctgcgttcagaatactggaagagggtcatggccctgaccgatgtactgtctgtgatgtctgacgaaaagaagaaagaatgggataagcagtttactgctgaccgttaccaccttcctcctcaggagatccctgattttacactcgatgctgttgttaccacggttgtcgcgttgctcaatgaccggcatcagttcattaaagatcgtgtctatgccgtctttcagtcattaagccgtcaacacaaaaccaataaagcatttggcttctctactcgcatgatcacctccggcgtatgtgaaggcgtgaaagacaaatgggtaaaactgaaggttgagtttaaagaatccggcctcatgccactttcggagttgcgggtgatctgttcttatttccggggcgaaacagttaaaccggtctatgacacgaaaaaaatggttgagaatatggttggtcatgttggattcagaaactggatcagcctggatggcaacagtattcgttttcgggtctacaaaaacggatcgatgcacattgatgtgcatcctgatatcgccgaacggcttaacaacattcttgctgccatcgtccctctggctctgcctgctgaacgcgtggcccataccaaagcgacgttgcaggagttcccggcactgaaacgctgcatcgattttcattcacggatgcagcttgcagagctggattttacccagaatgaaaaggaatggtccagctggacatcgctcggctatgccggtgagaacgctgataaaacgcggcaggtgaacgcggatgttctgcgatttctcggtgcccgagtgacaagctaccatgtgacgtttgattatgacccgaccgaagtgatgcgcttcatcggacatatgggcgccatgcctgatattaaatcccaccagttttatccgtcgtcggcgcgactcagtgaatacgtcgcatccattattgcggccggggagggggaacggctgctggagcccaatattgggcacggggatttgcttcaatgtttcccgaaaagtgtcaacgtaaccggcatcgaactggatacactgaattgtctggtctcccgggctaaaggttacgagaccacggaagccgattttctggcctggtcggcggcgaatcagattcagaaatttgattgcgtggtgatgaaccctccttttgctgacaaccgggctaagctgcatctgctggccgctgcgtctcatctggttcccggcgggcgtttagctgccgtcctgcctctgtcccttcaggggatcgataacctgctgggcgaggggttcaggaccgagtggatggataccttcgataatgagtttgacaacactgccgtctccgtccgcgttctgtatgcagaacgcttttaa

SEQ ID NO: 480306 - DNA, 1158 bp, Shigella flexneri; identical to SEQ ID NO: 26300

SEQ ID NO: 480307 - DNA, 825 bp, Shigella flexneri; identical to SEQ ID NO: 26299

SEQ ID NO: 480308 - DNA, 822 bp, Shigella flexneri; identical to SEQ ID NO: 381516

SEQ ID NO: 480309 - DNA, 708 bp, Shigella flexneri; identical to SEQ ID NO: 26297

SEQ ID NO: 480310 - DNA, 201 bp, Shigella flexneri; identical to SEQ ID NO: 26296

SEQ ID NO: 480311 - DNA, 1077 bp, Shigella flexneri; identical to SEQ ID NO: 26295

SEQ ID NO: 480312 - DNA, 876 bp, Shigella flexneri; identical to SEQ ID NO: 26294

SEQ ID NO: 480313 - DNA, 582 bp, Shigella flexneri; identical to SEQ ID NO: 26293

SEQ ID NO: 480314 - DNA, 354 bp, Shigella flexneri; identical to SEQ ID NO: 26292

SEQ ID NO: 480315 - DNA, 318 bp, Shigella flexneri
atgacaagccagtacgagataccgccacatacatatcgctttccatacagaataaatatgccgttactaattctattctgggatgcaaagcaattgggtataacattcgtgactatcgcgagcggtaatatttttgatttctttataacttcggtagttgtggcggtggtgttctggtttgcatataagaaagcagcagaggaagggattagaggaaaactaaaacacaaactgtggtggtacggcttttttcctggaaaatcagtgtttagtagtcgttactttaccgatccatttatcagaaacctctattcttga

SEQ ID NO: 480316 - DNA, 786 bp, Shigella flexneri
atgaaacttctcagcaggttaaaaattccattcattaaaaattccagtaatggcgattttgataacaaggatgagacttcgcaaaaaggaggtgaagaagtaaaaggaagttttctggattcaaaagcacgctttagtaaagaaattgaaggttctgaaattggaattacatatagtgcattgattaaacgcgacgaaaaactcctacgtgtgaatacagttgcaatgatcattattggggttctggttgtaaaaaatcaatttctcactgatcctgtgactatagtgctaccgccaaatatgacggaagaagtcaaagttgttggaaataaagcctcagaatcatataaaacgcagtgggccttattctttagtactttgattggaaacataaacccaacaaacatcggttttgttacaacaactatattggatgcgctttctccggatttacaggcaaagacccgggaatcactacagcagcaaaccaatataatgcaggctcgtggtgtagagcagtcatttaagccgatcgatatgtattacgataccaaaaatgacatggtctatgtctggggaacaaagtcaactcgtttgattaatgttccggacaaaactgaatcatccaaatggacgtttgaatgggtcctgggaatgaaaaatggacgaccgcgcatagcctatgtgaaccagtattcaggtacaccaaatattaagaaaattacaatcaacggcaaagaacaactggcaacactcgataatccgccgccgtcaataggtaactaa

SEQ ID NO: 480317 - DNA, 1233 bp, Shigella flexneri
atgacttcaaaaaaggtttttcactgcaccgcgattacagcagtgattttgctggcaacttcgaatgtggtatttgctgaagactatcagttaccggcgacagtaaataatccggtagttatgcctgtcggggccgatgaatttcagaacggtgtgaaaaatgcgataattaaagacactggcactatgactgagaccgtacaagcaacaaaaccgacaactgctctgccaagtctttcacctgcaagcagtgcttctcccgcagtcaatgaaataaccggggcgttgtcaaataaccctactctagctggttaccagcaacaggttaaatcaggaaattttgatagttacggaagaccagcagggaaagaacctcaacaaaatgcacaaagtaccgggtccccttcaaaggcagatgaactttatgttgaagcacgtaatcgctataaagaagtacaacgagtaaacgttccgcctggtggcaatattgtactcccggtttctcgggggctgcaaaacagaatttcgacttcatttaaaaatgcatctgtaagtacttcaacgccagctgatgaagccagtattttcgttaatggcggggatgtttttatttcaacaaatacagataagcctataggaattatgctttcagaagattcagttcctgaatctacttataacctgacactggttccactggatgtaccaggggccatgatttcagtaacaacttctttgagcccgacaatgcaggcaaaacgagaaacttctcttgataaacaaaattatgatgagatgctggcacgctcacaatcagaagagttgactccttcagaccctcggcaggatgaccataaacagcggatcattgatttgttgactccggttgcactgggtgaggttccttctggtttcagtttacaagaagaccgcttgtcacgcataccaagctcagagcagtccccatgtaatttcaatatgtacgccaagttaggtcaaagactggtgggatctcgggaattgatagatgtcgttcttgttaagaatgataagccttacggacaggtagtggctgatcagcaatgtataactgaaggcgtggttgcaagcgctctattcgataaagcattccttcagcccggggaagagaccgaactttatattgtgcgggataaattatttaaagagcgtcagactcgtgttactacgcgcccaagcctgattaaaagataa

SEQ ID NO: 480318 - DNA, 441 bp, Shigella flexneri; identical to SEQ ID NO: 26288

SEQ ID NO: 480319 - DNA, 1359 bp, Shigella flexneri; identical to SEQ ID NO: 26287

SEQ ID NO: 480320 - DNA, 513 bp, Shigella flexneri; identical to SEQ ID NO: 26286

SEQ ID NO: 480321 - DNA, 276 bp, Shigella flexneri
ttgaaaaagttacttttgtctctgctgatttccattacctcagcgtgcccgccgcttactctggctgttgaaaatgtattaaacaatcgtgatgccgctgcgttaatggaaaaggcaaaagaaggtggagtatcaacgaaacctttagacggtgtattggcgaaaatgaaaagctataagcctaaagatgctatttacatccctactggcggtctttatttgttccaggatgaacgttctcagttgatggcggtgaccactgacggacggtactga

SEQ ID NO: 480322 - DNA, 669 bp, Shigella flexneri; identical to SEQ ID NO: 26463

SEQ ID NO: 480323 - DNA, 300 bp, Shigella flexneri; identical to SEQ ID NO: 26462

SEQ ID NO: 480324 - DNA, 231 bp, Shigella flexneri; identical to SEQ ID NO: 26461

SEQ ID NO: 480325 - DNA, 780 bp, Shigella flexneri; identical to SEQ ID NO: 26460

SEQ ID NO: 480326 - DNA, 924 bp, Shigella flexneri; identical to SEQ ID NO: 26459

SEQ ID NO: 480327 - DNA, 516 bp, Shigella flexneri; identical to SEQ ID NO: 26458

SEQ ID NO: 480328 - DNA, 1428 bp, Shigella flexneri; identical to SEQ ID NO: 26457

SEQ ID NO: 480329 - DNA, 168 bp, Shigella flexneri; identical to SEQ ID NO: 26456

SEQ ID NO: 480330 - DNA, 1296 bp, Shigella flexneri; identical to SEQ ID NO: 26455

SEQ ID NO: 480331 - DNA, 300 bp, Shigella flexneri; identical to SEQ ID NO: 26454

SEQ ID NO: 480332 - DNA, 1221 bp, Shigella flexneri; identical to SEQ ID NO: 26453

SEQ ID NO: 480333 - DNA, 348 bp, Shigella flexneri; identical to SEQ ID NO: 26452

SEQ ID NO: 480334 - DNA, 456 bp, Shigella flexneri; identical to SEQ ID NO: 26451

SEQ ID NO: 480335 - DNA, 669 bp, Shigella flexneri
atggcggcgtcgcgaattacacacctaataacgtcctgtaccaaaggtaagcacagccagtgcggctccatgccagaactgagtatccggtctggacagacaccagaagaggcaatgtccagctgggcagcaacgattaaacggtcgcaaagtgcttcaccggtaccggccctgtcgctctatgccggtaatcactggtcaacggcaaaagagatattacggacaactgagaacctggagttgtgggtgatctcggccgggttgggttttttgaatagtcgtgacctcgtggacgcttatgaagccacctttcatgatttaccgttcagtcaccgacaatggtggcgggaattaacaaatacattcgggaaagaaaggacggcgaaatctattgagacattgatggcagcaagacctttcgatgattatgttatcgctgcctcccccgtttatatcgaggcgacggaggatgatatcctggcaggggcaagcaaattaaataatcacattgcccagttgacggttgtaacgtcaggggaatattctggactacttgaatcctatttaattcgtagcgaatcccgtatgatgcgccaactatcaagcaacatggtatgtcttaacatcaaacttgctcaatatattattggaagtcggcgctattcatga

SEQ ID NO: 480336 - DNA, 273 bp, Shigella flexneri
atgaaccgcactgatgattccataacgcaactatcttcactttatgaacggctcggagctgtggctcatgaactggaatattgtaaaattctgctccctgaacactctgaacaactggatcttgatgccgcagcaacatatgcaatgatgctccgcattgaacagtgggcagcaaacgttaagaacgcatataataccaacacatacgaccctttccatattaacgaaaagaacaaacaactaagaaatcaagaggaagaaaatcaatattaa

SEQ ID NO: 480337 - DNA, 405 bp, Shigella flexneri; identical to SEQ ID NO: 26448

SEQ ID NO: 480338 - DNA, 408 bp, Shigella flexneri
atgcaaaattgcctttcgggatatttaaaagcgaccattgttattttatctgcgggcctgacaggttgcgacctggcaaatgggactgcggaaagtggtgtgtatcagaaatacacgaatggacctttcaaggaaccgactatcgtgatgagtccgggctggcggatggatgaccacggcagggaagcactaatattcgggagcagccactgcccggatgtaaacggcaataatacgtctgagggcggctgcgtcctcattgaggagcactctgcgactgtcgcggtcactgttgttgatgcgacaaatcagtcccgtcgccatgaaacctggacgattgaacgtaaaaaggatcgagttatagtgaagcgcccggataacagttttgtgatgccctggggaaaatag

SEQ ID NO: 480339 - DNA, 807 bp, Shigella flexneri
gtgagagaacctcgtccacgccatacattacaggtagtctgtgtcccgtctctgaatatacaggatctggggctaaccagttttcatagctggctcttatcaaaaggctatgacacgaccaatgccaggaacaaccgtacttgctgggcaagggaaggtggctggcacctgaagcgatgcagacatctggcaacgggcgaagatcatttctggtttatcgcattcaacggtaccggcggcgacatttttcctgtgaaaacccagcaggactaccgtgctgcctaccgcaagcttgaagcgtatggatatgcaccggccgttattgaacaattgaacacaggcgttgcctataatcttgcttattcacggacaccgttaaaacgccctgagagcgccaccagcgaactgaagcgaaaacctgacgtgaatattcagggtgagccttgcgaacgctttgtgaccgaacggagcagcgcagcgcagaataaattcaaaaccctgctcattgagaacttcgccggtcggtgtgcagtcactggatgggttaatggtggtgtgctggtggcggctcatatcgagcatgggacgcgctacaacccttcgaacggcatcctgttgacgccgacaatgcacgcattgtttgacgcggatctgatgggtatagacccttcaacactcaccgttcattttaaaccgggcatcgaggcgggagagctgtttgaaggaaaaacgctcaatccgttggtgtatgatctggataccgaccggctggctgctcgctgggctgactttataggtgccgagtga

SEQ ID NO: 480340 - DNA, 228 bp, Shigella flexneri; identical to SEQ ID NO: 26443

SEQ ID NO: 480341 - DNA, 492 bp, Shigella flexneri; identical to SEQ ID NO: 26442

SEQ ID NO: 480342 - DNA, 1206 bp, Shigella flexneri; identical to SEQ ID NO: 26441

SEQ ID NO: 480343 - DNA, 141 bp, Shigella flexneri
atgaccgaacaaggtcgattcgggcaaggcggcggaggggcacatctcccaatgataatgaggttatgcaacctgttagtcaccggcttgcctgatgctatgattgacatctcttttgaccggtctgtatttgagcattaa

SEQ ID NO: 480344 - DNA, 204 bp, Shigella flexneri; identical to SEQ ID NO: 26440

SEQ ID NO: 480345 - DNA, 393 bp, Shigella flexneri; identical to SEQ ID NO: 26439

SEQ ID NO: 480346 - DNA, 261 bp, Shigella flexneri; identical to SEQ ID NO: 26438

SEQ ID NO: 480347 - DNA, 507 bp, Shigella flexneri; identical to SEQ ID NO: 26437

SEQ ID NO: 480348 - DNA, 1074 bp, Shigella flexneri; identical to SEQ ID NO: 247234

SEQ ID NO: 480349 - DNA, 174 bp, Shigella flexneri
atggcttgtagttcgttgattgagtcgggattatggtcgagggatgcggtagagcggcagatgagtcaccaggagcgtagctctgtgcgagcagcttacatccataaggcggaacatcttggggagcgtaggttgatgtttgaagtggtcaacaaaaactggccaccgagttag

SEQ ID NO: 480350 - DNA, 150 bp, Shigella flexneri
atgaaggggcttgagaatgccatccgcaatctgaacagccttgatacccgtatggtgccacaggccagcgcatgggcgataaaccgtgtggcacagaaagcggtctcggtattcccggcaggttgccgggaataccgttgcgggcgataa

SEQ ID NO: 480351 - DNA, 351 bp, Shigella flexneri
atgaaaattggcgtattcgtacctattggcaacaacggctggctcatttcgacccacgcgccgcagtacatgccgacctttgaactgaataaagccattgcgcaaaaagcggagcattaccatttcgatttcgccctgtcgatgatcaaactgcgtggctttggcggcaaaactgagttctgggatcacaaccttgagtcgttcaccttgatggcgggtctggcagccgtgacctcgcgcattcagatttacgccactgctgccaccttaacgttacctccggcaatcgtcgcccgtatggccgcaaccatcgactccatctctggcggcgttttggcgtcaacctcgtga

SEQ ID NO: 480352 - DNA, 582 bp, Shigella flexneri; identical to SEQ ID NO: 473786

SEQ ID NO: 480353 - DNA, 441 bp, Shigella flexneri
ttgtacctcgctggcatcaaagatgtttatacgtgcgaaattgtcggctacgccatgggagagcgcatgacaaaagagctgacaggtaaagccctgtttatggcgctcaggagccagcgcccacctgccgggctaatccaccactctgatcgaggttcacagtactgcgcatacgattaccgggtcatacaggagcagtctggtctgaaaacatcaatgtcgcgtaaaggtaactgttacgacaacgctccgatggaaagcttctggggaacgctgaaaaatgagagtctgagccactatcgttttaataaccgggatgaagccatctcagtaatacgggaatacattgagattttctacaatcgtcagcgtcgtcactctcgtctggggaatatctccccggcagccttcagggaaaaatatcatcagatggctgcttaa

SEQ ID NO: 480354 - DNA, 231 bp, Shigella flexneri
ttgagtgcgggacgcctgaataaaaaatctctgggtatcgtgatgtttttatcggttggactgctattggcgggctgttcgggtagcaaatcatccgatacaggaacgtattccggctccgtttacaccgtgaaacggggggatacgctatatcgtatttcgcgcaccacgggaaccagcgtaaaagagctggcgcgactgaacggcatttccccccccttacaccattga

SEQ ID NO: 480355 - DNA, 171 bp, Shigella flexneri; identical to SEQ ID NO: 478928

SEQ ID NO: 480356 - DNA, 576 bp, Shigella flexneri; identical to SEQ ID NO: 5316

SEQ ID NO: 480357 - DNA, 441 bp, Shigella flexneri
ttgtacctcgctggcatcaaagatgtttatacgtgcgaaattgtcggctacgccatgggagagcgcatgacaaaagagctgacaggtaaagccctgtttatggcgctcaggagccagcgcccacctgccgggctaatccaccactctgatcgaggttcacagtactgcgcatacgattaccgggtcatacaggagcagtctggtctgaaaacatcaatgtcgcgtaaaggtaactgttacgacaacgctccgatggaaagcttctggggaacgctgaaaaatgagagcctgagccactatcgttttaataaccgggatgaagccatctcagtaatacgggaatacattgagattttctacaatcgtcagcgtcgtcactctcgtctggggaatatctccccggcagccttcagggaaaaatatcatcagatggatgcttaa

SEQ ID NO: 480358 - DNA, 906 bp, Shigella flexneri; identical to SEQ ID NO: 6034

SEQ ID NO: 480359 - DNA, 1239 bp, Shigella flexneri; identical to SEQ ID NO: 6033

SEQ ID NO: 480360 - DNA, 585 bp, Shigella flexneri; identical to SEQ ID NO: 6032

SEQ ID NO: 480361 - DNA, 312 bp, Shigella flexneri; identical to SEQ ID NO: 8084

SEQ ID NO: 480362 - DNA, 543 bp, Shigella flexneri; identical to SEQ ID NO: 8085

SEQ ID NO: 480363 - DNA, 861 bp, Shigella flexneri; identical to SEQ ID NO: 8086

SEQ ID NO: 480364 - DNA, 756 bp, Shigella flexneri; identical to SEQ ID NO: 26465

SEQ ID NO: 480365 - DNA, 267 bp, Shigella flexneri; identical to SEQ ID NO: 11114

SEQ ID NO: 480366 - DNA, 246 bp, Shigella flexneri; identical to SEQ ID NO: 102671

SEQ ID NO: 480367 - DNA, 561 bp, Shigella flexneri; identical to SEQ ID NO: 102670

SEQ ID NO: 480368 - DNA, 729 bp, Shigella flexneri; identical to SEQ ID NO: 50969

SEQ ID NO: 480369 - DNA, 360 bp, Shigella flexneri; identical to SEQ ID NO: 474567

SEQ ID NO: 480370 - DNA, 690 bp, Shigella flexneri; identical to SEQ ID NO: 474568

SEQ ID NO: 480371 - DNA, 468 bp, Shigella flexneri
atgtaccgtgaaagcgacatcgtgccgggagagcagaccgccaccagcatactgaagcagcgcacaaaaaatcttgcgccgctgcctcacgcccaccagcaacagaatccaccacaggaagagacggtggtcagcattgccgttgatccggaatctccggctcagtatctccagcgccagaaaccacaacgggaagagatgcctgtatacacgcgctgggtaaaaacgcagaaatgcatgacgtgtggcaatcaggcagatgatccgcaccacatcattggtcatggactgggagggatgggaacaaaggctgacgatttgtttgttattccgctgtgtcgtaaatgccataacgaactacacgccggggtaaaagattttgaagaaaaacacggtagtcagttgttgttgctgattcgttttttaatgcacgcgagaaattcgggtgttctgaagtggaaagcataa

SEQ ID NO: 480372 - DNA, 306 bp, Shigella flexneri; identical to SEQ ID NO: 6030

SEQ ID NO: 480373 - DNA, 1206 bp, Shigella flexneri; identical to SEQ ID NO: 6029

SEQ ID NO: 480374 - DNA, 789 bp, Shigella flexneri; identical to SEQ ID NO: 6025

SEQ ID NO: 480375 - DNA, 474 bp, Shigella flexneri; identical to SEQ ID NO: 6024

SEQ ID NO: 480376 - DNA, 135 bp, Shigella flexneri; identical to SEQ ID NO: 26752

SEQ ID NO: 480377 - DNA, 525 bp, Shigella flexneri; identical to SEQ ID NO: 267143

SEQ ID NO: 480378 - DNA, 468 bp, Shigella flexneri; identical to SEQ ID NO: 480371

SEQ ID NO: 480379 - DNA, 366 bp, Shigella flexneri
atgaccgaacgcatagaatttgttttgccttacccgccaacggtgaacacctactggcgacgtcgtggcagcacatattttgtatcaaaagccggtgagcgttatcgccgtgatgtggcgctaattgttcgccagcagcgactgaaattaaacctgtccggaaggctggcgataaagattattgcagagccaccggataagcgccgtcgtgacctggacaatatcctgaaggcaccgctggatgcgctgacgcatgctggactacttatagacgacgagcagtttgatgaaatcaatattgtgtgcggtcagctcgttcctggtgggcggctggggataaaaatcacagaactggggtgcgcatga

SEQ ID NO: 480380 - DNA, 297 bp, Shigella flexneri
atggcgactcactttgcccgagggattttaacggaaggacatctgatttctgttcgtctcccctcccagtgtcatcaagaagcccgaaacattccccctcatcgtcaaagccgttttctggcgtccagaggtttactcgcagaactgatgttcatgctgtatggcattggcgaattgccggaaatcgtcaccctgccgaaaggtaaaccggttttcagtgataaaaatttgccttcgttttctatttcctatgccgggaatatggttggcgtggcgttaacaaccgaaggtgggtaa

SEQ ID NO: 480381 - DNA, 915 bp, Shigella flexneri
atgtcggtaaactcatttgtcaccacagtgggcttttttctgtctatttattttgccgataaactaccgcgcagatacaccatgtcattctcactcattgcgacaggattactgggtgtttatttgacgacaatgccggggtattggggcatcctctttgtctgggcgctatttggcgttacttgcgacatgatgaactggccggtcttgctcaagtcggtaagtcgattgggcaatagcgaacaacaaggtcggttgtttggcttcttcgaaacagggcgtggcattgtcgataccgtggtggcattttctgcgttggcagtatttacctggtttggcagtggcttattaggttttaaagcaggcatctggttctattcccttattgtgattgccgtaggcattattattttctttgtcctgaatgacaaagaagaggcaccgtccgttgaggtgaaaaaagaagacggagcatcgcaaaacaccagtatgacctcggtgctgagagacaaaaccatctggcttatcgctttcaacgtcttcttcgtttacgcggtttactgtggcctgacattcttcattccattcctgaaaaacatctatctattgcccgttgcgctggtgggggcttacggcatcattaaccaatactgtctgaaaatgattggtggaccgattggtggcatgatttcagataagatcctgaaatcgccgagtaaatatctatgctacacctttatcatcagtaccgctgcgctcgtactgttgattatgctgccgcacgaaagtatgccggtctatttagggatggcatgtacgctgggctttggcgcgatagtctttacacagcgagccgtattttttgcacctatcggcgaagcaaaaattggtaatgctgccaacttactgatttag

SEQ ID NO: 480382 - DNA, 381 bp, Shigella flexneri; identical to SEQ ID NO: 458903

SEQ ID NO: 480383 - DNA, 219 bp, Shigella flexneri
gtggcagtcgagccgcagcttggcgcacccctgcgttcgcgcggcatggcggcaagcctcgatcagcgcggagctgacaccccggcccgcatgtgtccgtcgcaccgcgagcttgtgcagatatgcggcctcccccttgagggcgtcgggccagaactcgggatcctcggccgacaaggtgcaacagccgacgatgccgtcgctgcaactcgcgactag

SEQ ID NO: 480384 - DNA, 369 bp, Shigella flexneri; identical to SEQ ID NO: 474687

SEQ ID NO: 480385 - DNA, 534 bp, Shigella flexneri; identical to SEQ ID NO: 5124

SEQ ID NO: 480386 - DNA, 441 bp, Shigella flexneri; identical to SEQ ID NO: 478283

SEQ ID NO: 480387 - DNA, 441 bp, Shigella flexneri; identical to SEQ ID NO: 479006

SEQ ID NO: 480388 - DNA, 756 bp, Shigella flexneri; identical to SEQ ID NO: 476359

SEQ ID NO: 480389 - DNA, 729 bp, Shigella flexneri; identical to SEQ ID NO: 474473

SEQ ID NO: 480390 - DNA, 405 bp, Shigella flexneri
atgtcaaaagtcgctctcatcaccggtgtaaccggacaagacggttcttacctggcagagtttctgctggaaaaaggttacgaggtgcatggtattaagcgtcgcgcatcgtcattcaacaccgagcgcgtggatcacatttatcaggatccgcacacctgcaacccgaaattccatctgcattatggcgacctgagtgatacctctaacctgacgcgcattttgcgtgaagtacagccggatgaagtgtacaacctaggcgcaatgagccacgttgcggtctcttttgagtcaccagaatataccgctgacgtcgacgcgatgggtacgccagcgcctgctggaggcgatccgcttcctcggtctggaaaagaaaactcgtttctatcaggcttccacctctga

SEQ ID NO: 480391 - DNA, 210 bp, Shigella flexneri; identical to SEQ ID NO: 476448

SEQ ID NO: 480392 - DNA, 318 bp, Shigella flexneri
atgtccacgccgaacgtggcagagtcttaccagagcaagttcaagggtcgcaatggtcttgataaggttctgggtgacagtgaaacgactcgcgtgaagattaactctgtgatcctcgataaaccgcacggcgtagcaacaatacgctttactacggttcgccgcgtgcgcagcaatcccgttgatgatcagccgcagcgctggattgccattatggggtatgaatataaatcgctggcgatgaatgctgagcagcgttatgtcaacccgctgggtttccgcgtgacgagttatcgcgtcaacccggaagttaactga

SEQ ID NO: 480393 - DNA, 885 bp, Shigella flexneri
atgaaaaaactacttctttcagcagtcgttttgtcagtcctgggaggcgcggccactaacgttatggcgcttgaggttggccgcaattctccttatgactatcgcattaaaagcgttgtttataaccctgttaatgtggtcaaaattgacgctgtcgccggtgtggctacccacattgttgtcgcgcctgacgaaacctatatcactcatgcttttggcgattctgaaagctggacgtttgcgcacaaaatgaaccatttttttgtgaagccgaaacaggccatgagtgataccaacctggtgatcgtcaccgataagcgcacctataacatcgtcctccatttcatcggtgaagaaacgaagaaaaatgcagacggtacggtatcaaaatcctttattgaaacgccgtgggctgtgcgccatgccgttcttcagctgacctatgaatatccgtttgagcagcaggaaaaagccaaaagcgcggctgataaaaaacgcattacgcagaagctgaagcagacggcttttgcgggggcgaagaactatcagtacgtaatgagcgaacagcctgaaatgcgcagtatccagccggttcacgtctgggataactaccgctttacccggtttgagtttccggccaatgcggagctaccgcaggtctacatgatctcggccagtggcaaagaaacgctgcctaactctcatgttgtgggtgagaaccgcaacatcatcgaggtggaaaccgtcgctaaagagtggcgtattcgtctgggcgataaagtcgttggcgttcgtaataataatttcgcgccgggcgccggtgcggtagcaaccggtacggcttccccggatgtgcgcagggttcaaattggggaggataactga

SEQ ID NO: 480394 - DNA, 1161 bp, Shigella flexneri
atggcccgtaaaagtgtcgatgtagatcaggaactcgatgaaaacaccggagacggtgaatttgaaagcgagcgtggcggatttaatggcagtaaccgccgttcggctcctggtatgaaagcctttgtcatactgatggcgctgcttgctttggtattcatcgggattacggtcatgggtaaaattcgcgccccggctaaagctgaagctgataaagacggtggtaaagcgcaacaggccaatacactgccaaactacagctttaacagcgatcctgatgttaataaacctgcaactgcgcagaatagcgccactgatgcccgtgctgtgcaggctgccgcacaggcagatgcagatgcgggcagcagcaataccggcgcgcgtacctctaataagcgtaaagaaccttcgcctgaagaactggctatgcagcgtcgtctgggcggcgagctggcccagactaatcaggcggctacaagcaatagtcccggagtgcagccccaggacaacgaaacaagcgaaggtagttcagcactcgctaaaaacctgactcctgcaaggctgaaggctagccgcgctggagtcatggctaatcccagcctgactgttccgaaaggcaaaatgatcccctgtggtaccggcaccgagctggataccactgttccgggtcaggtttcctgccgggtttcacaggacgtttactcagctgatggactcgttaggctgattgataaaggctcatgggttgacgggcagattaccggtggtatcaaagacggccaggcgcgcgtgtttgttctctgggagcgtatccgcaatgaccaggacgggacaatcgttaatattgacagtgccggaacgaactcactcggcagcgcggggattccgggccaggtggatgcccatatgtgggagcgtctgcgtggtgcgatcatgatttcgttgttctctgacaccttaacggcgctggttaaccagacgcagagtaataacattcagtacaacagcacagaaaacagcggtgggcagctggcgtctgaagcactccgctcttacatgtctatcccccctaccctctacgatcagcagggtgatgcggtgagcatttttgttgcccgcgacctcgatttcagcggcgtttatacgctcgcagacaactaa

SEQ ID NO: 480395 - DNA, 996 bp, Shigella flexneri
atgactgatgcagctttctatcaacttggcccactgcgcgagtatttagaagatcctactgtttttgaaattcgcattaactgctttcaggaagttatctgtgatacgttcagcggccgcagggttgtgcagaacgcggcaattacggcagattttattaggaaccttgctaaatcgttggtgagcagcaacaagctgaccatgcaggccattaatgacgtgatcctgcctggcgggatcaggggcgttatctgtctgccccctgcggtgattgacggtacaacggccgtagcgtttcgtaaggatttggcggccgataaaaatctggagcagctgaccagcgaggggattttcagtgactgccggaagattaccggcagcaagcaaagcctaacggatgatgattttttccttaaagagctgcacagcagcgaaaaatggcccgcattcctgcaaaccgccgttgagaagaaacgcactatcgtgatctgcggtgaaaccgggtcggggaaaacggtactcacgcgcgcgctgttaaaatcgctacataaagacgagcgtgtaattattttagaggacgttcacgaagtcacggtcgatcacgttgtagaagccgtttatatgatgtacggcgatgcaggaaagatcggccgcgtcagcgccactgatgccctgcgagcctgtatgcgtctgacaccgggccgtatcatcatgactgagcttagggatgatgctgcgtgggattatcttaaagcacttaataccggccatccaggcggtgttatgtcaacgcacgctaactctgcgcgcgatgcttttaaccgtattgggctgcttatcaaggcgacccctatcggccgtatgctcgatatgagcgatattatgcgaatgctctactccaccattgacgttgtggtgcatatggaaaagcggaaaatcaaagaaatttattttgatcctgaatataaaatgcagtgtgtgaacgggagcctgtaa

SEQ ID NO: 480396 - DNA, 534 bp, Shigella flexneri; identical to SEQ ID NO: 373449

SEQ ID NO: 480397 - DNA, 336 bp, Shigella flexneri
ttgaaggaatcacagtgtaagcaggcggcctatttcaaaaaaggcggctgtacggtagtcactgactctctcgcagatcttcccgctcatgtaccagtaatacccgtcagtgctgacaatatcgagcaaataccgcatatcataaaccgtatcgggtattacctcaccctcaccggccagaacgccgctggcaatagaatggttccctcctcgtacaaagcctatccgccagggcaaccacaaagtaacgcggtggttaatatcctgtacccacggattgcccttagcgctgcctatatgggggaaccgcagaattcggaaaaaatcgtacgctaa

SEQ ID NO: 480398 - DNA, 1071 bp, Shigella flexneri; identical to SEQ ID NO: 476467

SEQ ID NO: 480399 - DNA, 480 bp, Shigella flexneri; identical to SEQ ID NO: 480052

SEQ ID NO: 480400 - DNA, 480 bp, Shigella flexneri; identical to SEQ ID NO: 480052

SEQ ID NO: 480401 - DNA, 900 bp, Shigella flexneri
atgtatgtcgaagcggataaattgctggctaaacttaacctgcgctttaaaagcgacaagttagtgggcgatctttccatcggtgaccagcaaatggttgaaatcgccaaagtgctgagctttgagtcgaaagtcatcattatggatgaaccgaccgatgcgctgaccgataccgaaaccgaatccctgttccgcgtcatccgcgagctgaaatcgcaaggccactgtattgtctatatctcccaccgcatgaaagaaatcttcgagatttgcgatgacgttaccgtttttcgtgatgggcaatttattgctgagcgcgaagtggcatcactgaccgaagattcgctgattgagatgatggtgggccgcaagctggaagatcaatatccacacctggacaaagcgccaggagatatccgcctgaaagtcgataatctctgcggacctggcgttaacgatgtctcttttactttacgcaaaggcgaaattcttggcgtctctggtttgatgggcgcaggtcgtaccgaactgatgaaagtgctctacggcgcactgccgcgcaccagcggttacgtcaccctggatgggcatgaagtcgttacccgttcaccgcaggatggcctggcaaacggcattgtgtatatctccgaagaccgtaaacgtgacggtttagtgctgggcatgtcagtaaaagagaacatgtcgctgacagcgctgcgctacttcagccgcgctggcggcagtttgaagcatgccgatgaacagcaggctgtgagtgatttcattcgtctgtttaatgtgaaaacgccgtcgatggaacaggcaattggtctgctttccggtggcaatcagcaaaaagtggcgattgcccgcggtctgatgacacccccaaagtattga

SEQ ID NO: 480402 - DNA, 345 bp, Shigella flexneri; identical to SEQ ID NO: 477075

SEQ ID NO: 480403 - DNA, 2898 bp, Shigella flexneri; identical to SEQ ID NO: 7675

SEQ ID NO: 480404 - DNA, 606 bp, Shigella flexneri; identical to SEQ ID NO: 7674

SEQ ID NO: 480405 - DNA, 204 bp, Shigella flexneri; identical to SEQ ID NO: 31842

SEQ ID NO: 480406 - DNA, 267 bp, Shigella flexneri
atgttgggacttgaaccgaagaacacggcggtgcggagtccggagagtaacggaatagcagagagcttcgtgaaaacgataaagcgtgactacatcagtatcatgcccaaaccagacgggttaacggcagcaaagaaccttgcagaggcgttcgagcattataacgaatggcatccgcatagtgcgctgggttatcgctcgccacgggaatatctgcggcagcgggcttgtaataggttaagtgataacagatgtctggaaatatag

SEQ ID NO: 480407 - DNA, 441 bp, Shigella flexneri
atgttttttttatttattatatttaatggcgtttcaacatccaaaaatctatttttgaatgatactctcgcaagacagaaagatatctctttagctaaagaaatatcatacacatctcaaacaaaaggcatttcccttaacggaaaatatatatatatatatggttcaaacgactcaggaaatatgctctccatgagcgcagacacttttggaaaatcttttttttggtgggatggtggcaactattttaggatggttgcatttatgaattactatggaatctgtaattgcaaaccagcaaataaagaacaaatagagaagatttatccaattgtgaagagtttaccttcctggccgaatccagattcgatagctgaaataaatggtttggtgataataaaactatcagagaaaaaagggtggcttccatttaatatttag

SEQ ID NO: 480408 - DNA, 462 bp, Shigella flexneri
atgctccacacactcactgaccagatacatttccaccgacgaaaaacgagcgccccggttcaggatggcatcgagcaccacgggcaggttttcgtcgtattcatcgagccagcaggggtgatcgctttccttcaccaccaggcgaaagcggcgcgtctggcgggtcagcaacgtctgaccggtggtggtcagcgccgcacggatacgccgcgcatcttctgccacctggtaactgacactgcatactgcatcgcgtaccgcatcaagaacggccctgatttcgtcttcggtcagccactcaccggcatacgggaaagacacctgcgttccgtctgccggaagtaccggcagcgactgccactgactgccggacagaacaagttccgctccggttccggtcagtttgtgaatggcggaggccaggagcggcggcagtacgccgccgtgacggttgataagtaa

SEQ ID NO: 480409 - DNA, 267 bp, Shigella flexneri
atgcttacacaaactatattcccttgtcttccacaaaaacaagaaaatatcatccttgaagtatcaaatcctgtattattatcttctactgttactacagatggatatactgttttcaataaaaaagcagctatatacgaattacaaatacctgctgccagccggacgaaaacgttgaaattcactgctacagaaatgcaatggttgacaaagataaatgaagccggaattgatgaaaaacaaagccaacggcattctgatttctga

SEQ ID NO: 480410 - DNA, 957 bp, Shigella flexneri; identical to SEQ ID NO: 476538

SEQ ID NO: 480411 - DNA, 303 bp, Shigella flexneri; identical to SEQ ID NO: 473532

SEQ ID NO: 480412 - DNA, 447 bp, Shigella flexneri
gtgttgaatttagtgagtgataaagcggaattactggtgtttttaagtaaagaaagaaatagttcaaaagataccgaacttgataaattgaaaaatgctctgattgttgaatttccgtatatcaaaaatattaaattcaactatcttagcgatcataatgcaaggggggatgctaaaggtattttcacaaaggtaaatgtccagtataaagagatttgtgaaaataataaagttacatattctgtcagagaagaactgacagatgaaaagcttgagctcattaatagactgatttctgaacataaaaatatatatggagatcagtatattgagttttctgtacttttgatagatgatgattttaaaggtaaatcatatcttaacagcaaagacagttatgtaatgttgaatgataaacactggttttttttagataaaaataagtga

SEQ ID NO: 480413 - DNA, 225 bp, Shigella flexneri; identical to SEQ ID NO: 475456

SEQ ID NO: 480414 - DNA, 645 bp, Shigella flexneri
atgagcacaaaaccactcttcctgttacggaaagcgaaaaaatcatccggtgaacctgacgtcgtcctgtgggcaagcgacgattttgaatcgaccagcaccactctggactatctgctcgttaagtcaggtaaaaaactgagcaactattttaaagctgttgccacaaattttcctgtcgttaatgaccttccccctgaaggtgagatcgattttacctggagtgaacgctatcaactcagcaaagactccatgacatgggaactaaaaccgggagcagcgccagacgacgttcaccaccaggataatgctcaagaaaccaaagaactggcgggaggccaggaagaaaacgcgcaggcagacgcccacgaggattgccaggattgcgaagtctctgtagccactttgcggttcacacagcgtcttctgcacatttttacgtatgctgccggggatctgaaatacctgcatcatgccacccgtgaacaacgcaaacacattactgctcttgagatggatcaggaaaacagctatgtccagaatctgctgttggccatacgcggcatggcagaaccgacaactctggataatgccgccctgctccgcctgactgatgcaattaaggctgaggtgtactggcaatag

SEQ ID NO: 480415 - DNA, 618 bp, Shigella flexneri
atgtctctggcgcaatgcccgggctttttattcgcacatcgtgaggaatgcaccgtggaaattaaaaaaatcattaatccccgttataccgaaagtggcgcagtagactgtgacgttttttttgacgacagggaccaggcagtcccctacacagccaccgctgatgatgtcgctccgacgggtcagcaaatctggcaggaactgcaaagcggcaaatggggtgagatagccccattcactgtgacaccagaaatgctggaagcggccagagaggccagacgtcaggaaattgaagcatggctcgcagaacaggaggcgaaaccgctcacgtttgaatggaacggtcgtatctggaatgctggtcccgattcactgggccgcctgtccccggtagtcatgctggcaaaatctgtcacagcacaaacacatatggcgtggagcgatgccgataatcagcaggtgaaactgtcgatgccggaactggaagaactggcggcagcaatggtgcaggcgcaggtcgatcgcaacgatgagatttatcgccgtcagcgtgaaatgaaagaggagctgagcggtctggatgatttggcttcaattcgggcgtttgacgttgagtaa

SEQ ID NO: 480416 - DNA, 267 bp, Shigella flexneri; identical to SEQ ID NO: 462029

SEQ ID NO: 480417 - DNA, 543 bp, Shigella flexneri; identical to SEQ ID NO: 475669

SEQ ID NO: 480418 - DNA, 210 bp, Shigella flexneri; identical to SEQ ID NO: 477043

SEQ ID NO: 480419 - DNA, 435 bp, Shigella flexneri; identical to SEQ ID NO: 476567

SEQ ID NO: 480420 - DNA, 318 bp, Shigella flexneri
atgaacatggttgagaatatgctcgatcaggcattcaaaaagcttaatcctcacgagcatcctgttctgcactctgaccagggatggcagtatcgtatgagaagatatcaaaatatccttaaagaacatggtattaaacaaagcatgtccagaaaaggcaattgtctggataatgctgtggtggagtgtttctttggaaccttaaagtcggagtgtttttatcttgatgagtggatttgcccctatatttccagacatctgttatcacttaacccattacaagcccgctgccgcagatattcccgtggcgagcgataa

SEQ ID NO: 480421 - DNA, 156 bp, Shigella flexneri; identical to SEQ ID NO: 474739

SEQ ID NO: 480422 - DNA, 294 bp, Shigella flexneri
atgtatcgctggccttgcacacagcggcttaaggaagccggattactggcatcaacaggaagtacaggcgactcgtatgacaacgcgatggcggagagcatcaatggtctttacaaagcggaggtaatacaccgtaagagctggaaaaaccgtgcagaagtggaactggccacactaacgtgggtggactggtataacaatcgacgattgcaggaaaggctgggccacatccctccggcagaagcagaaaaagcttattatgcttccatcggaaacgatgatctggcagcctga

SEQ ID NO: 480423 - DNA, 480 bp, Shigella flexneri; identical to SEQ ID NO: 480052

SEQ ID NO: 480424 - DNA, 195 bp, Shigella flexneri
atgctggagaatgagtaccctcagagggtggctgaccggctgaaagcatccggtctgagcgatgatgcggatgcggagagggaagccggtgcacaggtgatgcgtgagactgaacagcagatttaccgtcagctgactgacgaggtactggccctgcgattgcctgaaaacggctcacaactgcaccattcataa

SEQ ID NO: 480425 - DNA, 195 bp, Shigella flexneri; identical to SEQ ID NO: 474694

SEQ ID NO: 480426 - DNA, 195 bp, Shigella flexneri; identical to SEQ ID NO: 464447

SEQ ID NO: 480427 - DNA, 195 bp, Shigella flexneri; identical to SEQ ID NO: 464447

SEQ ID NO: 480428 - DNA, 138 bp, Shigella flexneri
atgggcaactttaatgttaaggaagtagatgggtgcttcatggatgcacaaaagatagctatagataaactattttctatgctgaaagacggggttgttttaaacgaccataataaatcatttggaatagaaaaataa

SEQ ID NO: 480429 - DNA, 267 bp, Shigella flexneri; identical to SEQ ID NO: 476582

SEQ ID NO: 480430 - DNA, 189 bp, Shigella flexneri; identical to SEQ ID NO: 463227

SEQ ID NO: 480431 - DNA, 582 bp, Shigella flexneri
atggctgatatctttaatgttagcttgttggatgttttacctcctaacttagctagcgatcccaacgtgatagctatgtcgaaagctatcgatgatgaactacaagcaattaacaatttaatatataagacagaaatatatagcgttgttgataacctggattcagttgtcctcgatcatttagcttggcaatggaatgctgatacatggagggatagttggcctgtatcgttaaagcgttctgttttcaaatcaataatacgaacaaagcgaataaagggtacaagagcagcggttgaagatgtagtaaatagcttgggtggagaggtaaacataatagaatggtttgaaacatcaccacctggcgaaccatatacagcctcaattgttgcttcgattaactcttttgatggtgccgttccttcgaaagagatgttggaagatacgttaagaagtatcaagagcgcaaagtcggcaagaacattatttacattttcgcaagcagccaatgtttctggtggtgtcggtattgttggtgcttgtcagcctgtgtcttatatacgattaattggcgagtgttaa

SEQ ID NO: 480432 - DNA, 1125 bp, Shigella flexneri
atgacgttgccgcgtggtggtttgccagatattactttcgcagattctaacccgactgatataacaactcgttcaatcagggcttttgagagtataacaggtgaaacattagcacctgctgatccacgtagattattcatcttatcattgtgtgagattattatacagcaaagaaaagctatcgatttttctgcaaaacaaaaccttcttacatatggtgaaggtgaatatctcgaccatataggctatctgacggatacgcctaggctggaagctcaatctgccttgactacatttgagtttaatctgtcaacaaaattatcggggatatatacaatacctgctgacactcaagtttcaactggaaatggtgttattttccaaacagatattttgttggaaatacctgctgggaaaacagttggtacagtctcaggatatgctgttatacctggtttatctgggaatggctttttaccagggcaaataaatgagttggtgactccgttgccgtatgtttccagcgtaaggaatgtaacaacatctaattctggtgctgatacggagtcagatgataattatgctgaaagaataaaactgtcgccggaaaaactgtctacagcagggccggaggattcttataaatattggacaagaacagccaatcagaatataaaagatgtgaatgtatatacaccatcgcccggaattgtagaaatccgttctttgttagagaacggagatataccttctgatgaactattagagcagataaatagcgttctctctgcaactaatattcgaccattcacagataaagttcttgttaagaaaccagagagcattgaatacgatataataattaaatactggattaactcatcggacaaaaacagaacaactttaattcaaagtgaggttgagaaagctattgatgagtataaacaatggcaacgttcggttatgggaagagatataaatccagatgaaattattcaacgtttaaaaaatgctggggctaaaagattagaaatatcaagtcctgtttttactgtggttggagagacacaggtcgccagagagagaaatataaattgccagtatgcggggttagaggatggctga

SEQ ID NO: 480433 - DNA, 321 bp, Shigella flexneri; identical to SEQ ID NO: 468015

SEQ ID NO: 480434 - DNA, 468 bp, Shigella flexneri; identical to SEQ ID NO: 468016

SEQ ID NO: 480435 - DNA, 621 bp, Shigella flexneri; identical to SEQ ID NO: 468017

SEQ ID NO: 480436 - DNA, 1002 bp, Shigella flexneri
gtgttacgtaaaacgctttttgatgttgtatatcagaatgtaaatattaccgctcatatgtcacctgatgttttgtcaatgtcttatacagataatgaagatggtcaggtcgatgatatttctattatattaaaaaatgatgatgggaaatggtctggagactggacacctaaaaagggtgattttattgatttgagctttaagcctataaatcaaatcgtccttgagtgtgggaaattccaggtggatggcataacttgctctggaccaccttctgttgttgaggtgactgctgtttctgttcctgtttcatcaggcattagacgtgatttaaaaagtaatgcatgggaaaaaacaactcttaaagatatagcgacttctatagctaaattagctaaccttgaactgttgtttcttattgatggtgatagtaatccatattatgcgcgtgaagatcaaatggaggaaagcgatttaaaatttctccatcgactttgccaggatgaaggggtgtcgttaaaggtcactgatagccaattaataatatttgctcaagagatgtttgagcaaaaagatcctatcgctacgcttacgttaggtattgatgagataatcagatatagctttagcacacaatctacagatttgtataaaagttgcacgtgcaaatatcgcgtacctaaaaaaagaaagtcgctttcgtatacttgggtagatccatccgtagaagaaggggcgaatcttaagataagaaaactggtagctaatttagatgaagcaaaacgtaaggcaaaggctgctttgcggcttaaaaatagatatcaaaataccggatctttagttttggttggagacaccagattggtagctggtgtaactataaatctggacggatttggttcattttctggaaaatatcttatatcgaaagctgtgcattcaattggggctagtggttataccacctcgattgatgtccgaagagtaattaatgggtattaa

SEQ ID NO: 480437 - DNA, 2793 bp, Shigella flexneri
atggccagcaataagaactttaagctggcttttgaaattggcggcaaagttgccgcctctctccccaaaagttttactacagctaatcaggctgttgctaaattaaatgccgagcttgctggattaacgaaagaacatggggaaattcaaaagctacaatctgtaaaagtaaaggttggacagactgccctcgaatatcataaagctgccgctcgcgttgaagagttacagaagcaaataaaaaacacggccaatccaaccagagcgatgcttcgtgactttgagaaggcaaaaacacattcatcgaatttacgagcatcactacgttctcagcgtgaagaactggccgctttaaagtctgcctatcagggagctgatacatctgccagagctttggcctcaagagagaaagagcttaaagccagcattgatcgtaatcgtgaggctcaggcccgtagcgttgagcaggttaaccgctacagaacggctttggctttagccagagcaaatgttcagcaagtgaaaaaacagcaggaggaacttaaccgggcattagaaaaacaacgtattgataaaattaacagctataaaaatgcgttggctgaagcacggaaaaatgttcttgcagtaaaacgtgctcaggaggagttaaaccgcgcgttggaaaggcagcgtgaattgaagcgagagcatcttggtgaggcaaagagtcaacttgtaaggtcaggattacaaactggtgctgtagcggctggtgcatttgctgctgctaacaatgcagcaaatttcaatcgtgaaaacaaaatgattggtcttacggcagatatgaagccggaagaagttcaggcgatggggcaggcgatgcttgttaccggaacggccaccaaccagtttgcatctgatattcaggccgctcagggttttcttgtcgctgctgggcaggattataaagaggctcaggcgaatctactaactattgggcgaacagctacagctactggctctgatatcctcgatgtctcgaaagcatcatttacattaagtgactcattgaagattgatccatctcaaatgaagtctgcaatggggattctggttcaggcagggaaagagggaaactttgaatttaaagatatggccaaaaatcttcctgtgcttggtgctcagttccaggcattaaaaatgggaggtaaagaagccgccgcgacgatgggggcagctttgcagatagctcgcaaaggtgctgcaacttcggatgaggctgctaataatatgaacaactttttggcgaaaatactttcccctgaaacactaaaaaaagcaaagaaaaatttcggtgtagatttatataaaattgtcacaacagcgcagaaaaaagggaagaatccattcgaagctgcaatgcattctgtcatgaaaatgactaagaacggagatcagaagttacttggtgagctatttggcgatatgcaggttcagaactttgttcgtccgatgattcaaaactggaaggaataccagagaatcaaagcaacatctcttggagctggaagtgctgttattgaccgcgattttgccaacataacgaaagataatgcggagcgattgaaacaattacgtattcaggctagcaatgcatcattaagttttggtcaggccttgcaacctgctttgaatgccgcgcttagtgttttggttccgctgattacaaaaattagtgaatttgtagctaacaaccccaattttgtgtctcagatagtgatggcggcaggtgcgtttctaaccatgaaaagtgtggttatagcgtgtagggtagctatgctggctttatctgtagcgacaaagctaacacccttcgggtggattcagatggctatatctgcgctggttgccgcaggaatattgctctatcagaactgggataagatcagagattatgctgtcagagtttggccttctgttaaggaatatacagttaaatcgtttgaggctataaaaaactttatcttaaactttgatctcaatggatggattatatctatgtttggtaaagcatgggattatctttccaacataaactggagttcggcaggagtaagaatttacagtacattaattagtgcttttaaatggatgtctccgcttccgttcttaattaaagcatttaaacttacaacaaattacctttctggcattaactggagcgaaacaggaaagaaaatcatagatacactggtgtctgtttttatgcgtttttcgccagttggactctttataagagcattccaatctgtaacggcttatttatctggaataaactggagtgagtcaggtgcaaaaataattgagacgttaatcactgggataaaatcaaaagcaaatgctttaattaatgaagtgaaaggcgttttttcttctgtacgtgagtatttaccgttctctgacgcgaaaaaaggtccattctcacagctaacaaagtcaggtggtgcaataatgactactctggcatcaggtgttagcaggaataacagcttacagaatgcaatagcaaccaagttcgggcaatcaaatttatcacctcacgggatatctgccgccgggacttctggacctcgccagaacgttaacgctgtgactggtggaataacctattcacctgtaatcaatcttccggctggttcaccaaaggaaactgaggcggcagctaaaagagcattagatgcgggatattctgattttgagaagaaattgagtgctcatatgttccaacaacggagattaagttttggatga

SEQ ID NO: 480438 - DNA, 282 bp, Shigella flexneri; identical to SEQ ID NO: 468020

SEQ ID NO: 480439 - DNA, 522 bp, Shigella flexneri; identical to SEQ ID NO: 468021

SEQ ID NO: 480440 - DNA, 1464 bp, Shigella flexneri
atgggatatcgccacggtatttatatatctgaactggctacatctataactcctccagtgcaagttagtgctgggttgattgtcgcatttggtacggctcctgttaatcagttagaagatccagcctcagcggtaaataaacctatcattgcttatacatacgcagaggccgtatctaaaataggatatagcacaaacttcgagaaatatactttaagcgaagtaattaaagtcgcatttggaatatatggtgttgcgccagttgtatttatcaatgtgcttgatccagcaaaacataagaaagacgttactgatgagttagtaaaactttctggcgggaaaggtacgctctctaacgatggtgtcttatataaatctgttgttgtgaaaaaagcagatggtgattcgcctgggttaacgcttgataccgattatgtgctggcgctggatgataatggctatacggtcattacagctattagcggaggaaaaattaccgaaaaagacgctactcttaaggttagttatacgcatcttgatcccggtgccgtaactaaaaatgacattatcggtggtgtggattccaacactaaagccaatacagggcttgagttactgtcagatgtgtatccccgcttcaagttagttcctggacaagtgattgcacctggatttagttctgatagtgaagttggtcagctaatggcggctaaagccgcgctgattagtgaattgttcaaagcagaagctataacggatgcgccgaccgataaatctactatcagtgattactcggctgttcctgaatggaaacagaacaataatcacatggccgctaaccagacagtgtgctggccgatggtgaaacttggtgacaatatttaccatcactcaacccatttagcggccgcaacatgcttgctggatagtcagtatggtgatattccatcacgttctccgtcaaatataaaactacagatggacggtgctgtacgtaaagatggcagtgaagtatggcttaacattagccaggcaaactacttaaatggacaggggattgtaacaagccttaattttgatggttggaaatcatggggaaaccgtaatgctatttatccaacatctacagaccccaaagacgcatttcgtgtttgccgacgtatgtttaactgggtgggtaatacgttaattctttcgcattggtcaaaaatagacaatcctgcaaaccgtcgattaattgaatcgattgttacaagtgcgaatatttggcttaacggcctcacaggtaatcaggatattgcaggtggtgttgttacctttgatcagtctgaaaacacgattacgtcattaatggacgggattgttaaattccatgtaaaaatgacaccattctcacctgccagagatattgagttcgtcatggaatataatcctgattatctgctgaacttgttttctgaataa

SEQ ID NO: 480441 - DNA, 291 bp, Shigella flexneri; identical to SEQ ID NO: 468023

SEQ ID NO: 480442 - DNA, 486 bp, Shigella flexneri; identical to SEQ ID NO: 468024

SEQ ID NO: 480443 - DNA, 345 bp, Shigella flexneri
atgaactcctttaaagaggttatagcgcaagatatttctgcaatattcctcaatgaaaaagagtttgccgatacatataacatagacggcaaggatatccttgccgttattgatacagaccttattcatgagcggaataaacgctcatatgctgagtttgcagagggaataaatcaggggcaaataatattatttgtttcaagaaaagattttcctgttctccctgtcaaagaccagtcaatgaaaatcaacggtaaaaattatattgttaatgaagtatcagataatgttggtgtattggaaataactctcactgttaatactaacagaggaatgccgatttga

SEQ ID NO: 480444 - DNA, 393 bp, Shigella flexneri; identical to SEQ ID NO: 468026

SEQ ID NO: 480445 - DNA, 1044 bp, Shigella flexneri
atgccgaatattgatatttttgaacgacgtacaatgcttgagcctgttattcagaatttcaaggctcgtcgttttcttcttcgtaccttttttcctggtgttcagacctttaatacaaagaaagttgatctggattttgttcgcggtggccgtactatggctccgtttgttggtaaaggttttggctcaaaaaccgttgagcgacgcggctttgtaacgagaactctggagccaccacttgttgcacctgatttggtaacaacagccgagctgcttttaaacaggcttccgggtgagaatatttacaacgcaaaatcgccagcagaacgagccgccgagcaattaggtaaagatttgcttgagcttgatgaaatggttaaccgccgtgaagaatggatgtgtgcacaagtcttgtttacggggcaggttgatattgttggtgaaggagtggatgacacagtttatttttggcctgaagaggaaggagataaaccatatcttgaactgacaggtgatgatttatggagtgcagcaaactcagatccgttagtaaatgttcgcaactggaaacgtcgggtatcactaacttcaggttttacacctcgtgttgccgtaatgggcgcaaaagttgttgatgctttcgttaaaaatgaagcagtaactaaatatcttgataatcgccgaaaagagcttgggtatattgagcctaaggagttagaagaaggcgtaactcattatggcaatcttgaaggtgtcgatttttatggttacgacgaacttattcgcaatgataaaacaggaaaaccagaaccattagtaccggaagataagatcctctttggctctcctggtcgaggaacgatgctgtatggtgctgtagagcttgtagatgacgccgaaaagactctaacgattgttgagtcaccacgagttccagacacctgggtaactcgtaagccggctggccgttatgttgccatgaagtcatctccactgcctaatcctggtgtggctgatgcctatctggtggctaaggtggtttaa

SEQ ID NO: 480446 - DNA, 384 bp, Shigella flexneri
atgcgagagtctttttcatttgaaccagataatctgattatttctggtggtatgccagcaattacaacaagtattaaacttgccagcggtaaagtaaatcgaggtgagttgcttgcttttgtcagtattgatcagacaacaaatgttgtcactgtggcaccaataaatctctctggtgagggggtggcaaaagaaccgtattgtatcgctcaacatagtattgatgcgactgattcagcgcaagttggaacagcatggctgaccggaatgttcaatgcacacgcagttatccttcctgaatcagcaaagattgccgatgtatatctggcttgtcggaaggttgggatattccttaataccgcacaacaaaatccatctgcataa

SEQ ID NO: 480447 - DNA, 1065 bp, Shigella flexneri
atgcctaattggtgggaaataaaaaatagcacgggtgaagatgactctccggctgaacttttaatttacgggtatattggtgaatttgatgaggtttcttcttctgacatagttaataaattaaaggatatttcatcaaatactatcagcgtaaaaattaatagttatggtggttctgtttttactgctcaagctattctttcatcattaaagcgtcataaggctaatattactgtttatattgatggtattgctgcatcggctgcaaccattattgcaatggcaggtgataaagttgttatcccatctaatgctatgatgatgatccataatccgtggacatttgctgctggtgatgcggatgaactacgtgatattgctgagatgatggataaggtacgagatagtattttatctgcatataaggagaaaacagggctttctgaggataaattaattgaactaatggatcaggaaacatggctaaatgcagaagaggctgtagagcttggatttgctgacgaagttgaaaaaccaatgcgcttatccgcttctataaaggaagggatgctttcgctcaatggaataacttttgaagcatcaaggttttcaaaattacctgattcgctcgcaaagttgccacaaaataaaaatgaattatctactgaatcaaatgaacaaaatgaggacgatgttgtgactcttgatgaattaaaaaataaacatccagaattatacaatcaggtttttaatgctggtaaagacgagggggttaaatcagaacgcgagcgcattgaaacaatcgagaatagcgtaattccaggtcatgacgacctggttaagaatgcaaaattcaaaacgggaatttctgcggctgaacttgctttggaaattatgaatgcagagcgagcgcgtaacaaaaactttcttaatcaacggcaagaagacgcaaatgaggtgaataattcagttgatgttaatcaaccagaaaacaacggcgataaacaagctgaagtagtaaaaaatgttattgggtcagtatttaaaaatcgcgataaaaattaa

SEQ ID NO: 480448 - DNA, 1575 bp, Shigella flexneri
atgaatattcttgatcgagttattgcgccgttttcacctcagagggcattaaatcgagctttggcaagaaaacggttagaagcacttgaaggtattaataaccttggatattcacgtcatggtgcaagcactcataaaaaatcattaaggggttggtttagtaaagctggttctcctgatgatgatattgttaaaaatatagataaattgcgtgagcgttctcgtgatctcttcatgggaaacccgctatcggttggcgcaataaaaactatcaggacaaacgttgttggttccggtttaaaactaaatgcgaacattgatgccgatttcttggggatgacgcaggaagaagcgcgagcatgggaaaaacatgttgagcgtgagtttagattatgggctgattctccaaattgtgatgcatcaagaatgtgtacttttggacaattgcaatcattggttcaaatatctgcgttaacatctggcgatatatttgctgcgctaccagttattaagcgtaagggtgttatatatgatttgtgcgtctatttaattgaaggtgatcgtgtttgcaatccagaggatcgttttatactaaatctttacggtggcgtagaggttggtgagtttagcgagcctgtggcgtactgggttgcaaaacatcacccagccgggacttctggttttgtaacccgcaagtgggaacgtattcccgcatatgggagtaaaacaggaagaagaaatattctgcatgtcatgcaggattttgaaaggcctgggcaacgccgtggcgttcctgtccttgctcctgtaattgaagcattgaagcagttaggacgatacaccgatgctgaattggttgctgcggttgtgtcagggatgtttactgtctttattaaaacagacgctcctgatgggccagtcggtgaatcgggtatccctcagtacgagcagatcgataaccatgatgataacacccaagaaatggggaatggctccatagtaagtttgggtgaaggtgagtcgatagatacagcaaatcccgggcgaccaaatacggcatttgatggttttgttgtcgccatatgccgtcaaattggggctgctttagaactcccttacgaactcttggtaaagcattttacagcaagttatagcgcaagcagggccgcattacttgaagcctggaaaatgttccgtatgcgacgtgactggatggttcagtcattttgccaaccgatctatgaggaatggttggccgaagccgttgctaaaggtcgtgttattgcccctggttttttttatgggcctgaatatcgcgcagcatggagtggcgctcaatggtatggcccatcacaaggccaattagatccccttaaagaagtcaaagctgcaaaactgcgtgttgaggaaacattctctacccgtgaaaaggaagcggctgaaatgtcaggtcttaactgggaagaaaccgcacaaatctgtggcagagaagagaatgctcgccgtgagttggggcttattacacctcctgtttctgaggtaaatgaacaaaatatggagactgatgatgcctaa

SEQ ID NO: 480449 - DNA, 240 bp, Shigella flexneri; identical to SEQ ID NO: 16739

SEQ ID NO: 480450 - DNA, 1857 bp, Shigella flexneri
atgggcgaaacagtatggagcaccgcttttttccgtgcgcttcgccctaaatcacggctaactgtttccgaatgggctgataagtatcgtcatgtagcgccgggaacgtctccagagccagggccgtggcgtacaagccgagtgccatatttgcgtgaaccaatggatgttattggtgacgctgatacagaaacagtagtgatgcaatgtagctcgcaaattggtaaatccgaattacagctaaatgttatgggttactttgcagatcaggagccatctcctcagttgatgatttatccaacggtagaggcggctgaggctttttcaaaggagcgtattgatccgacgttcaaatattcccctggtttgaaacacaagctgcatgaagggaaagaggggcgcggtgcagccaaaaagtccagcacgactatacgtatgaagcattacgctggtggatatatagcacttgttggtgctaattccccagcaggtcttgcatccaggccaattcgaatactgttaggtgatgagattgatcgttacggtgtgacgcaggagggcgacccactaaaactaggtattcagcgtactaccaactttcataatcgtaagaaagtttttgtttctactcctgttttggaggaaacgagcaaaatccacaagtggtttaagctctccgatcagcgttactaccatgttccttgcccatgttgtggcaccatgcaggtgatgaaatggtcgcaagtcagatgggataagagcgattcaggtgaggcgttaccggaaacggccagatatgagtgctgtgagtgcggcgggattatgcgcggatctggtaaaccagacgttgattggttggcaaagggggtatggatagctgaacatactggagttaaaggtattgttggttttcatattaacagtctttactccccgtgggttgcattgtcagagctggttgaagaatttacggaagcaaccagaaaccgcgataaaaatggattaatggagtttattaaccttaagctgggtgagccatggaaagaggatgctaaagacgatatcgatcctgaatacttgttgcaacgcagaataaggtttgaagagtttttaccagatgatgttttattgttaagtgctggtgttgacgtacaggacacgtatttagtttgtgaattggtcggttggggaaaaggtaaggagtcatgggggatagaatataaaatattcccaggtgatcccgcacaagatgttgtctggaaacaacttgatgaatacttactccgtagctggtcattccgtgacggtcgaaaattacagatttcttctgtttgtattgactctggtgggcattttacgacagaggtatatcgcttcactaagctgagagaatcaaggcgaatatactctatcagggggcgtggtggggtaggtttaccatttataggaaagccaagtaataataaccgtgtgggtgctatgttgtttaatttgggggttgatgatggtaaagggaccatcatggcaagaattaaactacatgatcctggtcctggttatatgcatttcccattagattctgacagaggatatgataccgaatactttaaaggattattatcagagaaaaaaatatttgaatataaaaatgggcagacaaaagaaaagtgggtgaaagtctacgagcgtaacgagcctcttgattgccgtaactatgcaactgccgcgatggaaattctgaaccctaattttaactggcttgccgaacaggaaatgcgaggtaatgtgtatgtgcagaactcgtcaggtatacgtagaagacgccgtagagttataagtaaaggcgtaaacatatag

SEQ ID NO: 480451 - DNA, 552 bp, Shigella flexneri
atggccatcgtcagtaagtcagagtttgcccgccggaaaggtatttctccggcaatggttacgaagctctgtcgttccggtcgcattccagtgctgaaaagcggcaagctggattttgataaagccagtgcggcttatgaagcgagccgacaggttggtcgtgaggtatctgctgaaaatggaaaaagagggcatgggatatcttcggaacaaccagagttacccgctgatgatgccggattagctggtggtacttccggtgttgcggtgcaattcaacaaggctaagaccgcagaaaaaatttatcaggcaaagctgaaacgccttgaatttgaagaaaaggaaggctctctcatcgctaaagatgcggtcagggatgatgcatttctggcagctaatgaattgcgtagccgcttatttagtattgctccaagagcagctccccgttgtgaaggcaaaacagccagggagatcgaacgcattattgaagacgaaattaattttgcgcttcaggcgctccaggaatcccgatttattaagcaggaagaataa

SEQ ID NO: 480452 - DNA, 591 bp, Shigella flexneri
atggctctaaaaatcgaatatttaccagtcggtaagctgctcagatacgccaaaaattcacggactcattcagatgagcaggttgaacagttggtgaacagtatccgtgagttcggtttcactaatcctgtgctgatcgatgaaaagaatgaactgattgcggggcatggtcggcttgcagcagccgaaattctggaaatggataaagttccggcgattcggttgagtaacctttctgaaaaacagaagaaggcgtacaggattgcagataacaagctggccttaaatgctggctgggatatgcagcttctggccgaagaagtcaaagagttaatggatgatgattttgatattgatctgcttgggtttaatgatgcagagcttgacgaaatgttaagcgatgaacaaccgcaggaagaagacgataattcttcccctgttgttcaaattaagtacctggctattgataaagaacgtattcccgcgacggatatggaaattgcattgttgctggatgtttatcgtcagtaccacgacgcgcatgaaacgcatgagggatttgttcagtatcttgctaatggttgcaagtaa

SEQ ID NO: 480453 - DNA, 720 bp, Shigella flexneri
gtggctgacagaattgagataaagatggatttttcttctcaggatattcaacgacaactccagcgccttgaagaacgcgaattgccgttcgcaatggcgcttgcggcaaccagaacggcaaaggcttctcaggctgcgattaagaatgaaattaatcgggtatttgacaggcccacgccgtggattcagaactctacttacgttttggccgcaaagaagagtgatcctacagccattgtgtatgctcgtgaatggggaggaacgccagcccctgtaacgttgactccgcaaattgaaggtggccaacgacagtacaaacgctcagaaggggcgctaagggctggtggatatttgcctaacggctggcagcttgctcctggtcccggcgcaaagctggacaaatacgggaatatttcgcgggggcaattacagaaggtcttatctggcctaagagttcagcgagatgcgcatcaaaatcgccgtcagggcaagcctacggagttttttgttgttcgacctggtacaagtaacccgcttcaaccaggcgtctggcagcgcgttgggcggcgtcctacgttgatccttacgtttatccagcaacctaactattcgcagcgtcttgattggcatggcgtggcgctgcgtgttggtgaggatgcgtttgctgatgaagtcacaaaggctattgatgacattctttctaagaccttctctcgttaa

SEQ ID NO: 480454 - DNA, 1374 bp, Shigella flexneri
atgcttcacctcaattacgacataacgcacctacgcggcgcggaatataacccgcgttttatcggtgaggatgatcttgcgaggctggcggaaagcgtcagggagctggggcttgtgaagccattgatagtgcgcggcgatttgctggtggcgggacaccaaaggacgaaggcgctacgtaaattgggaataacgcgtgctgcggtgtatgtgttgccctgtgaaacgacggtatacgacgaagtacggtttaaccaactgcataacggaacggattttgatagcggagatgagcgttgcagggtgtccggtctggaagataagcatggttttgttcaggtatcggcaagccagatctcaggcaatatgcgcgcgaaaatggcatatgttcgaaagaacatagcggaactggttatcaagtatggtccgtggggtggttgtgttgctactcagtctggtgaggttattcactgtgctcagtatgcattagcagcgaaaatgacgcgcacaccgctaacggtgtttgtgatccctgatgttgagaaggaaaaataccaaagttatctgaataaaacttatggtgtatttgagtattctcatctggagaaaacaacatacatccagacgtatgcgcagcttatgcggttgcgtaatggtggcagcctgaaatcaaatctgtatgagtcgttgatcctcccgatcgttgccaagacgccaagaggaattgattttggttcggggcagggagactacgcgcgaatgctcagggcaaagggatataacctgcatgatcttgagctttttcgccgtaagggcgctggaaacactctggatagggctgcaacaaaccgaatgattgatacgctggtggacgacttaaaaacgcgagggcgttacgactacgtgatttgcgatagcgttttgaactcggtcgatagtgtcgaggctgaatggtccgttctgacggttctgaaaggcctgtgtaaagctggtgggtcaatattcttttctggtcgtagccgtggagagctggaaacagtcctgaagcaaacacaagcggcgagttccaaaagccggctttattttattgatcataacggttttaccgcgttgtaccggaaggggcactggttttaccagaagtttcactctgatgatgaagtgaagcagttgtgtcgtgtacatggtttcaggattaagcggtcaatattcaactgtaagagctggtatttgcacgtcattaacgatgattcccttagttgggcgagtctggagaaagctgttcgttttgagtttgagttgccgttgcctggtggttcaacaatcggacgatctgatgatgtgctggcggctttccggccgttgattaagtag

SEQ ID NO: 480455 - DNA, 624 bp, Shigella flexneri
atgacaaaacatcttaatgtggtttctttaccactttctgtgttgattggttatgaaaagaacgctcgcacacactccgtggagcaggtagatcagattgttgccagcatacaggagtacggatggactaatccgatcctgatagacgagaacaatgttgtaattgctggtcatggtcgaattgctgcggccactcagttggggatggatgatgttccctgcattgttctggaagggctaacggagaatcagaagaaggcatatcgtctggccgacaaccgtattccgctgaatgctggttgggatgaagagttgttaagcgcggagcttgcagatcttgcggccgatgattttgctctggactcaattggttttactcagcgcgaactggataacttattgagtgcggcggtctacgatgacacagagggtatggatatcccatttgagaaggatgaggccaaatcaggcgtaaaagttcagtacctgtcatttggaggtcataaaatcccggcaacggatgaggaagcggatcgttttgactgcgcggtgtctcgttatgttgatgataatggcagctatatcggatttgtatccgcattgctggctggggaggtgtgctga

SEQ ID NO: 480456 - DNA, 408 bp, Shigella flexneri
atgcgcaccgatctagattatctaaaaaagatgctgactgtgtttttggattcagaaagcacgttcataacagtaaatcaactaagagatgcggggtttgatatagcctcagaaaagggcatgtttcattatatgcaattgattgagcaaggttttatcagcaatatgaagatggaaacgcgtgatcctctgcgtcttggctatgttaattcctttgcaggaatgaggactgttgatgtagatattagattgactacagagggacaggattttgcctgtgcactagagagcaaagatgttttcgctagactaaaagaaattagcaatgagccattggctgttatgaaggatgttggtgtagaacttctcaagtcattggcaaagaagaagtttggtttatctgattag

SEQ ID NO: 480457 - DNA, 153 bp, Shigella flexneri
atgaatggtcttggcatttttctgatggttgtggccgtgtgtttttgtatctcgctggtggttattgctggtgtcctgtggcgcatcttagtggcgcagagagcttttcggcgtaagcgggagcaattattgattgataaatttaggcagtaa

SEQ ID NO: 480458 - DNA, 300 bp, Shigella flexneri; identical to SEQ ID NO: 468040

SEQ ID NO: 480459 - DNA, 198 bp, Shigella flexneri; identical to SEQ ID NO: 468041

SEQ ID NO: 480460 - DNA, 270 bp, Shigella flexneri
atgaaagtacaagaccgtgaagtagtaaaaaacctcctgcaatacctgacctcaaaaaacctgacgggcagcgttgagttccgtgaagcgttaaaacatttcaacgtcactacggtttatcgttgggaaaacaaacattctgaaagaccgtatgtggtggatgtttttgcgcctgatattgagtgcggttttgagcgtcattcgttcaaggagaaacattctgctgattttttttgtgaggttgtatgtgcggcaggagatgatgagtga

SEQ ID NO: 480461 - DNA, 588 bp, Shigella flexneri
atggaggcaattgcattgtttaatctgatttatgcagatcccccctgggaatacaaagataagtgtaaggatgggaatcgtggagctggttttaagtatccaacgatgaaagctgaggatattgctcgtattcctgtctggcagcttgctaatcctgaatcgtgtttgttggccatgtggtgggttccgactcagccagaagaagcgttgctggtggtgaaagcatggggattcaggcttatgaccatgaagggcttcacatggaacaaatgtggtagccgacaaccagataagctggtgatggggatggggcatatgactcgtgcaaacagtgaagattgcttgtttgcggtaaaaggcaaattgccgacccgccttgatgcggggatcattcagtcgtttacatcgcctcgtctggagcattctcggaagcctgatgtggttcgtgacaagctggtaaggctgttaggtgatgttcctcgtattgagctgtttgctcgcggtgatttacctgatggttggcatggctggggcaaccagtgcaatggaggtatccagttgcatgatgctctctggcaagtggcataa

SEQ ID NO: 480462 - DNA, 279 bp, Shigella flexneri; identical to SEQ ID NO: 468044

SEQ ID NO: 480463 - DNA, 543 bp, Shigella flexneri; identical to SEQ ID NO: 31400

SEQ ID NO: 480464 - DNA, 297 bp, Shigella flexneri; identical to SEQ ID NO: 16724

SEQ ID NO: 480465 - DNA, 396 bp, Shigella flexneri
atgtcagcagaaccaatttccggtacggccgttgctgctggtggcctgatgggtgccagcgtttttggtattgcaactggtattgattacggcgttgtattcggggcatttgctggcgctgttttctatgttgctacagcggtgaatattagccgtctcaagctgattggctatttctttacatcgttcattgttggagtgattggagcgccgttagttggctcatttcttgccaaatggaccagctacaacgatcgtcctcttgatgcgcttggtgcggttattgtggctgcattgacaattaaaatcctcacgttcgtaaacagccaggatctcggtagcatctttggaatgctttcccgcttacgtggagggggggcaaatggtaagcagtga

SEQ ID NO: 480466 - DNA, 141 bp, Shigella flexneri; identical to SEQ ID NO: 468048

SEQ ID NO: 480467 - DNA, 210 bp, Shigella flexneri
atgtctattgccgcaagttacaccatgcatctctattgtgactgccgccagtgtacggaaggtgtatatccagtgccagacttcggtgagtatatcggtacgtcatgggctggctgtgcaaaagaggcgcgcaaggatggctggcgaataagcaaagacaaaacgcgtgcttttgcgccagggcataaagttttgaggattaacaaatga

SEQ ID NO: 480468 - DNA, 249 bp, Shigella flexneri
atgcaacagcagtcacatctctttcatatcttgggcgtgaggaagaagaataaagcgatgaaaaaccgtaaagcaaagatgcttatctcccgtgtatacaaactttgctatcccagccagtggttgagagttagcaatcgccgtgtggtgttgtacttatattctggaattgccagagagggagtcaaagagaagcgcagcgcggcgcaaaaccgctggaaaaaacacttgcgcactaaaggagcctga

SEQ ID NO: 480469 - DNA, 615 bp, Shigella flexneri
atgagcaacatcgacacactggcgctacgtgaggcagcagaagaagaaattatgctgcgaactgcaagcgacacgtcagataactggcaggatttagcaactccagaggctatgctggcactactggatgaacgggaagccaaagacaaagcatggtccgcacaggacaaccatatcaaccagcaggctgaacgaattgaatcgctggagaagaagaatggagagctgggcagagagctggaatccgcagagaagcgcattgcagaactgaaaaaacaatgcgctgaatgggagcggaaagcattaagcaattttgaagagtgtgctgcgatggctgaacgtatcgaagagttggagcaggctaccacagggcaggacgccaatgtaaacagccaacaggaacgcgtggctcaatcagctaataggcacgtatatcactacaacgcagtgagcaatgttagcggcattactatgtccgggattgcgcagtcacctttcagaatcaaatcgcaatccgaccttgaagagtttaaaagcgcacttagcaaggtttgtggtttccatgcaacagcagtcacatctctttcatatcttgggcgtgaggaagaagaataa

SEQ ID NO: 480470 - DNA, 234 bp, Shigella flexneri; identical to SEQ ID NO: 468052

SEQ ID NO: 480471 - DNA, 660 bp, Shigella flexneri
gtgagcgaaattaattaccaggcactgcgtgaggcggcacagaatgcgaaaaatttaggtgggattaagaattacaagcgaggcgagcaagctgttgccgaatttgagtccttgataacgccacatattgtgctggcgcttctggatgaaattaagcggctggaggacacaaatattgatgctatgtgtcgaattgcagagcttgagactaatctcgcggcgctggtggcggagaatgcggggcttaaggccggggctatgtatttctcatatggctctgaatttagtttcgagtgtcacaaaactgctgaggaggctatcgctgctgctgaggctgcaattgacgactatagaggcgatgcttgcgatggatggagcgaagaggtcgaaagcatttgctggggggtaattattcagcaggcaaccaaggtcggtgaacgcaagaagaggaaatgcgacagagtatcaccatggattgaaagagtttgtgattatgagcttcgacctaatgtcgaaaccccagccaccgatgctttcctggatgaagtacgggcgcagggcgtggagatgatgcgcgaacatccatcaatcaaactttgctctttgacgcacatatgtgacgagttagccgcccagattcgcaaaggagttcagttatga

SEQ ID NO: 480472 - DNA, 627 bp, Shigella flexneri; identical to SEQ ID NO: 468054

SEQ ID NO: 480473 - DNA, 366 bp, Shigella flexneri
atgagcatcaaaacccataccggaataatcattaccaatgatggtgagaaaagagtgaagttacgcgaaacgccgacaacctggtgtgttggtccgaaagaaacatatcgcaaggaagatggccgtcgttgtggggcaccactttcccgccgtcgcctccttttgagcacgataaaacctatcgggcaggttgagcaaccaacgactccggtaacgaagatttcagacaagagtctggcaaacctgatcgccgatgcggacaaggtgctggagcggaacacccccgttgcagatgaggaatggtggcaggatttccgagccgcaatgctagagcttcaggaacgtcgtcgggaggagttgaagtga

SEQ ID NO: 480474 - DNA, 282 bp, Shigella flexneri
atgaaacgcaaaattattaacccccaagatgtgattaatttcctgaccgatcacccatgttcaaaagtggacgtaatcgcggaacacattggtgtgtcgcagaactctatgcgttgcagactgagaagcatggttgccgaaggacagataacaaccaggaaaataaatggttgcctgtactactccgctaaaccggaattgccatttggcatgaatcctaactccatgttgtttaacaccttattagccaaagtaaagccgttgagaggggctgtggcatga

SEQ ID NO: 480475 - DNA, 1068 bp, Shigella flexneri
atgaataaacaagtaattatttctgactggatcaacaaccctaacagcctgttgagcactgatactggctatagattacgtcatgttaatggccgtatggtcaaaagcgatgagcacgaaacctttttcgttgttgaagacgatggacgtctttatgaggatggtcactcttatgaatcccaaacaggttgtatccctgcagagttggtagacgtaacagaaaagctgcgcaaagcatggcttgaacagcagcagcgcggagatgattacgtaaatacctatcaggaacgccagaacgcgcgtcttgcccgatatattgctcgtgcagaaaaagccagaaaagaaggtgcggtggcgcataagcgagcgcatgaactgttggatgtgatcccgttaggccagccgattttagttgaccattatagcgcgaaaggccatcgccgccgtttgtctaaagctgatgcgttattcagaaaatcgtttgttgagtgtgaaagcagagcatcgtactacgaaagcaaagccgcaggtgtcggccgtaatggagtttcgtctgatgatcctgatgcgctatttaagttgcttcgtaagctgcaaggctgcatgaagtcacacatcaaaatgaaggccgcaaataaggctattcgcaaatacaaaaaagaccaattacagcagctttccgcattaattgaccttgagtttactgaaagcgaagccaaagggttactcgccggagatttctgtgggcacattggcttcccttcatactcactgagtaacaataatgccgaaatcaaacgactacagagccgtattaaggagcttgaatcggtcaagtctgtaacaggagcacagcgcgaagaatacgacggcttttctatggagatagatccagaggataaccgcatcctgttttatttccctggcaaaccagaggcaaacattcgttcgctgcttaaatcacgcgcctttaagtggagtccaacccgtaatgcatgggttcgcaagattactccaaacgccctggctgatgcccgatatctgaaagaatcgctattgaaagcctga

SEQ ID NO: 480476 - DNA, 378 bp, Shigella flexneri; identical to SEQ ID NO: 468059

SEQ ID NO: 480477 - DNA, 333 bp, Shigella flexneri; identical to SEQ ID NO: 468060

SEQ ID NO: 480478 - DNA, 405 bp, Shigella flexneri
atgaacggacgtacaccaacgaagaaagagaaactttatatacaagcggtgctcactcacgtgggttgcatagcttgcattattgatggccgtgaaattgagaatccagagctgtggacggagctacatcacgatcctgattacggcagcgttgatgagaattgccacttccatagctttgggttgtgcgcaccacatcatcgcggtgttgtgcctggtggtgggcgtgtgcctccgcatattgccgttcgtcaccctcccctgagtaattgtgctcgctttgttgagcgttatggcacagatgaatttttgtgtgcgcagacgtgggagctgttgccgcagtcagttaaagacgaaattgggtttgatcttagtcttggtgaagtaccaggggataccaaatga

SEQ ID NO: 480479 - DNA, 234 bp, Shigella flexneri
atgagtagttatgttcgcggtgctgcgatgcattgccagaatccccaattctggcgctttctggccagtaaaacagggaagaacgtttcaaacagttctgaggcctctgtgattctgcgtgagttttgcgggatctcatcccgtaaagagctggcaaagaactacgcggccagaagcatgtatgtccagttaatcaacgagttcaacctctttatcaatggtaaggggcgctga

SEQ ID NO: 480480 - DNA, 516 bp, Shigella flexneri
atgatgattctggccttctttggtgataatcaccagattcaatcgcaggtggtgcactaccttgatcaaacgattaaaggatttgttatcgatcatattgataacgatagcaaacgtctatctgtagagcagaaaattggaggtgtgcagcgactggttgccagccgtaacagacgtgacaccgtaacagtcgttacggggattacggaggtcatggagtaccagatgttgctgcatcgtggagctgttttctgcgttcttcctggtattctgccagcaattcttgctcgtggttttgtccctattgatgagtcgttcttatatgtaaccccaagccgttcccttctggatacggaggcgaagcgtcgcatttatatgatgccggacgaggcattttctgaatgttaccgccgtgaaatgaggttgggtaaacgagaagtgtctgttgttcgtgatggcaggtttttaagaagccgcacggtgaaaagcaccagaaatgacgggggccatcaatga

SEQ ID NO: 480481 - DNA, 495 bp, Shigella flexneri
atgacctttcaggagtgggttgacgaaaatggaggccaaattggtgttgccagaaagtttggctttacgtcatcactgattggtgcctggtatcgcttcgagagattccctcgtgcggataacctgacgctgctggtggcgtattcggaaggccggattaacgtccagcaatgggcggcagattttgccgaacgtcagcgccagcgtagcgatggcacatcggttcggcagaacaagatcaaagggaatctccctgttaactgcttatcaaggctgaaagcggttttctctgagctggggatgcctgcggagcgttgcaatctacgcggtccgcgattcattgctcgctggaaacactcacatgtaaccgtttcagaggttcgtgatgcgattaccgtgctggagcttaagaataaagattccagcgatatcgagctgattcataaggagattagcaacgcccggcgttcagcacttgggaggcttgaggaatga

SEQ ID NO: 480482 - DNA, 657 bp, Shigella flexneri
atgaaaagcaacgacgagaacatcaagaaagaaataggtctgcgcattcagactctacggaaacaatccggcatgactgccggagatctccagcaagtcactggaataggcttaagcaccttgcagaactatgaggccggattaagacaaccatctatacctgccatcaagaaaatcgcgcacgccctgaaagcatcagcgccttatatcgcgtgcttaacagataacccgttcccaccccagaatactaacgctcctgttattcctgggcttgtagctataaaaaatgacatagcatcgcacgccggagaaaagccagtgctggcgatagaacaggagattctacgaagcaagaacatcaacccatcgtctctgtcagttctccagagcaacgatgagttaatgtcaccaacaatatcccctggctcccaagtcctgattaatacagacgatacagagattcatgaggggatctatgcccttgaagacagaaatggcctggttgttttgaggcactgtagagtcataccgggtgacaatgctgttatgctgtcaaccgaaagggatgctgaaatgaacactaagcatctgaataacgaggaatttaagcgttataaagttcttggccgcgtagttagtgttgtcaactggttatga

SEQ ID NO: 480483 - DNA, 375 bp, Shigella flexneri
atggaattacatacagccaataaaaacgaaactctgatcactgctggaatcgaaatccaagcgttgaacatagcgattgagtgtatgttatgccaaatcattgataatgagaaagatatcgactggatagaatctatccttcatctggcatcagaacaaaaagtctgcctcaaaacggccttacaatacgatgtgccagcgatatcgaagctgtgccagccattgatggcatataacagggctattatttctgtatgcctcatgattcttgatgaaaacacccctcttagcgaccgctcagaagctgctctcaccctctcacgtaaacagcgacagctagcaaatcaactgatatcaacgatagctgacctctga

SEQ ID NO: 480484 - DNA, 654 bp, Shigella flexneri
atgactatctctgtaggtattttcaacggaaaaggcggcgtaaccaaatcaacaattgcccgtgctttagcagttgcttatgcaaaggccggctggaatgtatgcctgatcgatatggatgtgcttaacggaacggtaacgcgttgggtacaacgcagaatggccaacaatatcgaacctgcaatcgcggcgcagccgtgcggcacgccatcacaagtccagaaaatcatcgaatcagaagtatacgacctggttatcgtcgatggcggtgcctacgcatctgaatcagtaccgaagctctctgaatttctggatatggttattttgccaaccagattctctaccgatgacctagaaaccaccgttaacacagctcacggcatcgttaaaaagggtgtgccaatcaagaaaatttgcatggtgttctcaggcgcggctgaaaacgaagccgactacattgaagcccaagagtacctagctaatacgccatactttgttgtcgataagtacattccccacaagccagctctgagcaaagctcaggataagggcttaagcctcattgaatgctcatacgttgcgccacgcaaaaaggcagacgacgttattcaggggattatcaaccagcttgaggctctgactactgccgcgtaa

SEQ ID NO: 480485 - DNA, 249 bp, Shigella flexneri
atggccggaccatcaaaaccaccaaagaagaacagcaaaggcgtaccgccatcgatcgaacaaccgcaggttttcgacccgactgaaacgccaaccagaaccaaatcaggtggggcacaaatggcgtttaacgtcgaccctgaatttaaacgcgagtacaaaacgttcgccagctcaatggatatgtcattgaaagaagtgctgacaaaatcttttgagttactcaaggctcaatacaaccagaagtaa

SEQ ID NO: 480486 - DNA, 192 bp, Shigella flexneri; identical to SEQ ID NO: 468069

SEQ ID NO: 480487 - DNA, 1143 bp, Shigella flexneri
atgaaaacgcttccgaccgttaacaccctacagcctatcctgcataaccagctccccgttatcaccacggagctgcttgccaaactatatggctgtagcgtcgaatgtcttcacagaaatcaccaccgtaataagtcccggtttacagaaggaaaacatttcatagttgtaaaaggtacagatctccaaagtttgaaaatctctttaagagattttcaaaccatcgcgaataacgttagaaagctcatcctctggaccgaacgcggggctgcacgtcacgctaaaatgctcgaaaccgatcaggcatgggatgtattcgaacggctggaagactgctacttcaaccagaacgcgcaaacggccgcgaccgtaaccgtctcaccaaacaatgctcgtgaggttgtcgatacgctcaacgctaaaccaatgtattacgttaaggtgtgcaacaacgagccactcacaacctcagccgatgttgcccaagcattcagcaccacaaacaattccatcgttatggccatcgatgcgttacgcattcctcgcacggctgcggcgcgtcacttctttaaagaacaacgaccgctggaaggaagcgaccgcgaaataacaatctatcgcatgacaaaagacggatttaccttgctcatggaaagtatcgacggtccaggcgtgaaggatatcaagctggcctacattgaagcctttaacgctatcagcagcgtgttaaaggcagaatacgagcgaatgctatacaaccgactgtatcaggaaacaaagattatccgaacggcaacagaacatcatcggctattaacggaaccaaactaccgcaagacactaatcaaagagtttgacaaggcgacggagaaaactaaagcggcactaaatctaccaacaatgactaaagatgatgtgatatcagccttacttcttgatctgctcagaaacgccagagcacttatcagttttgacgaaaacctgaatcctcagctcaagctactaccaccgacaggcaaagtagtcgaccaagcagatcacaacagcatactcagcgtactggatgcaaacctgccagccaggacactacaggatctgataaaaacatgtgctgataagctggcacagaaaagcagaccataa

SEQ ID NO: 480488 - DNA, 273 bp, Shigella flexneri
atgacgggttatgaattgaaattatggcgtcgtgggatgaactggacgcaggagcgagccgccgaagaatttgggatatcgttggctacatataagcgatatgagaagggggagccgccgagggtcattgagatggccattcgcgttctgtcatttgacgatatggttaaggatctttcacaccttgataaagatgcgattctgttaaggctgcaaacccttgtatgggaaaaggttaaagtgtcgtcagaattggaacaagagatcaaatga

SEQ ID NO: 480489 - DNA, 381 bp, Shigella flexneri
atgagcatgattaaaatccgcaaaaacgctttccttaaaattcaaactatcctggctggttctgttggcgtgatttgccgttcttcttcaagccgcatcgatgacggctacgatgatgagtatcgtgtgtcctcgtgcgatgaggctttaacctggctgaaggagaatcaggaacgtgcccaggtatatctggaaacagagaacggcaatcagatgctgcgtattagcggtcgttatggatttgaaactacattcattgcctattttaatcaggtttactttgacaaggagctggcctggtacactgatcgcatgagcaaaagcgagccagctccgattacaccgccgaacaataaaccatttttattcctcgttaagtaa

SEQ ID NO: 480490 - DNA, 300 bp, Shigella flexneri; identical to SEQ ID NO: 468074

SEQ ID NO: 480491 - DNA, 348 bp, Shigella flexneri; identical to SEQ ID NO: 468075

SEQ ID NO: 480492 - DNA, 264 bp, Shigella flexneri; identical to SEQ ID NO: 16696

SEQ ID NO: 480493 - DNA, 288 bp, Shigella flexneri; identical to SEQ ID NO: 19998

SEQ ID NO: 480494 - DNA, 978 bp, Shigella flexneri
atggaaacaaaaagcccgcagataaatctgcgggcttcttgcgacatccacggaaaaccaacaactaaccatgggcgcctcgacaactcccattatacgttggttttccgtggacgcaagagcgaacatatggatagaccaatgccgtctctacgttcagcttacgtttgtaatttgtcgccggagttccagcctccaaagcaccatacgcacaagctgccgctggtgttatctgatgctttacagcgcattaatgggcgtgatcttacgtgtgaggttgcgttctacgttaatcaaccgtcagagcggaagcgccggataaacgagcatcgtcgtcgggcgattaatgctgtgatcgctgcgattttgcaccatgtaaacatcatttctaagcgggttctggctagtgctgaggcgttggctgatttttgcggcctgtctaccgtatccgaagctgggaacaagtctataacgcgctgtacaagggcgttgtcgcaactgaaagcgttaggttttattgattatgaacgtcgctgggatcgggtgaataaacagtattggccagcgaaaatagagattcgtgatcaactgctggaaaccgttggtattactgaacaagcatggagacgtgcggttagccagaaacttaattacttcaatgcgaagaatagcgaacggcttaaaaaagcgataacggaggctgattataagcgtattgttattcaggagcagatggagaatgtatggcgccagaggaagacggccagagagataaaggcaaaacagaaagcagcggagagagctgcgcgtcttgtccgggaaaagggagaggccgaacttcgtcatcaaatcactagagaggttagccaggaatttgctgatggcatgtatccaggtgctgaccttgcatatttacgatccctcgttgagcagcgttataacaggctaagaaagacctggaaatcactccaacattaa

SEQ ID NO: 480495 - DNA, 555 bp, Shigella flexneri
atgcaatatggttatgcgagggtgtcaacttttgaccagaatttggaattacaactggaggcgctcaggagttcaggatgtgaccggatttttgaagataaaatatccggtgctaaatcaaaacgtccaggacttgataagctactgaaggtgttacgaccgggcgatacggttattgtctggaagctggaccgaatggggcgttctctgattcatcttgttgatttacttaaccattttttatcaaacaacattgagttcatttcgattacggaaggaataaaaattagcacttcaattggccgctttgcctacacgatgctgagtgcagtcgcagagatggagcgggaaaatatgattgaaagaacgcgtgcaggattggcggtggcaagggctaacggcaggatcggaggacgccgctcaaagctgtcaccagagcaatgggaacagatcggaaggcttattgcgaatggtgtttcacgtaagcggatagcgattatcttcgatgttactttatccacgctttaccgcaggtttccggctgggaatcattga

SEQ ID NO: 480496 - DNA, 207 bp, Shigella flexneri
atgctggcttctgaggtgagaccatcgacaatcaacaagctgctgaccaaagcgaagatgtgtctcgattatggcctgatgaatgggcaacttgagggccgcaaccctattgaacggatgaagctgaccaaggatatcgactccaagcgcagagcgttcacagacgaggagctggagagacttctggtccgtgttgagtctgagtga

SEQ ID NO: 480497 - DNA, 210 bp, Shigella flexneri; identical to SEQ ID NO: 9340

SEQ ID NO: 480498 - DNA, 231 bp, Shigella flexneri; identical to SEQ ID NO: 476092

SEQ ID NO: 480499 - DNA, 258 bp, Shigella flexneri; identical to SEQ ID NO: 474014

SEQ ID NO: 480500 - DNA, 252 bp, Shigella flexneri; identical to SEQ ID NO: 478639

SEQ ID NO: 480501 - DNA, 354 bp, Shigella flexneri
atgccactgctggataagctgcgtgagcagtacggggtcggaccggtatgcagtgaactgcatattgccccgtcaacgtattaccactgtcagcaacagcgacatcatccggataaacgcagtgcccgtgcgcagcgcgatgactggctgaagaaagagatacagcgcgtatacgatgaaaatcacaaggtatacggtgtaaagtctggcgtcagttgttacgggaaggtatcagagtggccagatgcactgtggcacgtctcatggtggttatgggacttgccggtgttctccggggtaaaaaggtccgtacgaccatcagccggaaagccgttgccgcaggcgaccgcgtaa

SEQ ID NO: 480502 - DNA, 207 bp, Shigella flexneri; identical to SEQ ID NO: 24440

SEQ ID NO: 480503 - DNA, 639 bp, Shigella flexneri; identical to SEQ ID NO: 476552

SEQ ID NO: 480504 - DNA, 1098 bp, Shigella flexneri; identical to SEQ ID NO: 475447

SEQ ID NO: 480505 - DNA, 321 bp, Shigella flexneri; identical to SEQ ID NO: 477003

SEQ ID NO: 480506 - DNA, 360 bp, Shigella flexneri; identical to SEQ ID NO: 474567

SEQ ID NO: 480507 - DNA, 366 bp, Shigella flexneri; identical to SEQ ID NO: 474398

SEQ ID NO: 480508 - DNA, 240 bp, Shigella flexneri; identical to SEQ ID NO: 478614

SEQ ID NO: 480509 - DNA, 327 bp, Shigella flexneri; identical to SEQ ID NO: 466843

SEQ ID NO: 480510 - DNA, 396 bp, Shigella flexneri; identical to SEQ ID NO: 475514

SEQ ID NO: 480511 - DNA, 240 bp, Shigella flexneri; identical to SEQ ID NO: 478609

SEQ ID NO: 480512 - DNA, 126 bp, Shigella flexneri; identical to SEQ ID NO: 469585

SEQ ID NO: 480513 - DNA, 315 bp, Shigella flexneri; identical to SEQ ID NO: 477022

SEQ ID NO: 480514 - DNA, 309 bp, Shigella flexneri
atggcccccgtggtgttgtcaggtgcatacctgcaacgtgcgggggttttctctctccagcaaccaatgccaccagggattaagcccccgcaacattgcgcctcaccggaatccttccggcttgacgctgattctacgactgtttttctgttccggaatccgtctcatcttcactctgtgctgcgcattccgcagaatattatccgcttgcaaccgttgcatttttcttacgaaaaaggccgcagagtttcacccctgcggcctggtccgggcgcaaattgccattacggcagcctgacgcccacatga

SEQ ID NO: 480515 - DNA, 2034 bp, Shigella flexneri
atgaagaagaagaaacttattctgcctgtacttatagtctggctgatggccctgacagcctccggctggctggggagttttatactggtgaaaattgcctcgctgccaactgacaatctgcaatggagtacctacctctccacgcttgcctattacggctggcaaccttccctcaaaaaatatctgcttgccggacttgcggggactctgcttccgttcctgattgcactcatcctgacaatcgttatgtttgtcgtcgttcgggagaaaaaaacggtgcacggtaacgccaggctggccaacgatcgggacctggcagacagcggtttttttcccgacgaaaaggaactgaaaaatcagaaatacccgtcactgctcataggaaaaatgcctgaacacaaaggacgttttaaatcacgctatctgcaatacagcggtcagcagtttctgatgctgtacgccccgacacgaagcggtaaaggtgtatcgatcgttatccctaacggcatctggtataccgaatcgatggtattcctggatatcaaacttgaaaactttcttgagacggcgggataccggaaaaatgtgttaaatcaggaagtctatatcttcagtcctgacggctatgcacgagaaatcggcggtgaaacagtgctgacaactcaccgctacaaccccctttactatattcgccgtgatccggtatatcgctttggcgacctggaaaaaatcgcggtgatcctgtttccgatgaccggaggtgaaaacgacacctgggtggaatccagtaaaaacgtttttatcagtctggttctgtggttactcgatactgaacttgagggcaaatttaaagttaatatgaactcggtgatgaaactgagtattccggctgatggctcaagcctggcaaaatggatgctgaacgagatcagaagtcggggtaatgaagttctcactgaacgctggaaagcgtaccatgctttaccggaagaggagaaacagggcaaaacgccctccacctatccgttaagcgatgacaccatccgcctgttccgccagttcgcagccaaagaacccgagcaacaggaaagcatcatgctcgactttaaccgcaccatgtcaatgttcgccaaccctgtcgttgctgcggctacggaagataacgattttgatatgcgtgatgtgcgccgtaaaaaaatgacaatttactacggcatttctcctggtgcattaaagcaatatcagcgtctgactaacctgtttttttcacaactgcttaatgagaacgtgcgtactctgccagagcatgacgcaacactgaaatatcagtgcacactcatgctggacgagtttacgtcaatgggccgcctcgacgtggttcaggtgtccctggcattcactgcgggctataacctgcgttttgtgtttattctgcaaaacagggagcagttatttgatgaaaaacatggttacgggaaaatgggtggaaacactattcttaaaaactgtgcggttgaaattttctatccacctaaaaaagtggatgaaagtgtaaaagatgtatcagaaacaatcgggtattatgattttgtccgcactcaaataagccgtacaactggtaaaaaccccagtacaacccgcaataaaattattgaaaaacgggctgttatgctaccacaagaaattactgatttacgggaccagaaattttcagttaaaggaaagaaaacaagtttttccttaccacaaatcgtaattagtgagttttgccgcccgtttattgcacataaaattgtcagttttgatcaaaacaaggagtctttttttgttaacgcaagaaaatattcccgaaaaaatatcatagacacacctgtacttgatattccacagaatgaagtggttcgtcagttaatgctccagcgggaaagggaggaagcatggaaagcgacgcaacctgcttttgataaagatgattttgatgatgataaggaatattttcctggtgatgatgatggtggtggcggtggtgattaa

SEQ ID NO: 480516 - DNA, 330 bp, Shigella flexneri; identical to SEQ ID NO: 33899

SEQ ID NO: 480517 - DNA, 339 bp, Shigella flexneri; identical to SEQ ID NO: 33898

SEQ ID NO: 480518 - DNA, 270 bp, Shigella flexneri; identical to SEQ ID NO: 33897

SEQ ID NO: 480519 - DNA, 3288 bp, Shigella flexneri
atgttagtcagaatcagcggtggcaataagggggtatgcgaataccttgaaaaaggtcataagcaaggaagggaatatacccgagatgaaattgaccatcgattagttctggatggcgatctggcattgactgaatcagttattgacgcgatacctgataatggtcaagagcgctatatgcatattacgttatccttttttgaagatgatgtttctgaatcaaagttgcatgatgtagtccaggaatacaagtctctcatgatgaacgcttatcatgaagatgaatataatttttatgcggaagcgcatcttccaaaaataaaacagatgcctgatcataaaacaggagaaatggttgagcgtaagcctcacattcacattgttatccctgaagttaatctggtgacaggaaataaactaaatcctgggggagttattaaccattatttgaaacatcttgatgccatacaggagcacattaataataaatacaatcttgtttctcctaaagatggtgtcagagtcagtgaccataaccacgctaatgtattatccagggctaaaggcgatttttaccgtgagcggcacagtgagtttaaaaccacggtttttgatgcgctggatacagagaatatccgaacagagaaacaattttctgattatctttcccgttttggtgaggtaaaggagtataataaggggaagtctgatcgctactttggtgtgaagctcgaaggagactctaaatttactcgactcaaaagccctttattttcacgtcagtatatctctgatcgaactataccacttttaaaacccacaaagacgcagattgagagtcatctgaaagagtggaagagttcgatcagtcatgagataaaacatattcatccggcagggcaaaaaattcgtaaagaatatgcagcacttgctggtgaagataagcaaatgtatctgaaaaaggtaattaatcgttatgacgaaaaacacaaccttcaaagacaggaccgacgacagaatagtgaccagtccggtattaaatacaataccggaaagtttgtatccggtaagacaatcggattgccacgtctgccagcacgcgaactggtttacggacttcacggaagatcaggtgggaaaagcattaataaatctcagttgttattgcagcaaaatgaatacggttatttatcaacggctggacgacaaaaagtcgatccagatcgatatgtgcgacggttgcaggatagagcaggaagaagagtagttcagtcagcgcttgaatcaaatattaaagcggcgattcagcgcagtgatgatttaccttttttgaaacaaattcgcacagaaattaatgctgaacgttatttgtccaatctgcaaacacgctttaacatagatccatcaaagcatactgtcacctatggacaggatggatctccgcgtttcagagttggcaatcgaaatatgaatgccagtgattttttaactaaacatctgaatcttgaatgggatgaggcaaaagaggtattacttgatatctggcaggatcagaaagataacaaaccttttgatgctgttattacccgtgtaaatcttacgcgtcaacaggcaaaagaaagatttatttgtttaaatgaacataaaggttgggtaaataatgagattaaatataagcataatgataatatagctaattacagggcagaactcagagggcttctggcgataagaaacaagcaggaacgggaggttgctagagggtacattatatttaaaaagctggaaagagagcgtgaaataaactcaattcgaaaggcatgttttcgcgaaataaactcatactatcaccgttggaatccagacaggagatatgatatggctttaggtgattctttaaaaaagataatccgtaatccggttgatggaaacagcatttcttccggtaatgaaaaggaagttttcagcgtagttaagcgagtacagcaatcccagcaagttcaggattatgtaaaacgtgaactaaccgatcttgttcctcataaggtcagcccaaaagaaacgcgttaccttgatccgaagacaacacagactgttttcactgataaaggaaatcatgttcgtgtaaatggtgaaattacccaggataaagctgaagcagcccttctttatgcaaaagagaaatttggtgggatgctgaaactcaatggctcggaagaatttaaggtagcctgtgcaatggcggcagccgagaaggggatgaatgttattctgcgacctgaaaaatatcatgaaatgatgcaggtccgcctccaggaactgaaagctgaacatggacatgaaaacagcgtcgaggcagagcgtcagcaacaagtcgccggacagaaaccagaacaggagcaggaaaagagagcagagcaggttaattcagtcgagaaagacacccaggctaaggaaagaacgcccgaagtagcggaatctgtacataatgatgataaatcgcgtgatgcagtgccggaacagcctgttaagtcagaaactgtttctcaaaaatccacgtctgaaacatccgtggtacaggaagcggaaaaacaggagtctgtgcagcagaacgtttcggctcattctgaagaacgcgagcagcagccacaagaagcgcagcaacagaagccggtaacagagaaagacgtgactactggtcaggataaacagaccggagatgagcaaagcaaatccgcgttagccactgaaaatcctcatcagcaaaataacgcatcgctacagcagctacaggaagaggcaaaagttattgccagccagcaccaggaagcccagcgtttactgaatgaagctgtagaaaatggtgcgccgaaagaagaggttgatctgctttcgaaaggggttaacagtatttcggcccgtgctcagacgattaatgaacagattaaagcctttgaggaacaacaagggcagaaaaaagctaaatcagtcgaggaaaaaaacgagaatactacagaaaagaaaaagcggactgtcaatagtgaaaaagcgatggaaagagaaattgagcgaatttctaagcaactggcgaaggaaatgaatattgacaaacaaacagtcaaagatacgctcaaattcatacgttttgaggatgtaaacgatctcaaggcagcaatgaaaaaacctgaaacggtagaggccgtgaagcgtgaaatagtgagttatgacaacgctttgaaaaatgagcgtgaacgggaaagaaacagggataacacgcggtcccgttaa

SEQ ID NO: 480520 - DNA, 387 bp, Shigella flexneri; identical to SEQ ID NO: 36237

SEQ ID NO: 480521 - DNA, 402 bp, Shigella flexneri
atgaaaaagatcgatagtttattatctccaatatgcgaggcgataaaagaaacaaattcaaaatcaaaacaggctgtcttcaatatgtatttatcgaacatacttgaagcaaaaagctattatacatgggagcaaataacagattacataaataacaaaaccaagacagaactagcccaaaagacttatataaacatgaccgagagggccaaaaaaaggcaaaaatgcactgggcaaaaagacctaaaaaaaagcaccaatatgattgaaaaaaaaatagatgaagacaacaaacaaagaggaggcgtaaaaggatttttttcaacaatcagcgagaacaaaaacgaaatagatcacgatccaagcgcaacaaatgaaaaatttataaacaaatatctttaa

SEQ ID NO: 480522 - DNA, 756 bp, Shigella flexneri
atgaaaaactcaataaattttatccttcaaggaaaaggcggtgtaggaaaatcatttacaacagcaatactagcacaatactttattgatgaaaaaaacatggataacgtcgttgtaggcgacacagatcctgtaaatacaactacagctaaagtaaaaagattaaatgctgatttaatacaaatcactgaaaacagcaaagtagtccaatctaaattcgatccaatgttcgaatcaatgctaactaatactcaaaatacatttgtcattgataatggagcatctacttttttaccattaattcagtatttcaatgacaactgtgtaatggatatgtttaacgaagttgaacaagaagtttatatccatactattattgttggcggtcaggcgcaagcagatacaatagaaggttttgaagatcttgttaaactagtaaaaggaacaaaagtaaaaataatagtatggattaatgaatttcagggtgtaccagcacttgaaaacattcctttaattaaaactaaattcattgaaaaaaataaggatgtcatcgctggagttgtggttattcaggacagaaaaagcgatgcctttgcttctgacatcaaaaatttaaccgaaaaatcactaacattaaaagaagcccttgaatcagaattttttggattaatggctaaatctcgtctcaagcgagtttttaacgatatatatgtgcaacttgattcaatctataacatgcagcacacagaagcataa

SEQ ID NO: 480523 - DNA, 678 bp, Shigella flexneri
atgattaatgataaatcatttaatatcgaaaacattatttctgatatttttaaagagaccagattaaaaataagtaaggacgatcctgttttaagcataatactaatgcatgaaaaaatactcgaacatgcactaacacaacttaaaaacagtaatcaaatagctactgaaagattatctcatgacatatcttcaataagagatgcaatcaacgcattacctgacgctattgatgaaaaaacgtcagaactacaacatgcagcagtagcacttcatgacgaatttcaggaaagcaaaggagaaattaaaggttctctggaagaagcccgaattaatgcaacagagaaattagcagaaagtgcaaaagagcttcaattaaacattacaaaagttgctgaaaaaacaacagaaacaatagagtcagcaaataaaataatatctgccatagatacaaacctggctgaaattaataaaaaagccttagctaattatgttaatgatatcagaagccttgaaaagaaaggtgaaagtatatctaagaatattgatacagcaattaataatgcttttaaatccagtgtgaaatcatttaaattttattgtggtgctgcattatttattagcactgtcttacaattcacaatgtggggattttttctctataaactcctgacttaa

SEQ ID NO: 480524 - DNA, 183 bp, Shigella flexneri; identical to SEQ ID NO: 36506

SEQ ID NO: 480525 - DNA, 285 bp, Shigella flexneri
atgtcacaagcaaaagcaaacctgaagaaattacgtcatcactgttatattccaccaaaacaaaaaatatccagactgtattatgttgaaaaagccttaagttctccctggatatatcgtgaacggcctgcatacagagcagagttgctacttacacatgacacactgcttgttatttatggcctggcaaaatccggcctgattgaccgttctgaggaatcactcaacagagaaatcaaaggggtccgaaaagcgctcgcagccggacgtttccgttggtcgtga

SEQ ID NO: 480526 - DNA, 168 bp, Shigella flexneri; identical to SEQ ID NO: 36507

SEQ ID NO: 480527 - DNA, 582 bp, Shigella flexneri
atgacactgatcagtcagtgcgcacctggtgtttctcctgaaaccatgcgtgccattattatgactgaatccggtgggaatccctacgctatagcaaatgtcaccgacggtggcagtaaatattttaccactgaagaggaggctgttaatcacgcaaaaaaactgactacagataaaaaaaatttcagtgctggcctggggcagataaacagccgtaacttccagaatttaaatttaactaatgaatccgttttttctccctgtgcgaatattcgtgctgctgcggcagtgctgaaaacgtgctgggataaatacgaaacaaaagggggggaccaacaaaagatactacgtgacgccatgagttgttattactccggtaataacaaacggggttatgtgaaggaaagcaatggcaaaagttatatcgatataattgaggaaaaagccggaatacatactcattatgatattccggcaataaagtcatattcagaaacatccagccatttaatggtatccagtgataaccatgataaatgggatgtttttggtgatttcggaatacaggattttaaggagtaa

SEQ ID NO: 480528 - DNA, 306 bp, Shigella flexneri
gtgaataaatccattgcattatacagaacgttctttttatttttactttgtagctttattgctacaaatccggctctggcagcgggtgttggtgggcttgataaaggcacaaacttcatcggtgaactgcgcctctgggcgtatggttttgttggtggtgtggcccttttacacattctctggaaagtattccaggcatacacggaaatggactcctgggctggcgttctcaaatcactgatgtatgccgcaattgccggtggttgtgtggtagctgctgaagcctgctaccagattttcaaataa

SEQ ID NO: 480529 - DNA, 324 bp, Shigella flexneri; identical to SEQ ID NO: 33910

SEQ ID NO: 480530 - DNA, 2430 bp, Shigella flexneri
atgtcgataaagaaaataactaataatttcattcctccttatcactcacatattcatgaaaatatcatctggcttgaagataaaaaactactgctcacttttcttattgaaggcattccctatgaaagcctgacagatgatatgattctgaacaactttaacggacaaaaagaaacacttcttggactctgtaaaagtgaaagagtttttctgtggaaacatcttgtaaaacgcgaatcacctatggatgccagatataaatttcctggcaatccttttcttcagcgcttaggtgatttctactgtgatacttttaacggagaaagatcattcagaacagattattttctcacaataggcattccttatgatgatatcgatgctggcgaaaaaaaagctaaagatatcatccggcagattgaaacaggttttaaagactacaatatttatacgcttgggatcagtgacggcggtatttccgatatttgttcaaactatctgaattatttactcaatcatgattttgagaaaataccgttatctgcaacgaagatttcagagagtattaagaacagcaaattctatttcagctttgatactcttgaaataaaaaatcgcacaggacacgataataaattttgttccaattatatcgtaaaagatgtaccccgaggctcgcagattggtcagtggaattttctgttatccctgccatttgagtttatcctgacgcaatcctttattcccgattcgctatcaaaatccagcaagaaaattgagcaacagcttaacaaactcacttccgtaaaggacgccggtaagacgcaacacaccgaactccatatggcccaggaagctatcatcaaccaggaaaccgtttttggctcctggcacagcgtcctttccgtcttcggaaacacacctgatgaagccagtgataacggttctgaagtcgcggcggaatttgtcaccagtgggcggggatttcgttttgttcgtgcagcgtctgaagcaccttatgcatggttcagtcatctgccagcctcaaaactgcgcccccttgccacacaacgcacgctcactaatgtctgctgcctgatgccgcttcataatcacagctatggcaaaaaatcaggaaatccaattggtgatggctctgccataatgccgctgaaaaccgtcactgatggtctttactggttcaacactcactacagcgcaccagggcgtaatgtaacaggacagatgatcgcggggcacggaatgctgctgggtgcgactggtgcggggaaaaccacttttgaaatgatggccgccgcgtttatccagcgttttaacccagatatgttcgtgattgacttcaaccgctctaccgaactggcaatcagaatgttcggtggtcagtatttctctctgtctgagggtgtgtattccggcctgaaccccttccagatcggagacaatgacgatcctgaactgatggcattcctgaaagagtgggtcaaacgttgtgctgttaataacgatggcagcgactgtagcgacagtgaggctgaagagattgaccgcgccgttgaaatggtgatgaaacttgaacgtcgccagcgacgtttcgctcgtctgcaatcccgtatacaaagccccgaactaaacgtccgtctgtctaaatggtgggataatggcgctcttgcctgggctactgacagcgaagaaaataaattcgatcccaatcaatacagcaaaatcggttttgacacgactgtaatcctggaaacagttaatcaacgagatcatcctgcgtgtgaagtaattctttctgttctgtttttctacaaaaaacgaatgcagaaaggcggtaagctcatgctctccatcgttgaagagttctggaaaccctgtaactacccaatgacacaggccttaatcaaggcttcgctcaaggccggtcgtatgaagggggaaatgatgtggctcaccagtcagtcaccggaagacgcgattaactgtcaaattttcgcggctctcgttcagcagacaccgacaaaaatcctgctccctaaccctgatgccaaatacagcggctataaagagattgggctgacagaaaaagaatttcgccagcttaaaaagctgaaactcgaaagccgaacaatgctgattaagcaaagtggctcaagtgtctttgccaaaatggacctggtgggatttgacgattttctgcctgttatttcctgctcaatgaaagggattaaattgtgcgaaaaaatcagggaggaaataggctctgacgatcctgaactctggtatcccccgtttatcgaggggatttatcagatagatgacgttatacgggaagctaacagcgatatccctgaagtctggctgcccttcatgatgaaacggctcaaagacaaattgccggaaaaataa

SEQ ID NO: 480531 - DNA, 669 bp, Shigella flexneri
atgaaaaagactctgacagccctgtttctgggtgccaccctgaccggatacagttctgtggcaagttctgtaggcggtgtcatcgttaaagaccctggcagcatagctaaaaccgtcgaagtaattaagaaggctgccgatcagattgctgaactgaaaaaacaggttgatctggcaaccagccagcttgaagcctataagcaggaagtgctggataccaaaagacgactggaaggtataaccgattattccgccatttttggcagtgctgaatcctacatgaaagacttctgggaagatatgaagaaggaacttaccgatgctgatattcgcagtatggcaactaaatacggctttgatacaaaagagtacgaccggatcaaacgccagtacgaatcaaagtttgaggaaatcacgaaatacgaagcgatgagtaaggacctggagaaaagcgcagaaaagataaaggcaactcaaaaggctttcagtaaagccgatacgccacaaaaacgcgaagagcttcagaataacattcttctcgaaactgccgccatgcagttaaaaattgcacagaatgaggcagaaataaatcgtatggcccgtgaacgtaaattacgtgaggaagcggcactgataaaatatacagaagataacttttcctttaactga

SEQ ID NO: 480532 - DNA, 345 bp, Shigella flexneri
atgttcaaaaaactacttggcggttttatccttgcctttacttttttattatccggttgcggtggtgataatggtgaattagccggaacatatatagaaaaaaatcctgacaatagtgatgcacctcaaaaatggattatcaaatacgaaaaggataattactacactcaaatatgggtagaaaaagacaagaaaggtaatgagcataacggaacaaccaactcattccttattagagatggagactggcttgcaggaaaagaaaaacattttattcgagtgattgataaaaacacgcttcagttaagagatgatgagaacgctttgtatatccgtacaaactga

SEQ ID NO: 480533 - DNA, 1047 bp, Shigella flexneri
atggcttcaaatgactccgcttttgcaaaagcgaatttcgaaatcgtccagccgatgttcaatgaattatcttcgattattcagaacagcgtaaccacaaattttcagactattatgcaacttgtgagtccgttgttcggagccgccgtcattctctacggtgttttctttgcgtgggaaatcatgtacacacgcaaggatgatgtgatgatggaatccgtaaaacgtatgggcgttctgacgcttgtttttgccatgagtaccgccggaggtatgtaccttagttatattgttcctttcgtacagggaagcggtcaggaagtggcctccaggcttattggccaggacggagccagtaccggagccgttatcgatggccttcttaacagactgatagatttaggccatgaacaatttaaggtttttcaaaaagctgatggctggtttgattcaatgggggcatggattgtttttattgttaaagccattcttcttgctcttgctggcggcggatttgttatttactgcgcggcctatttattaatggccgaaatgatggtcggcatactgctttccattggcggtgtgtttatctcattttctgcgtggcccaccacgcgcaatatgtttacagcgtgggtgggatcgtgttttaactatatatttctcaatattgcctatgcctgtctgttcaaggttctgattcagtatattaataattatattaatacaaacagcgatgatattactaaaaatatctggagcgtcctttgtgttgcggttgtattcctgattggcaaattcctccttgctcaaatatcaacgctgataagtaccttaaccggcggtgtgggtattaacggtctgaccagcgcaaccggagatgttataaaagctctgcgtggcgctggcaacaatacacgaaatcagcttggacttggttttaatccaacagcacagaatgcacgggatcgcaacagggaattagccgtagcagcaaaagattatttatcttcccgctttggtggaaacatcaaggccggataa

SEQ ID NO: 480534 - DNA, 144 bp, Shigella flexneri
atgtataaatatatcattccggcagttgtctgcttatttctttctgcatgtaccgcaacaaatccccctgaagcacctgaagctacaggaaaatgggagtcattatataccagcgtcgataacattatgaagggatataaataa

SEQ ID NO: 480535 - DNA, 747 bp, Shigella flexneri
atgggtttgaaagaatattttaaaagctccaaagcggaagcacgtaaaacacccgctcaaaaagaaaccgataaaaaaattgaaaaaaacgtactggacgcagcaaaagaatttgcgcgtgatcgtgataacgaactgaagcgctcactgcggatcacgcgttttgcgcttttcttttcgtccgcttctgcggctgcaatggcggttgccctcgcagtcatggccccgctgaaaacaacagaaccgtttctgttacgggtagataaaacaacgggctacacggatgtgatcaccccgttcagtcaggattccggtacatatgacgaggcggtaagccgctatttcctcacgcgctatctggagaaccgcgaaggttacgaatggtacacaattcagaacatgctgaataccgttgaactgatgtcttcctcccaggtattcgccgaatacaacaacatgattcacggcccgttatctccgctgtataagctgaagaaaagctacaaaattcttgttcgcgtgcagtccatcacctttctggatgaaaacacggtacagggacgttttgttaaggcaatcaccgatcccgatggcaaacccgcacctggatacacgccaacacaatggattgccaccatcaaatttgtatggctaaaagacaagatatcaactgaagcagagcgccagataaacccgttcgggctggatgtgctctcataccgtgttgatccagaggtggtgaaatga

SEQ ID NO: 480536 - DNA, 798 bp, Shigella flexneri
atgatgatgcgaaaactccttttatccctggtcatatccggtatcactatgacctgtcatgctgcaaaaacgccagcgtccgcaggttttgacagacgcgtacagcaaatcgtctataaccccaatgacgtaaccattgtcaaaacaaaagcgggagaagtaacccttatcgagcttgaagagggagaaatcatcaagagcgaagatactggtcttgctattggtgatcctgaagcctgggatccggctgtcaggggtaacactatttttctgcgtcccaaagcagcagaacctgataccaatatcgcaattgtgacaaacaaacggatctactccatccagttagtcagtaccgaccagaacccgacctatttattgcgatacatctatccgaaaccgccggaacccgtgaaacccaatgtcatgacgggccggagtcgtgttgtcgcgccctgtactgaagggaatattgtaaacggtcgttatgaggtgcgtggtagcaggaaaattaaacctgaagccatctgggataacggtcgtctgacctgtttccgctggactggcgcagctgaccttccggttgtgttcaggatcttaccggacggtaaggagcaactggttaattaccatatggataaaaacatcatggttgtgcacgaaatttcgccagcttttgtactgcgtctcggaggtgaggtgatggaagtcagaacaaaccgtcatataccgcgaacctggaacgacagcggaacactgactggcgaaaccagagtggagattaataacgatgaaaaataa

SEQ ID NO: 480537 - DNA, 1224 bp, Shigella flexneri
atgaaaaataacaacgatattgtgattgaaaaactcgatgaaattgacacgcaggaggcggataccgacgctcaaaaccggaatttcatccactccggtaaaaaacagggaaacaaaaaggcaaaagcggtccttatacttgcaggttttgcttttgttaccgtagtcattctgacatccgttttatcaaaggtgttttcatcctcgggagaggaagaaactaccgaaactgcgaccacaaaagcacaggcagaggtctatgcacaaaatacccaggcaaaaaatcttgatgacctgaaagaaagcgtcgccagaagcatagaggaagtcaaaaacaacgttaattcagaagaggaacaagccagggaagaagcaccaccggaaaacaaggaaaataaaggtgtcactctgccagcagaaaacgaagctgataccggatatacacaaaataatggcgatgccccacccacaccagaacagcgtcgtctgatgggaagcgtaatggttgatgacagccggatcacacagtcacagcctggaagttccggtcaaaaaacggcaggcgctacgccagcgtcagacaacacaaatgtttctggtgatggtgattttttacagggtgctgactttgctgatggctctgtatcccgcataaaaaatcgtcgctttctgctttcggctggaacaacttttccgtgcgtcctgaaaacaatgattgtcaccacatatcctggtgtaacgctctgccagttaaccaaagatgtgatctcggatgacgggaaaacggtattaatccgtgctggcgcacaactccagggagaacagacaaaagccattacacagggaatggcacgcgtgtttgtcaactggacaatggttaaggaccgcaatgtcagagtgcggattaatgctctcggtgctgacagcctcggcgcgtcggggcttccggcgtgggtggatacacatttctgggagcgctttggtggcgcattaatgctttctctcattgaagacactctggctgccggaacctcacgtctttcccgcgaaaacaacagcgacttcactatgaacaataccaccggaacgtccagtgaactggcgaaaaccacgcttgataattcaatcaacattccgccaacaggttacgtgaatcagggcgaaatgctgactgtcattgtgccacgcaacattgatttttcttctgtatacggagtccgctga

SEQ ID NO: 480538 - DNA, 1014 bp, Shigella flexneri
atggaaacgattaacatgtttcttgaaagcacgggcgtacagccctttcttgaggcggaggggcttacggaaattatcgtaaaccgcccgtttgaaattattaccgaaggcgttaacggctgggaataccatgaagcccctggagcctcatacagtgacctgcttgatctctctattgcaatcaacaaatacaacaacagcgcagaaccccttgatgctctacaccctatcaagtcgctggttatgcctggcggtgaacgtatgcagattatcatgcctccggcctgtgagaaaaaatgtatctcattcaccatacgtaaaccttccctgaggcgcttcacactggaggattacgtcagcagcaaccgattcagcaatgtccgcattgtgaatcaggcaaacctgagcgccctgagcgcctcgcaacaaacattacttgaccttctcgataacaccaggtgcgcccccagaacctggatcagttttttagaagcagctgtggccgccagaatgaatattctggttgtgggtggtacgggatcaggaaaaaccaccattgcaaaaaccattgcagacctgtttccccgtgatcgccgcattatcaccattgaagatgtgcacgagatgacgctgccaaaccatcgtaatcacgtccatctattctataagcaaggcggcgtacagccccgatacctgattgaagcggcaatgcgtatgaaaccggatcatatctttctggcagaattacgtggcgatgaggcatggagttacctggaagcactgaatacagggcacgaaggcagcgtgacaaccattcacgccaacagtgctctggacgcaatttcccgtcttgcgtcgattgtcaaacagtccacggtggggcttaccctggaccacagcttcatactgaaaaccatcaaaacttccatcgatattgtggtgttcttcagacatacacatatgacggagatctactacaacccgatggagaaaaatcaattactggccgcatga

SEQ ID NO: 480539 - DNA, 387 bp, Shigella flexneri
atgccacgtatacaaacttttgtcagcaatcaggttcgtgaagaaattgagaatctggtaactgaaaggaggcaggagggggctacggaaaatgatgctacggtatcatctgttacttcaatgcttatagagcttggcctcagagtatacagaattcagagagaaaaaaaggaaagtggatttaatcagatggagtacaacaaactcatgctagataatatatcaagagtgagatttatgtgtagtgaaattatgaacatgagcatgctcaatcaggagtctgttgccagcggttatttcacgattgaaaagattaagcccgctatggaaaaattcgttaatgagcaggtgggtattttttttcatgacgatgaggagacagactga

SEQ ID NO: 480540 - DNA, 282 bp, Shigella flexneri; identical to SEQ ID NO: 34183

SEQ ID NO: 480541 - DNA, 168 bp, Shigella flexneri; identical to SEQ ID NO: 34182

SEQ ID NO: 480542 - DNA, 237 bp, Shigella flexneri
atggactcagacgaagttcacgaaatgcgcagtgccggaattatcagcaagccgggagtcaggcggtcagactgggggtcagagggcgatggagagaggctgccggagcatggcgtcgggcggcacacatggcttcccgaccagaatggcaacagtttgccctgcaaagagcggagcattgccggcggcgctgcagggggaactgtagcgaaagacagcggtgtagtcattaaatga

SEQ ID NO: 480543 - DNA, 210 bp, Shigella flexneri
atggcgaaaacaaaacagaaatggttatatcagttacggcggtgttcatcggtgaatacactggaaaagattatctgtaagaacacctatgatttaccggacagtgagcgtgaggcctttaattcagcagcagaccaccgtcttgctgaattaacaatgaacaggttatatgacagggttccaaaagaggtctgggcatatgtcaggtaa

SEQ ID NO: 480544 - DNA, 207 bp, Shigella flexneri
atgaagtacttgaacactactgattgtagcctcttccttgcagagaggtcaaagtttatgacgaaatatgcccttatcgggttgctcgccgtgtgcgccacggtgttgtgtttttcactgatattcagggaacggttgtgtgagctgaatattcacaggggaaatacagtggtgcagataactctggcctacgaagcacggaagtaa

SEQ ID NO: 480545 - DNA, 261 bp, Shigella flexneri
atgtcgcagatcgaaaatgcagtaacttcctcaccgaaacgcatttacagaaaaggtaatccgttaaccggagccgagaaacaacgtatatctgtttcccggaaaaaggggacacataaagcgattaatgttttcatccagagtgaactcaaagatgatttgacacagctttgtaaagattcgggcttaactcaaaaagaaatgatagagcactggattttgaaagaaaaagctgcgatggatgatgcgaatagaaggtaa

SEQ ID NO: 480546 - DNA, 132 bp, Shigella flexneri
atggctaatgaaaacttagatattgactccaagacagcagaagaattatacgagtggtatctggatgataaattaattataaatcgaagataccaaagaaaattaggtgatgctgccaacttactgatttag

SEQ ID NO: 480547 - DNA, 567 bp, Shigella flexneri
atgattatttactttttcccatttcaaatggaagaaaatgacgcttttcttgatgccgaagttaagtatcagaaaatgaagaataaagaatgttatggtgtgaaagcttcacacaaaacacctttatcctttcttaaaccgagcgatacgttatacatcgttgctcatggcaacacatcagttattggatctggttcagctactgggccaacgttgaatcccgtagcattagcctctctattaatacacaaacgtttaccaaagaacttcatagatatcagagtgttgtcctgcgcctcggggatacattcgagaaccccagccttcgcacaacggctgaaagaaattatgaaagtacatgggtatcatagtctggtcgttaccggataccttggtgaggttgatgtatcgagagactggagattaaaaaatgatgatggtatggagttttataccttaagaaaaaaagggattattcctgttaaggatgtattaagtgaatcccagagagcgctttgtggttctgatctgaaatacgccctttctgatttcaagaaacgattttga

SEQ ID NO: 480548 - DNA, 558 bp, Shigella flexneri; identical to SEQ ID NO: 18850

SEQ ID NO: 480549 - DNA, 291 bp, Shigella flexneri; identical to SEQ ID NO: 75692

SEQ ID NO: 480550 - DNA, 927 bp, Shigella flexneri; identical to SEQ ID NO: 18852

SEQ ID NO: 480551 - DNA, 759 bp, Shigella flexneri
atgcaaaacagtctgtaccaggcactgcttgagccacactcacgccccccggtggggcttaccgtctggaatggcagcgatccggccgtccggtttgcggtctaccgtaataatatcatggcctccttaacggaagcgctggcagaaaactgcccggtcctgcaacgacaggttggtgacgaattttttcgggccatggttgctgaatttatccgtcagcatccaccctcgtcgccggtattggcggggtatggacatgctctgcctgcctggatagcgtccttttccccactggctgaatggccgtggctggccgatctgacccgactggaactattgtttatcgatgcgttgcatgcggcggagacgaccagcctcgtatccgaagaacagctggtgcgactggcgcagaccggactggtcagtctgactgcgggcctggttccttctgtccgacttttcagctcgccttatgcgatatacagcctgtgggcagctcatcaggaggaggagccattgtttgttgaccctctgcagccagagcaggtgctgttgttccgtttgggggatgacgtgcggattacgcttctcagccctgccgacttttcgtttatggtggcggtacatgccggcaataacctggcgcaggcaacgttgcaggccagagagcatgactgctgttttgaacctggctctctgttgctgcgcctgcaccagaacaggctactcgggtggctggcctgcacagaggagaaatga

SEQ ID NO: 480552 - DNA, 528 bp, Shigella flexneri; identical to SEQ ID NO: 75695

SEQ ID NO: 480553 - DNA, 363 bp, Shigella flexneri
gtgactaattttaaatcagacttaaatctaataagaaaagaatggtataatgcattttattcaggtaatactgaaatgctagattacttggaagctgattggtttatttcaacaaatggtcaaaaagttatctataaaaaacatcagttacgaaagattgatatgcgtccagcgaggattttaccgggcatagaaagatatgaatatgatgtcgtaatgcgtgagtttaaaggaattgcttgtgtttcagggaaagctgaaataaagcaaaatgatggaaatatattaatggcatttattgaaaattggataaaggttaatggtggatggaaaatgcagtttatatcgtatgaaaaaatctaa

SEQ ID NO: 480554 - DNA, 510 bp, Shigella flexneri; identical to SEQ ID NO: 75697

SEQ ID NO: 480555 - DNA, 1182 bp, Shigella flexneri; identical to SEQ ID NO: 33608

SEQ ID NO: 480556 - DNA, 210 bp, Shigella flexneri; identical to SEQ ID NO: 9340

SEQ ID NO: 480557 - DNA, 123 bp, Shigella flexneri; identical to SEQ ID NO: 479149

SEQ ID NO: 480558 - DNA, 174 bp, Shigella flexneri
gtggggcgcaatagccgtaacggtacccgaggtgggcgcgtgaacaggcagcattttgccgcgaccacgggtaagcggctggccgcgcaatactttatcgccgacgctaacgcacaactcaccttcagcgccaatatgctgtttcagtggaataacaaaatgctgcgccagtag

SEQ ID NO: 480559 - DNA, 204 bp, Shigella flexneri
atgcgcaagaatgcgaataccctctacgacctgagccgcgcaatcctgcatcaaacggtcatcggcggtaatgtacggctcgcactcagcagcgttgataatcaacgtttcaatcttatctccaccaccctgcaatttaacgcctgtcgggaatccggcaccgcccagcccggcaacaccaaactgatgtatgcgctcgattaa

SEQ ID NO: 480560 - DNA, 675 bp, Shigella flexneri
atgcggaaccagaagaacaggtcgatccgcgcaaagccgccgtcgaagccgctattgcccgcgccaaagcacgcaagctggaacagcaacaggccaatgcggagccagaagaacaggttgatccgcgcaaagctgccgtcgaagcggctattgcccgcgccaaagcacgcaagctggaacagcaacaggccaatgcggagccagaagaacaggttgatccgcgcaaagctgccgtcgaagccgctattgcccgcgccaaagcacgcaagctggaacagcaacaggccaatgcggagccagaagaacaggttgatccgcgcaaagctgccgtcgaagccgctattgcccgcgccaaagcacgcaagctggaacagcaacaggccaatgcggagccagaagaacaggttgatccgcgcaaagctgccgtcgaagcggctattgcccgcgccaaagcacgcaagctggaacagcaacaggccaatgcggagccagaagaacaggttgatccgcgcaaagctgccgtcgaagccgctattgcccgcgccaaagcacgcaagctggaacagcaacaggctaatgcggaaccagaagaacaggtcgatccgcgcaaagccgcagttgccgcggctattgcccgcgttcaggccaaaaaagccgcccagcaaaaggttgtaa

SEQ ID NO: 480561 - DNA, 213 bp, Shigella flexneri; identical to SEQ ID NO: 479442

SEQ ID NO: 480562 - DNA, 153 bp, Shigella flexneri; identical to SEQ ID NO: 476447

SEQ ID NO: 480563 - DNA, 867 bp, Shigella flexneri; identical to SEQ ID NO: 476972

SEQ ID NO: 480564 - DNA, 768 bp, Shigella flexneri; identical to SEQ ID NO: 480153

SEQ ID NO: 480565 - DNA, 216 bp, Shigella flexneri; identical to SEQ ID NO: 478917

SEQ ID NO: 480566 - DNA, 342 bp, Shigella flexneri
atgactaaaaatactcgtttttcccccgaagtccgtcaacgggcagtccgtatggttctggaaagtcagggcgaatatgactcacaatgggcgacaatttgttccattgctccaaagattggctgtacgccggagactctgcgtgtctgggttcgccagcatgagcgggataccgggggcggtgatggagggctcaccaccgctgaacgtcagcgtctgaaagagctggagcgtgaaaatcgtgaactgcgccgcagtaacgatatccttcgcaggcttccgcttattttgcgaaggcggagttcgaccgcctctggaaaaaatgatgccactgctggataa

SEQ ID NO: 480567 - DNA, 153 bp, Shigella flexneri; identical to SEQ ID NO: 390769

SEQ ID NO: 480568 - DNA, 255 bp, Shigella flexneri
gtgaaactaatctggtctgaggaatcatgggatgattatctgtactggcaggaaacagataagcgaattgttaaaaagatcaatgaacttatcaaagatacccgcagaacaccatttgaaggtaaggggaaaccagaacccctgaaacataatttgtcaggtttctggtcccgacgcattacagaggagcaccgtctggtatacgcggttactgatgattcactgctcattgcagcatgtcgttatcattattga

SEQ ID NO: 480569 - DNA, 171 bp, Shigella flexneri; identical to SEQ ID NO: 478928

SEQ ID NO: 480570 - DNA, 315 bp, Shigella flexneri
gtgaagtggcgttactcactgcgctggaaactgccttatccctgtcctggcgagcatgaactggtttcagaagtggtggaggcggggcagcctgcaccggcatccgttatgtcacgctgggttgccggagcagggtatgcggtctgtctggattttatttctgaccgcccggtgcgccgctggagcgaagaacgtaaggctgcggtacgacggcggaatctggagaaacgtatcaacaggcatgcaccactgtttgcggatgaactgatagcccgtgaactggctgaacgaccggattattttcagggaaagtga

SEQ ID NO: 480571 - DNA, 453 bp, Shigella flexneri
atgaccaaacttcttcttattggattactcactctttcatctcatgttattgctcaggactgttttgaactggctggtagagattacaaaatcgatcccgatttactgagagcgatttcatggcatgaatcccgtaacagggttaatgctatcggcattaaccctgttacgggatatggctccggcctgatgcaaatcgactcccagcattttaaggaactgtcccgttatggaatagaaccggaacacctagtaacagatccttgcatgaatatttataccggtgcgtattacctggcaataccgttcaaaaaatggggagtaacatggagagcggtcggcgcttacaatgctggttttcgcaacacagaggaacaggatcggcgcaggaaaacttatgcagaaaaaatacagaacatttatcgaaatataaaaaacaagcaagggcaatga

SEQ ID NO: 480572 - DNA, 261 bp, Shigella flexneri
atgactgatgatgatctggatacagagcaggaggaattttactctatggaacaatgcatctttgatttcggcattataaactataatcccgccattacatggactgtgccagctgtatttttctttttagcgttgctggcaggtatggttttcaatattagcaggaaaaataatctaatcgtttttgtttgggcaatgtcgcttcctgtaataacagttttcatttttatatttctgggtggtaagataaatatatgctga

SEQ ID NO: 480573 - DNA, 243 bp, Shigella flexneri
atgggatatatcacatatgttacagatcaacgacccggtgaatcagatatcctgagcgggaatgcttttgctgatctggagattcgtgattctgatgggcatattctgctgaaaatgcctgctcctgaaagcggctggacacatgaaagcctcagtcttgttcagccacagaaggtgcgggatggggaagaagcatttgatgcttatctgaatggtatgtggatcggatcgacagaagtctga

SEQ ID NO: 480574 - DNA, 282 bp, Shigella flexneri
atgagtacccgaaatatccacgttaacaccgcgtcgtacacgattcttgttgccgggagggaaaaaaacaccggggaagagtgggacgtcctggaattcagcagcctgactgagctgaaaaaatatcgcaaaagccacccggaaaagatggccttcagctatagctacgcgctcagccggggtgtggatacgcagttccgccatatcaacattgcggaagccgatcactttaaacagttcctgcgtcagattgagcgtgtcaattcgaaagtttttttttga

SEQ ID NO: 480575 - DNA, 849 bp, Shigella flexneri; identical to SEQ ID NO: 474529

SEQ ID NO: 480576 - DNA, 816 bp, Shigella flexneri; identical to SEQ ID NO: 195523

SEQ ID NO: 480577 - DNA, 291 bp, Shigella flexneri; identical to SEQ ID NO: 477906

SEQ ID NO: 480578 - DNA, 288 bp, Shigella flexneri; identical to SEQ ID NO: 474636

SEQ ID NO: 480579 - DNA, 327 bp, Shigella flexneri
atgactaaaaatactcgtttttcccccgaagtccgtcaacgggcagtccgtatggttctggaaagtcagggcgaatatgactcacaatgggcgacaatttgttccattgccccaaagattggctgtacgccggagactctgcgtgtctggggtcgccagcatgagcgggataccgggggcggtgatggagggctcaccaccgctgaacgtcagcgtctgaaagagctggagcgtgaaaatcgtgaactgcaccgcagtaacgatatccttcgccaggcttccgcttattttgcgaaggcggagttcgaccgcctctggaaaaaatga

SEQ ID NO: 480580 - DNA, 141 bp, Shigella flexneri
atggccttttttctttccgatagcacaggtctgtcgggggggcgggatatgtatcagatggaaaaaatatcaacaggcattgcctacggcacctccgccggcagtgccggctactggtttttgcagtggttggatcagtga

SEQ ID NO: 480581 - DNA, 333 bp, Shigella flexneri
atgcgccatgagtttattttaccttatccgccgacggtgaatacttactggcgacgtcgtggcagcacatattttgtatcaaaagccggtgagcgttatcgccgggatgtggcgcttattgtccgtcagcagcgactgaaattaagcctgtccggaagactggcgataaagattattgcagagccaccggataagcggcgtcgtgacctggacaatatcctgaaagcaccactggatgcactgacacatgcggggttgcttatcgacgacgagcagtttgatgaaaccaatattgtgcgcggactgcctgttcctggtggtcggttggggtga

SEQ ID NO: 480582 - DNA, 138 bp, Shigella flexneri; identical to SEQ ID NO: 474566

SEQ ID NO: 480583 - DNA, 327 bp, Shigella flexneri
atgactaaaaatactcgtttttcccccgaagtccgtcaacgggcagtccgtatggttctggaaagtcagggcgaatatgactcacaatgggcgacaatttgttccattgctccaaagattggctgtacgccggagactctgcgtgtctggggtcgccagcatgagcgggataccgggggcggtgatggagggctcaccaccgctgaacgtcagcgtctgaaagagctggagcgtgaaaatcgtgaactgcgccgcagtaacaatatccttcgccaggcttccgcttattttgcgaaggcggagttcgaccgcctctggaaaaaatga

SEQ ID NO: 480584 - DNA, 327 bp, Shigella flexneri; identical to SEQ ID NO: 475920

SEQ ID NO: 480585 - DNA, 465 bp, Shigella flexneri
gtgtgccacttcacccctgaaggtgagatcgattttacctggagtgaacgctatcaactcagcaaagactccatgacatgggaactaaaaccgggagcagcgccagacgacgttcaccaccaggataatgctcaagaaaccaaagaactggcgggaggccaggaagaaaacgcgcaggcagacgcccacgaggattgccaggattgcgaagtctctgtagccactttgcggttcacacagcgtcttctgcacatttttacgtatgctgccggggatcggaaatacctgcatcatgccacccgtgaacaacgcaaacacattactgctcttgagatggatcaggaaaacagctatgtccagaatctgctgttggccatacgcggcatggcagaaccgacaactctggataatgccgccctgctccgcctgactgatgcaattaaggctgaggtgtactggcaatag

SEQ ID NO: 480586 - DNA, 492 bp, Shigella flexneri
atgactcaggaagcgctcagacggatagcagagttatacgacatagaagcggagatacgtggcagtccggcagaggaacggcttgcagtcagaaaagccagaagcgtccagttgatgcagtcgttgtacgactggatacagttgcagaggaaaacgctgtcgaaacatgcggagatggcgaaggcgttcgactatatcctgaatcactggaatgcgctgaacgagttctgtcgtgacggccgggtggaaatagacaacaacatcggtgaaaacgcgttacgatcggtggcggttggaagaaaaaattatctctttttcggctcagacaagggaggagaaagtgcggcgatcatctacagtctgctggtcacctgcaaacagaacgaagtggagccggaggactggttgcgcgaagtgatcgagaagctcaatgactggccgtcgaaccaagtgcatgaactgctgccctggaacttctcgtctgtaaaataa

SEQ ID NO: 480587 - DNA, 267 bp, Shigella flexneri
atgcttacacaaactatattcccttgccttccacaaaaacaagaaaatatcattcttgaagtatcaaatcctgtattattatcttctactgttactacagatggatatactgttttcaataaaaaagcagctatatacgaattacaaatacctgctgccagccggacgaaaacgttgaaattcactgctacagaaatgcaatggttgacaaagataaatgaagccggaattgatgaaaaacaaagccaacggtattctgatttctga

SEQ ID NO: 480588 - DNA, 219 bp, Shigella flexneri; identical to SEQ ID NO: 474644

SEQ ID NO: 480589 - DNA, 234 bp, Shigella flexneri
ttgatcgaatcgaaagtggattacaacaaagcacagaacctgatcctgacttccgtgattttgatcatcggcgtcagtggcgcgaaggtaaacatcggcgcggcggagttaaaaggtatggcgctggcgaccatcgtcggtatcggcttaagtttgattttcaaactgatcagtgtgctgcgccctgaagaagtggtgctggacgcagaagacgcggatataacagacaaataa

SEQ ID NO: 480590 - DNA, 210 bp, Shigella flexneri
atgcagttacagaaattagtcaatatgtttggtggtgatctcacccgtcgttatgggcaaaaggtgcataagctgacgctgcacggcggttttagctgccctaaccgtgacggtaccatcgggcgtggtggctgcacattctgtaatgttgcctcgtttgccgatgaagcgcagcagcatcgttccattgccgagcaactggcgcactag

SEQ ID NO: 480591 - DNA, 2073 bp, Shigella flexneri
gtgcacaacggcggtacggcgtctggcactgttgtaaacagtgacggctggcagattatcaaggaaggtggtctggcggatttcaccaccgttaaccagaaaggcaaactgcaggtgaacgccggtggtaccgccacacatgtcaccctgaaacagggtggagcactggttaccagtactgcggcaacggttcttggcagcaaccgtctgggcaatttcacggtggaaaacggtaaggctgacggagttgttctggagtccggcggtcgcctggatgtactggaaggccattcagcgcagaaaacacgggtggatgacggcggaaccctggcagtgtctgccggtggtaaggcaacaggtgtcaccatgacatccggtggtgccctgattgcagacagtggtgccactgttgaggggaccaatgccagcggtaagttcagtattgatggcacatccggtcaggccagcggactgctgctggaaaatggcggcagctttacggttaatgccggaggactggccagcaacaccactgtcggacatcgtggaacactgacgctggctgccgggggaagtctgagtggcagaacacagctcagtaaaggtgccagcatggtactgaatggcgatgtggtcagtaccggcgatattgttaacgcaggggagattcgctttgataatcagacgacaccggatgccgcgctgagccgtgctgttgcaaaaggcgactccccggtaacgttccataaactgaccaccagtaacctcaccggtcagggtggcaccatcaatatgcgtgttcgccttgatggcagcaatacctctgaccagctggtgattaatggtggtcaggcaaccggcaaaacctggcttgcgtttacaaatgtcggaaacagtaacctcggggtggcaacctccggacagggtatccgggttgtggatgcacagaatggcgccaccacagaagaaggtgcgtttgccctgagtcgcccgcttcaggccggcgcctttaactacaccctgaaccgtgacagcgatgaagactggtacctgcgcagtgaaaatgcttatcgtgctgaagtccccctgtatacatccatgctgacacaggcaatggactatgaccggattctggcaggctcccgcagccatcagaccggtgtaaacggtgaaaataacagcgtccgtctcagcattcagggcggtcatctcggtcacgataacaacggcggtattgcccgtggagccacgccggaaagcagcggcagctatggcttcgtccgtctggagggtgacctgctgagaacagaggttgccggtatgtctctgacgacaggggtgtatggtgccgcaggccattcttccgttgatgttaaggatgatgacggttcccgcgccggcacggtccgggatgatgccggcagcctgggcggatacctgaatctgacacacacgtcctccggcctgtgggctgacattgtggcacagggaacccgccacagcatgaaagcgtcatcggacaataacgacttccgtgcccggggctggggctggctgggctcactggaaaccggtctgcccttcagtatcactgacaacctgatgctggagccacaactgcactatacctggcagggacttaccctggatgacggccaggataacgccggttatgtgaagttcgggcatggcagtgcacaacatgtgcgtgccggtttccgtctgggcagccacaacgatatgagctttggtgaaggcacctcatcccgtgacactctgcgcgacagtacaaaacaccgtgtgagtgaactgccggtgaactggtgggtacagccttctgttatccgcactttcagctcccggggtgacatgagcatggggacagccgccgccggcagtaacatgacgttctcaccgtcccggaatggcacgtcactggacctgcaggccggactggaagcccgtgtccgggaaaatatcaccctgggcgttcaggccggttatgcccacagcgtcagcggcagcagcgctgaaggttataacggtcaggccacgctgaatgtgactttttga

SEQ ID NO: 480592 - DNA, 492 bp, Shigella flexneri; identical to SEQ ID NO: 463435

SEQ ID NO: 480593 - DNA, 564 bp, Shigella flexneri; identical to SEQ ID NO: 463434

SEQ ID NO: 480594 - DNA, 210 bp, Shigella flexneri; identical to SEQ ID NO: 9340

SEQ ID NO: 480595 - DNA, 483 bp, Shigella flexneri
gtgcaatttcagcgtcctgcctgggacggctatctacgcgtaaatgcgttgctggcagataaattactgccgctgttgcaagacgatgacattatctggatccacgattatcacctgttgccctttgcgcatgaattacgcaaacgtggggtgaataatcgcattggttttttcttgcatattcctttcccgacaccggaaattttcaacgcgctgccgacatatgacaccttgcttgaacagctttgtgattatgatttgctgggtttacagacagaaaacgatcgtctggcgttcctggattgcctttctaacctgacccgcgtcacgacacgtagcgcaaaaagccatacagcctggggaaaagcatttcgaacagaagtctacccgatcggcattgaaccgaaagaaatagccaaacaggctgccgggccactgccgccaaaactggcgcaacttaaagcggaattgaaaaacgggtaa

SEQ ID NO: 480596 - DNA, 549 bp, Shigella flexneri; identical to SEQ ID NO: 478683

SEQ ID NO: 480597 - DNA, 2478 bp, Shigella flexneri; identical to SEQ ID NO: 472397

SEQ ID NO: 480598 - DNA, 261 bp, Shigella flexneri
atgaggcgcttcgcaggcgcatgtcgtttcgttttcaatcgtgctctggcgcttcagaatgagaatcatgaggccggtaataaatacatcccttacgggaaaatggcttcctggctggttgagtggaaaaacgccactgaaacgcaatggcttaaagattcgccctcacagccattgcaacagtcactgaaagaccttgagcgggcttacaaaaacttcttccggaagcgggctgcttttccccgattcaaaaagcggtga

SEQ ID NO: 480599 - DNA, 456 bp, Shigella flexneri
atgattacattcaaaccaacgcgaaacatcgacctgatagaagcagtcggaaatcaccctgacattatcgccgggagcaacaacggtgatggatacgactacaaacctgaatgccgttactttgaggtgaacgtgcacggtcagtttggcggcattgtttactatcaggagattcagccgctgacattagattgccacgccatgtacctgccagagattcgcggcttcagcaaggaaattgggctggcgttctggcgatacattctgactaacaccaccgttcagtgcgtaacatcgttcgctgcacgcaaattccgacacggtcagatgtactgcgcaatgattggccttaagcgtgtaggaaccatcaagaaatacttcaaaggcgtggatgacgtgactttttacagcggcacacgcgaagaactaatcgacttcctgaatcacgggagatag

SEQ ID NO: 480600 - DNA, 225 bp, Shigella flexneri; identical to SEQ ID NO: 133446

SEQ ID NO: 480601 - DNA, 225 bp, Shigella flexneri; identical to SEQ ID NO: 476353

SEQ ID NO: 480602 - DNA, 699 bp, Shigella flexneri
atgatgaagaaaacgcccacctctacgaaagactccttacccaacaaggagatgaatgatttgccccggctggcgagcgcggtgctgccactgtgttcgcaacatcccggtcagtgtggtcttttccctctggagaaaagtctggatgcgtttgccgcccggtatcgtctggccgaaatggcagagcatacgctggatgttcagtattacatctggcaggacgatatgtcggggcggttactgttttccgccctgttagccgcagcaaagcgtggcgttcgcgtccgtttgttgctggacgacaacaatacgcccggacttgacgacattttgcgcttgcttgacagtcatccacgcattgaagtccggctttttaatcctttctcgtttcgcttgctacgtccgcttggatatatcaccgacttttcccgtctcaatcgccggatgcacaataaaagtttcactgtcgatggcgtggttaccctagtgggaggacgaaatattggtgatgcctattttggtgcaggggaagagccacttttttcggatttagatgtcatggcaataggccccgtggtagaggatgttgccgatgatttcgcccgctactggtattgcaaatcggtttcacccttacagcaggtgctggatgtcccggaaggtgaaatggcggatcgcatcgagttacccgcctcctag

SEQ ID NO: 480603 - DNA, 339 bp, Shigella flexneri; identical to SEQ ID NO: 473924

SEQ ID NO: 480604 - DNA, 282 bp, Shigella flexneri
atgacgaaagagttgacgggtaaagccctgtttatggcgctcaggagccagcacccacctgccgggctaatccaccactccgctcgaggttcacagtactgcgcatacgattaccgggtcatacaggagcagtctggtctgaaaacatcaatgtcgcgtaaaggtaactgttacgacaacgctccgatggaaatcttctggggaacgctgaaaaatgaaagcctgagccactatcgttttaagagccgggatatttcgtcagcatacgggaaaactgattga

SEQ ID NO: 480605 - DNA, 225 bp, Shigella flexneri; identical to SEQ ID NO: 466930

SEQ ID NO: 480606 - DNA, 267 bp, Shigella flexneri; identical to SEQ ID NO: 462029

SEQ ID NO: 480607 - DNA, 213 bp, Shigella flexneri
atgaacaagtatatcaaacagtggtgctttgctgtgtttatgctctcgttaagtagtgtagcacttgcagctcctaaaggtatctgtacccctgataatggcgtatttcacagtacgcttgatttctcgggaggtaatgactccaacttactgatagtgttttatgttcagataatgcccgatggccttgtcatgcagctccaccgattttga

SEQ ID NO: 480608 - DNA, 2031 bp, Shigella flexneri; identical to SEQ ID NO: 474425

SEQ ID NO: 480609 - DNA, 372 bp, Shigella flexneri; identical to SEQ ID NO: 477910

SEQ ID NO: 480610 - DNA, 267 bp, Shigella flexneri; identical to SEQ ID NO: 462029

SEQ ID NO: 480611 - DNA, 207 bp, Shigella flexneri; identical to SEQ ID NO: 24440

SEQ ID NO: 480612 - DNA, 210 bp, Shigella flexneri; identical to SEQ ID NO: 479870

SEQ ID NO: 480613 - DNA, 288 bp, Shigella flexneri; identical to SEQ ID NO: 474636

SEQ ID NO: 480614 - DNA, 207 bp, Shigella flexneri; identical to SEQ ID NO: 24440

SEQ ID NO: 480615 - DNA, 207 bp, Shigella flexneri; identical to SEQ ID NO: 474271

SEQ ID NO: 480616 - DNA, 387 bp, Shigella flexneri
atggaaacgacattcgtgctggatgcactggagcaggcgttatgggcccgtcgaccgtccggcacggtccatcacagtgataaaggttctcagtatgtatcgctggtctacacacagcggcttaaggaagccggattactggcatcaacaggaagtacaggcgactcgtatgacaacgcgatggcggagagcatcaatggtctttacaaagcggaggtaatacaccgtaagagctggaaaaaccgtgcagaagtggaactggccacactaacgtgggtggactggtataacaatcgacgattgctggaaaggctgggccacatccctccggcagaagcagaaaaagcttattatgcttccatcggaaacgatgatctgtcagcctga

SEQ ID NO: 480617 - DNA, 207 bp, Shigella flexneri; identical to SEQ ID NO: 24440

SEQ ID NO: 480618 - DNA, 303 bp, Shigella flexneri; identical to SEQ ID NO: 473532

SEQ ID NO: 480619 - DNA, 267 bp, Shigella flexneri; identical to SEQ ID NO: 462029

SEQ ID NO: 480620 - DNA, 267 bp, Shigella flexneri; identical to SEQ ID NO: 462029

SEQ ID NO: 480621 - DNA, 210 bp, Shigella flexneri; identical to SEQ ID NO: 9340

SEQ ID NO: 480622 - DNA, 693 bp, Shigella flexneri; identical to SEQ ID NO: 473368

SEQ ID NO: 480623 - DNA, 921 bp, Shigella flexneri
atgaaaatgaataaaagtctcatcgccctctgtttatcagcagggttactggcaagcgcgcctggaattagccttgccgatgttaactacgtaccgcaaaacaccagcgacgcgccagccattccatctgccgcgctgcaacaactcacctggacaccggtcgatcaatctaaaacccagaccacccaactggcgaccggcggccaacaactgaacgttcccggcatcagtggtccggttgctgcgtacagcgtcccggcaaacattggcgaactgcccctgacgctgaccagcgaagtgaacaaacaaaccagcgtttttgcgccgaacgtgctgattcttgatcagaacatgaccccatcagccttcttccccagcagttatttcacctaccaggaactaggcgtgatgagtgcagagcggctggaaggcgttatgcgcctgacaccggcgttggggcagcaaaaactttatgttctggtctttaccacggaaaaagatctccagcagacgacccaactgctcgacccggctaaagcctatgccaaaggcgtcggtaactcgatcccggatattcccgatccggttgctcgtcataccagcgatggcttactgaaactgaaagtcaaaacgaactccagctccagcgtgttggtaggaccactatttggttcttccgctccagctccggttacggtaggcaacacggcggcaccagctgtggctgcacctgctccggtgccggtgaagaaaagcgagccgatgctcaacgacacggaaagttattttaataccgcgatcaaaaacgctgtcgcgaaaggtgatgttgataaggcgttaaaactgcttgatgaagctgaacgcctgggatcgacatctgcccgttccacctttatcagcagtgtaaaaggcaaggggtaa

SEQ ID NO: 480624 - DNA, 645 bp, Shigella flexneri; identical to SEQ ID NO: 476006

SEQ ID NO: 480625 - DNA, 282 bp, Shigella flexneri; identical to SEQ ID NO: 480157

SEQ ID NO: 480626 - DNA, 954 bp, Shigella flexneri; identical to SEQ ID NO: 474502

SEQ ID NO: 480627 - DNA, 288 bp, Shigella flexneri
atggtttccggtaatatcgacctgctcggctttacatggctcggtctgctcgtactccgcgtcatagccgcacgacacttcgcgcaggccatcttcgataagctgaatggcgctttcgtctttgacgataaggtcagccagcatcaaatcagactgctcacccgtcccgcgccggacattctggaggtgcccgacagcaagcactttccagttctcgggatttaccagccgcacattcccgttttcatcttcaggatgcaggatcgtgatgctcatcccttcgaatga

SEQ ID NO: 480628 - DNA, 234 bp, Shigella flexneri; identical to SEQ ID NO: 479183

SEQ ID NO: 480629 - DNA, 2034 bp, Shigella flexneri; identical to SEQ ID NO: 475764

SEQ ID NO: 480630 - DNA, 684 bp, Shigella flexneri; identical to SEQ ID NO: 474399

SEQ ID NO: 480631 - DNA, 825 bp, Shigella flexneri; identical to SEQ ID NO: 478357

SEQ ID NO: 480632 - DNA, 372 bp, Shigella flexneri; identical to SEQ ID NO: 477910

SEQ ID NO: 480633 - DNA, 219 bp, Shigella flexneri; identical to SEQ ID NO: 474644

SEQ ID NO: 480634 - DNA, 366 bp, Shigella flexneri; identical to SEQ ID NO: 473885

SEQ ID NO: 480635 - DNA, 210 bp, Shigella flexneri; identical to SEQ ID NO: 476166

SEQ ID NO: 480636 - DNA, 210 bp, Shigella flexneri
atgacggatggctggccgctgtatgaatcacgcctgaagggaaagctgcacgttatcagcaggcgttacactcagcgcattgagcgacataatctgaatctgagacaacatctggcaaggctgggacggaagtcactgtcgttctcaaaatcggtggagctgcatgacaaggtcatcgggcattatctgaacataaaacactatcagtaa

SEQ ID NO: 480637 - DNA, 219 bp, Shigella flexneri; identical to SEQ ID NO: 474644

SEQ ID NO: 480638 - DNA, 219 bp, Shigella flexneri; identical to SEQ ID NO: 474644

SEQ ID NO: 480639 - DNA, 270 bp, Shigella flexneri
atgggggaaacaatctcagagcaactggatatcattaataccgcctttaaagttatcgaaaccatacgtcccaaactggcctgtagccggtgtgatgtcatcgttcaggcaccacttcctcctaaaccgatcgaacgcggttatgccagtgcagggttacttgcacggatcctggtcagcaaatatatggaacatatccctttatatcgccagtcagaaatatacgcgcgacagggcgtggagctgagccgtaatactgaggtagcctga

SEQ ID NO: 480640 - DNA, 438 bp, Shigella flexneri
atgaaaataatacttctgtttttagcagccctggcaagttttaccgtacacgcgcagcctccttcacagaccgtagaacaaacagtccggcagatttatcagaactataaatcagatgccagtacgccttatttcggtgaaaccggagagcgggcgataacttcagcgcgtattcaacaggcgcttaccctgaacgacaatcttacactaccgggcaatattggctggctggattatgatccggtttgtgattgtcaggattttggcgatctggtgttagaaagcgtagcgataacccaaactgacgtcgatcatgccgatgccgttgtgcgctttcgtatctttaaagatgataaagaaaagaccacacagacactgaaaatggtggcggaaaatggtcgttgggtcattgatgatattgtcagcaatcatgggtaa

SEQ ID NO: 480641 - DNA, 324 bp, Shigella flexneri; identical to SEQ ID NO: 479507

SEQ ID NO: 480642 - DNA, 294 bp, Shigella flexneri
gtggcgcacgtcttcggtgaacgcactctggccacactggagcgtcttctgagcctgttgtcggcctttgaggtcgtggtatggatgacggatggctggccgctgtatgaatcacgcctgaagggaaagctgcacgttatcagcaagcgttacactcagcgcattgagcgacataatctgaatctgagacaacatctggcaaggctgggacggaagtcactgtcgttctcaaaatcggtggagctgcatgacaaggtcatcgggcattatctgaacataaaacactatcagtaa

SEQ ID NO: 480643 - DNA, 294 bp, Shigella flexneri; identical to SEQ ID NO: 476979

SEQ ID NO: 480644 - DNA, 1035 bp, Shigella flexneri
atgttgatagcaaagtatctctgtctgctgaagcccttttggctgcgtaagaataataaaacttcagtgttgttaatcattattatcctcgcaatgatccttggcgtggttaaaattcaggtctggttaaacgactggaataatgattttttcaatgcgctaagccagaaagaaaccgataagctttggcagctcgttctttggttccctgccctgctggggatctttgtattaatatccgtaaacaaaacatggttaattaaactactgactattcgctggcgcgaatggttaacagattactaccttaatcgctggtttgcagataaaaactactacttcacgcagatctacggcgagcataaaaatacagataaccctgaccaacgtatcgctgaagacattctcttactgatcaacaaaacgctcagtctttcatttggcttcatccagtcacttagcatgctgatcacctttaccgttattctttggcaaagcgcgggtacgctctcattcactgttggtggaacagaatggaatatccaggggtatatggtctataccgtcgtgctcattgtgatcggtggaactttatttacccataaggtgggtaaacgtattcgtccgcttaatgtggaaaaacaacgtagcgaagcgacatttcgaactaatcttgtgcagcataataagcaggcagaactgattgcgctaagcaatgctgagtctctacaacgccaggagttgcgcgacaattttcataccattaaagagaactggcatcgtttaatgaatcgtcagcggtggcttgattactggcaaaatatttattcgcgctcgcttagcgttcttccctactttctgttattgccgcagtttattagcgggcagatcaatctgggcggactgatgaaatcgcgccaggcatttatgctagtatcgaacaatttaagctggtttatttataaatatgacgaacttgctgaactggctgcggttatcgatcgcttgtatgagttccatcaactcactgaatag

SEQ ID NO: 480645 - DNA, 2310 bp, Shigella flexneri
atgtccggcagtgcttttgccgttacgcaccacgccttcagtagcggagcaggaaggacatctgatggaaatggaagccacgcaagcaccttaaaatcactatcatacactaaatcagtaagttggcagcattaccaagataaacaacaagttgaacaagctatcaacagtagcgtgaatcttgtccccttcggtttatctgcatcggactggaaagtgcatcgtggcgatttagtggtagaaggtaatatagagagtaatcaaaaattgattgttcttggcaatttgacagtcaaaggtaatatttccactttctctctttctaatccatgggttattctcggtaacgtgacggcaacgaatatagttacggattcaccactgttaattaccggttcgataaatgcaagtggactggtatttatcgactcatattacgataatccgtctacgattaaggggagtattaatgcgcgtggggtatttatcaatgacataattgcacctgttgttgcgtcttcgacaaatagtgaattcatggtccgtgcgagtgacaaaaatgacactgaaaatgtcaaaaaagcgctgatgataataaatcctgatgcatattattggggtctaataaatgatgaagatgctctgaaagaaatttttaagcgaagcaatattcgcatggcagggaatgtctgtaatcagatgaaaaaagaagcgctgtttcgccctaagccttctcctgagttagtgcaggaattgcaaatgctggatgaaggcaacgttgctgcatttgaaggacgagatattgcgacatttgatcttgccataatgcgaactctcccaaggcttaaaggaatttcagctaacctacgcaaacaacttattaatagcaatgatgaacaaacgattgaaagtatggcgagatatatgcctgacaatgagattctggagttgaccgatcagcaattgggttaccagcctgttgttctggggttgctcgaccgtgaaccgctctctgtcgaaataatgacgcgaatgagtcgtctacctgatggtgtcggtccgttgaatcttgcgctacgtgaaaatctccctctggatatcgtcatgactctggcgaaaagagattgggatatgatcattcaggagctttataaagatgcgtggttattgcccgaatccattattgatggctatatccgcagtgatgattcctctattcgtcaggtcggtgctggaggacaactcacttacaatcaggcaatgcagttggcgaacgattcatcaaacaatgttgtcacaagcttagcgttcaagctggcagagatgaaacaccatggtcaattattgcggatgacgccacaagagagtgacaaagttgcagcctatttataccaaaaattcgagaatgacgatgatctaatacgtgtgttatttttagcattgccagataacttacagtttaattttgttaaaaggatggagaaaaaatcccctgcctacttttgctgtcgggatatgcaggtaattcactctgacgctgctttacaacggttattgacacgtttcaacgatcctgaggggtggagtaatctggcgaaaaatcagtatctgagcacgtcgatgaaacaaaaaatttggcaacgtgctttatcgcatcggaaaaataatccgaaagcagattcagatgcatatgaaaccagcgctgatatgattttgtctgagctgattagccacggcgaagttgatgaccagatgctattaaatgccgccgccctgatacgtttggaagactgggactttttagagagtgcattagttagttgggataatttacccgctgttgttctcaaggaattacagcaaaacacgccacgcaatgatatttgggcgaagttttttctgaggcaggaaaatagctcccgtgcgcaggttgatgaagcattacgtgtttattatgcactcgaccccgatgcgttagcacaactggatgtactggcaaaacaaccggatcgtatatggtggagtacactggcgaaaagcaatctcacatttttcaagttcggcgcacttagcaaccgccacaccccctctgcggcactggcggcagaaattgatcccgagtggtggattgtggcgatgaataatccccgctttccagttgatgtattgaaggcgaggctgaaacgtgatcctttgctggcgttagagcttgttaaccctgaactggatttagtccgccagctggcgcttaacggtaagacgcgcgcaatacgggaacaagcgatgaggaaacttgatgagttgtattga

SEQ ID NO: 480646 - DNA, 294 bp, Shigella flexneri; identical to SEQ ID NO: 476979

SEQ ID NO: 480647 - DNA, 210 bp, Shigella flexneri; identical to SEQ ID NO: 9340

SEQ ID NO: 480648 - DNA, 1152 bp, Shigella flexneri; identical to SEQ ID NO: 479449

SEQ ID NO: 480649 - DNA, 204 bp, Shigella flexneri; identical to SEQ ID NO: 475480

SEQ ID NO: 480650 - DNA, 546 bp, Shigella flexneri
atgttgcatttaaaaaatattactgcgggtaatccgaaaacagcagaacaatatcagatgacaaaacgatattcggtcacctggcttttttcagaagacggaaaaaactggtatgaagagctgaagaatttcgccagcgacacaataaaaatagcttacaccggagatggtcgcgtggtgtgggtcggtaaggatgtgacaggcatcgagccacgcaatgccagcgttatcgaagttccggatattaccactaaccgacggattaccgcgccgggttactggttttaccgcaatgatgaatttgtctttgactacagactcaaagcggaagatgagcgtgatgcccttctggctcaggtcagtgcccggacaggggaatgggaagaagacctgctgctggggttaatcagcgacgaagataaagaaaagctgaaagcctgtcgtatttacgcgaaatcgctgcaggcgatggatttcagcaccatcactgataaatcctcatacaacgccattgaatggcccgcctctccggaaggttcttcctga

SEQ ID NO: 480651 - DNA, 303 bp, Shigella flexneri; identical to SEQ ID NO: 473532

SEQ ID NO: 480652 - DNA, 219 bp, Shigella flexneri; identical to SEQ ID NO: 474644

SEQ ID NO: 480653 - DNA, 219 bp, Shigella flexneri; identical to SEQ ID NO: 474644

SEQ ID NO: 480654 - DNA, 219 bp, Shigella flexneri; identical to SEQ ID NO: 474644

SEQ ID NO: 480655 - DNA, 390 bp, Shigella flexneri
gtggcggacctgacgtatgttgccacacaggagggatggttgtacctcgctggcatcaaagatgtttatacgtgtgaaattgtcggctacgccatgggagagcgcatgacaaaagagctgacaggtaaagccctgtttatggcgctcaggagccagcgcccacctgccgggctaatccaccactctgatcgaggttcacagtactgcgcatacgattaccgggtcatacaggagcagtttggtctgaaaacatcaatgtcgcgtaaaggtaactgttacgacaacgctccgatggaaagcttctggggaacgctgaaaaatgagagcctgagccactatcgttttaataaccgggatgaagccggtaatgctgccaacttactgatttag

SEQ ID NO: 480656 - DNA, 219 bp, Shigella flexneri; identical to SEQ ID NO: 474644

SEQ ID NO: 480657 - DNA, 141 bp, Shigella flexneri; identical to SEQ ID NO: 480580

SEQ ID NO: 480658 - DNA, 219 bp, Shigella flexneri; identical to SEQ ID NO: 474644

SEQ ID NO: 480659 - DNA, 219 bp, Shigella flexneri; identical to SEQ ID NO: 474644

SEQ ID NO: 480660 - DNA, 207 bp, Shigella flexneri; identical to SEQ ID NO: 478949

SEQ ID NO: 480661 - DNA, 423 bp, Shigella flexneri
atgttacgtcctgtagaaaccccaacccgtgaaatcaaaaaactcgacggcctgtgggcattcagtctggatcgcgaaaactgtggaattgatcagcgttggtgcgaaagcgcgttacaagaaagccgggcaattgcagtgccaggcagttttaacgatcagttcgccgatgcagatattcgtaattatgtgggcaacgtctggtatcagcgcgaagtctttataccgaaaggttgggcaggccagcgtatcgtgctgcgtttcgatgcggtcactcattacggcaaagtgtgggtcaataatcaggaagtgatggagcatcagggcggctatacgccatttgaagccgatgtcacgccgtatgttattgccgggaaaagtgtacgtatcaccgtttgtgtgaacaacgaactgaactggtag

SEQ ID NO: 480662 - DNA, 528 bp, Shigella flexneri
atgataagaatggatggaatttataaaaaatatctttcaataatttttgatccagcgttctatataaatagaaatcggttgaatttgccttctgaactgttagaaaatgccaaaagaatgacaactagtacagccatcccgagaaataaatatgatctaaattgcgatattgaacctttaagcggggtaaccgctatgtttgttgccaactggaatttacttccagctgttgcttattttatcggtagtcaagagtctcggttaattaatcatagtgagatggttattagttattatgggggcaaaatcagtaagcaaggggaggccgctattcgaagtggtttttggcatcttattgcgtggaaggaaaatatatctgttggtatatatgaaagaataaacttattatttaatccaattgctttggagggaaattatacgcctgtagaaagaaatttgtcccgattaaatgaaggtatgcaatatgcaaaaaggcactttaccggtatccagacatcatgcctatga

SEQ ID NO: 480663 - DNA, 726 bp, Shigella flexneri
atgattaggtataaaggttttattttattcttgttgctgatgttgattggatgtgagcaacgtgaagagttaatttctaatttatctcaaagacaggcaaatgaaataatatctgtgctagaacgccataatattactgctagaaaagttgatggaggtaaacaggggatctcggtacaagtcgaaaaggggacatttgcatcggcagttgatttgatgcgcatgtacgatttgccaaatccggagagagttgatatctcacaaatgtttcctacagattcattagtgtcttctccaagagctgaaaaggcccgtttatatagtgctattgagcaacggctggaacagtctttagtttctattggtggtgttatttcggcaaaaatacatgttagctatgatcttgaagaaaaaaatatatcttcaaaaccgatgcatatatcagtaatcgctatatatgactcaccgaaagagtctgaactattagttagtaatattaagcgatttttgaaaaacaccttttctgatgttaagtatgaaaatatatctgtcatattaactccgaaagaagaatatgtttatacaaatgtacaacctgttaaggaagttaaatcggaatttttaacaaatgaagtaatatatttatttctcgggatggctgtactagttgtcattcttttggtatgggcattcaaaacagggtggttcaagagaaacaaaatatga

SEQ ID NO: 480664 - DNA, 366 bp, Shigella flexneri
atgattgatgtcttagggccggagaaacgcagacggcgtaccacacaggaaaagatcgcaattgttcagcagagctttgaaccggggatgacggtctccctcgttgcccggcaacatggtgtagcagccagccagctatttctctggcgtaagcaataccaggaaggaagtcttactgctgtggccgccggagaacaggttgttcctgcctctgaacttgctgccgccatgaagcagattaaagaactccagcgcctgctcggcaagaaaacgatggaaaatgaactcctcaaagaagccgttgaatatggacgggcaaaaaagtggatagcgcacgcgcccttattgcccggggatggggagtaa

SEQ ID NO: 480665 - DNA, 411 bp, Shigella flexneri
gtgatagtcttaatactagtttttagacttgtcattggagaacagattattgatgtcttagggccggagaaacgcagacggcgtaccacacaggaaaagatcgcaattgttcagcagagctttgaaccggggatgacggtctccctcgttgcccggcaacatggtgtagcagccagccagttatttctctggcgtaagcaataccaggaaggaagtcttactgctgtggccgccggagaacaggttgttcctgcctctgaacttgctgccgccatgaagcagattaaagaactccagcgcctgctcggcaagaaaacgatgaaaaatgaactcctcaaagaagccgttgaatatggacgggcaaaaaagtggatagcgcacgcgcccttattgcccggggatggggagtaa

SEQ ID NO: 480666 - DNA, 411 bp, Shigella flexneri
gtgatagtcttaatactagtttttagactagtcattggagaacagattattgatgtcttagggccggagaaacgcagacggcgtaccacacaggaaaagatcgcaattgttcagcagagctttgaaccggggatgacggtctccctcgttgcccggcaacatggtgtagcagccagccagttatttctctggcgtaagcaataccaggaaggaagtcttactgctgtggccgccggagaacaggttgttcctgcctctgaacttgctgccgccatgaagcagattaaagaactccagcgcctgctcggcaagaaaacgatggaaaatgaactcctcaaagaagccgttgaatatggacgggcaaaaaagtggatagcgcacgcgcccttattgcccggggatggggagtaa

SEQ ID NO: 480667 - DNA, 411 bp, Shigella flexneri
gtgatagtcttaatactagtttttagacttgtcattggagaacagattattgatgtcttagggccggagaaacgcagacggcgtaccacacaggaaaagatcgcaattgttcagcagagctttgaaccggggatgacggtctccctcgttgcccggcaacatggtgtagcagccagccagttatttctctggcgtaagcaataccaggaaggaagtcttactgctgtggccgccggagaacaggttgttcctgcctctgaacttgctgccgccatgaagcagattaaagaactccagcgcctgctcggcaagaaaacgatggaaaatgaactcctcaaagaagccgttgaatatggacgggcaaaaaagtggatagcgcacgcgcccttattgcccggggatggggagtaa

SEQ ID NO: 480668 - DNA, 486 bp, Shigella flexneri; identical to SEQ ID NO: 473244

SEQ ID NO: 480669 - DNA, 1089 bp, Shigella flexneri
atgaatatactatttacggaatcatcaccgaatataggtggtcaggaattacaggctgttgctcaaatgaaggccctgaagaaaatggggcattcagttctgcttgtctgcagggaaaacagcaaaattgcttttgaagccagtaaattggggattgatatcacattcgcgttatttcgaaacagtcttcacatccctactgcatggagattactcggaatagttcatggttttcagcccaatgcaatcgtttgtcacagtgggcatgatagcaatattgttggtttagtacggttattcactaggaaacatccattcagaattatcaggcaaaagacatatttgacacgaaaaacaaaagttttttcaataaatcatttttgcgatgaggtgattgttcccggaacaagtatgaagacacatctggagcaggaaggatgtcgaacccgggttactgttgtgcctccaggctttgatttccagaaattatacgttgattcccgaaacagtttgcctccaaatgttctttcttggctggcgtcccgaaggggatgccccgttattgctcaggtaggaatgttgcgcccggaaaaagggcacgaatttatgttgaatttactgttccatttaaaaatgaatggacgacagttctgttggttgattgtggggtctggttcgcctgaactgcgggagcatttacagtatcagattgacagtatgggcatgcatgatgatgtttttattgctgacaatgtttttcctgccgcccccgtatatcgggttgccagtctggtggttctgccttcagaaaacgaatcgtttggtatggtactggcagaagcatcggcattttctgtgcctgtactggccagtcagattggtggaatccctgatgttattcagaataaccagaccgggacattgttaccagcaggtaataagcacgcatggatgtgcgccctgaatgatttttttaatgaccctgggcgtttttatcagatggctcgccaggcaaaacaggatatagaagagcggtttgatattaataaaactgcgttaaaaatactcacattagcgaagcacaagtaa

SEQ ID NO: 480670 - DNA, 207 bp, Shigella flexneri; identical to SEQ ID NO: 24440

SEQ ID NO: 480671 - DNA, 366 bp, Shigella flexneri; identical to SEQ ID NO: 462994

SEQ ID NO: 480672 - DNA, 213 bp, Shigella flexneri
atgattgcgcagataggatttggaatagtcacgctgaagcctataattgctaaagccatagggataaataatttggtgatatactccattccacatatgttaagagtatttcttccagctcttacaataaagtcatttccacaaattatttttgctatgaaaatattaaagattatcaagcctaccgtggtgataatagtattaatagcttga

SEQ ID NO: 480673 - DNA, 321 bp, Shigella flexneri; identical to SEQ ID NO: 477003

SEQ ID NO: 480674 - DNA, 366 bp, Shigella flexneri; identical to SEQ ID NO: 462994

SEQ ID NO: 480675 - DNA, 366 bp, Shigella flexneri
atgattgatgtcttaggaccggagaaacgcagacggcgtactacacaggaaaagatcgctattgttcagcagagttttgaaccgggaatgacggtctcccttgttgcccggcaacacggtgtggcagccagccagttatttctctggcgcaagcaataccaggagggaagtcttactgctgtggccgcaggagaacaggttgttcctgcctctgaacttgctgctgccatgaagcagattaaagaactccagcgcctgctcggcaagaaaacgatggaaaatgaactcctcaaagaagccgttgaatatggacgggcaaaaaagtggatagcgcacgcgcccttattgcccggggatggggagtaa

SEQ ID NO: 480676 - DNA, 225 bp, Shigella flexneri; identical to SEQ ID NO: 476353

SEQ ID NO: 480677 - DNA, 207 bp, Shigella flexneri; identical to SEQ ID NO: 476087

SEQ ID NO: 480678 - DNA, 366 bp, Shigella flexneri
atgattgatgtcttagggccggagaaacgcagacggcgtaccacacaggaaaagatcgcaattgttcagcagagctttgaaccggggatgacggtctccctcgttgcccggcaacatggtgtagcagccagccagttatttctctggcgtaagcaataccaggaaggaagtcttactgctgtggccgccggagaacaggttgttcctgcctctgaacttgctgccgccatgaagcagattaaagaactccagcgcctgctcggcaagaaaacgatgaaaaatgaactcctcaaagaagccgttgaatatggacgggcaaaaaagtggatagcgcacgcgcccttattgcccggggatggggagtaa

SEQ ID NO: 480679 - DNA, 366 bp, Shigella flexneri; identical to SEQ ID NO: 462994

SEQ ID NO: 480680 - DNA, 558 bp, Shigella flexneri; identical to SEQ ID NO: 478619

SEQ ID NO: 480681 - DNA, 213 bp, Shigella flexneri; identical to SEQ ID NO: 462242

SEQ ID NO: 480682 - DNA, 219 bp, Shigella flexneri; identical to SEQ ID NO: 478752

SEQ ID NO: 480683 - DNA, 318 bp, Shigella flexneri; identical to SEQ ID NO: 480420

SEQ ID NO: 480684 - DNA, 267 bp, Shigella flexneri; identical to SEQ ID NO: 462029

SEQ ID NO: 480685 - DNA, 243 bp, Shigella flexneri; identical to SEQ ID NO: 464973

SEQ ID NO: 480686 - DNA, 189 bp, Shigella flexneri; identical to SEQ ID NO: 470416

SEQ ID NO: 480687 - DNA, 267 bp, Shigella flexneri; identical to SEQ ID NO: 462029

SEQ ID NO: 480688 - DNA, 351 bp, Shigella flexneri; identical to SEQ ID NO: 477225

SEQ ID NO: 480689 - DNA, 366 bp, Shigella flexneri; identical to SEQ ID NO: 462994

SEQ ID NO: 480690 - DNA, 366 bp, Shigella flexneri; identical to SEQ ID NO: 480664

SEQ ID NO: 480691 - DNA, 213 bp, Shigella flexneri; identical to SEQ ID NO: 474663

SEQ ID NO: 480692 - DNA, 480 bp, Shigella flexneri; identical to SEQ ID NO: 464883

SEQ ID NO: 480693 - DNA, 294 bp, Shigella flexneri; identical to SEQ ID NO: 476979

SEQ ID NO: 480694 - DNA, 189 bp, Shigella flexneri; identical to SEQ ID NO: 464712

SEQ ID NO: 480695 - DNA, 1668 bp, Shigella flexneri; identical to SEQ ID NO: 16546

SEQ ID NO: 480696 - DNA, 1149 bp, Shigella flexneri; identical to SEQ ID NO: 477067

SEQ ID NO: 480697 - DNA, 474 bp, Shigella flexneri; identical to SEQ ID NO: 475593

SEQ ID NO: 480698 - DNA, 189 bp, Shigella flexneri; identical to SEQ ID NO: 470416

SEQ ID NO: 480699 - DNA, 690 bp, Shigella flexneri; identical to SEQ ID NO: 476993

SEQ ID NO: 480700 - DNA, 294 bp, Shigella flexneri
atgcagacccgggataaccttgagcgcatggtggttatcctggcgtttatagcggtacgggtgctgggcctgcggcagggaggtgtcagtgaagaaacacaaaatgacagctgtgagaaaatactgacgccgacagagtggaaactactgtgggttaagctggaaggaaagccgcttccggtgcaggcaccgaccctgaaatgggcctggggcgatggcatgacagcaaacgcacaggtcgtcccggttggggcgtcatgtgggatggctggtcagacttcaggatatggttga

SEQ ID NO: 480701 - DNA, 951 bp, Shigella flexneri
atgttttctgtaagtaacttatcatttatcggtttccttaaaaggattattttttcctcagattcactaccggggaagtgggaacacagaaaatttcggttcatgtacattttgcgatgttctataaatccggttgtcagtattcgatattattatgaactgcgttccttgccgtgcattgaggatattctggcaatacaccccacgttgccagcaagaattcatcgcccttatttgcataaaggggggcgcgcctggacccgtgggcaatatattcttgagcattatcgctttgtgcaaaatttgccagaaaaatattctaaatttttgtttccacaaaaatcggtatcattagtccaattcatcgggaaagatggagagaattttgatatccagtgttctcccagtggttttgaccgggaaggagagttgatgttgtcattgttttacaataaaacagttattgcccggttaacattttcagtcattctgactcaaaatggacacaccgcttttattggcggattacagggagcccccaaaaataccggacctgatattattcggtgcgcaacccgggcctgttatgggcttttcccaaaacggattatttttgaagcattttgtgcgttgatgaaagcttgtaatgtctctgagtgtctggcagtcagtgagcacagtcatgttttccggcaattgagatactggtatcagaaacgcaaaacctttgttgctgtctacagtgatttctgggagtctgtagcagggaaaacctgtggtgactggtacaaattaccaacacaggtggttcgaaagccgctaagcaatatagctagtaaaaaacgctctgagtatcgaaaacgatacgctttgctggattatatccatgaaactgctatccgctctttggatgcatatcctgtacactcagaacatcaggacttaaattaa

SEQ ID NO: 480702 - DNA, 372 bp, Shigella flexneri; identical to SEQ ID NO: 476556

SEQ ID NO: 480703 - DNA, 360 bp, Shigella flexneri; identical to SEQ ID NO: 474629

SEQ ID NO: 480704 - DNA, 207 bp, Shigella flexneri; identical to SEQ ID NO: 479610

SEQ ID NO: 480705 - DNA, 219 bp, Shigella flexneri; identical to SEQ ID NO: 478752

SEQ ID NO: 480706 - DNA, 366 bp, Shigella flexneri; identical to SEQ ID NO: 473885

SEQ ID NO: 480707 - DNA, 180 bp, Shigella flexneri; identical to SEQ ID NO: 474761

SEQ ID NO: 480708 - DNA, 564 bp, Shigella flexneri; identical to SEQ ID NO: 475755

SEQ ID NO: 480709 - DNA, 225 bp, Shigella flexneri; identical to SEQ ID NO: 476353

SEQ ID NO: 480710 - DNA, 540 bp, Shigella flexneri
atgccccctctttctgttaccaggaagcatactggtgatcgctggaggaatagtttttggcccgctcttaggacacaactctcattaattgccgcaacgctggcctcctcgtgctcattcctgctggcgcgctggctgggacgtgatttactgctgaaatacgtgggccatagccataccttccaggccattgaaaaaggcattgcgcgtaacggtattgattttcttattctgacccgcttaatcccgttgtttccttacaatattcaaaattacgcttacggattcaccaccatcgccttctggccttatacccttatttcggcactcacgaccctgcccggtattgttatttataccgtgatggcaagcgatctcgccaatgaaggcattacgctgcgctttattttacaactctgtctggcgggcctggcgctgtttattctcatccagctcgcaaaactctacgcccgacacaaacatgtggatctgtctgcttcgcgccgcagcccacttactcacccaaaaaatgaaggatag

SEQ ID NO: 480711 - DNA, 1167 bp, Shigella flexneri; identical to SEQ ID NO: 478900

SEQ ID NO: 480712 - DNA, 546 bp, Shigella flexneri; identical to SEQ ID NO: 471944

SEQ ID NO: 480713 - DNA, 210 bp, Shigella flexneri; identical to SEQ ID NO: 9340

SEQ ID NO: 480714 - DNA, 303 bp, Shigella flexneri; identical to SEQ ID NO: 473532

SEQ ID NO: 480715 - DNA, 1215 bp, Shigella flexneri; identical to SEQ ID NO: 476539

SEQ ID NO: 480716 - DNA, 849 bp, Shigella flexneri; identical to SEQ ID NO: 474529

SEQ ID NO: 480717 - DNA, 825 bp, Shigella flexneri; identical to SEQ ID NO: 478357

SEQ ID NO: 480718 - DNA, 303 bp, Shigella flexneri; identical to SEQ ID NO: 473532

SEQ ID NO: 480719 - DNA, 561 bp, Shigella flexneri; identical to SEQ ID NO: 475523

SEQ ID NO: 480720 - DNA, 270 bp, Shigella flexneri; identical to SEQ ID NO: 480123

SEQ ID NO: 480721 - DNA, 207 bp, Shigella flexneri
atgatttacccaacgaatacaggaaaaagcggagaacaccttcgtctcaccacgctggaaagtgtctggattcagggaaaactacgtatgtgggggcgctggtcgtatattggtgtgaagtggcacactgaatttggccacctgaacagaggtgatatgctcacctcagaacaacacaggtgctccaatgaaaaaaagaaattttag

SEQ ID NO: 480722 - DNA, 504 bp, Shigella flexneri; identical to SEQ ID NO: 479252

SEQ ID NO: 480723 - DNA, 504 bp, Shigella flexneri; identical to SEQ ID NO: 479351

SEQ ID NO: 480724 - DNA, 210 bp, Shigella flexneri; identical to SEQ ID NO: 480636

SEQ ID NO: 480725 - DNA, 549 bp, Shigella flexneri; identical to SEQ ID NO: 478683

SEQ ID NO: 480726 - DNA, 630 bp, Shigella flexneri; identical to SEQ ID NO: 479506

SEQ ID NO: 480727 - DNA, 393 bp, Shigella flexneri
atgcataatgtaagcaccacaaccactggttttcctcttgccaaaatattggcttccactgagcttggagacaatactatccaagctgcaaatgatgcagctaacaaattattttctcttacaattgctgatcttactgctaaccaaaatattaatacaactaatgcacactcaacttcaaatatattaatccctgaacttaaagcaccaaagtcattaaatgcaagttcccaactaacgcttttaattggaaaccttattcaaatactcggtgaaaaatctttaactgcattaacaaataaaattactgcttggaagtcccagcaacaggcaagacagcaaaaaaacctagaattctccgataaaattaacactcttctatctgaaatgtaa

SEQ ID NO: 480728 - DNA, 861 bp, Shigella flexneri
atgatcctcaaaattagcaatttcattgacgcaagcaatacaaaagggcctatacgcgttgaagatacagagcatggacctatattgatagcacagaaattcaacctaaaggatctctttttcagaacattaagcactattaatgcaaagataaattcacagatattaaatgaacaactaaaaaattatcgactagagaatcaaaaatccttattgcttttcctcaatacattagctagcgaaaaatctgcagaaagtgcgtttgccgcctatgaagcagctaaaaactcaattcaacactctttcacaggtagagacatcaaattaatgttgaataccgcagagcgttttcatggcatcggtacagccaaaaatcttgaaagacatttagtttttcgttgctggggaaatagaggcataacccatttagggcatactagtatcagtataaaaaacaatttactacaggaaccaactcatacctatctcagctggtatcccggcgggaatgttacaaaagatacagaaataaactacctttttgaaaaacgctcaggttacagtgtcgatacctataagcaagacaaactaaatatgatttcagaccaaacagccgaaagacttgatgcaggccaagaggttagaaacttattaaattcaaaacaagatcaaaataacaacaaaaaaatattttttcccagagctaatcaaaaaaagtatacattccattatcaggtgataataaaacaaaggatggtaaaatcagccataacctttttggccttgatgaaacaaacatgtcaaaatttatatgcaaaaagaaagcagatgctttcagacaattggcaaattataaattaa

SEQ ID NO: 480729 - DNA, 405 bp, Shigella flexneri
atgagcagagtcaccgcgattatctccgctctggttatctgcatcatcgtctgcctgtcatgggctgttaatcattaccgtgataacgccattacctacaaagagcagcgcgacaaaaacgccggagaactgaagctggcgaacgcaaccattactgacatgcagcagcgccagcgtgatgctgatgcactcgatgctaaatacacgaaggagttagctgatgcgaaagctgaaaatgatgctcttcggcgcaagcttgataatggtggtcgggtgctcgtcaaaggaaaatgccctgtgccatcctcagccgaaacctccagcgcctccggcatgggcaatgatgccaccgtcgaactctctccagttgctggacgaaacgttctcggtatccgggacgggtga

SEQ ID NO: 480730 - DNA, 354 bp, Shigella flexneri; identical to SEQ ID NO: 476372

SEQ ID NO: 480731 - DNA, 237 bp, Shigella flexneri; identical to SEQ ID NO: 474596

SEQ ID NO: 480732 - DNA, 372 bp, Shigella flexneri; identical to SEQ ID NO: 476556

SEQ ID NO: 480733 - DNA, 888 bp, Shigella flexneri; identical to SEQ ID NO: 474634

SEQ ID NO: 480734 - DNA, 303 bp, Shigella flexneri; identical to SEQ ID NO: 473532

SEQ ID NO: 480735 - DNA, 342 bp, Shigella flexneri
atggcgctcaggagccagcgcccacctgccgggctaatccaccactctgatcgaggttcacagtactgcgcatacgattaccgggtcatacaggagcagtctggtctgaaaacatcaatgtcgcgtaaaggtaactgttacgacaacgctccgatggaaagcttctggggaacgctgaaaaatgagagcctgagccactatcgttttaataaccgggatgaagccatctcagtaatacgggaatacattgagattttctacaatcgtcagcgtcgtcactctcgtctggggaatatctccccggcagccttcagggaaaaatatcatcagatgactgcttaa

SEQ ID NO: 480736 - DNA, 354 bp, Shigella flexneri; identical to SEQ ID NO: 474642

SEQ ID NO: 480737 - DNA, 294 bp, Shigella flexneri
atgagaaccgacagcaacaaggcatggaagggagcgttaaagcgggcaggcattagcaacttccgcttccatgacctgaggcatacctgggcaagctggctggttcagtccggtgtctctcttcttgcgcttaaagagatgggaggatgggaaactctcgaaatggttcaaagatacgcccacctttcagccgggcatcttaccgagcacgcgagcaaaatcgatgcgattataagtcgcaatggcacaaatacggcacaagaggagaacgtagtttacttaaatgcgaggtaa

SEQ ID NO: 480738 - DNA, 261 bp, Shigella flexneri; identical to SEQ ID NO: 475838

SEQ ID NO: 480739 - DNA, 294 bp, Shigella flexneri; identical to SEQ ID NO: 25632

SEQ ID NO: 480740 - DNA, 963 bp, Shigella flexneri
gtgcaaaagaatggcgataccttgtccggtgggcttacttttgaaaacgactcaatccttgcctggattcgaaatactgactgggcgaagattggatttaaaaatgatgccgacagcgatactgattcatacatgtggtttgaaacaggcgacaacggcaatgaatatttcaaatggagaagcaaacgaagcaccacaacaaaagacctgatgaatcttaaatgggatgctttgtctgtccttgttaaagcccttttcagcagtgaagtaaaaatatcgacagtcaatgcactaaggatatttaattcatcttttggtgctatttttcgtcgttctgaagaatgcctgcatatcatcccgacacgagagaatgagggagaaaatggtgatatagggccactacgcccctttacgcttaatctcagaactggtcggataagcatggggcatggtcttgatgttacaggggatatatttgcaaaccgttttgcaattaacagtagtaccggcatgtggattcatatgcgtgaccagaatgttattttgggacgcaatgcggtatccaccgatggtgcacaggcattacttcgtcaggaccatgctgatcgcaaatttatgattggtgggctgggaaataagcaatttggcatctacatgattaataactcaaggacagctaatggcaccgatggtcaggcgtacatggataataacgggaactggctttgcggtgcgcaagttattcccggcaactatggcaattttgactcacgctatgtgagagatgtccgacttggcacacgtgttgttcaattgatggcgcgtggtggtcgttatgaaaaagccggacacgcaattaccggattaagaatcattggtgaagtagatggcgatgatgaagccatcttcagaccaatacaaaaatacatcaatggcacatggtataacgtcgcacaggtgtaa

SEQ ID NO: 480741 - DNA, 528 bp, Shigella flexneri
atgcagcatttaaaaaatattaagtccggaaatccaaaaacaaaagaacaatatcagctaacaaagaattttgatgttatctggttatggtccgaagacggtaaaaactggtatgaggaagtaaataactttcaggacgacaccataaagattgtatacgacgaaaataatattattgttgccataaccaaagatgcctcaacgcttaatcccgaaggctttagtgtcgttgagattccagatataacagccaatcgtcgtgccgatgattcaggaaagtggatgtttaaggatggagctgtagttaaacggatttatacggcagacgaacagcaacaacaagccgaatcacaaaaggccgcattgttttccgaagctgaatcagtcatccagccgctggaacgcgctgtcaggctgaatatggcaacagacgaggaacgcacacgactggaagcatgggaacgctacagtgttctggtcagccgtgtggatacggcaaatcctgaatggccacaaaagcctgaataa

SEQ ID NO: 480742 - DNA, 534 bp, Shigella flexneri; identical to SEQ ID NO: 20324

SEQ ID NO: 480743 - DNA, 948 bp, Shigella flexneri
ttgcaggaaacggtaaatcaggcttctggcgcattacagaaaaaccagaacggcgcagatattccaggaaaagataccttcacaaaaaatattggtgcatgtcgcgcttttcacggtgctattagtacaggggcagggaactggacaacggcacaattgattgaatggctggattctcaaggggcattcaatcacccatactggatgtgcaaatgttcatggtcatacggcaataataaaattattaccgatactggctgtggaactattcatcttgcaggttgcgttattgaggttatgggtaataaaggtgccatgaccatccgtgtaacaacaccaagcacttccagcggtggcggaatcactaacgctcaattcacttatattaatcatggtgatgcttacgctcctggctggcgacgagactacaacacgaaaaacctgcaacctgcatttgctttagggcagacaggaaacagggttgcaaatgataaagctgttggctggaactggaatagcggtgtttatgatgcagacctaaaaggcgcatcaacattaatcctccactttaatatgaatacggggagttgccctgctgtacagttccgcgtgaattacagaaatggcggtatcttttatcgttcagcgcgtgatggttatggctttgaagctaactggtcagagttttacaccacaacacgcaaaccctctgcgggagatgttggtgcatatacgcaggcagaatgtaactcaaggtttattacaggtattcgccttggcggtctgtcatctgttcagacatggaatggtcccggctggtctgacaggtcaggttatgtcgttacgggttcagttaacggaaaccgtgatgaattaattgatacaactcaggcaaggccaattcagtattgcattaatggaacgtggtataacgcggggagtatttaa

SEQ ID NO: 480744 - DNA, 1485 bp, Shigella flexneri
atgattgaatggattattcgtcgctcggtggcgaaccgttttttggtgctgatgggcgcgttgtttctgagcatctggggcacctggaccatcattaatacgccagtggatgcgttgccggatctctccgatgtgcaggtgattattaaaaccagctatcccggccaggcaccgcaaatcgttgaaaatcaggtgacttatccgctaaccaccaccatgttgtcggtgcctggcgcgaagactgtgcgtggtttctcgcagtttggcgactcttatgtgtatgtcattttcgaagatggcaccgatccgtactgggcgcgttcgcgggtgctggagtacctcaaccaggtacagggtaagctgcctgcgggagtcagcgccgagctgggaccagatgccacgggtgttggctggatctatgaatatgcactggtggatcgcagcggtaagcacgatcttgccgatttacgctcattgcaggactggtttctcaaatatgagctgaaaaccattcctgacgttgcggaagtggcgtcggtaggcggtgtggtgaaagagtatcaggtggttatcgatcctcagcgcctggcgcagtatggcatcagtctcgccgaagtaaaaagcgcgctggatgcttcaaaccaggaagcgggcggttcgtcaatcgaactggcggaagcagaatatatggtgcgcgccagcggctatctacaaacgctcgacgactttaatcacatcgttttaaaagccagtgaaaatggcgtgcccgtttatctgcgcgatgttgcgaaggtccagattggcccgaagatgcgccggggcattgccgaactaaacggcgaaggcgaagtggcgggcggggtggtgatcctgcgatccggcaaaaacgcccgagaagtgatcgccgccgtgaaggacaaactggaaacgctgaaaagtagtctgccggaaggcgtggagatagttacaacatacgaccgcagccagctcattgaccgggccatcgacaacctcagcggcaagttgctggaagagtttattgtggtggcggtagtctgcgcgccgtttctctggcatgtgcgctcggcgctggtggcgattatttcgttgccgctggggttgtgtattgcttttattgtcatgcccttccaggggctgaatgccaatattatgtcgctgggtggcattgcgattgccgtcggggcgatggtcgatgccgctatcgtcatgatcgagaatgcgcataaacggctggaagagtggcagcaccagcatcctgacgccacgctggataataaaacgcgctggcaggtgatcaccgatgcgtctgttgaagtggggccggcgctgtttatcagtctgctgattatcacgttgtcgtttatcccgatcttcaccctggaagggcaggaagggcgtctgtttggcccgttggcgttcaccaaaacgtatgcgatggcgggtgcgcgctgctggcgatcgtag

SEQ ID NO: 480745 - DNA, 1062 bp, Shigella flexneri
atgacctgttcaacttcattaagcggcaaaaacaggattgtccttatcgctggcattctgatgattgccacaacattacgcgtcacctttaccggcgcagcgccgttactggatacgattcgttccgcttactcgctgacgacagcgcaaaccggcttattaaccaccctgccattattggcctttgcgctaatctcacctctggctgccccggtggcgcgacgttttggtatggaacgtagcctgtttgccgcgttacttttgatctgtgcaggtatcgcaattcgttctctcccttcgccttacttattatttggcggtacagcggtcattggcggtgggattgcattaggcaatgtcttactgccaggattaattaaacgcgatttccctcattccgtcgccagacttaccggcgcatattccctgacaatgggagctgcagcggcactgggatcggctatggtcgtgccgctggctttgaacggttttggctggcaaggcgcgttgttcatgctgatgtgttttcctctgctggctctttttttatggctgccacagtggcgaagtcagcaacatgcaaatttgagtacctcacgcgccttacatactcggggtatctggcgttcgccacttgcctggcaggtaacattgtttcttgggatcaactcactggtctattacgtgattattggctggcttccggcgatcctcatcagtcacggctatagcgaagcacaggcgggttcactgcatggtttgctgcaactagccacagcagctcccggtttgctgatcgcacttttcttacatcatgtgaaagaccagcgtggtattgcagcgttcgttgccttgatgtgcgcagtgggcgcggttgggctctgctttatgccagcgcacgcgatcacctggactctgcttttcggttttggttccggcgcaacaatgatactggggttgacgttcattggtcttcggcaagttctgcgcatcaggcggcggcactctcggggatggcacaatccgtcgggtatttgctggcagcctgtgggccgccgctaa

SEQ ID NO: 480746 - DNA, 621 bp, Shigella flexneri; identical to SEQ ID NO: 479960

SEQ ID NO: 480747 - DNA, 621 bp, Shigella flexneri
atgcgccagaatgcgctgttgcttgagcgaaaacctgctgtaccgccatcgaaacgggcacatacaggcagagtggccgtgaaagaaagcaatcagcgatggtgctctgacgggttcgagttctgctgtgataacggagagagactgcgtgtcacgttcgcgctggactgctgtgatcgtgaggtactgcactgggcggtgactaccggcggcttcaacagtgaaacagtacaggacgtcatgctgggagcggtggaacgccgcttcggcaacgatcttccgtcgtctccagtggagtggctgacggataatggttcatgctaccgggctaatgaaacacgccagttcgcccggatgttgggacttgaaccgaagaacacggcggtgcggagtccggagagtaacggaatagcagagagcttcgtgaaaacgataaagcgtgactacatcagtatcatgcccaaaccagacgggttaacggcagcaaagaaccttgcagaggcgttcgagcattataacgaatggcatccgcatagtgcgctgggttatcgctcgccacgggaatatctgcggcagcgggcttgtaatgggttaagtgataacagatgtctggaaatatag

SEQ ID NO: 480748 - DNA, 207 bp, Shigella flexneri; identical to SEQ ID NO: 24440

SEQ ID NO: 480749 - DNA, 294 bp, Shigella flexneri; identical to SEQ ID NO: 478922

SEQ ID NO: 480750 - DNA, 639 bp, Shigella flexneri; identical to SEQ ID NO: 476552

SEQ ID NO: 480751 - DNA, 243 bp, Shigella flexneri; identical to SEQ ID NO: 462679

SEQ ID NO: 480752 - DNA, 1098 bp, Shigella flexneri; identical to SEQ ID NO: 475447

SEQ ID NO: 480753 - DNA, 378 bp, Shigella flexneri; identical to SEQ ID NO: 477037

SEQ ID NO: 480754 - DNA, 219 bp, Shigella flexneri; identical to SEQ ID NO: 474644

SEQ ID NO: 480755 - DNA, 567 bp, Shigella flexneri
atgcgccagaacgcgctgttgcttgagcgaaaacctgctgtaccgccatcgaaacgggcacatacaggcagagtggccgtgaaagaaagcaatcagcgatggtgctctgacgggttcgagttctgctgtgataacggagagagactgcgtgtcacgttcgcgctggactgctgtgatcgtgaggcactgcactgggcggtgactaccggcggcttcaacagtgaaacagtacaggacgtcatgctgggagcggtggaacgccgcttcggcaacgatcttccgtcgtctccagtggagtggctgacggataatggttcatgctaccgggctaatgaaacacgccagttcgcccggatgttgggacttgaaccgaagaacacggcggtgcggagtccggagagtaacggaatagcagagagcttcgtgaaaacggtaagcgccccatcagcgacgtcttgtgaaaattgtcctgtctggcaacaatcgcgcccatctatattgatggacacgaacgatgaattcccagacaacaaaagatattccctgcttccgttcttatttgcctga

SEQ ID NO: 480756 - DNA, 327 bp, Shigella flexneri; identical to SEQ ID NO: 466843

SEQ ID NO: 480757 - DNA, 354 bp, Shigella flexneri; identical to SEQ ID NO: 466835

SEQ ID NO: 480758 - DNA, 354 bp, Shigella flexneri; identical to SEQ ID NO: 474642

SEQ ID NO: 480759 - DNA, 327 bp, Shigella flexneri; identical to SEQ ID NO: 477049

SEQ ID NO: 480760 - DNA, 294 bp, Shigella flexneri; identical to SEQ ID NO: 476979

SEQ ID NO: 480761 - DNA, 276 bp, Shigella flexneri
atggttctggaaagtcagggcgaatatgactcacaatgggcagcgatttgttccattgccccaaagattggctgtatactggaaactctgcgtgtctgggttcgccagcatgagcgggataccgggggcggtgatggagggctcaccaccgctgaacgtcagcgtctgaaagagccggaacgtgaaaatcgtgaactgcgccgcagtaacaatatccttcgcctggcttccgcttattttgcaaaggcggagttcgaccgcctctggaaaaaataa

SEQ ID NO: 480762 - DNA, 189 bp, Shigella flexneri; identical to SEQ ID NO: 463227

SEQ ID NO: 480763 - DNA, 213 bp, Shigella flexneri
atgctttacacatgtaggttagcctcttacgtgccgaaaggcaaggagaagcaggctatgaagcagcaaaaggcgatgttaatcgccctgatcgtcatctgtttaaccgtcatagtgacggcactggtaacgaggaaagacctctgcgaggtacgaatccgaaccggccagacggaggtcgctgtcttcacagcttacgaacctgaggagtaa

SEQ ID NO: 480764 - DNA, 885 bp, Shigella flexneri; identical to SEQ ID NO: 472428

SEQ ID NO: 480765 - DNA, 1818 bp, Shigella flexneri
atgtataattttatcactataatgtatgatgtcttttcatgttttggtgttctggctaaaaaccagaatagccgtgacatccgaaatattaaaaatttttcctcacatcaacattcactgggcgacatgtttgatgaattaataaacattattgataaagaacaagtattgagtaaagaacaacgaaaagttatatttaggagatatgaagatctctatgttaagctaatgcactattctgtttttacagacaaaacacatcaaataataaaacaaaaatattttaatgacattgtaccaatgattctcgcactcgacatcaggaacacatatcgcccggataatgagatggcattttactatcatattcattcttttctcactcagataccggataatgaggatgatatatatcatgctgcaaggacatatctgcgaaattacgttaagttatgtttatccggatacacgccagcgaatgcgcatttcaaagatatctttgatggcgtatatgaattcattcgtaatattcgcaaaaacagtacaccaggaaaaacaaaacttatcgcaactatcaacacatgcaaagaaacctgtaaacatctgctttatttaagtaatgaagacaaggaaaaaataatttctgacttagataaagttcaggttgcatgttattatctcactatattactggctttcgaaagacgaacttcattaacaagcatcctggcaactttatataaaatgctgataagcgaaagagaagtttcagaatatgaatgccagttattatatttaaccaacccaatagatgtaatgaatatactgaacaaatacatatattactttcctaatgagaactcaccattttatacactgaaaattgacagtgcattatcgtgggatgccattgacgcaatacgagactatagtatttctgatatttatctttatcctgaacaaaaaacaataaattgtgtcgttgagattgaaaacattgtctttggcggttacatttatacattgaacaacggcgtcacattacaaaacatagaaaactctttaaaagattcttcatgccattatgtcttaaatggctatacagaatttgttaactgtttgagacaacttacttcaggaaagactgaaagtgttcatcgcaccatcaataaactgaactatgagaaattaccttttggatttatcattgccgcgtttgctatactaaagatagcatttaaaataaaattcagtaaaaatcatgtaaatatccgagcattattaaatgacatcaattattttatgacttatcagggcgagtccattaaccttatttcactggatcacgaatacccagagtcctgtcttcaaaatgacacaaacacatatttattaggaagagtaatatttctgtataactcaatgatttataagttcataaactgtcaggaacatgaaaccaataacattcactcagctatgataaataacctattacaggaagttgatatagccctcggtaaaataaatgacattatagacagcagaaacatatcagccccccatgaactggcaaatattcttacccgcgaaaaaatacttacaacacgggaaaaaaaaggaaacctgataagcctgtttgatggattcactttattccattgtgttggaatgataacctttcttatccattatctcagaacacctgaagaaaaagttgaaaatatatttatgttatatggtgcagataaaaacaataaactacgcagaagactgatttatgacgcactaggaataattcagtctcagcaggagtga

SEQ ID NO: 480766 - DNA, 312 bp, Shigella flexneri
atgggagttgagcagaataatttcagggacatgctgaccggttatctgtccggcccgccgcagacgcagcatgtgttttgtgtattcccggcggctctggtcgcgcacgcgggtctggcaggcgaagaatggctgaaaaccttcctgctgcaggctttccagtacggtgatggtgggaatgtacgcatagtgttcactgcgagaggtatgtcggttttccccaaaaatactcggtacatggcgcatcagttcttcgtgtgtcagcggacgatcacgacgtatctggttcgcataaccaaaacgactggctaa

SEQ ID NO: 480767 - DNA, 1434 bp, Shigella flexneri
atgtgcttacttgcaccagaaaatccttatccgatatatgcactaccaccgctggtgagaaatgcaataattgaaactcaaaaaaatacacaggcacctttggctatggtggcaacatccgcattaacagcgatctcaattgcctgtcagaatcagattgacgtgtgcagacctggaaatttacatgggcctgttaatctttactctctgattctggctgattccggtgaaaggaaaacgaccgtggataaagtgtttatgaaagcattttatctcagggatgaagccctggcggatgaatacgcgaaactggttgagaattacagtacagaaaaggaaatatgggagcaaaaacaaaaagcgctggaatcaaaatttcataaagagattcgtgccggtaaagattacaaggcaacagaatcagagcttgaaacgcatctgaataaacctcctgttccgccgcagatacgtcgaacaatttttaatgagacaacgatagagggaatgttaaaatattactccgatagcaatcgctcttttgctcttgtatccagtgaagggggggtaatttttgacagccgggccatgagtaaactgggaattattaacactttgtgggatggaggttctcttttcatcgacaggaaatcatctcccggaattaatttgaaggagccaagactgacgatatcggtgatgattcagcctgatgtttaccacaaaggtttttgtacgcgaaaaaaagaaattgtgaaaacgtcaggacatcatgcaaggtttttgatgtgtcaaccaacatcaacgcaggggacaaggataataaccggagataattattcatcacagtatcaggatttgtttgaagagaggatcaatgagcttattgatgaaagtctggcgatgagtggtgaacgacgttgccttcacttttctcctcaggctgccagaatctggacggattattacaatgatgtggaatcgaagctggggggattggggcctttaagacattgccgggaatatgctgctaaaaatgcagagtatatggcaagactggcaggacttatttaccattcgagcggtgaagagggggagatttccccttacactgcagaaatggcgagagaattagcaatatggtacggtaatgagtatgtgcggttgtctaatccgttaacttttgacaactctgccctgaccgtacctgtgcgactcattccagaggagcttgaacttttcaactggataaaaagctattgtattgagaaggggatcctctgtatgaaaaaaaatgacattttacagcgtggtccgaaccgtttccggaaaaaggataaaatcaactggttactggatttactgtatgaacaaaacagagttgtaccggttattgagggaaaaacgttgtgtgtcgcacctaactttgacctctga

SEQ ID NO: 480768 - DNA, 198 bp, Shigella flexneri; identical to SEQ ID NO: 478426

SEQ ID NO: 480769 - DNA, 378 bp, Shigella flexneri; identical to SEQ ID NO: 478651

SEQ ID NO: 480770 - DNA, 267 bp, Shigella flexneri; identical to SEQ ID NO: 474508

SEQ ID NO: 480771 - DNA, 189 bp, Shigella flexneri; identical to SEQ ID NO: 470416

SEQ ID NO: 480772 - DNA, 213 bp, Shigella flexneri; identical to SEQ ID NO: 474663

SEQ ID NO: 480773 - DNA, 219 bp, Shigella flexneri; identical to SEQ ID NO: 474644

SEQ ID NO: 480774 - DNA, 219 bp, Shigella flexneri; identical to SEQ ID NO: 474644

SEQ ID NO: 480775 - DNA, 207 bp, Shigella flexneri; identical to SEQ ID NO: 24440

SEQ ID NO: 480776 - DNA, 141 bp, Shigella flexneri
atgggttaccgcacgctggctgaactggaatctgaaattctgcaactgcgtaaggcgttaaatgaagctcgccttgagcgagatatattaaaaaaagcaacagcgtattttgcacaggagtcgctgaaaaatacgcgttaa

SEQ ID NO: 480777 - DNA, 126 bp, Shigella flexneri; identical to SEQ ID NO: 469585

SEQ ID NO: 480778 - DNA, 210 bp, Shigella flexneri; identical to SEQ ID NO: 9340

SEQ ID NO: 480779 - DNA, 375 bp, Shigella flexneri; identical to SEQ ID NO: 475278

SEQ ID NO: 480780 - DNA, 375 bp, Shigella flexneri; identical to SEQ ID NO: 13405

SEQ ID NO: 480781 - DNA, 351 bp, Shigella flexneri
atggaactggcgcgtagtggcgcaaattatcaaatcaaaattcacgacggcccggcggttaaccgtcatcggccttcggtagatgtgttgttccattctgtcgccaaacaggcggggcgtaatgcggttggggtgatcctgaccggtatgggcaacgacggcgcggcgggaatgttggcgatgcgtcaggcgggggcatggacccttgcgcaaaacgaagcaagttgcgtggtgttcggcatgccgcgcgaggccatcaatatgggtggtgtctgcgaagtggtcgatcttagccaggtaagccagcaaatgttggcaacaattagtgccggacaggcgatacgtatttaa

SEQ ID NO: 480782 - DNA, 159 bp, Shigella flexneri; identical to SEQ ID NO: 473686

SEQ ID NO: 480783 - DNA, 1059 bp, Shigella flexneri
atgaaacgacatctgaatacctgctacaggctggtatggaatcacattacgggcgctttcgtggttgcctccgaactggcccgcgcacagggtaaacgtggcggtgtggcggttgcactgtctcttgccgcggtcacgtcactcccggtgctggctgctgacatcgttgtgcacccgggtgaaacagtgaatggcggaacactggtaaaccatgacaaccagtttgtatccggaacagctgatggcgtgactgtcagtaccgggcttgagctggggccggacagtgacgaaaacaccggcgggcaatggataaaagcgggtggcacaggcagaaacaccactgtcaccgcaaatggtcgtcagattgtgcaggcaggaggaactgccagtgatacggttattcgtgatggcggagggcagagccttaacggactggcggtgaacaccacgctggataacagaggtgagcagtgggtacacgggggagggaaagctgccggtacaattattaaccaggatggttaccagaccataaaacatggcggactggcaaccggaaccatcgtcaacaccggtgcagaaggtggtccggagtctgaaaatgtgtccagcggtcagatggtcggagggacggctgaatccaccaccatcaataaaaatggccggcaggttatctggtcttcggggatggcacgggacaccctcatttacgccggtggtgaccagacggtacacggagaggcacataacacccgactggaggggggtaaccagtatgtacacaacggtggcacggcaacagagacgctgataaaccgtgatggctggcaggtgattaaggaaggaggaactgccgcgcataccaccatcaaccagaaaggaaagctgcaggtgaatgccggcggtaaagcgtctgatgtcacccagaacacgggcgtgcactggttaccagtacagctgcaaccgtcaccggcacaaaccgcctgggagcattctctgttgtggagggtaaagctgataatgtcgtactggaaaatggcggacgcctggatgtgctga

SEQ ID NO: 480784 - DNA, 189 bp, Shigella flexneri; identical to SEQ ID NO: 470416

SEQ ID NO: 480785 - DNA, 450 bp, Shigella flexneri
ttgaaagttaagccgaaagaactggaacagcgcggtggggcttattactctgatgcagcgtgcgaagtgatcaacgctatctacaacgacaagcaagctgaacattacgttaatatcccgcatcatgggcatattgataatattccggcagactgggcggtagaaatgacctgtaagctggggcgcgatggcgcgacgccacatccgcgcattacgcatttcgatgataaagtgatggggctgattcacaccattaaaggcttcgagattgctgccagcaacgccgcacttagcggagaatttaacgatgtgttactggcgctaaaccttagtccgttggtgcattccgatcgcgatgctgagctgctggcacgcgagatgattctggcgcacgagaaatggctgccaaattttgccgactgcatcgcagagcttaaaaaagcacattaa

SEQ ID NO: 480786 - DNA, 330 bp, Shigella flexneri; identical to SEQ ID NO: 31188

SEQ ID NO: 480787 - DNA, 564 bp, Shigella flexneri
gtgaaggaagccgggtgcctggcccacgcccgccgaaaaatccatgacgaggatgtgcgccgtccgacagaaatgactcaggaagcgctcagacggatagcagagttatacgacatagaagcggagatacttggcagtccggcagaggaacggcttgcagtcagaaaagccagaagcgtccagttgatgcagtcgttgtacgactggatacagttgcagaggaaaacgctgtcgaaacatgcggagatggcgaaggcgttcgactatatcctgaatcactggaatgcgctgaacgagttctgtcgtgacggccgggtggaaatagacaacaacatcggtgaaaacgcgttacgatcggtggcggttggaagaaaaaattatctctttttcggctcagacaagggaggagaaagtgcggcgatcatctacagtctgctggtcacctgcaaacagaacgaagtggagccggaggactggttgcgcgaagtgatcgagaagctcaatgactggccgtcgaaccaagtgcatgaactgctgccctggaacttctcgtctgtaaaataa

SEQ ID NO: 480788 - DNA, 468 bp, Shigella flexneri
atgaacaaaacgctaatcgccgcaactgtggcagggatagttttactcgcttcaaatgctcaggcacaaaccgtaccggaaggctatcagctacagcaagtgctcatgatgagccgccataacttacgtgcgccgctggcgaacaatggcagtgtgctggagcagtcgacgccgaataaatggcccgaatgggacgtccccggtgggcaactcaccaccaaaggtggcgtgctcgaagtgtatatgggccattacatgcgtgaatggctggcagagcaggggatagtgaaatcgggggaatgcccgccgccggacaccgtttatgcctatgccaatagtctgcaacgtaccgtcgctaccgcccagttctttattactggtgcattccctgggtgtgatattcctgtgcatcaccaggaaaaaatgggcactatggaccctaatgccgatcagttaaggatcagttga

SEQ ID NO: 480789 - DNA, 207 bp, Shigella flexneri; identical to SEQ ID NO: 24440

SEQ ID NO: 480790 - DNA, 375 bp, Shigella flexneri; identical to SEQ ID NO: 475278

SEQ ID NO: 480791 - DNA, 483 bp, Shigella flexneri; identical to SEQ ID NO: 477014

SEQ ID NO: 480792 - DNA, 351 bp, Shigella flexneri; identical to SEQ ID NO: 475888

SEQ ID NO: 480793 - DNA, 684 bp, Shigella flexneri
atgaataaccagtatttacagtttgtgcgtgagcagctcattatcgccaccgctgatttgagtggggcaacaaaaggtcagcttgaagcctggcaagagaatgccatgttcgatacagggcgttacaggcgtaaaaaaatccggtaccgcgatgaagtgactggaaaaatgataacgcgggataatccaccaatcccgggaaagcaatcgctggcgaaggggacgtcaattcctctggtcagtccggttgagttttcgacatcatcgtggcggcgggctgttctgtctcttgaagagcactataaagcctggttgttgtggtgttacagcgggagtatttgttgggaatatcagatcgcgataacacagtgggcgtgggaagagtttaaggctcattctggcactaggaaaattgcagggaaaacgcaggaacgcctgaaaaaattaatctggctggcggcgcaggcagtaaaagcagaactttttggtggggaaggttatgaataccaggagctggcattactggcgggagtgacaactaaaaactggtccaaaacatttactcgtcactgggttgcaatgaaacacatttttcaccgactggatagtgaggctttattgtttgtaatgagaacacgttcaaaaaaaagacggcattttcaaagcaaagtgttgcaaaagtag

SEQ ID NO: 480794 - DNA, 522 bp, Shigella flexneri; identical to SEQ ID NO: 477184

SEQ ID NO: 480795 - DNA, 342 bp, Shigella flexneri; identical to SEQ ID NO: 475416

SEQ ID NO: 480796 - DNA, 312 bp, Shigella flexneri
gtgaaagatgagcgaataatcgtcacgccaattaacgatatctattacgccgaagcgcacgagaaaatgacctttgtctatacgcggcgtgaatcctacgtaatgccgatgaacattaccgaattttgcagcaaactgccgccgtcgcattttttccgctgccatcgctcattttgtgtcaatctgaacaaaatacgcgaaatcgaaccgtggtttaataacacctacattctgcgactgaaagatctggattttgaagtgccggtcagccgcagcaaagtgaaagaatttcgccagttaatgcatctttaa

SEQ ID NO: 480797 - DNA, 228 bp, Shigella flexneri
atgaccattacgtctctggatggctatcgctggctgaagaacgatattattcgcggtaattttcaaccggatgaaaaattacggatgagtttactgacatcgcgttatgcacttggcgttgggccgttgcgggaagcactttctcaactggtggcggaacggctggtcacggtggtgaatcaaaaagggtatcgggtggcgtctatgtcagagcaggagctgctctga

SEQ ID NO: 480798 - DNA, 174 bp, Shigella flexneri
atgacccggctgatagttttagtctttagctgttgcattttgtttatgaaacagttcacggaacaccggataaatatcatcctggtcgcggatgtgctgcatcgcaaagttgtcgaaagtagattgcagatgctcatattctcgcacacaatgtctgatgtgcacgacgggtaa

SEQ ID NO: 480799 - DNA, 297 bp, Shigella flexneri
atgtcgaaaaaatacatcatagggattgatggcggaagtcagagcacaaaagtggtgatatacgatctggaaggtaatgtggtttgcgaagggaaaggcttattgcagccgatgcacacgccagatgccgatactgcagaacatcctgacgacgatttatgggcatcattatgttttgccggtcacgatttgatgagtcagtttgccgggaataaagaagatattgtcggtattggtctgggatccatccgttgctgccgtgcgttattgaaagccgatggcacggccgttgattag

SEQ ID NO: 480800 - DNA, 213 bp, Shigella flexneri
atgtttgacacaaagcaaattagatactcaggtaaagatggtatctattttcaccttagagataatgtagaatcttttcttgccttaacagctactgaacagatggactatgactcaccgatgatggtgacaaccaggctatgcaatcggggcaaactatcactgataatgttcagagagcacctaagaccatctctattagcggtgttgtag

SEQ ID NO: 480801 - DNA, 219 bp, Shigella flexneri
gtgccgcgtggcagccagatgcaggatctcacccagccgcagcatattaataccatgctctacgaagcagagctgttcgctaccctggtggatgagcatctggtggatcatccagggctggcggtcagtcgcatcacagccaaactgctgaccgagatccgccgccagactggggtgatttttccggcagatagcgtaaaactatacttgccaaagtaa

SEQ ID NO: 480802 - DNA, 285 bp, Shigella flexneri
gtggaagaagatggcagcatcaacgacgactaccgcattgactacctgcgcgcccatattgaagagatgaaaaaagcagtgacttacgatggtgtggatctgatgggctacacaccgtggggctgcatcgactgcgtgtcattcactaccgggcagtacagcaaacgctacggctttatctatgtgaataaacatgacgacggtactggcgatatgtcgcgttcacgtaagaagagctttaactggtacaaagaggtgattgccagcaacggcgagaagctttaa

SEQ ID NO: 480803 - DNA, 357 bp, Shigella flexneri
atgaattttcatcatctggcttactggcaggataaagcgttaagcctcgccattgaaaaccgcttatttattaacggtgaatatactgctgcggcggaaaatgaaacctttgaaaccgttgatccggtcacccaggcaccgctggcgaaaattgcccgcggcaagagcgtcgatatcgaccgtgcggtgagcgcagctcgcggcgtatttgaacgcggcgactggtcactctcttctccggctaaacgtaaagcggtactgaataaactcgccgatttaatggaagcccacgccgaagagctggcactgctggaaactctcgacaccggcaaaccggattcgtcacagtctgcgtga

SEQ ID NO: 480804 - DNA, 678 bp, Shigella flexneri; identical to SEQ ID NO: 479633

SEQ ID NO: 480805 - DNA, 942 bp, Shigella flexneri
atggaaggcatccgtatcgaaaacgcaacccacgcgccggttgatttcgataccaatattgccaccacaattaccgctcatgatgcgggatatattaaccagccgctggaaaaaattgttggcctgcaaacggatgcgccgttgaaacgtgcgctacacccgttcggtggcattaatatgattaaaagttcattccacgcctatggccgtgaaatggacagtgaatttgaatatctgtttaccgatctgcgtaaaacccataaccagggcgtatttgatgtttactcaccggatatgctgcgctgccgtaaatctggcgtgctgaccggtttaccagatggctatggtcgtgggcgcattatcggtgactatcgccgcgtagcgctgtatggcatcagttatctggtgcgtgaacgcgaactgcaatttgccgatctccagtctcgtctggaaaaaggcgaggatctggaagccaccatccgtctgcgtgaggagctggcagagcatcgtcatgcgctgttgcagattcaggaaatggcggcgaaatatggctttgatatctctcgcccggcgcagaatgcacaggaagcggtgcagtggctctacttcgcttatctggcggcagtgaaatcgcaaaatggcggcgcgatgtcgctggggcgcacggcatcgttcctggatatctacattgagcgcgactttaaagctggcgtcctcaatgagcagcaggcacaggaactgatcgatcacttcatcatgaagatccgtatggtacgcttcctgcgtacaccggaatttgattcgctgttctccggcgacccaatctgggcgacggaagtgatcggcgggatggggctggacggtcgtacgctggtgaccaaaaactccttccgctatttgcacacctgcacactatggggccggcaccggaacctaacctga

SEQ ID NO: 480806 - DNA, 1194 bp, Shigella flexneri; identical to SEQ ID NO: 475009

SEQ ID NO: 480807 - DNA, 702 bp, Shigella flexneri
atgctaacgctggatacgcttaatgtgatgctggccgtcagcgaagagggattgatcgaagagatgatcatcgcactgctggcctcaccgcagctggcggtcttctttgaaaaattcccacgactgaaggcggcaatcactgatgatgttccccgctggcgtgaggcgctgcgcagtcggctgaaagatgcccgagtcccgccggaactcaccgaagaggtgatgtgctatcagcaaagccagctcctctccacgccgcagtttattgtgcagctaccacagatcctagacttactgcatcgtctgaattccccatgggcagaacaagcccggcagttggttgatgctaacagcacaataacttcagcgttacacacgctttttctccagcgttggcgtttaagtctgatcgtgcaagcaacgacgttaaatcaacagctattagaagaagaacgcgaacaactgttaagtgaagttcaggaacgcatgacgctgagcggacaacttgaaccgattctcgcagataacaataccgcagctggtcgtctgtgggatatgagcgccggtcagcttaaacgtggcgactatcagtttattgtgaaatacggtgaatttcttaacgaacagccggaactgaaacgcctggcagagcagccggggcgttctcgggaagccaaatcaataccgcgcaacgatgcgtag

SEQ ID NO: 480808 - DNA, 234 bp, Shigella flexneri
atgcagacgttcgccagtggctctctgcttcaggctgccgttcaggtgatacaggttgcagggcaacatcccgaccgactccgccagcaccctgacacaggaaaaaaccgccgtcagtcgcatggcccgctggctgctgatctgctttccggtataggtgtcgtaggacaacccgatatcatccgccagctctgctggcgtggtcaccggtgcgtcactttttcgttgaaataa

SEQ ID NO: 480809 - DNA, 300 bp, Shigella flexneri
gtggtcagacagcgtgtcttctttctcgtacagcatggctctgccaaccgccataatcagcgcaactgcaccgtcaattttgttttccgcctgctctttgacgggcttcaccacatcatcgttacccggaatggttttgccgaccacgttgccgatacactaggtcatgatgggattgccatcatgatgaaagcgccccgattcaattgccgcttccagctctttcatcgggtcggacatgttggtgtagttctgaatgatagtgatggggttcaggtcttcatcagcaaggtcatgtga

SEQ ID NO: 480810 - DNA, 555 bp, Shigella flexneri
atgaacgaaaattatattgcatatgagacacttgtagcaaaccgtgctgctgctgagtgggcttgttgggcaatgattgcatcttgggtgagtgctggagctactattgttactttggttttggcgttcaaggcattgtttacgtggcgggaacaagagaaaacaaaagtaaaaatagattttaggaatgcattaaagaaattaaagacagctctattatttatgcctgtcaatattgaccccgagaaactcaatgatgaacgagagcaagttattgcgaaatggctatttaaagatgtagatcttattagtcagcaaattgagttgggagaagagaatgttaaaagatttgatgaacttttgagtattttcgattgttgccagtcttcatggtttgcgacagagcacttatttgataatactgagttagaaaaagtttggcatgagttcgagtctaactttaataaatatataaatggtggtgagagtaaggatttacttatgaaaatgcttgataagctcatctcttctagatttgtatttgagtcaagataa

SEQ ID NO: 480811 - DNA, 393 bp, Shigella flexneri
atgaagctgagctataagctgcttatcgttggtttcttcgttactgtcattggttctttcatctggtcggccaaccactactacagcaaatatcagtacgaaaagaaacgtgctgatgaggctgtacgaaatgctgaatcagcaactgccattaccaataacgtcctgcaatcactacaaatcgtcaatacagttctggaggctaaccagcatgcaaaacagcagatcgcactggagtcacagagagcccgggaagatatcaaagtggctgttgcggatgatgattgtgcttcacgccctgtgcctgatgtcgctgctgaccggttgcggaagtacgcggacagtatacgtgcaggttccaacgatgccgttaccgacgaacctgctcgctga

SEQ ID NO: 480812 - DNA, 1332 bp, Shigella flexneri
atgttagatacactatctttcactgaacgtgacgagttccaacgcagaaacatcgctgaaaatatcatcaagttgctaaaaccagaggcagacatttcaccactggtaatagacggcgcatggggaacagggaaaacagaatttagtatcaaactgaaaaatctcattattgagcaagaaactgaatctaaagttgtttatattgatgcctttaaaggggatcatgcagaatctccattacttctcataacctctgcaattgccagcattttacctgaggaagaaaaacaacacttcattaagagatctcttcctgcaattcgctttggtttaaaaacggtactaaaagctggtgcaggttggtttttacgacaggaggctagtgaagtttccgaagaattccaagatgcgatgaagaaagcaagcaatgcagcaatagatgggactattgaaaatttgcttgaagaccatatggaatcagagaaaaacataaattcacttaaatcttgcatcgaaagcatttcagaaagtcaaaagatagtaattataattgatgaattagaccgatgtaagccgagtttttcaacaaatgtcattgaaacaataaaacacatttttgacatcaataatgtcttttttattttagttacaaacacagaacaattaaaagcatcgataaatcatatttatggttatagtattaactcacaaaagtatcttgacaagtttataaaatataccatcacgcttccagacacatgtttaataaatggtcacgtcgtatgtaaaacatctgttatatattggaattaccttgtagacaagacaaaatcattaaatgaaattaataggttatctggtagatttatccgtgatttaattcaacgaaccaacttatccttacgtgaaacacaaactttttcacgcaatcttaacatttttcaactattaaacgacgatgagtacaaaagcagtgatcctttaataaataagatctttgtcgtagctgtcttcatacattgctttggtgacaaggaaaaactaaaacaagaaattaccgcagaatctatatctcatttagcagatctgcttaacataaaagaaataccttattcttatgagagaagatcgcaaattcctgaaatatctattgtattcttcggaataattaaagacagtattactcttaatgagcgatttgcccctaaaagtgatgaagaacttaaaaaattcaccactgtttatactgattatgaacacctaaatttttggagtactacacccagagagttattgataaaatatattaatcaaatgtcattcatccagtaa

SEQ ID NO: 480813 - DNA, 366 bp, Shigella flexneri
atgcgtgatattcagatggttcttgagcgttggggagcatgggcggcgagtgatagttcaggcgttgactattcacctatagctgctgggtttaagggacttcttccctataccagcaagaaacgcttggcttgttcggatagtgatgcattaattattgaaggttgtcttgctcgtctaaagcaaaaaagaccttatgagcattcgcttcttgtggcacattatttatacagaatatccaagcgtaagattgcaaaggcgcgtggaaaggatgagaaattgatacgtatagaaatacagctagccgaaggatttattgatggctgcctttccatgctagatctaacattagatttggacgtttaa

SEQ ID NO: 480814 - DNA, 705 bp, Shigella flexneri
atgatgcaggagacaagcgatcaatggctttcctggttaagcctgtacttctggccgttactgcgcgtgctggcgctcatttctaccgcgccaattctgagcgaacgcagcgtgccgaaacgggtaaaactgggtctggcaatgatgatcacgttcgccattgccccatcattacctgccaacgatgttcctgttttttcgttctttgctctgtggctggccgtgcagcagatcctgatcggcattgcgcttggttttaccatgcaatttgcctttgccgctgtgcgaaccgctggcgaaattatcggtctgcaaatggggctgtcatttgcgacatttaacggtcatttatggttgatttcactgctggtcgatacctttcacaccctgccgattggtagcgaaccgttgaacagcaatgcgtttctggcacccaccaaagcagggagtttgattttccttaacgggctgatgctggcgttaccgctcattactctgttgctgaccctgaatctggcattaggtttactgaatcgtatggccccgcaattatccatttttgttattggatttccattaactctgactgtcggcatctctttaatggcggcattaatgccgttaattgcgcctttttgcgaacatttattcagtgaaatttttaatttgctggctgatattattagtgaattaccattaatataa

SEQ ID NO: 480815 - DNA, 1293 bp, Shigella flexneri
atgtttgattcgactttaaatccgttatggcagcgttacatcctcgccgttcaggaggaagtaaaaccggcgctgggatgtactgaaccgatttcactggcgctggcggcggcggttgctgcggcagaactggaaggtccggttgaacgtgtagaagcctgggtttcgccaaatctgatgaagaacggtctgggcatcaccgttcccggcacgggaatggtggggctgccgattgcggcggcgctgggggcgttaggtggaaatgccaacgccgggctggaagtgctgaaagacgcaactgcgcaggcaattgccgatgccaaagcactgctggcggcggggaaagtctctgttaagatccaggaaccttgcaatgaaatcctcttctcacgcgccaaagtctggaacggtgagaagtgggcgtgtgtcaccatcgtcggcgggcataccaacattgtgcatattgagacgcacaatggtgtggtgtttacccagcaggcgtgtgtggcagagggcgagcaagagtcgccgctgacggtgctttccagaacgacgctggctgagatcctgaagttcgtcaatgaagtcccatttgcggcgatccgctttattctcgattccgcgaagctaaattgtgcgttatcgcaggaaggtttgagcggtaagtgggggctgcatattggcgcgacgctggaaaaacagtgcgagcgcggtttgctggcgaaagatctctcttcatccattgtgattcgtaccagcgcggcatccgatgcgcgtatgggcggcgctacgcttccggctatgagtaactccggctcgggtaaccaggggatcaccgcaacaatgcctgtggtggttgtagcagaacacttcggagcggatgatgaacgactggcgcgtgcgctgatgctttctcatttgagcgcaatttacatccataaccagttaccgcgtttgtctgcactttgtgccgcaacgaccgcagcaatgggggccgccgccgggatggcatggctggtggatgggcgttatgaaactatctcgatggcgatcagcagtatgatcggcgatgtcagcggcatgatttgcgatggtgcgaaggtttcgaccagtgcttcggctgcgtggaaagcggtgttaatggcgctggatgataccgccgtgaccggcaatgaagggatcgtggcgcatgatgttgagcagtcgattgccaacctgtgtgcgttagcaagccattcgatgcagcaaacggatcggcagattatcgagattatggcgagcaaggccagataa

SEQ ID NO: 480816 - DNA, 465 bp, Shigella flexneri
gtggcacattaccgtcaaattgcaccagcccgtgaagttgatgtggcacgctgcctctcaaccgaaactctggccgcttatgctcacgaactggcagagtgggttctgggccaggaaagtgtacttgctccactggtttttgccaccgccagcactgacgcattggcagcaattcaacagcaatacggtgcacaaaaagccagtcaggcagtagaaactctgttttctcaactagcggcgcggttagcagcggaaggcatgacacgctttattgtcgcaggtggtgagacctccggcgtagtcacacagagcctgggcataaaagggtttcatattggcccaaccatttcccccggcgtgccgtgggtaaacgcactggataagcctgtctcactcgcccttaaatctggcaacttcggtgatgaagcctttttttcacgagcccaaagagagtttttatcatga

SEQ ID NO: 480817 - DNA, 264 bp, Shigella flexneri
atggatagttatatcgcgattacactgtttggctgtttttttgtgctggtctttattggtgtgcccatttcgttctcaatcggtattgccactgtagcttcaatgcttttgatgtttccctgggatatcgcggcaatcactgtttcgcaacgactggctaatggactggataactttgccctgttggcaatcccctttttcatctttgccggaacactgatgaacagcggcggtattgcgatacgtttgattaacctcgcctag

SEQ ID NO: 480818 - DNA, 405 bp, Shigella flexneri
gtgcactggcaaactcacaccatttttaatcaacctataccattaaataacagcaacttatacctgtctgatggcgcgctttgcgaagcggtaacgcgtgaaggtgctggctgggatagcaattttctagccagtattggtcagcagttaggaacggctgaatcccttgaactggggcggctggcgaatgtaaacccgcctgaactgttgcgctacgatgcccaggggcggcgtctggacgatgttcgtttccatcccgcatggcacttgctgatgcaggcgttatgtaccaatcgggtgcacaatcttgcctgggaagaagacgctcgctccggcgcatttgtggcgcgcgcggcgcgttttatgttacatggcaggttgaggctgggtcgttatgtccaataa

SEQ ID NO: 480819 - DNA, 288 bp, Shigella flexneri
atggttactatcaatacggaatctgctttaacgccacgttctttgcgtgatacgcggcgtatgaatatgtttgtttcggtagctgctgcggtcgcaggattgttatttggtcttgatatcggcgtaatcgccggagcgttgccgttcattaccgatcactttgtgctgaccagtcgtttgcaggaatgggtggttagtagcatgatgctcggcgcagcaattggtgcgctgtttaatggttggctgtcgttccgcctggggccatcctgtttgtactcggttctatag

SEQ ID NO: 480820 - DNA, 165 bp, Shigella flexneri; identical to SEQ ID NO: 479636

SEQ ID NO: 480821 - DNA, 897 bp, Shigella flexneri
gtgtcctcgctgctggctgagaaggcccagaccctgaagtcatccagctacaaggacctgtcgtcctcactgaataccgtctctcggttcttacctgaagacatggacctgatgtcccgctctgagtggctggctgtcagggacgctatgctggcttctgaggtgagaccgtcgacgattaacaagctgctgactaaggcgaagatgtgtcttgattacggtctgatgaatgggcaacttgagggccgcaaccctattgaacggatgaagctgaccaaggatatcgactccaagcgcagagcgttcacagacgaggagctggagagacttctggtccgtgttgaggctgagtatcagttcacacgacacacggctcacacgacctctgaggcccgtagatgggcgtctctggtttctgtagttactggcgctcggtctgctgaggtctgccacctgactaaacgtgacattgtaaccttagacaatggactggtctgtatcgatataaacgaagatggggacggtaagtctgtgaagaacaagcattcagtccgacttgtgccgctgaccgatggcgttcatgggttcgaccttgagtctttcctcaaatgggtagacatgcagcctgatgatggtcctctcttcgggatgactccgagcgcctactctagctggtttaactcaagggtcctgactgaggccctaggagactctcaggatgtctctctccacagtctgagacattggctggcgacccgaatgaaagagcgtggagtcaatctggtggacgctcaaggcatcttaggtcacagcagtcagtcaattacgtatgacctgtacgggaaaggacacgctgtgggtaggctggctgatgtgcttaagacagctttactttaa

SEQ ID NO: 480822 - DNA, 294 bp, Shigella flexneri; identical to SEQ ID NO: 25632

SEQ ID NO: 480823 - DNA, 519 bp, Shigella flexneri
atgaaaaaaattgctattgtgggtgccgggcctacggggatctacaccttattctcgcttctacagcaacaaactccactttctatttctatcttcgagcaggctgacgaggccggtgtcgggatgccatacagtgatgaggaaaactcaaaaatgatgctggcaaatattgccagtattgaaataccgccgattaattgtacgtatctcgaatggctacaaaagcaagaagccagccatctccagcgttatggcgttaaaaaagaaaccttgcacgatcgtcagtttttaccgcgaattctgctgggcgaatatttccgcgatcaatttttacgattagtagaccaggcacgacagcaaaaatttgcagtggctgtttatgaatcatgccaggttaccgatctgcaaattacaaatgctggcgtcatgctcgctacaaatcaggatttacccagcgagacgtttgatttagcggtgattgccacggatcacgtctgggtaatgctgccaacttactga

SEQ ID NO: 480824 - DNA, 624 bp, Shigella flexneri
atgggaaataatttgttatcagcaaaagcgacactccctgtttatgatcgtaataacctggccccaagaattgttcatttaggctttggtgcatttcaccgtgcgcatcagggcgtgtatgccgatattcttgctacagaacatttcagtgactggggatattatgaggtcaacttaatcggcggcgaacagcaaattgccgatttacaacagcaagataatctttataccgttgcggaaatgtcggccgatgcgtggacggctcgcgtcgttggcgtcgttaaaaaagccttgcacgtacagatggatggcttagaaaccgtgttggctgcgatgtgtgaaccgcaaatcgcgattgtctctctgacaatcaccgaaaaagggtatttccactctccggcgaccggacagttaatgctcgatcacccgatggtcgctgccgacgtgcaaaatccccaccagccgaaaacagcaacatgggtgattgttgaggcgctggctcgccgtaaagcggcaggacttcccgcattcccgcatttaccgtcatgtcatgtgacaacatgccagaaaacggtcatgttatgcgtgacgttgtcacttcctacgcgcaagccgttgatgtaa

SEQ ID NO: 480825 - DNA, 294 bp, Shigella flexneri
atggttcgtgcaaacaaacgcaacgaggctctacgaatcgagagtgcgttgcttaacaaaatcgcaatgcttggaactgagaagacagcggaagctgtgggagttgataagtcgcagatcagcaggtggaagagggactggattccaaagttctcaatgctgcttgctgttcttgaatggggtgtcgttgacgacgacatggctcgattggcacgacaagttgcttcgattctcaccaataaaaaacgcccggctgcaaccgagcgttctgaacaaatccagatggaattctga

SEQ ID NO: 480826 - DNA, 243 bp, Shigella flexneri
atgagagtaaaaactatgggcgcaagcctattaagtggtcgtatttttcaaggaacattaaacactgaaaaaggaatgtgggtaggaaagagagaagatgtcaccgatcaggcagtgagggcagtagccgaacacatgatgataaaagaccagaaatatgcatacgaaacgaaggatggcaaatggctgataataagtcatcaactggttgataaattaccagaagagtttgttgatggttaa

SEQ ID NO: 480827 - DNA, 315 bp, Shigella flexneri
atgacaatcacaaaacaacgagtagaaaaaatcatatatcaccatgaaatgggactgagcagcgatgtcactgccgaagaggtttatgacctggctgtactggcgctgaatttatcaaatatcgcaaacctgaagcgatacgagcttgatatgggtggttgtgactcatgcggtcaggattgtggcgctgacatgactgaagattctgatggtgattatgtcctgtttgatgacgtggttaagttgtttgaatttgatacaaccactcaaaagttagaaagcccagcaaaggaggcaaccagtgagcgaaattaa

SEQ ID NO: 480828 - DNA, 687 bp, Shigella flexneri
gtgagcgaaattaattaccaggcactgcgtaaagcggcgcaactggcaacacagggtgaatgggtcgcatttatttcgtctggtactggtacatatgcggtgcatacacctggtgataaacgatgtgaagacgttatcaaatggaccggctttgatggacagaacaacgcagagaacaacgctcgttatatcgcagctttcaaccctgaagtagcgcaggcactactggatgaacgggaaaggaaccagcaatacatcaaacgccgcgaccaggagaacgaggatattgcgcttacggtagggaagctgcgcgttgagctggaaggcaaagacagcaaaatagccaatcttaccgccgaacgcgatgctcttcgtgaaggtgagatgggcgacgctaggtatagcaacacacgggccgcagctgatatctacttccaactggtcgaggagtgcgaaattcctgctggcggttctctggtcgagtacgttgacgatatgcgcgagaagctggaatccgcagagaagcgcatagcagaactggaggagcgggaaatactgctcccggaacgtagcagcatgcttcatcgaacagattttcacgaggattaccaaacggtaatggcatacaaagtttctgaagtcatcgatgcaatccgcgctactggtattcgcatcaaaggagagtga

SEQ ID NO: 480829 - DNA, 1014 bp, Shigella flexneri
atgatgacgacgatgctggaagtggcgaagcgcgccggggtttcaaaagcgaccgtttcccgcgtgctttcaggtaatggctacgtcagccaggagactaaagatcgcgtgtttcaggcggtagaagagagcagttaccgcccaaatttgctggcccgcaatctgtcggcgaagagtactcagacgctggggctggtagtgaccaacacgctttatcacggcatttattttagtgaattactgtttcatgccgcgcgaatggcggaagagaaagggcgacagttgctattggcagatggtaaacacagcgccgaagaagagcgccaggcgattcagtatctgctggatttgcgctgcgacgccattatgatttacccgcgttttttaagcgtggatgagattgatgacatcattgacgcgcacagtcagccgataatggtgcttaatcgccgcctgcgcaataatagcagccatagcgtctggtgcgatcataaacagaccagctttaacgccgtggcagagttgataaacgccgggcatcaggagattgctttccttaccggctcgatggattcccccaccagcattgaacgtcttgccgggtataaagacgcgctgtcgcagcatggtattgcgctcaatgaaaaacttatcgctaacggtaaatggacgcccgccagcggggccgaaggggtagaaacgttgctcgaacgtggggctaaatttagcgcgttagttgccagtaacgacgatatggcgataggtgcgatcaaagcgttgcacgagcgcggcgtagcggtgccagagcaggtgtcagttatcggattcgatgatatcgcaattgccccctatatcgttccggcgctctccagcgtaaaaattccggtgactgagatgattcaggaaattattggacggctgatttttatgctcgatggcggggatttctcaccgcctaaaacctttagcggaaaactgatccgccgcgactcactcattgccctttcgcgataa

SEQ ID NO: 480830 - DNA, 828 bp, Shigella flexneri
atgggcaattatattcgtcccttatccgatgcggtatttaccatcgcatctgatgacctgtggatcgagagtttagcgatccaacaattacacaccacggcaaatttacccaacatgcagcgcgtagtggggatgccagatttacaccccggacgcggctacccgattggcgcagcgttcttctccgcaggccgtttttacccagcactggtcggcaatgatatcggctgtggcatggcgctatggcaaacagatattctcgctcgcaaatacaacgccgataagtttgaaaagcgattatcagctttggatgacgttgctgaagaaagctggctggaggaaaacctgccgtcagcatttgcacagcatccgtggcgcagctcgcttggctctatcggtggtggcaatcatttcgctgaactgcaacaagttgatcaaatcatcaacgctgaactgtttgcactggcaggtctggatgcgcagcatctgcaactgctggttcatagcggctcgagggagctagggcagtctattttacagcggcatattgcctcgttttcgcatcatggtttgcctgaaggcagtgacgacgcgctggcgtttgcgcgttttaatcgccacctgatcgctttgcgcataatgcaacaggttaaggccaccggaagtccggttctggatgtggcgcataactttgttagcgcgtgtcgaatcggtgatcaacaaggggtcttacatcgtaaaggtgccacgcctgatgactgtggtctggtggttattcccggttcacgcggtgattactccaggctggttcaggcccgtcaggagtga

SEQ ID NO: 480831 - DNA, 576 bp, Shigella flexneri; identical to SEQ ID NO: 475039

SEQ ID NO: 480832 - DNA, 303 bp, Shigella flexneri
gtgctggcggtgaccaccttcaaaacgatggaagaagcgctggagctggcgaacgatacgcaatatggcttgggcgcgggcgtctggagccgcaacggtaatctggcctataagatggggcgcggcatacaggctgggcgcgtgtggaccaactgttatcacgcttacccggcacatgctgcgtttggtggctacaaacaatcaggtatcggtcgcgaaacccacaagatgatgctggagcattaccagcaaaccaagtgcctgctggtgagctactcggataaaccgttggggccgttctga

SEQ ID NO: 480833 - DNA, 258 bp, Shigella flexneri
atgtccgggctgatatcggtgttcgtctactgctttatggtgacgtggaacgactatctgtttgcgtcgattttcctctccagcgccagcaatttcaccttaccagtgggcctgaacgcgctgttcagtacgcctgattacatctggggacggatgatggcggcctcgctggtgaccgcattgccggtggtgattatgtatgcgctttcggaacgttttattaagagtggtttgaccgccggtggcgtgaagggctaa

SEQ ID NO: 480834 - DNA, 933 bp, Shigella flexneri
atgattgaatggattattcgtcgctcggtggcgaaccgttttttggtgctgatgggcgcgttgtttctgagcatctggggcacctggaccatcattaatacgccagtggatgcgttgccggatctctccgatgtgcaggtgattattaaaaccagctatcccggccaggcaccgcaaatcgttgaaaatcaggtgacttatccgctaaccaccaccatgttgtcggtgcctggcgcgaagactgtgcgtggtttctcgcagtttggcgactcttatgtgtatgtcattttcgaagatggcaccgatccgtactgggcgcgttcgcgggtgctggagtacctcaaccaggtacagggtaagctgcctgcgggagtcagcgccgagctgggaccagatgccacgggtgttggctggatctatgaatatgcactggtggatcgcagcggtaagcacgatcttgccgatttacgctcattgcaggactggtttctcaaatatgagctgaaaaccattcctgacgttgcggaagtggcgtcggtaggcggtgtggtgaaagagtatcaggtggttatcgatcctcagcgcctggcgcagtatggcatcagtctcgccgaagtaaaaagcgcgctggatgcttcaaaccaggaagcgggcggttcgtcaatcgaactggcggaagcagaatatatggtgcgcgccagcggctatctacaaacgctcgacgactttaatcacatcgttttaaaagccagtgaaaatggcgtgcccgtttatctgcgcgatgttgcgaaggtccagattggcccggagatgcgccggggcattaaacggcgaaggcgaagtggcgggcggggtggtgatcctgcgatccggcaaaaacgcccgagaagtgatcgccgccgtgaaggacaaactggaaacgctgaaaagtag

SEQ ID NO: 480835 - DNA, 291 bp, Shigella flexneri; identical to SEQ ID NO: 478793

SEQ ID NO: 480836 - DNA, 846 bp, Shigella flexneri
atgaataccaacgaagttagcgtcatcaaccttgaccagcttgtgtctatgagtagctacgatttcttgactaaggtcatcaacccggctcgtgtggaggctggggagaagcctgtccgtaacaacgactttgtgtcccgtattgaagatgagctggacggtcaaaatgtagcctacgaaattttcgtaagcttcgggcaggacgttaaaagctataccctcaacactgaccagcttctgctggtcgggatgcgtgagtctaaagctgtgcgtcgtaaggtcctagcctatattcgccagaaggagcaagaggtcctcgaacttcaggcccagcaacttcaggtcgcacagaccaaagctatctgctatgcgcccggtgctatcgtcctcgactccaagctggactccaagtcaggcgccacgcctaccgaggttattaaagctctggaccttaagttgaccagctctaagatgctgacagctagcgtcctgactggatatctgaagaccctgtgtcgtcctaacccattctacaccaagcgtgttactgagtttggcactacggatatagacctatcgaccggacgtccacgagccatcttcaataagaaaggtgagaccaacggctactatcgtctacagccacagcctaacgacaaagagcctaccatcaagattctacgcaagggttatgactggctgaaggataactggaaggatatcgctcatgacatgcgcacatccaatatcaaggttgtccgtcgtctggtggattctcacctgaatggtaaggctacaaagtcccagaaagcagcagcgggcaaggggtctgactatgggttctaa

SEQ ID NO: 480837 - DNA, 126 bp, Shigella flexneri
atgcaaaaacatattaaacaaagcctcaaccaaaacatgagagctgtgttatatatcaatgcaacgggagaaatttacctgtgtcttgctttgaaaaaaagaggggaaaagctatatgttcgataa

SEQ ID NO: 480838 - DNA, 1035 bp, Shigella flexneri; identical to SEQ ID NO: 475068

SEQ ID NO: 480839 - DNA, 303 bp, Shigella flexneri; identical to SEQ ID NO: 475222

SEQ ID NO: 480840 - DNA, 282 bp, Shigella flexneri
gtgtggggtgttgaacttctggcaatcagatatgcagcatggattaagccggaatttgaaatcgaagtttatgaagttttcaaaacggttgtccgtctcggcgttggcgcaatgtcccgtctgaatagaatcgatcacatcatcaatactgaaaccaaagcgataagccagtgcgcaagccaaatggctaagtggggcgttggtgggcgaaaaagattgcttcatgttgcacgtgagagagcggcaaatgaagtgcaaatgtatttgcccggaatggtgtga

SEQ ID NO: 480841 - DNA, 201 bp, Shigella flexneri
atgaagtacccaacagttattgtcaatggtgtgtccgttcgtgttgatgaggatggacgctacaacttaaacgatctccatgcagcagcagttgcaaatggagaggctacagagcaacagcgcccaagccagtttttgcgtagcgcgcagataaaacgcttcataaaagcactttggaacaaattcaaccacttaaaataa

SEQ ID NO: 480842 - DNA, 402 bp, Shigella flexneri
atgcttttaattcaacctggatttggccttagcatcaaaaaagggcacatgtttggcgagaaagagtctcaacgaaaaatggtgtcgatacagttgccatttatcagtatttattggctaaacagggaggcaacaaattattggtatacctgcgccagagcagcatttaacgaccctgactggtttgtgaaaaaccaccacgcagttcgtcaggcaaagagaaaggccaatacgacatacatgaaggcgtatcgaaaagcatggaaagaacaccgcgatcgataccaacaagacatggaaaagcttgaatcagaaaacatggaattaagacgaaagctcggtgaagcaaaacgagacatcgatgcttacaagcgactttttaatggtgaaagccatgcttag

SEQ ID NO: 480843 - DNA, 159 bp, Shigella flexneri
atgcactctgaacgcgcaccgtttttcctcaaactggcggcctggggcggcgttgttttcctacattttcccatcctgataatcgccgcctatgcgtttaacactgaagatgcggcgtttagttttccaccgcagggcctgacgctgcgctggtgttag

SEQ ID NO: 480844 - DNA, 189 bp, Shigella flexneri; identical to SEQ ID NO: 469030

SEQ ID NO: 480845 - DNA, 204 bp, Shigella flexneri
atgaattcccagacaacaaaagatattccctgcttccgttcttatttgcctgatgccctgcgtttaagatttgaagataaactgaccatccgggccatcgctcagcgtctgggtctcagtcattccacaatacatacgctttttcagcgatttcttgcatccggtatcgcatggccattgcccgattcagtttcattcgcttaa

SEQ ID NO: 480846 - DNA, 198 bp, Shigella flexneri
atgaataccaacaaaactctgggcagtaataaacagcattctgatagagagtgcctgtataaagctgaagtgacaatgaccgggaagggaacccgttttcaggaatggatgcctgtctttttcactgtaaatatcctggcattactaatgcctggatatttacagaagagcagcataaccatgacggaacggggttaa

SEQ ID NO: 480847 - DNA, 1095 bp, Shigella flexneri
ttgccccattgtgctgatggtgcggcggcaaccacgggcgacaatgccgatgggaggactgctgtaaaatcggcaaagccatttcctgtaagtaaacgacaggtatgggaagcttataaacgagtaaaagccaaccgtggggcggcaggcattgacgggcagacactggccgggtttgacgagaatgttacagacaatctctacaaactgtggaacagaatggcttccggcagttatatgccgcaggcggtaaggcgtgtggacattcccaaagctgacggtggtgtacgtccgctcggtattccggccgtgtcggaccggatcgcccagatggtcgttaagcagatactcgagccggtactggaacccctgttccatgcagactcgtatggttatcgaccgggtaaatccgcacaccaggcgattgcgcaggcgaggaaacgctgctggaagtttgactgggtggtggaagtcgatattaaaggcttctttgatgatatcgatcatgacctgctactgaagacagtgcagcatcatactcaggcacgctgggtggtgatgtacattgagcgcaggctgaaggcaccggtgcaaatgccggatggagcaatgctggcacggggtcgaggaacgccgcagggcggcgtaatctcccccctgctctcaaatctgttcctgcactatgcctttgatatgtggatgcaacgtcagtttcccggcgttcccttcgaaaggtacgccgatgatgttgtatgccactgtcacagccagtggcaggctgacgctctgataagtggactgaggcagcggcttgcgcaatgcgggctgcagctgcatccgcaaaaaacacgaatagtttactgtaaggatgctgaccgacggggggactacccggaaacgagcttcaactttctgggctatacattccggccgcgtctgtcgatgaatcgctggggtaagaccttcgttaacttcagtccggcgatgagtgccagagcaggaaaagcaatccgtcaggaggtgaggagaatcgcagtgacaagtccttgtacgagctggcgcatatgttcaatgcgaaaatcaaaggctggataa

SEQ ID NO: 480848 - DNA, 192 bp, Shigella flexneri
atgactgccgcagcattgctggcggaaatgcctgaatcgagcagcctctcgagacgtgaaatcagcgcacttgtcggtgttgctcaggtaaaccgggactcgggaactctgcgcggtcgacgaaccattttcggtgattgtgctggggaagaacagctctgtacatggcggcgcttgaggcccccggtttaa

SEQ ID NO: 480849 - DNA, 504 bp, Shigella flexneri
atgacccagccgctcaaactgcgtggtttccagaagtgggatgtgttctgtaatgccgtcaacaacatgatgaataaccctctcttgcctgcccacggtaaaggcgttctggttgccctacgtccggtaccgggtatccgcgttgagcaagccctgacgctatgtcgccctaaccgtaccggcgatatcatgaccattggcggtaatcggctggtgctgtttctctcattctgtcggattaacgatctggataccgcgttgaatcatattttcccattgcctactggcgacattttctcaaaccgtatggtctggtttgaagatgatcaaatcagtgccgagctggtgcagatgcgcctgcttgccccagaacaatggggaatgccgctgcctttaacgcaaagttctaaaccggtcatcaatgccgagcacgatggtcgccactggcgacgaataccagaacccatgcgactgttagatgatgctgtggagcgctcatcatga

SEQ ID NO: 480850 - DNA, 258 bp, Shigella flexneri
atgctgattgaaaatatcagcgccgccgagaaagcaatgatgcgcaatacagttcgtattgagtccatcgttggcacgcttgcgacggtaggaaaaatatttgctgatacagcctaccgcaaggccgccactgataaggtgtctctggaggctgatcgtcttcgccgtgatgcaggtattgatgatggcaatggagagcgtgacctcaatgacttctactctgacatccaaaccgacgctgaatccggctttacgtag

SEQ ID NO: 480851 - DNA, 732 bp, Shigella flexneri
atgtggactaagtggtccatttatagtattcatggctccaatggtagggataaatatacttatacaaaaacgcttatctacaaaaaaataaccactcacgaatacgttttcattgccatttgtttgattcaatttatttctattattatgacatcctctgagaccagagttgatatggttcttggagctaatttcgcaacactttgcaaaatattaacaacaaaggtttttctgggtttatgggctaatggtgactttttatcacctttatggaatcatgattcaatttgcattgcaattacaatgatttgtctttccatcactatttttacatttattgtttccaattaccccatgcgctcggcaatagttttcgcaatactaacattaacgttttcactagcaaaaccaatgctttcatctacaagtgagcaatggccattattaattcatggcggaggaagatattctgtcataccaacaatcatatggtactctgtattggtttacttcttaaactatatttcccacttgcactttaaattcctaccatggatgttatatacaacatcgttaatctcatgtttatattttttcaatcttaccccactcccagattacgggtggaaagagcaagttaaaaaatttgaaagcttagcaccaggagaatcgtattctttcaagttcaaccctgcaggatggacgatgacattaataaaaaaacagccttaa

SEQ ID NO: 480852 - DNA, 480 bp, Shigella flexneri
atgctgacagatatcacggagttccagctccctgcaggtaaagtctggctgtcaccagtggtggactgcttcgatggaaaagttgtgagctggtctctcagtacacgccctgatgctgaactggtcaacactatgctggatagcgctgtcgaaacgttaaatgctggcgaacgaccggtgatacacagtgacagaggtgggcattatcgctggccaggctggctggaaagagtgaatgcagcaggtcttattcgctcaatgtcccgtaaaggatgttcacctgataatgctgcatgcgaaggctttttcggcagactgaaaacggaaatgtattatgggcgtaaatggtcgggcatcacgccagaaaagttcatgcagcaagtggatgcttacatcagatggtataacgagcggcgtataaaattatcgctgggtgccgtcagccccaaaatgtaccgccaacaatgcgggctggaatga

SEQ ID NO: 480853 - DNA, 294 bp, Shigella flexneri; identical to SEQ ID NO: 25632

SEQ ID NO: 480854 - DNA, 294 bp, Shigella flexneri; identical to SEQ ID NO: 25632

SEQ ID NO: 480855 - DNA, 987 bp, Shigella flexneri; identical to SEQ ID NO: 474481

SEQ ID NO: 480856 - DNA, 678 bp, Shigella flexneri
atgaagacacatctggagcaggaaggatgtcgaacccgggttactgttgtgcctccaggctttgatttccagaaattatacgttgattcccgaaacagtttgcctccaaatgttctttcttggctggcgtcccgaaggggatgccccgttattgctcaggtaggaatgttgcgcccggaaaaagggcacgaatttatgttgaatttactgttccatttaaaaatgaatggacgacagttctgttggttgattgtggggtctggttcgcctgaactgcgggagcatttacagtatcagattgacagtatgggcatgcatgatgatgtttttattgctgacaatgtttttcctgccgcccccgtatatcgggttgccagtctggtggttctgccttcagaaaacgaatcgtttggtatggtactggcagaagcatcggcattttctgtgcctgtactggccagtcagattggtggaatccctgatgttattcagaacaaccagaccgggacattgttaccagcaggtaataagcacgcatggatgtgcgccctgaatgatttttttaatgaacctgggcgtttttatcagatggctcgccaggcaaaacaggatatagaagagcggtttgatattaataaaactgcgttaaaaatactcacattagcgaagcacaagtaa

SEQ ID NO: 480857 - DNA, 951 bp, Shigella flexneri; identical to SEQ ID NO: 475095

SEQ ID NO: 480858 - DNA, 1440 bp, Shigella flexneri
atgaccactcgtgtgttccgtcggcaattttctgaaatgaccgagctggttaatacgctggcgtttttgcccgactcaacggatcagatcgaggctctgaaaattcgcgaaggcgatgcgaaagagattatcagcatcaaaaattcgatcgcggaaatgaaagatgccgaaattgaacggtcaaataaattgctctcactgatctcttacgatcaggaaagcggttttattaaaaatatggcgattattgagtccaacaataatcagtatctggctgtggggatcatcaaactgtgtggtctggaagccgtggaagcggtgtttggtgttgatgaacgcaataaaatcgtcaggaaattgtgtcagcgaattgccgagaaatatgcgcaatgctgcgatatcgtgacattcaatgccgatctctatttacttctgtgtcgggaaaatgtacagacatttacccgtaaaatagcgatggtaaacgattttgacagcagctttggctaccgcaatctgcgcatccataagtctgccatttgtgaacctttgcagggggaaaacgcctggagttacgcagaaaaactgaaactggcgatttccagtatccgtgaccatatgttctccgagtttattttctgtgatgacgcgaaactcaacgaaatagaagagaatatctggattgcgcgtaatattcgccatgcaatggaaattggcgaactattcctcgtctatcaaccgatcgttgatattaacacccgcgccattctgagcgcggaggcgttgtgccgttgggtttctgcggagcgggggatcatttcaccgctgaagttcattaccattgctgaagatatcgggtttatcaatgagctgggttatcagattattaaaacggcaatgggtgaattcagacattttagtcaacgtgcgtcgctgaaggatgatttcttactgcatattaatgtttcgccctggcagttaaacgaaccgcactttcatgagcgttttaccaccatcatgaaagaaaatggcctgaaggcgaacagcctctgtgttgagatcactgaaaccgtgatcgagcgaattaatgaacatttttatctcaatattgaacaactgcgtaaacaaggggtacggatatcgattgatgactttggcaccggtttgtcaaacctgaaacgtttttatgaaattaatccagacagcataaaggtggactcgcaatttaccggcgatattttcggtactgcgggaaaaattgtgcgcattattttcgatctggcacgctataaccggatcccggtgattgcggaaggcgtagagagcgaagacgttgcgcgcgaattaattaaattaggatgcgttcaggctcaggggtatctgtaccagaaacccatgccattctccgcctgggataaaagtggaaaattagtaaaagagtag

SEQ ID NO: 480859 - DNA, 219 bp, Shigella flexneri
gtgcatgtgagtatctctaatgaaggcgctgatacttatctcttcgggccaggaatcgatgattctgttgatttatccagatattccccagaactcgatagtcacggacaatactcactccctgcttctggcaaatatgagctgcgagtgctgcaaactcgaaacgacgcccgtaaaaacaaaactaaaaaatataacgtcgatattcaaattaagtaa

SEQ ID NO: 480860 - DNA, 480 bp, Shigella flexneri; identical to SEQ ID NO: 475263

SEQ ID NO: 480861 - DNA, 1005 bp, Shigella flexneri
gtgacgctgcgtattattcagggattgggtgcaggtgcggaaatttccggtgccggtacgatgctggcggaatatgcgccaaaaggtaagcgcggaattatctcctcatttgtggctatgggaactaactgcggcaccttaagcgcaacggcaatctgggcctttatgttcttcattctcagtaaagaggaactgctggcgtggggatggcgtataccgttcctggcgagcgttgtcgtgatggtctttgctatctggttgcgtatgaatctgaaagaaagcccggtctttgagaaggttaacgacagcaaccaaccgacagcaaaacctgcacctgctggtagcatgttccagagcaaatccttctggctggcaacagggctgcgttttggtcaggcgggtaactccggtttaattcagactttccttgcaggctatttagtacagacgttattgtttaacaaagcaattccaacagatgcattgatgatcagttcgattctcggctttatgaccattccgttccttggttggttatccgataaaattggtcgccggatcccgtatattattatgaatacctctgcgattgtgctggcgtggccaatgctttctatcatcgtagataaaagctatgccccgagcaccattatggttgcactgattgtgattcataactgtgcggtgctgggattatttgctctggaaaacattaccatggcagaaatgttcggcagtaaaaaccgctttacccggatggctatttcaaaagaaattggtggtcttatcgcttccggttttggtcctatcctggcgggtattttctgcaccatgacggaatcctggtatccgatcgccattatgatcatggcatattcagtgattggtttaatctctgcgctgaaaatgccagaggtgaaagaccgtgatttaagtgcgctggaagacgctgcggaagatcaaccgcgtgttgtaagagctgcgcaaccttccagaagtctgtaa

SEQ ID NO: 480862 - DNA, 234 bp, Shigella flexneri; identical to SEQ ID NO: 475232

SEQ ID NO: 480863 - DNA, 525 bp, Shigella flexneri
atgtatcaggcaggcgttcctctgcgtcatatgcgaatttgcgaaccttttggcccggagcaacgacaaggattatggctctatcacgttatcgaaccggatcgctgggctgctatgtgcgcacgagtcagcggggtaaaaagtggcggcatttacgccggacatgacaatcatttctatgggcatcggaaaatcctcaaaccagaacatttagactggcaagaatatgcattattgctgctcaatagcatgccggaaaaaacagctgagcattaccgcaataaaatcgccatttatttgcactggtatcagaaaaaaggcatcgaggttccacaaacccagcaaggggacattggcgcgaaagatattccctcctggcggcggatatgcaaagttttactcaataacgattactggtgtcgggcattatcatttagtcctacgaaagcgaagaactatcagcgttataacgaacggataaaaggaaaacgtcaggaatgggggatactatgcaacaacgattaa

SEQ ID NO: 480864 - DNA, 798 bp, Shigella flexneri
atggctgaatcgggagatatcgacgcgcagagcctgttaggctgggaatattatcagcctcgctatgataccaaacctgatgttcaggaagcgattaaatggttcgagttagccgctaaacaaggtgacagagaagctccgttagcgctggggagtatctactacgacggtgagcaggtgcgggtggattatgccaaagcgtatgcactatttaatcaggccgcgcagcaaggtatgaatttagcatggtccaggttgggcatgatgtacgccaatggtcagtatgttgaggtagattgtaagaaagcgaaggaataccttgataaaggtgtccacatttatggtggcccggaagactttctggctacttgtcgaaaagacatgattgacagaaaaacggttgaggatacgttacccgtgatcacggttacccgttctgggatgcgggataattttttagataaaggtttttcctgcatggatagcctcttcgccaccaccaataaattaggcgaagtggccaatcttcgcgtgacattcagcattcgtcgcccatccggtaaggagattaaccaaacggttggcttcgcgcctttcggtttaaaccggctgaatattagctttactgattacctatttggttcatttaccagtaattcgtctcttattctttataaaccggaatttgagcgaaaatcttgtgcaactgtaaggaccacaatagttgccgcaacggcaactattaacggcaaggatgtggagttgctgaaagcgggggcaattgaacaaaagtggtaa

SEQ ID NO: 480865 - DNA, 285 bp, Shigella flexneri; identical to SEQ ID NO: 461629

SEQ ID NO: 480866 - DNA, 189 bp, Shigella flexneri
atgttgacccgcaaaagtatagataccgttctgctctctgttggtgctgagaagctctcacaacgtgaatgggactggatgaagatgctcaaacccatggacccaccacctgcgatggtcgcggcctccatcctggtgcgccgtggcgacacagcagcccttacccggctacaggataccgggggttaa

SEQ ID NO: 480867 - DNA, 408 bp, Shigella flexneri
gtgaacggtaaacgcacctgcgccagcgcaccgctggatccgctgacccgcgccgtggtgatttccctgtttacctggcggcgggcggagcctgatgacaacgccgacgtcccgatgggatggtggggggatacctggcctgcggtacagaatgaccgttacgcctccagactgtggctgcttcagcgcagcaaactgaccaatcagctggtgcagacggtaagggggtatatccgcgaatgcctgcaatggatgactgatgacggcgtggtgtcccgtattgatctggatatccgccgcaccgggattaatgaactgggtaacagtatcactctctggcgtcgtgacggaccggtaatgatttcttttgatgatctgtggagtgcgataacgcatggcggacagtga

SEQ ID NO: 480868 - DNA, 204 bp, Shigella flexneri; identical to SEQ ID NO: 480845

SEQ ID NO: 480869 - DNA, 126 bp, Shigella flexneri; identical to SEQ ID NO: 20991

SEQ ID NO: 480870 - DNA, 285 bp, Shigella flexneri
atgtacatgcggatgccagttgagacgacggccatacgtgtggatggcgcagaagataccgggttcctgcccccgtttccgggcggcatacagcagattctccaccgccagacggcacacgtcattcagcagccaccggttgctttcgaacaccggccacagcgtgtccggcagggtgaagaccaggtgtacccagtcgcagtcaggaagacgattcagctgtgtcactatccacaggtctgtggccttttttccgcaggacgggcaggcacggctgccgcatga

SEQ ID NO: 480871 - DNA, 510 bp, Shigella flexneri
atgatcgtagcttcagaacatcaaacaaagctaagacagaaagaaatacaggaaatcgacaggaaggcatctaaagagcacgaggaggcgaagaagaatagcaacttcacccagacatacccaaagggctggcaacgcattagagagcttgtgagggacaaacaaggtgctgccgctataggtctttactcatttttcgctgaacacatagatcctacctgcggtgccgtggtctgcgaccagcaatttctagctaatcaaatgggcgtttctactcggacaattcgtcgttggttagattatttggaagagaagggtgccttggtaagaataccagttgccggcaaggtctgtgcttatgctttagatcctcatgaagtctggaaaggatataacacatcaaaagactactcagcctttgttaccaagacgttagtgaacaaagatggagaaataaaacgccggataatggctatgttttcaggagaggagagcggtcaagagcagtag

SEQ ID NO: 480872 - DNA, 294 bp, Shigella flexneri; identical to SEQ ID NO: 25632

SEQ ID NO: 480873 - DNA, 285 bp, Shigella flexneri; identical to SEQ ID NO: 461629

SEQ ID NO: 480874 - DNA, 336 bp, Shigella flexneri; identical to SEQ ID NO: 480100

SEQ ID NO: 480875 - DNA, 240 bp, Shigella flexneri; identical to SEQ ID NO: 31835

SEQ ID NO: 480876 - DNA, 480 bp, Shigella flexneri; identical to SEQ ID NO: 479123

SEQ ID NO: 480877 - DNA, 480 bp, Shigella flexneri; identical to SEQ ID NO: 464883

SEQ ID NO: 480878 - DNA, 480 bp, Shigella flexneri
gtggcggacctgacgtatgttgccacacaggagggatggttgtacctcgctggcatcaaagatgtttatacgtgcgaaattgtcggctacgccatgggagagcgcatgacaaaagagctgacaggtaaagccctgtttatggcgctcaggagccagcgcccacctgccgggctaatccaccactctgatcgaggttcacagtactgcgcatacgattaccgggtcatacaggagcagtttggtctgaaaacatcaatgtcgcgtaaaggtaactgttacgacaatgctccgatggaaagcttctggggaacgctgaaaaatgagagcctgagccactatcgttttaataaccgggatgaagccatctcagtaatacgggaatacattgagattttctacaatcgtcagcgtcgtcactctcgtctggggaatatctccccggcagccttcagggaaaaatatcatcagatggctgcttaa

SEQ ID NO: 480879 - DNA, 267 bp, Shigella flexneri; identical to SEQ ID NO: 462029

SEQ ID NO: 480880 - DNA, 531 bp, Shigella flexneri
atgttcatggcaatgatggttgccggacgcgctgaagcaggagtggccttaggtgcgactcgcgtaatttatccggcagggcaaaaacaagtgcaacttgccgtgacaaataatgatgaaaatagtacctatttaattcaatcatgggaggaaaatgccgatggtgtaaaggatggtcgttttatcgtgacgcctcctctgtttgcgatgaagggaaaaaaagagaataccttacgtattcttgatgcaacaaataaccaattgccacaggaccgggaaagtttattctggatgaacgttaaagcgattccgtcaatggataaatcaaaattgactgagaatacgctacagctcgcaattatcagccgcattaaactgtactatcgcccggctaaattagcgttgccacccgatcaggccgcagaaaaattaagatttcgtcgtagcgcgaattctctgacgctgattaacccgacaccctattacctgacggtaacagagttgggtaatgctgccaacttactgatttag

SEQ ID NO: 480881 - DNA, 192 bp, Shigella flexneri
gtgactaaacaggaaaaaaccgcccttaacatggcccgctttatcagaaggcagacattaacgctgctggagaagctcaacgaactggacgcggatgaacaggctgatatctgtgaatcgcttcacgaccacgccgatgagctttaccgcagctgcctcgcacgtttcggggatgacggtgaaaacctctga

SEQ ID NO: 480882 - DNA, 261 bp, Shigella flexneri
atgaaaatcgaagaattacgtgaaatttttagtgaagatggcctctatactgtgcgcgttgagaatggcgctattgtcagccactgccgtattaaatgtttacagtctcaacaaaggaagagtggagctgcgttaattcatttggtggatgggcttgtgacggatggttttcttttgtgtggagatgaatttgtcacgtcattacgggcgctgaaagagactggacttaaggctggcttttctgcttttgaatgtgagtga

SEQ ID NO: 480883 - DNA, 405 bp, Shigella flexneri
atgtttaaccagttgctggcatcccaaaaaatgacaaaaacagccgtcaatgaagccctgcgcagattgaaaaaagcgggaattgataaaccagagttggaagcatttttgcgtgagatgatcgaaggaaagcaaaaaagctggttaactcactgcactgacgcagaggcactaaaaattgatagtgttataggtgaagttctggcggatcatccaggactactaaatgtcctgagtcagcgttatgtggggcgagggatgagtaagagaaggatggccgagttattaaacgaacagtacccagagtgggcgttgattacatgccgacgtcgtgttgatcagtggttgcgtgttgctgagttcattttgtattcaccgatgagagaagcgttcgattatgcttaa

SEQ ID NO: 480884 - DNA, 276 bp, Shigella flexneri
atggttctggaaagtcagggcgaatataactcacaatgggcgacaatttgttccattgctccaaagattggctgtacgccggagactctgcgtgtctgggttcgccagcatgagcgggataccgggggcggtgatggagggctcaccaccgctgaacgtcagcgtctgaaagagctggagcgtgaaaatcgtgaactgcgccgcagtaacgatatccttcgccaggcttccgcttattttgcgaaggcggagttcgaccgcctctggaaaaaatga

SEQ ID NO: 480885 - DNA, 153 bp, Shigella flexneri
atgcggcgggtctgcctgggtgagccggttgcccgttccgggaaactgccgacactggcaccgccgttactgcgtcagctggctgccatcggggacgagctgcgccggctgcgtctggccgtcagggaacaggggacgcgggatgatagttaa

SEQ ID NO: 480886 - DNA, 369 bp, Shigella flexneri; identical to SEQ ID NO: 471289

SEQ ID NO: 480887 - DNA, 429 bp, Shigella flexneri
atgggagcagctggcgcggatatgatcgagtgtaacttctcctgtccgcaaatgacttctcatgcgatgggtagcgatgtcgggcaaagcccggagctggtagaaaaatattgtcgggcagtgaaacggggttccacgctgccaatgctggcgaagatgacgccgaatatcggtgatatgtgcgaagtggcgctggcggcgaagcgcggcggcgcagatggcattgcggcaattaacaccgttaaatccatcaccaatatcgatcttaatcagaaaatcggtatgccgatcgttaacggtaaatcgagtatttccggatattccggtaaagcggtaaaaccgatcgccctgcgcttcattcagcaaatgcgcacccatccagaactgcgcgatttcccaatcagcggtatcggcggcattgaaacctag

SEQ ID NO: 480888 - DNA, 351 bp, Shigella flexneri; identical to SEQ ID NO: 471291

SEQ ID NO: 480889 - DNA, 294 bp, Shigella flexneri; identical to SEQ ID NO: 25632

SEQ ID NO: 480890 - DNA, 579 bp, Shigella flexneri
gtgacgatatcgtctggacctactccgctgtgtgatgatgagtccgactcgccgcaagccattacccgtgattacacccttgatatccatgatgaaaacggcaaagcaccgctgctgtcggtattcggcggtaagctgaccacctaccgaaaactggcagaacatgcgctggaaaaactgacgccgtattatcagggtattggcccggcgtggacgaaagagagcgtgctgccgggtggtgccattgaaggcgaccgcgacgattacgccgctcgcctgcgccgccgttacccgttcctgactgaatcgctggcacgtcactacacgcgcacttacggcagcaacagcgagctgctgctcggcaatgcgggaacggtaagcgatctcggggaagatttcggtcatgagttctacgaagcggaactgaaatacctggtggatcacgaatgggtccgccgcaccgacgatgccctgtggcgtcgcacaaaacaaggcatgtggctgaatgcggatcaacaatctcgtgtgagtcagtggctggtggaatatacgcagcagaagttgtcgctggcgtcgtaa

SEQ ID NO: 480891 - DNA, 603 bp, Shigella flexneri
atgaaggagaataaccttaatcgcgtcatcggatggtctggtttactgctgacgtctttattgagtaccagcgcactcgcagacaatatcggcaccagcgcagaagagctggggctgagcgattatcgccattttgttatttatccccgtctcgataaggcgctgaaggcacagaaaaataacgacgaagcaaccgccatccgcgaatttgaatatatacaccaacaggtgccggataatattccgctgactttataccttgcggaagcctatcgtcattttggtcatgatgaccgggcgcggctgttgcttgaggatcaactgaaacgtcacccaggagatgcccgacttgagcgcagtctggcggctattccagttgaagtgaaaagcgttacgactgttgaagaactgcttgcccagcaaaaagcgggcgacgctgcgccgaccctgcgttgtcgcagtgaagtcgggcagaatgccctgcggctggcacaattacctgtcgccagagcgcaactgaacgatgcgacgtttgctgcatcgccggaaggaaaaacgctgcgaaccgatctgctgcaacgggcaatctacctgaaacaatga

SEQ ID NO: 480892 - DNA, 147 bp, Shigella flexneri; identical to SEQ ID NO: 476209

SEQ ID NO: 480893 - DNA, 1551 bp, Shigella flexneri
atggcaagctaccattgcactgtcaaagctggagcaaaaggcagtgccttaaaacatgctgattacatttccagatccggcgaatataagagttacaaatcgcgggaggatctggaattttcgtcatccggtaacatgccatcatgggcgaagaaaaatcccgaagagctatggaaagccgcagatgaatttgaacgaaaaaacgggactgcataccgtgaaattgagatcgcgttaccgcgtgaactgacacgcgaacaacggatagaacttgttgaagatttcgtgcaaaaggaacttggcgatcgccatgcctaccagtacgcgatccacaatccgccaggtgcaatcgacggaaaggaacagccacacgcgcatatcatgttttgcgagcggattaatgatggtattgaacgcgatccacagcaattttttaaacgtgccaacagcaaatcaccagagcggggaggcgcaaaaaaagcgagtattccccagacagccggagagcgaaaagccgcccttgttgcgctgcgttcccgctgggcagatgtgcagaatgagcaccttgcgcggcacggtcacgagtcgcgcgtagatcatcgttctctgaaagaacagggtatcaatcgcacgccggaagttcatcttggccccgttcaggccgccagtctgaatggggagcagattgttgcaatccaggaacggaggaatgccgagcgggaactcaagaccgccagagatgccgcaaatgccattcagcaggaacaggagcaaaagcaaaaaatcaaggcagttgagcctgttcgttcagcccgttcaccggagttattgcttcagtaccgcaaggttatgaaaatggtcattcagggagaggcaaggcttgctcgtttaggggatgccaatcccaatgcgctcaaagaacataagctgcttcagaatgcgaaagctaaaaaagactctctttccgaatggagtagacgaatatatgaaggggcacggtatttagacaaactggggcgtaatgttgtttccgcacaaagggagctgcgggagctacaggaacaacgcaatgctttgaatgggattcgtggcctgtttcggggggctgacaaaagggagattgatgcgcgtattctggagcaaaaaagtgtgctggaaaccgctgaacatgaaaggaatgaattcaggaacaagctacagcaagccgaatccgagtgggacaaagaaaacgctgcttttaagcgtaccgagggatataagtacgttggggagctggacaggtacagagaacgcgagattctggcggcggcatctttagagaacaccaggcaaaaggttgctgaagaggtatccgttgcccgtagccagatgttatctctggagcctgaactcagtatatctggagatgaaaaagctcaaatgcgacatgagttactggcagaaatggcgcaggaacggcagcaacaggaggaaaaagcactgcgtatacagcgatcctggtccaggggggcatcacgtagtaacgaacgtgatcaagatatggagcgttga

SEQ ID NO: 480894 - DNA, 447 bp, Shigella flexneri
atgacaaatcgtgaagagtggttaagtgcaaaaattgcctacatcaacggactgaaatcaccatcagagcagcagagattacttgtgttactggcagagaaaaaaaaccgaacaacgacggatgaaaaaacgttgtccgcactgatacgggcagaaaaaaccgcagagaaagcagccgcagcaaaagccagagtaacggcaatcatagcggcagaacggaaggcagccgcaagggcggaacgaaaggcgcgggatcatgaactctacaaggccgcaggcctcatgattgtggcaggactggtggacagcaaaaccggaaagccaaagtttagtgctgccgaactggtaggcgcactcgcaggaatcgcagagctaccgcacaaccatccaaaatggcaggaatgggaaaaacgcgggaaagagctactcaccaaagacagtgcgtaa

SEQ ID NO: 480895 - DNA, 267 bp, Shigella flexneri
atggaatccatacataccgataaaccgacttactatgtttgtgctcaacgtcttacgcagttcgaaaagatttcgcaccagttcacctttttctggatgagaaagtttgctgttttgacctgttcgctgttcaaaacgagtgaaaccggacatgaatcgctttcgtgcatagttatgcagccccctgaaaacaattctggcgcgtttttttggtctggcctgttgtttccctgtctttttgcgttttttgcgccagaaagcgactga

SEQ ID NO: 480896 - DNA, 177 bp, Shigella flexneri
gtggtactagtggtgctagtggtgctagtggtgctagtggtgctagtggtgctagtggtgctagtggtgctagtggtgctagtggtgctagtggtgctagtattggttaattacatgaaatctcttggggtcagccctgcgtcaaccgccatgagacagagggcagctttagagtaa

SEQ ID NO: 480897 - DNA, 435 bp, Shigella flexneri
atgtctgagcgagcgtgcgcggtccgacattcccacatcctgtcccgatttctgcgggtttgtgtcaccggaacactggcgcaatgtcagcagttttttgcgccgcgccgccctccacgtaagcgcgcagttctggcaaccggacagcaaatcattctgccgttttcgtgccacagctgttccgcgcgatcgacaaactggcagtcggggaatctcacgaagtgcgcactcatacaaactacacttcgtttcgtttgtcgtgcggtctgcgacgctcaaaaaaccgagaaacggcgggaattttcgggacaggatgtgggaatgtcggaccgcgcacgctcgctcagacattccccacctggtcagggcttcgcccgacaccccgctagcctgattcagttttatctttcgtcggtgagcgacggtactttctga

SEQ ID NO: 480898 - DNA, 189 bp, Shigella flexneri; identical to SEQ ID NO: 470416

SEQ ID NO: 480899 - DNA, 294 bp, Shigella flexneri; identical to SEQ ID NO: 25632

SEQ ID NO: 480900 - DNA, 504 bp, Shigella flexneri; identical to SEQ ID NO: 479351

SEQ ID NO: 480901 - DNA, 504 bp, Shigella flexneri; identical to SEQ ID NO: 479252

SEQ ID NO: 480902 - DNA, 504 bp, Shigella flexneri; identical to SEQ ID NO: 479215

SEQ ID NO: 480903 - DNA, 504 bp, Shigella flexneri; identical to SEQ ID NO: 479252

SEQ ID NO: 480904 - DNA, 219 bp, Shigella flexneri; identical to SEQ ID NO: 474644

SEQ ID NO: 480905 - DNA, 1035 bp, Shigella flexneri; identical to SEQ ID NO: 475565

SEQ ID NO: 480906 - DNA, 546 bp, Shigella flexneri; identical to SEQ ID NO: 471944

SEQ ID NO: 480907 - DNA, 1218 bp, Shigella flexneri
atgaaaactcgcgactcgcaatcaagtgacgtgattatcattggcggcggcgcaacgggagccgggattgcccgcgactgtgccctgcgcgggctgcgcgtgattttggttgagcgccacgacatcgcaaccggtgccaccgggcgtaaccacggcctgctgcacagcggtgcgcgctatgcagtaaccgatgcggaatcggcccgcgaatgcattagtgaaaaccagatcctgaaacgcattgcacgtcactgcgttgaaccaaccaacggcctgtttatcaccctgccggaagatgacctctcattccaggccacttttattcgcgcctgcgaagaagcagggatcagcgcagaagctatagacccgcagcaagcgcgcattatcgaacctgccgttaacccggcactgattggcgcggtgaaagttccggatggcaccgttgatccatttcgtctgaccgcagcaaacatgctggatgccaaagaacacggtgccgttatccttaccgctcatgaagtcacggggctgattcgtgaaggcgcgacggtgtgcggtgttcgtgtacgtaaccatctcaccggcgaaactcaggcccttcatgcacctgtcgtggttaatgccgctgggatctgggggcaacacattgccgaatatgccgatctgcgcattcgcatgttcccggcgaaaggatcgctgctgatcatggatcaccgcattaaccagcatgtgatcaaccgctgccgtaaaccttccgacgccgatattctggtgcctggcgataccatttcgctgattggtaccacctctttacgtattgattacaacgagattgacgataatcgagtgacggcagaagaggttgatattctgctgcgtgaaggggaaaaactggcccccgtgatggcgaaaacgcgcattttgcgggcctattctggcgtgcgcccgctggttgccagcgatgacgacccgagcggacgtaacgtcagccgtggcatcgtgctgctcgaccatgctgaacgcgatggtctggacggatttatcaccatcaccggtggcaaactgatgacctatcggctgatggctgaatgggctaccgacgcggtatgccgcaaactgggcaacacgcgcccctgtacgactgccgatctggcactgcctggttcacaagaacccgctgaagttaccttgcgtaaagtcatctccctgcctggctga

SEQ ID NO: 480908 - DNA, 324 bp, Shigella flexneri; identical to SEQ ID NO: 479507

SEQ ID NO: 480909 - DNA, 630 bp, Shigella flexneri; identical to SEQ ID NO: 479439

SEQ ID NO: 480910 - DNA, 768 bp, Shigella flexneri; identical to SEQ ID NO: 480153

SEQ ID NO: 480911 - DNA, 759 bp, Shigella flexneri
atgctgaatgatcggatatctcctattgttgataaggaaattcagcagtttttgcaatcagataaaatacactttaatgccacattagataaaaatgaagcctaccgggatgctgattatgtcatcatcgccactccaaccgactatgatcctaaaactaattatttcaatacatccagtgtagaatcagtaattaaagacgtagttgagataaatccttatgcggttatggtcatcaaatcaacggttcccgttggttttaccgcagcgatgcataagaaatatcgtactgaaaatattattttctctccggaattcctccgcgaaggtaaagccctttacgataatctccatccgtcacgtattgtcatcggtgagcgttcagaacgcgcagaacgttttgctgcgttgttacaggaaggcgcgattaagcaaaatatcccgaccctgtttaccgactccactgaagcagaagcgattaaacttttcgctaatacctatctggcgatgcgcgtagcatactttaatgaactggatagttatgcagaaagtttaggtctgaatactcgccagattatcgaaggcgtttgtctcgatccgcgtattggcaaccattacaacaatccgtcgtttggttatggtggttattgtctgccgaaagataccaagcagttactggcgaactaccagtctgtgccgaataacctgatctcggcaattgtcgatgcaaaccgcaagtggtgggtatttatcgtctga

SEQ ID NO: 480912 - DNA, 483 bp, Shigella flexneri; identical to SEQ ID NO: 479445

SEQ ID NO: 480913 - DNA, 171 bp, Shigella flexneri; identical to SEQ ID NO: 478928

SEQ ID NO: 480914 - DNA, 690 bp, Shigella flexneri; identical to SEQ ID NO: 474189

SEQ ID NO: 480915 - DNA, 153 bp, Shigella flexneri; identical to SEQ ID NO: 476447

SEQ ID NO: 480916 - DNA, 312 bp, Shigella flexneri; identical to SEQ ID NO: 475598

SEQ ID NO: 480917 - DNA, 1401 bp, Shigella flexneri; identical to SEQ ID NO: 474418

SEQ ID NO: 480918 - DNA, 627 bp, Shigella flexneri; identical to SEQ ID NO: 479864

SEQ ID NO: 480919 - DNA, 825 bp, Shigella flexneri; identical to SEQ ID NO: 478357

SEQ ID NO: 480920 - DNA, 516 bp, Shigella flexneri
atgtcgaccgattgtttcggtaatttgcggatatccgcatcaccgactatctggcgaaccagcgttttgtcagcagaagccagaacctcgcgtttgaacgcggtcggtttcatcttacggctcagatcgatacccggaacgataacttcggcacgccaggctgagtcaccagtaatcgtggtttcctcttcatcgtcctcgccgtcaccggtcggattatcgtcaggtttattatcgttatcgcccgtggcatttccttccagcttagccagcagggctttcagtaatgttttgaggtcatcatcactgtcgccggttggatctccgcccatctctggtgctttgtccggtagtggttgctgcggggacaggttgatgttgagattaacgccctgcggcaaatccccctcatctcctgtaaccgatgcgggagccgactccaccagttcgttcatggtgtcagcgtcacccgttttgatggccgtgcgcatgcgggtccaccagcttttcttttga

SEQ ID NO: 480921 - DNA, 807 bp, Shigella flexneri
gtgcacgcagatgacactccggtgaaagtactggccccggggaacggaaagacgaaaacgggtcgtctgtgggtatacgtcagggatgatcgtaatgcgggttcatccctgccggcagccgtctggttcgcgtattcggcagatcgcaaaggagaacatccgcagctccacctggcaaagtatcagggcgtactgcaggctgatgcctatgcaggttataacgtactgtacgaaacgggccgggtgaaggaagccgggtgcctggcccacgcccgccgaaaaatccatgacaaggatgtgcgccgtccgacagaaatgactcaggaagcgctcagacggatagcagagttatacgacatagaagcggagatacgtggcagtccggcagaggaacggcttgcagtcagaaaagccagaagcgtccagttgatgcagtcgttgtacgactggatacagttgcagaggaaaacgctgtcgaaacatgcggagatggcgaaggcgttcgactatatcctgaatcactggaatgcgctgaacgagttctgtcgtgacggctgggtggaaatagacaacaacatcggtgaaaacgcgttacgatcggtggcggttggaagaaaaaattatctctttttcggctcagacaagggaggagaaagtgcggcgatcatctacagtctgctggtcacctgcaaacagaacgaagtggagccggaggactggttgcgcgaagtgatcgagaagctcaatgactggccgtcgaaccaagtgcatgaactgctgccctggaacttctcgtctgtaaaataa

SEQ ID NO: 480922 - DNA, 366 bp, Shigella flexneri; identical to SEQ ID NO: 473885

SEQ ID NO: 480923 - DNA, 405 bp, Shigella flexneri
atgaacaatgaactccccgatgatattgagctgcttaaagccatgttgcgtaagcaacagagtcggcttcgacagtatgcctgtcaggtcgcgggctatgagcaggaaattgaacggctgaaagcgcaactcgacaggttgcgtcgtatgttgttcggccagagttcagagaaaaagcgtcataagcttgaaaatcagatccgacaggcagaaatcttctggaagatgcatcgtcagtcacagattcacctgacaccagtcccccgtcagaaaacccgatcgccagtaagcctgaatccccgggacgaaaatcttcacgaaaaccgctgccggcagaacttccccgggagacacatcgccttctgcctgctgaaaccagttgcccggcctgtggaggtgttctga

SEQ ID NO: 480924 - DNA, 375 bp, Shigella flexneri; identical to SEQ ID NO: 479334

SEQ ID NO: 480925 - DNA, 219 bp, Shigella flexneri; identical to SEQ ID NO: 474644

SEQ ID NO: 480926 - DNA, 219 bp, Shigella flexneri; identical to SEQ ID NO: 474644

SEQ ID NO: 480927 - DNA, 186 bp, Shigella flexneri; identical to SEQ ID NO: 462789

SEQ ID NO: 480928 - DNA, 324 bp, Shigella flexneri
atgaaaatcggcacacagaatcaggcattctttccggaaaatatccgcgagagatttcgttatatcaaagagatgggcttcgatggttttgagattgacggcaaactgctggtcaacaacatcgaagaagtcaaagcggcgatcaaagaaaccggtttaccagtgaccaccgcctgcggcggctatgacggctggattggtgactttatcgaagagcgtcgtcttaatggcttaaagcagatcgaacgcattctcgaggcgctggcagaagtgggggggttccggcagcgtggggcatgtttaccttccgcttaccgccgatga

SEQ ID NO: 480929 - DNA, 645 bp, Shigella flexneri
atgagtaaacttttggatcgctttcgctacttcaaacaaaagggcgaaacctttgccgatggtcacggacaggtgatgcatagcaaccgcgactgggaggacagctatcgccagcgttggcagttcgacaaaatcgtgcgttccacccacggcgttaactgtacaggctcctgtagctggaaaatctacgttaaaaatggtctggtgacctgggaaatccaacagaccgactacccgcgcactcgccctgacctgcccaatcatgaacctcgcggctgcccgcgtggcgcaagttactcctggtatctttacagcgctaaccgcctgaaatacccgctcattcgtaaacgactgattgaactgtggcgcgaagccctcaaacaacacagcgatccggtactggcgtgggcatcgattatgaatgatccgcaaaagtgcctgagctacaaacaagtgcgtgggcgcggcgggtttatccgctccaactggcaggaactaaaccagctgattgccgccgctaacgtctggaccatcaaaacctacggcccggatcgcgttgccggtttctcgccgatcccggcgatgtcgatggtttcttacgccgccggaacgcgttatctgtcgctgcttggcggcacctgttaa

SEQ ID NO: 480930 - DNA, 2220 bp, Shigella flexneri
atggcgatttatcatctcagcatgaaaatcatttcgcgaaaaaacggctacagtgccgttgcttctgctgcctaccgttccggctctgtcatacccgatgaccgtaccggattaacccacgattacacccgtaaacgcggcgttgatgatgcggtcattctcacccctgcgaatgcaccgtcctggtgtggtgaccgttccgttctctggaatgcggtcgagaaagccgaacagcgccggaactcccagctggcaagggagattgaactcgccattccccgtgagatttcccgcgaggccgcacgggaaaccgttctcgcttttgtccgggaaaactttgtcagtcggggcatgattgctgatgtggcgttccatcacatggaccggaccaacccccatgcacacatcatgctgaccacgagagctgtcggggaaacgggattcgcaggaaaggtcagggactggaacgaccgggcactcgccgagacgtggcgcgcatcatgggctgaccatgcgaacagggcactggcgaacgccggttacctggaagagatagaccatcgttcatacgagcgtcagggactggagaaagcgcccggccttcacctcggaaaggctgcctgtgcgatggaaaaacgggggatggaaacagaacgcggtgagcagaaccgtctgattaacagccttaacctggaaatacaggtttcccgcacgcagctggctctcaggacggttcaggaagcgcagcgtaagcgggaactcagcgatgccgcacgtcgtgcagctgaagcccttaacctgaccattcccgctgcgaatgcctcagcggataccctgcgggaattcattgccacgctgccgcaggaatgcgggaacgcgtgggagataagcccggagttcctggcgatgaacgggaaggtgaacgacatcgaacgtgaggggaatgcgctgctgaaagagcaggccattctcgaaaaggagatgaccggactcaaaaaagcacgccctgtcgcgtcccttctgtcagagattcccctgatgacatgggctgaaccggaataccgcaaaagacaactccgtttctggaaactcgagaaacagattgaatctcttcgccgcacctacagggctgtgaaagaacgggacattcccgcccgtcgtcaggcctttgaaacgcagtggaatacgtggattgcgccgggaatggcagagctgaaagaaaagctgtcagtacgggaagcggagcggcgcagggaggaagccgaagcggaagcgcgccggaaggaacaggagcatgaggcgcggctgaaacgccatgataaccactgtctgagccgtgaaacggcattagtcggggttattacggagctggggcgtgccagagagccgggaacgggcaggataacccgctacatgatgctgagtaacagagtcggagaattcacggtatggggtgatgagctggcgcattatccccagagcgttcatgaccaggtgaatgtttacctgtcgcctggcggggcagtgatggtctcggatatacgtgagggaatgccagaatctcatgagacgctggcgcggcctgagcgtgtgagaatgtattccggtgcgacggtccggcatgtactggaacagatgcgccaggggtggccctcttacggttttccggcgctgccgcatcactggccggataatttttatttcagcgacgaccgcaggcccgtagcctctccgctgccgtcagcgcaccgggtggacgtcaccgcttatgcggtaccggggcaactcatgcccgttgtattttcgacagagcgaaacagcaggaagctgaatctgctgttgtgcaaagggccggaggaaatgcttgtcggatttgtgcgccaggaggacgggctgcgtcccgttcttgtgcttccgtcgccggattacagtcatctgatggtcagcaccatcacagagaacgggatacacctggcaggctacggtgaggccataaaccgtgatgctgatactccgtacccaccggaaccgcacctgatgcagttccggcttaagggctgtcaggacacgctttttgctgccatcaacaaaccggaagagatgccggattatctcttccgtcaactcggttttaatcagacctggcatgagtggaagcgggacgaacagcacaggcaacaacaacgccgccccgggcacttccggggtatgagtatgtga

SEQ ID NO: 480931 - DNA, 267 bp, Shigella flexneri; identical to SEQ ID NO: 467831

SEQ ID NO: 480932 - DNA, 894 bp, Shigella flexneri
atgagcgccgcgcttcaatacttcgacgaaaatttaccccaccgtccctatcacacggatgatctcgcttttggtcttcgcatctccggcaaagggcgtgcgcttcttgcgcggtacatacagcagaaccagcctcatgcgcagttctggctggtttttgacgttgaccgcgagggggctgcgattgactggagcgaccggaacgctcccgcgccgaacatcaccgtaaaaaatcctgtgaacggtcatgctcacctgctctacgcgctcaatatcgccgtgagaactgcgccggacagctcggttaaggcgctgaaatacgccgctgcgattgaacgttcgctgtgtgagaaactttgtgctgatgtgaactacagcggactgatttgtaaaaatccgttccacctggaatggcaggtgatggagtggcgagaggaagcctataccctcgatgaactggctgattatctcgatttgagcgcctcagcgcgccgtagcatcgataaacattacgggatggggcgaaactgccacctgttcgaaatgacacgcaaatgggcttacagggcgattcgtcagggctggcctgtattctcacaatggcttgatgccgtgatccagcgtgtcgaaatgtacaacgcatcgcttcccgttccgctttctccggctgaatgtcgggctattggcaagagcattgcgaaatatacacacaggaaattctcaccagagggattttccgctgtacaggccgctcgaggtcgcaagggcggaactaaatctaagcgcgcagcagttcctacatcagcacgttcgctgaagccgtgggaggcattagggatcagtcgagcgacgtactaccgaaaattaaaatgtgatccagatctcgcaaaatga

SEQ ID NO: 480933 - DNA, 174 bp, Shigella flexneri; identical to SEQ ID NO: 467832

SEQ ID NO: 480934 - DNA, 258 bp, Shigella flexneri; identical to SEQ ID NO: 467833

SEQ ID NO: 480935 - DNA, 1641 bp, Shigella flexneri; identical to SEQ ID NO: 467834

SEQ ID NO: 480936 - DNA, 2085 bp, Shigella flexneri
atggctaactattttattgatcgcccggtttttgcctgggtacttgccattattatgatgcttgcaggtggtctggcgatcatgaacttaccggttgcgcagtatccgcagattgcgccaccgaccattaccgtcagcgctacctatccgggtgccgatgcgcaaacggtagaagactcggtcactcaggtgattgagcaaaatatgaatgggcttgatggcctgatgtacatgtcttcaaccagtgatgcggcgggtaatgcctctatcactctgaccttcgagactggggcatctcctgatatcgcacaggttcaggtgcaaaataaactgcaactcgctatgccttcattacctgaagcggtgcagcaacaggggattagcgtcgataagtcgagcagtaatatcctgatggtagcggcgtttatttctgataacggcagcctcaaccagtacgatatcgcggactatgtagcgtctaatatcaaagacccgctaagccgtaccgcgggcgttggtagcgtacagctctttggttccgagtacgccatgcgtatctggctggacccgcaaaaactcaataaatataacctggtaccttccgatgttatttcccagattaaggtgcaaaacaaccagatttctggtggtcaactgggtggcatgccacaggcggcagaccagcaactaaacgcctcgatcattgtgcagacgcgtctgcaaacgccggaagaatttggcaaaatcctgttgaaagttcagcaagatggttcgcaagtgctgctgcgtgatgtcgcccgcgtcgaacttggggcggaagattattccaccgtggcgcgctataacggcaaacctgttgccgggatcgccatcaaactggctgccggagcaaacgccctggatacctcgcgggcagtcaaagaggagctgaaccgcttatcagcctatttccccgcaagtctgaagacggtttatccttacgacaccacgccgtttatcgaaatttctattcaggaagttttcaaaacactggttgaggctatcatcctcgtcttcctggtcatttatctgtttttgcagaatttccgtgccaccatcatcccgacaattgccgtaccggtggttattctcgggacgtttgcgatcttgtcggcggtcggtttcaccatcaacacgttgactatgttcgggatggtgctggcgatagggttactggtggatgacgccatcgtggtggtggagaacgtcgagcgtgtcattgcggaagataagctaccgccgaaggaagcgacgcataaatcgatggggcagatccaacgtgcgctggtcgggattgccgttgttctttctgcagtgtttatgccgatggcctttatgagcggtgcaaccggggagatctaccgccagttctccatcacgctgatctcctccatgcggctttcagtatttgtggcaatgagcctgacccctgccctgtgcgccaccattctgaaagccacgccggaaggcggtcacaaacctaacgccctgttcgcacgcttcaacacgctgtttgaaaaatcaactcagcactataccgatagcacccgctcgctgttgcgttgtaccggtcgctacatggtggtctacctgctgatttgcgccgggatggcggtgctgttcctgcgtacaccgacctctttcttaccagaagaggatcagggggtatttatgaccaccgcgcagttaccttccggtgccaccatggttaacaccacgaaagtactgcaacaggtgacggattattatcttacaaaagagaaagataatgttcagtcggtgtttaccgttggcggctttggcttcagcggccaggggcaaaacaacggcctggcgtttatcagtctcaagccgtggtctgaacgtgtcggtgaggaaaactcggttaccgcgatcattcagcgggcaatgattgcgttaagcagtatcaataaagccgtcgtcttcccgttcaacttacccgcggtggctgaactgggtaccgcgtcaggttttgatatggaactgctggacaacggtaacctggggcacgaaaaactaacctag

SEQ ID NO: 480937 - DNA, 207 bp, Shigella flexneri; identical to SEQ ID NO: 24440

SEQ ID NO: 480938 - DNA, 651 bp, Shigella flexneri
atgaaacaggattttcgctgcggttgctggctgatggagaaaccggaaaccgcaatgaaagccatcacacgcaatcttgatcgcgaactctggcgtgatctgatgcaacgttccgggatgctgagtctgatggatgcgcagacccgggacacatggtacaggtcactggaatatgataattttccggaaatcagcgaagcgaacattctgagcacatttgaacaactgcaccagaacaaagatgaagtgtttgaacggggagtgatcaacgtcttcaaagggctgagctgggattacaaaaccaactcaccctgtaaatttggcagtaaaattatcgtcaacaacctggtgaggtgggaccggtgggggtttcatcttatcaccgggcaacagactgaccgactcgtcgacctggaaagaatgctacatctgttcagcggcaaaccgatccccgacaaccgggaaaacatcactattcgtctggatggtcacatccagtccgttcagggtaaagagcgctatgaagacgagatgttcatcattaaatactttaagaagggatctgcacacatcactttcaaaaggctggaactgattgacagaattaacgatataatagccaggtactttccttctgtgctctcagcctga

SEQ ID NO: 480939 - DNA, 957 bp, Shigella flexneri; identical to SEQ ID NO: 476538

SEQ ID NO: 480940 - DNA, 987 bp, Shigella flexneri; identical to SEQ ID NO: 479588

SEQ ID NO: 480941 - DNA, 525 bp, Shigella flexneri; identical to SEQ ID NO: 477205

SEQ ID NO: 480942 - DNA, 207 bp, Shigella flexneri; identical to SEQ ID NO: 476087

SEQ ID NO: 480943 - DNA, 243 bp, Shigella flexneri; identical to SEQ ID NO: 464992

SEQ ID NO: 480944 - DNA, 225 bp, Shigella flexneri; identical to SEQ ID NO: 476353

SEQ ID NO: 480945 - DNA, 372 bp, Shigella flexneri
gtggtgtgggtcggtaaggatgtgacaggcattgaaccccgtaacgccagtgttatcgaagttccggatattaccgctaaccgacggattaccgcgccgggttactggttttaccgcaatgatgaatttgtctttgactacagactcaaagcggaagatgagcgtgatgcccttctggctcaggtcagtgcccggacaggggaatgggaagaagacctgctgctggggttaatcagcgacgaagataaagaaaagctgaaagcctgtcgtatttacgcgaaatcgctgcaggcgatggatttcagcaccatcactgataaatcctcatacaacgccattgaatggcccgcctctccggaaggttcttcctga

SEQ ID NO: 480946 - DNA, 180 bp, Shigella flexneri; identical to SEQ ID NO: 474761

SEQ ID NO: 480947 - DNA, 459 bp, Shigella flexneri
ttgcaaatcgacacacttatccgacaactggctgaaatctcggtgctgacggaaagcatcggaggtaaaactgccccggactgggccatgaaacaggattttcgctgcggctgctggctgatggagaaacccgaaacagcaatgaaagccattacccggaatcttgatcgcgaaatctggcgtgacctgatgcaacgttccgggatgctgtcattaatggatacgcaggcccgtgatacatggtaccggtcactggagtacgataattttccggaaatcagcgaagcgaacattctgagcacatttgaacaactgcaccagaataaggatgaggtgtttgagcgaggggtgatcaacgtcttcagagggctgaactggaattacaaaaccaattgcccctgtaaatttggcagtaaaattatcgtcaacaatctggtgagatgggaccggtggggataa

SEQ ID NO: 480948 - DNA, 180 bp, Shigella flexneri; identical to SEQ ID NO: 474761

SEQ ID NO: 480949 - DNA, 588 bp, Shigella flexneri; identical to SEQ ID NO: 475689

SEQ ID NO: 480950 - DNA, 288 bp, Shigella flexneri; identical to SEQ ID NO: 474636

SEQ ID NO: 480951 - DNA, 354 bp, Shigella flexneri; identical to SEQ ID NO: 474642

SEQ ID NO: 480952 - DNA, 1071 bp, Shigella flexneri; identical to SEQ ID NO: 476467

SEQ ID NO: 480953 - DNA, 207 bp, Shigella flexneri; identical to SEQ ID NO: 24440

SEQ ID NO: 480954 - DNA, 1605 bp, Shigella flexneri; identical to SEQ ID NO: 478723

SEQ ID NO: 480955 - DNA, 189 bp, Shigella flexneri; identical to SEQ ID NO: 470416

SEQ ID NO: 480956 - DNA, 564 bp, Shigella flexneri; identical to SEQ ID NO: 463434

SEQ ID NO: 480957 - DNA, 417 bp, Shigella flexneri
gtgttaattataattttttccctctctttaaagaaagatgaagtaaaagaaattgctgaaattatagatgataagagatatggaatagtcaacactggacagtgcaattatattcttgccgaaacacaaaatgatgcggtatgggcgtctgtagccttaaataaaaccggatttaccaaatgcagatatattctggtgtcaaacaaagaaataaatagaattcaacaatatatcaatcaacgattcccatttatcaatttgtatgtgttgaatttagtgagtgataaagcggaattactggtgtttttaagtaaagaaagaaatataacagcaaagaaaaaaaacaccgagtggttcttatacattccgtttagtatatggcctctcgatttatcctccctcatatttttaaggtga

SEQ ID NO: 480958 - DNA, 189 bp, Shigella flexneri; identical to SEQ ID NO: 475619

SEQ ID NO: 480959 - DNA, 708 bp, Shigella flexneri
atgctggcctgcggcacgcggatactgggcgtgaaggaatacatctgcgataaacctgagtgcccccacgtcagatacgtcactaactcatgcggcagccgtgcctgcccgtcctgcggaaaaaaggccacagacctgtggatagcgacacagctgaatcgtcttcctgactgcgactgggtacacctggtcttcaccctgccggacacgcagtggccggtgttcgaaagcaaccggtggctgctgaatgacgtgtgccgtctggcggtggagaatctgctgtatgccgcccggaaacgggggcaggaacccggtatcttctgcgccatccacacgtatggccgtcgtctcaactggcatccgcatgtacatgtgtctgtaacctgtggaggtctgaataagcatggtcagtggaaaaagctgagcttcctgaaagacgcgatacgttcgcggtggatgtggaatatgcggcaacggcttctgaaagcgtggtcagaggggctggcgatgccggagtcgttgtcacatatcacgacggaatcacagaggagaagcctggtgctgaaagccggaggaaaatactggcatgtgtacatgtcgaaaaaaacggccggcgggaggaatacggcgcgctacctgggtcgttatctgaagaagccgccgatagcggcctcccggctggcacattacaacggagggggagcctga

SEQ ID NO: 480960 - DNA, 294 bp, Shigella flexneri; identical to SEQ ID NO: 476979

SEQ ID NO: 480961 - DNA, 294 bp, Shigella flexneri; identical to SEQ ID NO: 476979

SEQ ID NO: 480962 - DNA, 354 bp, Shigella flexneri; identical to SEQ ID NO: 474642

SEQ ID NO: 480963 - DNA, 378 bp, Shigella flexneri; identical to SEQ ID NO: 477315

SEQ ID NO: 480964 - DNA, 378 bp, Shigella flexneri; identical to SEQ ID NO: 477315

SEQ ID NO: 480965 - DNA, 1077 bp, Shigella flexneri
atggcagggaaagttacggaaaccgctgttgtgggtggcgtggatacacataaagatctgcacgttgccgctgtcgtagatcagaacaataaagttctggggacccagtttttctccacaacacggcaaggttaccggcagatgctggcatggatgacttcgtttggggcattaaagcgaattggtgttgagtgtacaggcacctatggatcaggtctgcttcgctatttacagaatgccgggttagaagttcttgaggtgactgcgccagatcggatggagcgacgcaaacggggtaaaagtgacaagattgatgctgaatgtgccgctcacgccgcattctccggaataagaaccgtcacacccaaaacgcgcaatggcatgattgagtctctgcgggtattaaaaacttgccgaaaaacagcaatatcagcccgcagagtcgctctccagattatccattccaatattatctctgccccggatgaattacgtgaacaactcagaaatatgacgcgcatgcagctcatcaggactctgggatcctggcggcctgatgccagtgaataccgcaatgttaccaacgtttatcgtatttcattaaagtcccttgcccgacgctatctcgagttacatgacgaaatcgctgatttggatgtcatgattgcggcaattgtcgatgagctggcgcctgaactgattaaacgtaatgctattggatacgaaagcgcttcgcagttgctgatcacggcaggagacaatccccaacgattaagatcagaatcaggttttgcggcactgtgtggtgtcagccctgttcccgtatcttcaggaaaaacgaatcgttatcgacttaaccggggtggagatcgtgctgcaaatagtgcacttcacatcattgccatcggacgtttgcgaactgacgataaaacgaaggaatatgtcgccagacgagtagcggaagggcatacaaaaatggaagcaatacgctgcctgaagcgctatatctcacgcgaagtttatacattactgcgtaatcaaaacaggcagatcaacagcatcccgataacggcttga

SEQ ID NO: 480966 - DNA, 363 bp, Shigella flexneri
atgttaaaactctttgctaagtacacatcgattggggttctcaatacactcattcactgggtggtgtttggtgtttgcatttatggattgtcaacaagccaagcgttagcgaactttgctggcttcgtggtggcggtgagtttcagcttttatgccaatgcacgtttcacatttaaagcatccacctccacgctacgttacatgctctatgttggctttatgggtaccctgagcgctgctgtaggttgggctgctgacaggtgcgggttaccacccatcatcacgttaatagcattctccgcaatcagtcttgtttgcggtttcttctattcaaaattcattgtttttagggaagcaaaatga

SEQ ID NO: 480967 - DNA, 927 bp, Shigella flexneri
atgaaaatttctctggtcgttccggtcttcaatgaggaagccacgataccgatcttttataaaacggtaagagagtttgaagagttacagcaatatgatgttgaaatagtattcatcaatgacggcagtaaagatggaacagagtcaattataaattctattgcctcttgggatcctcttgtggttgcattatcgttcacccggaattttgggaaggaaccagctctgtttgctgggctggaccatgcaaccggtgatgcaatcattccgattgatgtggacctgcaagatcctattgaagtaattcctcacctcattaccaaatggcaggctggggctgatatggttcttgctaaacgaacggatcgttcaactgacggacgattaaagcgtaaatcagcggaatggttttacaagcttcacaataaaatcagctcaccaaagatagaagaaaatgttggcgatttcaggttaatgtcacgtgacgttgttgaaaatattaaactgatgcctgaaagaaacctctttatgaaaggcgttctgtcttgggttggcggtaaaactgatgttgtagaatatgcgcgagcagaacgcttcgctggtgattccaagttcaatggatggaaactatggaaccttgcgcttgaaggcataacaagtttctcaactttcccattacgcatgtggacatatattggcttgtttgtagcaggtatttcattcttttatggcgtatggatgatttttgatacattcgccttcggtaaccctgttcgcggatacccatcacttttggtatctatattatttctaggagggattcaactgattggcattggcgcccttggcgagtatataggaagaatatatgttgaaacaaaatccagacctaaatacatactaaaaaaatggaaaagtcagaaatga

SEQ ID NO: 480968 - DNA, 1581 bp, Shigella flexneri
atgaataacaaatacttaaacaaatacattacaagtgctattggcttggttgctgtttttatttgcttttatatatcgtggatgccagtctttcaccatggaagctggtcaggtcacgattttttatttcatattaatagagttttatcatcagtcaatggattaaagaatggtcaattaatcccatattatgatgttgactataaaaatcaccctgggtatgggagtaatttattttatccacctttagcaaatttattaggttctatatttttttatataagtcacgatttcaatgttaccgttaagttattagcgatatttattgcgatatcgtcatttcttacatcatactttgttttaattagaataaatggggacaaattaccatcagtaatttattcattgtgcttttcatgctcaatctatatggttgataatattttcataagatcatcttatccagaagctatggcaatatgcgccattccgttatttttatatgggctaggatatgcatcaaacagagaatcagtattttttttagcttctgcgaatattatttttattttatccaatatccctgcaactttatgttctggggttgtatttatcatatattactccataaatagacgtagattagctcagtatgttgttagcgtttgtatatctatactattatgtagttggtatgtattcccattgatatattcaacgcatggtgagtcatttactatgttagatcgtgactggttcccaacaatgtcacgaacatacatatcactttacgatcttatttctggagaaataataaaatcaggccccctaaagggaatggcattagggatcggactgccaattacctttgcatttatatggaactttgcgacagatcacaataaaaagaaacaagattacctgcttgttttaattatattgctaatcatttgtggtggcattaattttggttttctaggtggcgtatttacacatttatcaaaaattcaatttacttggcgttttattccattcctgctatttagcattttacttattctccatgcatcaggaagaatcaaattaaaatatatcttgttaattttcacatcaacatgtttgatgacaagtgcgattactgtacctaaaaaaagtagccacaacctcacaattgatattgccgccagtgcaaattataaagattatgttctatcaaatgcaccagagcttggtgaccggattaaagaattaaaatgcgataatgggctgtcatacgctttctcacgaaccttaggttcaaatgggttacctgttttcacatttagtattccaacaaaaaccacttgcagcatacctttcatgtcttataaatcattagaattagatggggcaaaaaaatattcgagagacggctatttcaaagcggaattgactaaaggtaattatattatacgtattgacacaacttataggttcaaacaggtcgtattaatatctttcatagtatcaatatgcacaatacttaccatattgttatttgctttaaaaaggaaatggaaatggaaatggaaatggaaatga

SEQ ID NO: 480969 - DNA, 327 bp, Shigella flexneri
atgactaaaaatatgcgcttttcccctgaggtccgtcagcgggccgttcgtatggttatcgaaagccagaatgactatgactcgcagtgggcggccatcagctccatcgcccctaaaatcggctgtacgcctgagaccctgcgtacctggctgcgtcagtatgagcgcgatgccggtgcaggtgacggcggactgagcaccactgaacgccagcgtctgaaggaactggagcgtgaaaaccgcgaactgcgtcgcagcaacgatatcctgcgccaggcttccgcgtattttgcgaaggcggagttcgaccgcctgtggaaaaaatag

SEQ ID NO: 480970 - DNA, 360 bp, Shigella flexneri
atgaccaaacgccagggcaaaaaccgcaggcgcgctaaccgtcttattgaactatggcctgaattattcagcctggaatcaccgaagccgcttaaggtagggatatttgaagacctgatacaggatattgccgtcagggcgcaggcttttgggtcaggggcattacgtgcagcgctagcatcttatgctcattctccgcgttattaccgtgccttaatggctggtggcgtgcgttacgatctgaatagccagccatgcggcgaggtgacacaacaggaacagcagaacgcggaagcacgactgatggcactgaaagagaagcgcaaacgtaagtcgaacaaagagcaagctggcgtatga

SEQ ID NO: 480971 - DNA, 285 bp, Shigella flexneri; identical to SEQ ID NO: 29497

SEQ ID NO: 480972 - DNA, 201 bp, Shigella flexneri; identical to SEQ ID NO: 29496

SEQ ID NO: 480973 - DNA, 219 bp, Shigella flexneri
atggatcacgatgccaatatcattagcgtgtcgcagcgcgaatttgagcaaatctacccaaaaccaggttgggtagaacacgacccaatggaaatctgggccacccaaagctccacgctggtagaagtgctggcgaaagccgatatcagttccgatcaaattgcagctatcggtattacgaaccagcgtgaaaccactattgtctgggaaaaagggtaa

SEQ ID NO: 480974 - DNA, 690 bp, Shigella flexneri
gtggcagagcgatacccacgatacggttttccgaaactcttccaggttctgcggcgacagggatacccatggaatcacaaaaggatccaccgtatttactgtctgctgaagctgaattttcgccgtaagggcaaacaacggttgccggtgcgtaatccctcgccactggccacgtcggaagcgctgaaccagagttggtctgtcgattttatgcatgatgccctggtctgtggccgtcgttttcgtacgttcaatgtcgttgatgactttaaccgtgaggcgttgtcgattgaaatcgacctgaatctgccagctctacgcgtggtccgtgtactcgacaggatcgcggcaaaccgtggctatccggtcaagctgcgcatggataatggtccggaatttatctccctgacactggctgaatgggcagagaaacatgcagtaaaactggagtttatccagccgggtaagccgacgcagaacgctttcattgagcgctttaaccggacataccgtacagaaatactcgatttttatctgttcagaacgctgaatgaagtgcgggaaatcacggaaaaatggttgtcagaatataactgtgaacgcccgcatgaatcactgaacaatatgacgccagaggaatatcgacaacaccattatttggccgggatctcaaaaaatgcctggaactaa

SEQ ID NO: 480975 - DNA, 267 bp, Shigella flexneri
atgcgtaaagcccgttttactgagcatcagatcatcgccgtgattaagtcggttgaagccggacgaactgttaaagatgtctgccgggaggccggtatctctgaagccacctactacaactggaagtccagatacggtggcatggaggcttctgatattaaaaagattaaagagcttgaggacgagaaccgccgtctcaaacagatgtttgccgacctgagcctggagaaccgggcgctgaaggacgttatcgaaaaaaagctttaa

SEQ ID NO: 480976 - DNA, 210 bp, Shigella flexneri
atgacggcacaaatatcagcttacgggcggctggtagctgacccgcagttaaagaccaccagcaagggaacaccaatggcgctggtgagtatggctgttcccattccgtgcaatcaggcagatgacggacaggcgacgatgtggttatccgtcctggcatttggcagacaggccgacgcactggcaaaacactgtaagtatcccgcataa

SEQ ID NO: 480977 - DNA, 2136 bp, Shigella flexneri
atgaaacgtgcaccgaatttaaagcatcagccagccgacaaaatgacggaggttatcatttttgcgggtagtgatgcctgggcacatgcgaagcagtggcaggagatggacgggcgacttgctggcgataacgtgcctcctgtctggcttggagatcagcaactggcagaactggaaaatctgaacatcattgacgacgggcgctattgtgtccggctgtacaaggcagggcacatcaagccatcaaacatcaataccattgcgcaaaagctggcggcggcaggcatacgggatgcgaattattaccccgacgggatgcacagccagaagcgggagaactggcgcgaatatctggaacgtgagcgccaaaacatcgatgacgggctggctatccggcttccgacaaaagaaaacgccaccggaagtcatggcgatgatgaattaaagccccgcgttgaaagccgcgcagatggtgttttctgggtaacacccaaagtggacaagcagacaggcgagataatcagacctgaaacgtggttatgttccccgcttgaactactgggaacggggacgatcggcagggagcatcaccgcgtgatgcgctggaaaaaaacggcaaatcatgaagtcatcacgatggcggttccgtgcggtggcattggcgaccgtgacggctggcggttgttgaaagaccacggccttaacgtgacaaccaacggcaaatacagagcaatactggctgactggatgcagttaagcggaaaccatgaggaatggcagttaagcacaacaacggggtggcattttggcgcgtacatcatgccggacggttcagtcattggtgagtctgaaaaaccgatcctgtttaccggaaaaacggctgccgttaatggttattccgtagcaggaacgacggagggctggcgcgatacagtggcgcggttggctggtggcaatccgtccatgatgctgggggtggcggtatcgttatcagcgccattaatcgggctggtgggcgctgacggtttcggtgtgcatcttttcgaacaatcatcggcaggtaagaccaccacgcagaacatcgcatccagtttgtggggagagccggacgcacaacggctgacctggtacggaacggcgttaggtatcgccaacgaggccgaagcacacaatgacgggctgttacccctggatgaaataggccaagccggaaacgcacgggaggtgtccacgtcggcttatacgctgtttaacggttcgggaaaattacagggggcgaaggacggcggcaacagggagataaaacactggcgaacagtggcaatcagtaccggagaaatggacgttgaaacattcctcaaaagtgaggggataaaagtcaaagcggggcagcttgtccggttgcttaacgtgccgatggagaagtccacgcagtttcacgaatacagcacaggaaaggcgcacgcagacgcgttaaaggatgcctggacagcaaatcacggggcggcaggtcgtgagtggattaaatggctagcagcccaccagcagaaggctaaggacacggtaagggcatgccgtgaacggtggcgcaacctgataccggagagctacggcgaacaggttcaccgtgtaggggaacgattcgccatactggaggccgcgcttgtgctgtcaggcaatgttacgggttgggatgttcaggcgtgccgtgatgccattcagcataactttaatgcctgggtgaaggagttcggcacgggtaacaaggaacacaggcagattattgaacaggcagaggcgtttcttgctgcctacggcatgagcaggtttgcgcctgtcaattatgaccctgcaagcctgccgatttcagaactgtacggctacagggaaagcgacgggcgttacggtgagtctgttttgttttacgtcctgccggagccatttaaatcgcatgtggcgaagggatttaacaaggatgccgtagcaagagtccttcacgaagctggaatgctgaaaaagccagccagcggggaaggatggcaaatcagaacaccacgtcttaaacacatgaagggggcacgactaagggtgtacggccttttacttgcacaggatcatgatgatgaaggaggttaa

SEQ ID NO: 480978 - DNA, 300 bp, Shigella flexneri; identical to SEQ ID NO: 29501

SEQ ID NO: 480979 - DNA, 186 bp, Shigella flexneri
atgcttaagcgattccagataacagcacgcgctgtaaatcatcaaggccacgttattgatattcggcaaaacgtgaacgccaccagcgttaatgcagctatagcaatattgaaagaagagttaatcggctgtgggttcacgcaggtgatgatccgtgccgtagttgaagtgtcgactgttcattaa

SEQ ID NO: 480980 - DNA, 189 bp, Shigella flexneri; identical to SEQ ID NO: 29503

SEQ ID NO: 480981 - DNA, 192 bp, Shigella flexneri; identical to SEQ ID NO: 29504

SEQ ID NO: 480982 - DNA, 1245 bp, Shigella flexneri
atggcaagaaaggcaaccccactcaccaccacacagatcaaagcagctaaaccagcagaaaaagaatacaccttacaggatggcggcgggctttttctcgttattaagccgtctggttcgaaactatggcgattcaactactatcgaccttcgaacaaaaaacgaacactcattagtttgggatcgcttgatgaagtctcccttgctgatgccagaaaacgccgtagcgagtacaggacgttaattgcggcaggaaccgacccgcaggaatacgaacggcaaaaacgcgaagcagaggctcgacgacagggcaacacgttcgaaaatgtggccgcattgtggtacgaaatgaaaaaaaaccagaatctcgcccacaatacgatcaaggacatctggcgctcgctagagaaatatgtattcccgtatatcggaaacacaccgatagatactctcaccgctcgccgctttgttgagatactcacgcccatcaaggcacgtggcaacctggaaacactgaaacgcgttttacagcgcatcaatgaagtgatggattttgctgccaacagtggaatgattgacatcaacaccgccgcgaacgttcgcaagacattcccttctcccaccaaaaagcacatgccaaccatccggccggaacaactaccgcagctaatgcacgatttatcgatcgccagcatagaacggcaaaccagattgctgattgagtggcagttgttaaccgcaacccgcccagccgaagcctctgccgcacggtgggaagaaatcaaccttgaggcggcaacctggacgataccagccggacgcatgaagatgcgccgtgatcatgtgatccccctttgcgctcaggcgatggcagtgcttgaagccatgaagccgattagcgcacgaagggagcatgttttcccaagtcttaaaaatccagtgcaaccaatgagcagccagacagcaaacgcagcattacggcgaatgggttacactggtgtgctggtatctcacggactacgcgccatattcagcacagcggcgaacgaagaaggatttgagccggacgtaatcgaggccgcactcgcacacgtggacacgaacgaagttagacgggcatacaaccgaagcaactacctggaaaaacgtaaagtgttaatgtgctggtggggtgattttgtggaagcagccgcaaccggaacaaccatcgccagcgggcacagaggattacgcggaataaaataa

SEQ ID NO: 480983 - DNA, 294 bp, Shigella flexneri; identical to SEQ ID NO: 25632

SEQ ID NO: 480984 - DNA, 276 bp, Shigella flexneri; identical to SEQ ID NO: 5786

SEQ ID NO: 480985 - DNA, 216 bp, Shigella flexneri; identical to SEQ ID NO: 478917

SEQ ID NO: 480986 - DNA, 504 bp, Shigella flexneri
atgccgggcaactgcccgcattatgggcgttggcctcaacacgattttacgtcacttaaaaaactcaggccgcagtcggtaacctcgcgcatacagccgggcagtgacgtcatcgtctgcgcggaaatggacgaacagtggggctatgtcggggctaaatcgcgccagcgctggctgttttacgcgtatgacaggccccggaagacggttgttgcgcacgtcttcggtgaacgcacgatggcgacgctggggcgtcttatgagcctgctgtcaccctttgacgtggtgatatggatgacggatggctggccgctgtatgaatcccgcctgaagggaaagctgcacgtaatcagcaagcgatatacgcagcgaattgagcggcataacctgaatctgaggcagcacctggcacggctgggacggaagtcgctgtcgttctcaaaatcggtggagctgcatgacaaagtcatcgggcattatctgaacataaaacactatcaataa

SEQ ID NO: 480987 - DNA, 312 bp, Shigella flexneri; identical to SEQ ID NO: 475598

SEQ ID NO: 480988 - DNA, 234 bp, Shigella flexneri; identical to SEQ ID NO: 479183

SEQ ID NO: 480989 - DNA, 1152 bp, Shigella flexneri; identical to SEQ ID NO: 382377

SEQ ID NO: 480990 - DNA, 150 bp, Shigella flexneri
atgaatgcgttattactccttgcggcactttccagccagataacctttaatacgacccagcaaggggatatgtacaccattattcctgaagttactcttactcaatcttgtctgtgcagagtacaaatattgtctgaagtggcacactga

SEQ ID NO: 480991 - DNA, 366 bp, Shigella flexneri; identical to SEQ ID NO: 473885

SEQ ID NO: 480992 - DNA, 276 bp, Shigella flexneri
gtggcttctgtttctatcagctgtccctcctgttcagctactgacggggtggtgcgtaacggcaaaagcaccgccggacatcagcgctatctctgctctcactgccgtaaaacatggcaactgcagttcacttacaccgcttctcaacccggtacgcaccagaaaatcattgatatggccatgaatggcgttggatgccgggcaactgcccgcattatgggcgttggcctcaacacgattttacgccatttaaaaaactcaggccgcagtcggtaa

SEQ ID NO: 480993 - DNA, 225 bp, Shigella flexneri; identical to SEQ ID NO: 476353

SEQ ID NO: 480994 - DNA, 504 bp, Shigella flexneri; identical to SEQ ID NO: 479351

SEQ ID NO: 480995 - DNA, 213 bp, Shigella flexneri; identical to SEQ ID NO: 474663

SEQ ID NO: 480996 - DNA, 207 bp, Shigella flexneri; identical to SEQ ID NO: 480721

SEQ ID NO: 480997 - DNA, 501 bp, Shigella flexneri; identical to SEQ ID NO: 479872

SEQ ID NO: 480998 - DNA, 495 bp, Shigella flexneri; identical to SEQ ID NO: 471654

SEQ ID NO: 480999 - DNA, 825 bp, Shigella flexneri; identical to SEQ ID NO: 478357

SEQ ID NO: 481000 - DNA, 372 bp, Shigella flexneri; identical to SEQ ID NO: 477910

SEQ ID NO: 481001 - DNA, 480 bp, Shigella flexneri; identical to SEQ ID NO: 480052

SEQ ID NO: 481002 - DNA, 354 bp, Shigella flexneri; identical to SEQ ID NO: 476372

SEQ ID NO: 481003 - DNA, 504 bp, Shigella flexneri
atgcccggagaacgggtcatctttcagcgtgttctgcaccttcgaagccaggccattgaagccacaacgcatatctgtgatgccagcgatgatccagattttggtaccggtcggcagcgttatcatcggataccccctttcatttcgcggattagcgcccgtaacagttccggagtgagagggtcaaacagttttaccacacctgatttaagatgcagctcgcaccgtgggacgtttccgggagccccctcagggcgctcatcatgcttgttacgccagaagggatttgtaactggtctggtcggctccggcgtatcagtcagtgccaccgggacaggcatgcattcctgtatgtcatcatcgctcagtaagccgtcctcgtactggcttttccatttaaacagcaggttattattgatatcgtgttctctggcgatccgggcaacaacagccccaggctgtaacgcctgcttagccagacggaccttaaattcacggctatag

SEQ ID NO: 481004 - DNA, 504 bp, Shigella flexneri; identical to SEQ ID NO: 479351

SEQ ID NO: 481005 - DNA, 375 bp, Shigella flexneri; identical to SEQ ID NO: 475278

SEQ ID NO: 481006 - DNA, 258 bp, Shigella flexneri; identical to SEQ ID NO: 479876

SEQ ID NO: 481007 - DNA, 228 bp, Shigella flexneri; identical to SEQ ID NO: 480144

SEQ ID NO: 481008 - DNA, 300 bp, Shigella flexneri
atgggcctgacgctaccgcagacttatcgatacgtactgctgcctaatgcttatcgcgttatcgtcccgccgatgacttccgagatgatgaacctggtgaaaaactccgccatcgcctcgaccatcggtctggtggatatggcggcgcaggcgggtaaattgctcgactactcggctcacgcctgggagtcgtttaccgccatcacgcttgcgtatgtgttgattaacgcttttatcatgctggtgatgacgctggttgaacgtaaagttcgcctgcccggcaacatggggggcaaataa

SEQ ID NO: 481009 - DNA, 549 bp, Shigella flexneri; identical to SEQ ID NO: 478683

SEQ ID NO: 481010 - DNA, 627 bp, Shigella flexneri; identical to SEQ ID NO: 479864

SEQ ID NO: 481011 - DNA, 294 bp, Shigella flexneri; identical to SEQ ID NO: 478581

SEQ ID NO: 481012 - DNA, 654 bp, Shigella flexneri; identical to SEQ ID NO: 476062

SEQ ID NO: 481013 - DNA, 219 bp, Shigella flexneri; identical to SEQ ID NO: 474644

SEQ ID NO: 481014 - DNA, 174 bp, Shigella flexneri
atgaatgagcgggaacaaaaccgccttatccgtggacttataaggcagcgtgacgcatggaagacacaggaaacagggcataaagataaagcgtcaggacgcgcagaacgcatcacagcgaagcgattaaccgaccgtgaccgcgaggttatggaatgtttccgcaatcgctga

SEQ ID NO: 481015 - DNA, 252 bp, Shigella flexneri
atgaccgcaattctgaaagttgacttgcctgcatcatgtgtgactgagtattggtgtaaaatcacccgccagcagattatacctgctggttttttttattctcgccgcgctaaaaagggaacgtatgatctggataatgacgatggctcgccgtatgaacggtgtttacgcggcatttatgctggtcgcttttatgatgggggtggccggggcgctacaggctcctacattgagcttatttctgagtcgtga

SEQ ID NO: 481016 - DNA, 297 bp, Shigella flexneri; identical to SEQ ID NO: 480799

SEQ ID NO: 481017 - DNA, 2064 bp, Shigella flexneri
gtgctggataacgacacctcgcgtaaagagttgatcgaccagttgcgtactgtcgccgcgacgccccctgcggaaccggtcccgaagatcgtgccgccgacgctggttgaagagcaaaccgtgctgcaaaaggtcaccgaagtcagccgccattatggtgaagccctttccgcccgcttcgggcaactttatcgcaatatcaccggctccccgcataagccatttaatccacaaaccttcagcaatgcgctgagccatttttcaatgttagcggtattagtgtttggtttttactggctgattcgcctgtgcgcactgccgctatatcgcaaaatgggtcagtgggcgaggcaaaaaaatcgtgagcgcagcaactggttgcagcttccggcgatgattattggggcgtttattatcgacctgctgttactggccctgacattatttgtcggccaggtattaagcgacaacctgaatgcaggtagtcgcaccatcgctttccaacaaagtttgtttctcaacgcctttgccctgattgaatttttcaaagccgtactacgcctgattttttgcccaaacgtggcggagctgcgcccgttcacgattcaggacgagagcgcccgttactggagtcgccgcctgagctggttaagcagcctgattggctatggcctgattgtggccgtgccgattatctctaatcaggtgaatgtacagataggtgcgctggcgaacgtcatcattatgctgtgcatgaccgtctgggcgttgtacctgatcttccgaaataaaaaagagattacccagcatttgctcaactttgcggagcattcgctggcttttttcagcctgtttatccgcgcctttgcgctggtgtggcactggctggcaagcgcctattttatcgtgctgtttttcttttcgttgttcgatccgggcaacagtctgaaatttatgatgggtgcaacggtgcgcagcctggcgattattggtatcgcagcgtttgtttccggtatgttttcccgctggctggcgaaaaccatcaccctctcgccacatactcagcgtaactatccggagctacaaaaacggctgaatagctggctttcggcggcgctgaaaacggcgcgtattctgaccgtctgcgtggcagtaatgttgctgttgagcgcatggggattgttcgatttctggaactggctgcaaaacggcgcggggcagaaaaccgtagatatcctgatccgcatcgcactcattcttttcttctcggcggttggctggacggtgctcgccagtttgatcgaaaaccggctggcttcggatattcatggccgcccgctacccagcgcccgtacgcgtaccctgctgacgctgttccgtaacgcgctggcggtgattatcagtaccatcaccatcatgattgtgttgtcggaaatcggcgtcaatatcgcgccattgctggcaggtgccggggcattaggtctggctatctcgtttggttcgcaaacgctggtaaaagatattatcaccggggtatttattcagtttgaaaacggcatgaacactggagatttggtgactatcgggccgttgaccggcacagtggaacggatgtcgattcgctccgtgggcgtgcgccaggataccggggcgtatcacatcattccgtggtcttcgataaccacctttgctaacttcgtccgcggtattggttcggtagtggcaaactacgatgttgatcgccatgaagatgctgataaagccaatcaggcactgaaagatgcggtaacggaattgatggaaaacgaagaaattcgcgggctgattattggtgaaccgaactttgccgggattgtcggcttaagcaataccgcgtttacactgcgtgtttcgttcaccacgctgccactcaaacagtggacggtacgctttgccctcgacagccaggtgaaaaaacatttcgacctggcgggcgttcgcgcgccagtgcagacttatcaggtgctgcctgctccgggcgcgaccccggctgaaccgctgccgccgggggagccaacgctttaa

SEQ ID NO: 481018 - DNA, 288 bp, Shigella flexneri; identical to SEQ ID NO: 480819

SEQ ID NO: 481019 - DNA, 405 bp, Shigella flexneri; identical to SEQ ID NO: 480818

SEQ ID NO: 481020 - DNA, 897 bp, Shigella flexneri; identical to SEQ ID NO: 480821

SEQ ID NO: 481021 - DNA, 264 bp, Shigella flexneri; identical to SEQ ID NO: 480817

SEQ ID NO: 481022 - DNA, 624 bp, Shigella flexneri; identical to SEQ ID NO: 480824

SEQ ID NO: 481023 - DNA, 819 bp, Shigella flexneri; identical to SEQ ID NO: 475066

SEQ ID NO: 481024 - DNA, 879 bp, Shigella flexneri
gtgcgttatgcccgtgaacataatctcggcaagattattctcggtcgcccagcctcgcgccgctggtggcgtcgggaaacatttgctgaccgactggcgcgcatcgcccccgatctcgatcaggtgctggtcgcgcttgatgaaccacccgcccgcacgattaacaacgcgccggatagccgctcatttaaagacaagtggcgggtacagattcagggatgcgtggttgccgccgcgttatgcgccgttatcaccttaattgccatgcagtggctgatggcgtttgatgccgccaacctggtgatgctgtatctgcttggcgtggtggtggcgctattttatggacgctggccttcggtggttgccaccgtcattaatgtggtgagtttcgatctcttttttatcgccccacgcggcacgctcgccgtctctgatgtgcaatatctgctgaccttcgcggtgatgttaaccgtcgggctggtgatcgggaaccttactgctggcgtgcgttatcaggcgcgggtagcccgttaccgcgagcaacgcacacggcacttatatgaaatgtcgaaagctctggcggtgggccgcagtccgcaggacatcgccgccaccagcgaacaatttattgcctctacgtttcatgcccgcagtcaggtgttgttgcccgatgacaacggtaaattgcagccgttaacacatccgcaaggaatgacgccatgggacgatgccatcgcgcagtggagttttgataaaggcctgcctgcgggcgcgggcaccgacacgttacccggtgtaccgtaccagattttgccgctaaaaagcggcgagaaaacctacggctggtggtggtggagccggggaatctgcgccagttga

SEQ ID NO: 481025 - DNA, 189 bp, Shigella flexneri; identical to SEQ ID NO: 477115

SEQ ID NO: 481026 - DNA, 141 bp, Shigella flexneri; identical to SEQ ID NO: 480776

SEQ ID NO: 481027 - DNA, 726 bp, Shigella flexneri
atgattaaagagaatcagttgatgatgatcgcccacggtgtcgcttcgccgcggatcccggaagcgcgtaatttgtggctgatttcacttaagctctggagttgcgaaggcgagattattgatgaacaaaaatttcgtcgtagcttcagcgatccggcacttagccatgctcttgaccgacgggtattccacgaatttttccagcaggccgcaaaagcggttgccagtaaaggcataagcatcgccctccccctttccgttgccggtttgagtagcgccacgctggtgaatgatctgcttgagcagctggaaaatagccctctaccaccacggttattacatctgattattccggctgaagcgattttagatcacgcagaaagcgtgcaaaaactgcggctggcgggatgtcggatagtgctcagccaggtgggccgcgatctgcaaatcttcaactcgctgaaagcgaatatggcagattacctgctacttgatggtgagttatgcgccaacgtgcagggtaatttgatggatgagatgctgattacgattattcaggggcacgctcagcgactcgggatgaaaaccatcgccgggccagtcgttttacccttagtgatggatacgctttctggcatcggcgtcgatctgatttatggtgatgtgattgccgatgcccaaccgctggatttgctggtgaatagcagttatttcgcgattaactga

SEQ ID NO: 481028 - DNA, 138 bp, Shigella flexneri; identical to SEQ ID NO: 474971

SEQ ID NO: 481029 - DNA, 531 bp, Shigella flexneri
ttgtttcttgggatcaactcactggtctattacgtgattattggctggcttccggcgatcctcatcagtcacggctatagcgaagcacaggcgggttcactgcatggtttgctgcaactagccacagcagctcccggtttgctgatcccacttttcttacatcatgtgaaagaccagcgtggtattgcagcgttcgttgctttgatgtgcgcagtgggcgcggttgggctctgctttatgccagcgcacgcgatcacctggactctgcttttcggttttggttccggcgcaacaatgatactggggttgacgttcattggtcttcgggcaagttctgcgcatcaggcggcggcactctcggggatggcacaatccgtcgggtatttgctggcagcctgtgggccgccgctaatgggtaaaatacacgatgctaacggtaactggtccgtaccactgatgggtgttgcaatactttcactactgatggcgattttcggactttgcgccgggagagacaaagaaattcgctaa

SEQ ID NO: 481030 - DNA, 345 bp, Shigella flexneri
atgaacccgtcgcaacatgctgaacagtttcagagccagttagcgaactatgtgccacagttcactcccgaattttggccggtgtggttgatcattgccggagtattgctggttgggatgtggttggtgctggggctgcacgccttgcttcgtgctcgtggcgtgaagaaatcagccaccgatcatggtgagaaggtttatctttacagcaaagcggtcagattatggcactggtcgaatgcgttactctttgtattgttgctggcaagtgggctgataaatcactttgcgatggtgggcgcaactgcggttaaaagtctggttgcggtgcatgaagtttgctga

SEQ ID NO: 481031 - DNA, 1290 bp, Shigella flexneri
gtggtcccgaaactggctgtatatgacccgacggtgcagtttgagttctggttttcggaaaagcggattgcggatatcaggcaggttgaaaccagcgcccgctatcttggcacggcgctgtactggatagccgccagtatcaatatcaggccgggccatgattattatttttacgttcgcagtgtgaacaccgttggcaaatcggcatttgtggaggccgtcggtcgggcgagcgattatgcggaaggttatctgagtttttataaagggttgatcaataaaacgcatctcggcaaggagttgtggacgcagattgataacggtcagcttgcgccggacctgactgaaatcaggacgtccattacgaatgtcagcaatgaaatcacgcaaaccgtcaataaaacactggaaaatcagagtgctgcaatccagcagatacagaaagttcaggttgatacaaataataacctgaacagcatgtgggctgtgaagctgcaacagatgaaggacggacgcctttatattgcgggtatcggtgccggtattgagaatacgccagcaggaatgcagagtcaggtgctgctggcggcagacaggattgcgatgattaatcctgcgaatggcaacacaaagccgatgtttgttggtcagggcgatcagatattcatgaacgacgtgttcctgaaacgcctgacggctccgaccattaccagcggcggtaatcctccggcattttccctgacacctggcggacggctgacggcgaaaaatgccgatatcagcggtaacgtgaacgcgaactccgggacgctcaacaacgtcacgactaataagaactgtcgggttctgggaaaattgtccgcgaaccagattgaaggcgatctcgttaaaacagtgggcaaacctttcccacgggactcccgggcaccggagaggtggccatcagggaccattaccgtcagggtttatgacgatcagccgtttgatcggcaaattgttattcccgcggtggcgtttcgcggtgctaaacatgagcggaagaataacaatatttattcgtcatgccgcctgatagtgaagaaaaacggtgctgaaatttataaccgaacgaccctggataatacgctgatatatacgggtgttattgatatgcctgccggtcacggtcacatgacgctggagttttctgtatcggcatggctggtaaatggctggtatcccacagcaagtatcagcgatttgctggttgttgtgatgaagaaagccactgcaggcatcacgattagctga

SEQ ID NO: 481032 - DNA, 246 bp, Shigella flexneri
gtggcccgcctgtccccggtagtcatgctggcaaaatctgtcacagcacaaacacatatggcgtggagcgatgcggataatcagcaggtgaaactgtcgatgccggaactggaagaactggcggcagcaatggtgcaggcgcaggtcgatcgcaacgatgagatttatcgccgtcagcgtgaaatgaaagaggagctgagcggtctggatgatttggcttcaattcgggcgtttgacgttaagtaa

SEQ ID NO: 481033 - DNA, 159 bp, Shigella flexneri; identical to SEQ ID NO: 480843

SEQ ID NO: 481034 - DNA, 189 bp, Shigella flexneri; identical to SEQ ID NO: 463227

SEQ ID NO: 481035 - DNA, 303 bp, Shigella flexneri; identical to SEQ ID NO: 480832

SEQ ID NO: 481036 - DNA, 504 bp, Shigella flexneri; identical to SEQ ID NO: 480849

SEQ ID NO: 481037 - DNA, 657 bp, Shigella flexneri; identical to SEQ ID NO: 463703

SEQ ID NO: 481038 - DNA, 654 bp, Shigella flexneri
atgggacgctggcttgctggcaggcccatgaaagagctggggctggtcagctgtcagcagccgactcaccggtataaacgtggtggtcatgaacatgttgctatccctaactaccttgaaaggcagttcgccgtgaccgagccaaatcaggtgtggtgcggtgatgtgacctatatctggacgggtaagcgctgggcgtacctcgccgttgttctcgacctgttcgcaagaaaaccagtgggctgggccatgtcgttctcgccggacagcaggctcaccatgaaagcgctggaaatggcatgggaaacccgtggtaagcccggcggggtgatgttccacagcgatcagggcagtcattatacgagcaggcagttccggcagttattgtggcgataccagatcagacagagtatgagccggcgcggaaactgctgggataacagcccaatggaacgcttcttcaggagtctgaagaacgaatggatgccggtggtgggttacgtaagcttcagcgaggcagctcacgccataacggactatatcgttggatattacagcgcactaagaccgcacgaatataacggtgggttacccccaaacgaatcggaaaatcgatactggaaaaactctaactcggtggccagcttttgttga

SEQ ID NO: 481039 - DNA, 939 bp, Shigella flexneri
atgctgcaccgctggcggcgtgacaccattcaccgtgccgcgccggtcaccgtcaaagtgtgccccgttatccacgatggcctctttttccggcacatgctgcacggcggtgatggcatacgtgccgtcgtcgttctcacggatactcacgcagcggaacaggcgctggcgcagcgtcggcagcttcagcccccacacgctgtattctgcaacgccgtcaggaacccggctcactttcaccttcacgccgtcggtgacggactgaacctccacgctgaccggattgccatttccgtcaaccaggcttatcagcgtggtaccggaggacggcagcgtgatttcacggtcgagcgtcagcgtccgggtctggctgttcaccgccagtacgcgaccaccggtgctgataccggcataatcatcatcgcagatttcaatgacatcacccggtacatggcgaagcccttctgcgccgacgctgaagtccacggtctgcgtttccagcagttccgttttaatcagccacagcccggcgcggtgcgcctgtccccggctggtacagccaaaggcatccatcttcgtgacgttacgaccgtaacggacaatggcctgcgtgtcctccacaagctctgtcgccgtctcatgaccgttgtccggatcaatccagttcacctcaacgacattatggcggtccttcagggcgctgaagctgtagcggaacggcgcgccatcatccggcatcaccacattactgcggttataggtccacactttatccgacggtcggtcctgcacgaacgtcagcgtctgcccgttccataccggcatacagcgcatcgccgagcagaaatcactgagaacatcccacgccttacgctgtgtggtcaggtaagcgttacaggtgatgcgcggctccgtgccgccaaatccgtccggcactga

SEQ ID NO: 481040 - DNA, 480 bp, Shigella flexneri
gtggcggacctgacgtatgttgccacacaggagggatggttgtacctcgctggcatcaaagatgtttatacgtgcgaaattgtcggctacgccatgggagagcgcatgacaaaagagctgacaggtaaagccctgtttatggcgctcaggagccagcgcccacctgccgggctaatccaccactctgatcgaggttcacagtactgcgcatacgattaccgggtcatacaggagcagtttggtctgaaaacatcaatgtctcgtaaaggtaactgttacgacaatgctccgatggaaagcttctggggaacgctgaaaaatgagagcctgagccactatcgttttaataaccgggatgaagccatctcagtaatacgggaatacattgagattttctacaatcgtcagcgtcgtcactctcgtctggggaatatctccccggcagccttcagggaaaaatatcatcagatggctgcttaa

SEQ ID NO: 481041 - DNA, 489 bp, Shigella flexneri; identical to SEQ ID NO: 475240

SEQ ID NO: 481042 - DNA, 798 bp, Shigella flexneri; identical to SEQ ID NO: 480864

SEQ ID NO: 481043 - DNA, 744 bp, Shigella flexneri
atgtccggcagtgcttttgccgttacgcaccacgccttcagtagcggagcaggaaggacatctgatggaaatggaagccacgcaagcaccttaaaatcaccatcatacactaaatcagtaagttggcagcattaccgagttgaacatggttactttaatgaatcaccaaacatatatgacaagaagtatatctctggtataaccagaagtatggcacaattaaaaatagaggagtttattaatgagaaatccagacgacttaattatatgaagacaatgtattctccatgtccggaagattttcagcctatttccagagacgaagccagtacaccggaaggaagctggttgacagttatatctggaaaacgtcctatggggcaattttctgtggatagtttgtaccatcctgacttacatgcattatgtgagctcccagagattagttgtaagatcttctctaaagaaaatagtgattttttgtatataattgttgtattcagaaatgattctccccaaggagaactacgggcaaatcggtttatagaactatatgatataaaaagagagattatgcaagtgttaagagatgagtcgccagagttaaagtctattaaatctgagattattattgctcgtgaaatgggagaactttttagttatgcatcagaggaaatagatagctacataaaacaaatgaatgacaggctttctcaaatcaaggctcgaatgcctgttacttaa

SEQ ID NO: 481044 - DNA, 531 bp, Shigella flexneri; identical to SEQ ID NO: 480880

SEQ ID NO: 481045 - DNA, 390 bp, Shigella flexneri
atggtgcagaacaccgatcgcgccactttcaacaatattgaagagctggggctcggatttatcaactattcccttgtgccgtatctgacccgtattgaacaacggatcaacaccggactggtacgaaaaagtaagcagggcgtttattacgccaaatttaacgccggggcgttactgcgcggggatatgaagtcccgttttgaagcctacgccaccgggattaactggggaatttactctcccaatgactgccgcgacctggaagatatgaatccgcgtcccggtggggatgtctatctcacaccgatgaacatgaccacgaaaccctccgatggcagtaaagccggtaagcagaaggataacgccaatgcagacgaaacaacgtcttga

SEQ ID NO: 481046 - DNA, 351 bp, Shigella flexneri
atgtgggcggcaacagcaaaagttcggcgctgttacatcagcctgctgaagcggcttaaagcgacataccgtcgggcgaaaaccatcacgctgatcgtggacaactacattatccacaaaagccgggaaacacagagctggctgaaggagaacccgaagttcaggggcatttatcagccggtttactcgccatgggtgaatcatgttgaacggctatggcaggcacttcacgacacaataacgcgtaatcatcagtgccgctcaatgtggcaactgttgaaaaaagttcgccattttatggaaaccgtcagcccattccccggaggcaaacatgggctggcaaaagtgtag

SEQ ID NO: 481047 - DNA, 336 bp, Shigella flexneri; identical to SEQ ID NO: 480100

SEQ ID NO: 481048 - DNA, 357 bp, Shigella flexneri; identical to SEQ ID NO: 462732

SEQ ID NO: 481049 - DNA, 696 bp, Shigella flexneri
atgcttccccgttttgccgatatttttcagcagggaaaccgctggcttaactggctggagaaacaaccggaaggggcagtccgtccggtggtaattgaatcagtgacaaaaatcatggcctgcgggaccacactgatgggctacacgcagtggtgttgttcatcaccggactgttgccatacaaaaaaggtctgcttccggtgtaaaagccgctcctgcccgcactgcggggtgaaggctggcgcacagtggatacagtatctgctgagcctggtccccgactgcccgtggcagcatattgtgttcacacttccctgccagtactggtccctggtgttccacaaccggtggttactggcagagatgagccgcattgcagcggatgtgatactggaaatctgccatcaggcagatgtggagccggggatattcacggtgatccacacatgggggcgtgaccagcagtggcatccgcatatccatttatcgacaactgccggtggtgtgacgtcgggccacacctggaaaaatcttcatttttacgcccgtaaggtgatgagcatgtggcgctaccggataacacggttgctgtcacggaaataccctgacctggtgatgccggatgcgctggcagcagaaggaagcagtaaacgggaatggaatcgcttcctggacacgcattaccgccgtggctga

SEQ ID NO: 481050 - DNA, 480 bp, Shigella flexneri; identical to SEQ ID NO: 481040

SEQ ID NO: 481051 - DNA, 480 bp, Shigella flexneri; identical to SEQ ID NO: 479122

SEQ ID NO: 481052 - DNA, 204 bp, Shigella flexneri; identical to SEQ ID NO: 476746

SEQ ID NO: 481053 - DNA, 543 bp, Shigella flexneri; identical to SEQ ID NO: 464540

SEQ ID NO: 481054 - DNA, 543 bp, Shigella flexneri; identical to SEQ ID NO: 478372

SEQ ID NO: 481055 - DNA, 543 bp, Shigella flexneri; identical to SEQ ID NO: 464540

SEQ ID NO: 481056 - DNA, 525 bp, Shigella flexneri; identical to SEQ ID NO: 476744

SEQ ID NO: 481057 - DNA, 543 bp, Shigella flexneri; identical to SEQ ID NO: 464540

SEQ ID NO: 481058 - DNA, 204 bp, Shigella flexneri; identical to SEQ ID NO: 471690

SEQ ID NO: 481059 - DNA, 543 bp, Shigella flexneri; identical to SEQ ID NO: 478360

SEQ ID NO: 481060 - DNA, 543 bp, Shigella flexneri; identical to SEQ ID NO: 464540

SEQ ID NO: 481061 - DNA, 546 bp, Shigella flexneri; identical to SEQ ID NO: 471944

SEQ ID NO: 481062 - DNA, 1677 bp, Shigella flexneri
atggataagagcgacgctaagcactgcacggtgattaacgccttgtcgcgcaatggctggaaagagttcgcagaggattacggtattgacccggataccctgccatctttccagaatcctaacgatacatggctattcccgtgggtgtcgaatgatgtcgtctacgtcgctgagtattacgaggtagaagaggagaaggagaaggtcttcatctaccgcgacccgctgacaggtgagccggtcagctattaccagcaggatatcaaagacgtcatcgacgacctggctaatcgtggattcattaaggtagcagagcgcaaggtgaagcgtcggcgtgtgtataagtcgatcatcacctgtacgcagatactgaaagaccgcgagaagatagccggagagcatattccaatcgttccagtgtatggcgaatggtcattcgctggtgacaaggagtgctacgagggtgtggtaaggctgacgaaagacggtcaacgccttcgtaacatgattatgtcgttcaacgccgatattgttgctcggtcaccgaagaagaaaccgaccttcttccctgagcaaatcgaaggctacgaatacatgtacggcggaaatgatgactatccgtactatctgcagaacaggaccgatgaaaacggtaacgacctgccgattggtccaatctcctacatggaaaaccctgaagtgccgcaagccaacgcttacatgcttgaggctgccaccaacgcagtgaaagaagtggctagtcttggcgtggatgcgcaggcggcaaatggtcaggtcgcttttgataccgtcaatcaactgaacatgcgggcagaccttgagacatacgtgtttcaggataacctggctaccgcaatgcgacgtgatggcgagatttatgcctcaatggtcaacgatatttatgacgttcctcgtcatgtaacgctgacacttgaagatggaagcgagaaagacgttcaactctatgcgcaagttgtcgattaccagtccggcaatgtggtcacactcaacgacattcgcggtcgatatgagtgctatacagacgttgggccatccttccagagtatgaaggaacagaaccgcgcagagattcaggagttgctcaccaaggttccgcaaggtactccagagttccagatgctgatgctgcaatacttcacgctgcttgacggtaaaggcgtcgagatgatgcgagagtacgcgaacaagcaactggtgatgatggggctgaagaaaccagaaacacctgaagagatggagatggtgcagcaggcacaacaacagccgcagcagccatcagcagagcaaattcaggcgcagggtatccttctgcaaggtcaggctgaattgctcaaggcagagaaccaacaggcgcagattcaggttgaagctgccaaggttgaagcccaaaaccaactcaacgccgcgaagattgcggaaatcttcaacaatatggacctcgacaagcaggcagaactgcgtgagtacctcaagctcgtaggtcaattccagcaacagcgcagcaaagatgctcgtgctaacgctgagctgcttcttaaagatgcagaccagactcattcacaacgcatggatttcgcgaatcttatgcgtcaagttcaaatcccctccggcggagtagccgagacacctcaataa

SEQ ID NO: 481063 - DNA, 960 bp, Shigella flexneri; identical to SEQ ID NO: 474419

SEQ ID NO: 481064 - DNA, 354 bp, Shigella flexneri
atgccactgctggataagctgcgtgagcagtacagggtcggaccgctatgcagcgaactgcatattgccccgtcaacgtattaccactgtcagcaacagcgacatcatccggataaacgcagtgcccgtgcgcagcgcgatgactggctgaagaaagagatacagcgcgtatacgatgaaaatcacaaggtatacggtgtaaagtctggcgtcagttgttacgggaaggtatcagagtggccagatgcactgtggcacctctcatgggggttatgggacttgccggtgttctccggggtaaaaaggtccgtacgaccatcagccggaaagccgttgccgcaggcgaccgcgtaa

SEQ ID NO: 481065 - DNA, 1188 bp, Shigella flexneri; identical to SEQ ID NO: 476303

SEQ ID NO: 481066 - DNA, 525 bp, Shigella flexneri; identical to SEQ ID NO: 476744

SEQ ID NO: 481067 - DNA, 294 bp, Shigella flexneri
atgagaaccgacagcaacaaggcatggaagggagcgttaaagcgggcaggcattagcaacttccgcttccatgacctgaggcatacctgggcaagctggctggttcagtccggtgtctctcttcttgcgcttaaagagatgggaggatgggaaactctcgaaatggttcaaagatacgcccacctttcagccgggcatctcaccgagcacgcgagcaaaatcgatgcgattataagtcgcaatggcacaaatacggcacaagaggagaacgtagtttacttaaatgcgaggtaa

SEQ ID NO: 481068 - DNA, 207 bp, Shigella flexneri; identical to SEQ ID NO: 480016

SEQ ID NO: 481069 - DNA, 132 bp, Shigella flexneri; identical to SEQ ID NO: 476846

SEQ ID NO: 481070 - DNA, 327 bp, Shigella flexneri; identical to SEQ ID NO: 476852

SEQ ID NO: 481071 - DNA, 204 bp, Shigella flexneri; identical to SEQ ID NO: 471690

SEQ ID NO: 481072 - DNA, 210 bp, Shigella flexneri; identical to SEQ ID NO: 476166

SEQ ID NO: 481073 - DNA, 249 bp, Shigella flexneri
gtgttcgaccttgaggttgaatcgtcaactggcgttgcgcagtacgccgaccgcctttttctctctgcaaccactgactgcatcaattacgggcgtgagcagatgattgagcagaatgaaccgttcgtttacgacaagcgtgttttgtggaagcgagtagggcgcatcaggaaaaatgtcggcttcaaattgcgcgttatcacgaagtcacctgtcactctgtctggcgctcagataaggattgagtaa

SEQ ID NO: 481074 - DNA, 267 bp, Shigella flexneri; identical to SEQ ID NO: 462029

SEQ ID NO: 481075 - DNA, 1035 bp, Shigella flexneri; identical to SEQ ID NO: 475565

SEQ ID NO: 481076 - DNA, 867 bp, Shigella flexneri; identical to SEQ ID NO: 476972

SEQ ID NO: 481077 - DNA, 255 bp, Shigella flexneri
atgattggccgaaaaggggcggttggcgacattttaggctacttttttgatgcaaaaggtgacgttgtcacggatatcaaaatacataacgaactgattggcttacctttaagcgcgctgaagaccatacccgtccgggttggcgtggcagggggagaaaataaagccgaagcaattgccgctgcaatgaaaggcggttatatcaacgcactggttaccgatcaggacacagcagcggcgattttacgtagttaa

SEQ ID NO: 481078 - DNA, 834 bp, Shigella flexneri; identical to SEQ ID NO: 476088

SEQ ID NO: 481079 - DNA, 645 bp, Shigella flexneri; identical to SEQ ID NO: 476006

SEQ ID NO: 481080 - DNA, 1389 bp, Shigella flexneri; identical to SEQ ID NO: 476989

SEQ ID NO: 481081 - DNA, 366 bp, Shigella flexneri
atggcccgttcagctaaaccacgcaaacgaaaacctgcacctcaaagaagcaaactcctccgctatgtcgtaaaacttcacgaagatgatttttttgacgaagaagaagctgaggttctgcgctttgataattttgacgatgccgttgagtgttgcgcagacctgaatattccgttctttgtggatgccggaaacaaaaaactggtcttctggtttgtacgtgttgatgacgaagggtatccggaaattgcccgctgcatggagcgggaatttgcgacaattcctgccggtatcaacgccgacggcatgtattgccctgaatgcggtacggttcactggccggatggcgttattccgcctttctga

SEQ ID NO: 481082 - DNA, 198 bp, Shigella flexneri
atggtctcccggaggcaggctaccggtagtaatagtggcactactgaaatcagccatcggggctttatcaagtttaccgaccagattgccctgcttgtcgtaaatggaaatattcgtggtccccggcgtaaactgacctttattctcggcaaagtcgcggaatatctgataagggatctctgcactgaccgttgctga

SEQ ID NO: 481083 - DNA, 381 bp, Shigella flexneri; identical to SEQ ID NO: 458903

SEQ ID NO: 481084 - DNA, 381 bp, Shigella flexneri; identical to SEQ ID NO: 458903

SEQ ID NO: 481085 - DNA, 528 bp, Shigella flexneri
atggtagtgtccgctattgccagtacacctcataccatggtgcgctgggtatcagaaatggcagacaaactccgtcctctgtatatagcgctgaatgactatgttctggaggcaggaaaggtgcacgcagatgacactccggtgaaagtactggccccggggaacggaaagacgaaaacgggtcgtctgtgggtatacgtcagggatgatcgtaatgcgggttcatccctgccggcagccgtctggttcgcgtattcggcagatcgcaaaggagaacatccgcagctccacctggcaaagtatcagggcgtactgcaggctgatgcctatgcaggttataacgtactgtacgaaacgggccgggtgaaggaagccgggtgcctggcccacgcccgccgaaaaatccatgacaaggatgtgcgccgtccgacagaaatgaagtggcacactgaatttggccacctgaacagaggtgatatgctcacctcagaacaacacaggtgctccaatgaaaaaaagaaattttag

SEQ ID NO: 481086 - DNA, 303 bp, Shigella flexneri; identical to SEQ ID NO: 473532

SEQ ID NO: 481087 - DNA, 354 bp, Shigella flexneri
atgccactgctggataagctgcgtgagcagtacggggtcggaccggtatgcagtgaactgcatattgccccgtcaacgtattaccactgtcagcaacagcgacatcatccggataaacgcagtgcccgtgcgcagcgcgatgactggctgaagaaagagatacagcgcgtatacgatgaaaatcacaaggtatacggtgtaaagtctggcgtcagttgttacgggaaggtatcagagtggccagatgcactgtggcacgtctcatggcggttatggggcttgccggtgttctccggggtaaaaaggtccacactaccgtcagccggaaagccgttgccgcaggcgaccgcgtaa

SEQ ID NO: 481088 - DNA, 219 bp, Shigella flexneri; identical to SEQ ID NO: 474644

SEQ ID NO: 481089 - DNA, 303 bp, Shigella flexneri
gtgattgagagcggagagttccgccatggcccgctggagattgtcgaaccgggcgttccgttcctgttcctgctcggcaatgatgaaagtcgccacaccaccgaacgcgccattaactttgttaaacagcgtactgacaacgtgatcgtcatcgattacgccgaaatttcgcaagggctgcacccgtggctggcaccgttcctgatgttcgtgccaatggagtggctctgctactacctgtctatttacaaagatcacaacccggatgaacgccgctattacggtggtctggtggaatattaa

SEQ ID NO: 481090 - DNA, 462 bp, Shigella flexneri; identical to SEQ ID NO: 470872

SEQ ID NO: 481091 - DNA, 288 bp, Shigella flexneri
atggaacaacgccacatcaccggcaaaagccactggtatcatgaaacgcaatccagtactacggagtatgacgttctgcctctggtcccggaagccgcaaaggtcagcgatccctttctgctcgacgtgatccttgatgaagagacgctggcccccttcctttcatggctggtccctgcgcgcgttcttgcagtggagttgttccctgaccagcttaccgtgacccgttcacaaaccttcaccgcttatgaacgcttgtcgacggccctgacggttgctcaggtttga

SEQ ID NO: 481092 - DNA, 243 bp, Shigella flexneri
atgcgaaagatttttcttccgttgttactggtggcactttcgcctgtcgctcacagtgaaggtgtgcaggaagtcgagattgacgcaccgctctctggctggcatccggcagagggcgaagatgccagtttttcacaatcgatcaattacccggcgtcgtccgtcaacatggcagatgatcaaaatatctcagcgcagatccgcggcaaaataaagaattatgctgcggcgggtaaagtttag

SEQ ID NO: 481093 - DNA, 2673 bp, Shigella flexneri; identical to SEQ ID NO: 470959

SEQ ID NO: 481094 - DNA, 1461 bp, Shigella flexneri
atgattaaaattaatttatttaaaaatgcaaatctccttgccttcatatcatgttttgcaatatcaatttattgttattgggggtggttgtacgatggaacacttaatattgatggcgagtttacaaataatttttatcaaacaatcacgcttgggcggtggtttcacacttttttgcgacattactttctccctgagcctttttcactttatataacaccattaatagccttatcttttatcatcatttcagcatttataatctgcagatcgctaaagctagaatcttatgaattattgataggtatgttagtatttattaccttccctcagatctcctatcaattagagtttcttaaccaagctgatactgtgggaattgcttttctactggcagcgatatcagcaattatttttcactcgcaaaaaaataggattgtgatattttctggtatagtactgtccattctttcaatggcaatctaccaaacattcgtaacatatattattgcattcgtcattgggttgcagataaattcgataatacgaaatgagaaaaatattcgtgaatctttttatagttcatgtttatctctatccctcatagctttatctaccttaatttacctgctattaaccaaagctatcaagcattatttttcgcttgaatcgaacgagtacatctcaaattatatacaaaatgcaagcgatattaaatggcttgttaaatcagccatagataatatatataacttctataacaatcctcccactggtttaaacctatacaagtggttactgattcctttattaattctgatatttaccctaacatataaattaaaaacaagatcaatttatttgatttcatcaatcattttcatttatatacttccggttatatttatcgttgttgttggctcaggggcgccacctcgcctgtttgttttaatgcctatagtagcagtaattttgttttcttgcttaagcaattttcgctctataaaatacctaaactgcatgttttttttatttattatatttaatggcgtttcaacatccaaaaatctatttttgaatgatactctcgcaagacagaaagatatctctttagctaaagaaatatcatacacatctcaaacaaaaggcatttcccttaacggaaaatatatatatatacatggttcaaacgactcaggaaatatgctctccatgagcgcagacacttttggaaaatcttttttttggtgggatggtggcaactattttaggatggttgcatttatgaattactatggaatctgtaattgcaaaccagcaaataaagaacaaatagagaagatttatccaattgtgaagagtttaccttcctggccgaatccagattcgatagctgaaataaatggtttggtgataataaaactatcagagaaaaaagggtggcttccatttaatatttag

SEQ ID NO: 481095 - DNA, 210 bp, Shigella flexneri; identical to SEQ ID NO: 9340

SEQ ID NO: 481096 - DNA, 210 bp, Shigella flexneri
atgacggatggctggccgctgtatgaatcacgcctgaagggaaagctgcacgttatcagcaagcgttacactcagcgcattgagcgacataatctgaatctgagacaacatctggcaaggctggggcggaagtcactgtcgttctcaaaatcggtggagctgcatgacaaggtcatcgggcattatctgaacataaaacactatcagtaa

SEQ ID NO: 481097 - DNA, 1140 bp, Shigella flexneri; identical to SEQ ID NO: 476755

SEQ ID NO: 481098 - DNA, 579 bp, Shigella flexneri
atgcgccgtcaggctttgggtttacagtctccggcctctaccgcagtagtcggtcgccaagctttaaccgctatcatcgtattaggcgcaatctggctgttgaatgattaccgtggcgttcccactcctgttctgctgctgacgttgctgttactcggcggaatgtttatggcaacgcggacggcatttggacgacgcatttatgccatcggcggcaatctggaagcagcacgtctctccgggattaacgttgaacgcaccaaacttgccgtgttcgcgattaacggattaatggtagccatcgccggattaatccttagttctcgacttggcgctggttcaccttctgcgggaaatatcgccgaactggacgcaattgcagcatgcgtgattggcggcaccagcctggctggcggtgtgggaagcgttgccggagcagtaatgggggcatttatcatggcttcactggataacggcatgagtatgatggatgtaccgaccttctggcagtatatcgttaaaggtgcgattctgttgctggcagtatggatggactccgcaaccaaacgccgttcttga

SEQ ID NO: 481099 - DNA, 393 bp, Shigella flexneri; identical to SEQ ID NO: 472843

SEQ ID NO: 481100 - DNA, 1056 bp, Shigella flexneri; identical to SEQ ID NO: 476765

SEQ ID NO: 481101 - DNA, 234 bp, Shigella flexneri
atgaccaaacagggcgatgcgataacgggatcaatggtctttttctgcgttattggtgcccccctcattctggtgtcctccatagcatatttatggtttggtaaccgactgggaatgaatttacgtccggtactgctgatgcttgagcgacttaaagagtgggtaatgctggatatctacctggtcggcattggcgttgcttctataaaggtacaggattatgcccatatctag

SEQ ID NO: 481102 - DNA, 492 bp, Shigella flexneri
  misc_feature (480)..(489): n is a, c, g, or t
atgaaaaaatttaatattaaatctttgactctcttgattgtattgttaccattgatagttaatgctaataatattagcaaacaagctgcaaaaaagagaatatctggggagtttgatttatctaatccagaagaaatgcttgaaaaactgacattacttgtgggactcatatggtataaagatggaaatgcattatacatatatgactctggagaattaataagcaaagttattttgctggagaatatatcacttaattatcttattcagtatctgaaggatgctaacctttatgatcacagatatcctataagaggaaacattagtgataaaacattctatatatctggtcctccggcattggttgaactggtagctaatacagcaactttgcttgataagcaggtttcttctattgggacagataaagttaattttggggttataaaattaaaaaatacatttgttagtgacagaacnnnnnnnnnntga

SEQ ID NO: 481103 - DNA, 567 bp, Shigella flexneri; identical to SEQ ID NO: 474361

SEQ ID NO: 481104 - DNA, 375 bp, Shigella flexneri; identical to SEQ ID NO: 472664

SEQ ID NO: 481105 - DNA, 1617 bp, Shigella flexneri
atgtttagacgaaatcttattacctctgccatcttattaatggcaccgttagccttttctgcacaatcattggctgaatcattaacggtggaacaacgccttgagttattagaaaaagcgttaagagaaacgcaaagcgaactcaaaaagtataaagatgaagagaagaaaaaatatacgccagcgacggtgaatcgtagcgtaagtacgaatgatcaagggtatgccgccaatccgttcccgaccagtagtgccgcaaaacctgatgctgtactggtcaaaaatgaagagaaaaatgccagtgagacaggctcgatttattcttccatgactctgaaagatttcagtaagtttgtgaaagatgaaattggctttagttacaacggctattaccgttctggttgggggaccgcctctcatggttcacctaaatcatgggcgattggttctctgggccgctttggtaacgaatactccggctggtttgatttgcagttaaaacaacgtgtctacaacgaaaacggcaaacgggttgatgccgttgtgatgatagatggtaacgttggtcagcagtactctaccggctggtttggcgataatgccggtggcgagaactttatgcagttctccgatatgtacgttaccaccaaaggtttcctgccctttgcgccagaggctgatttctgggtgggtaaacacggtgcgccgaaaattgaaatccagatgctggactggaaaacgcagcgtactgatgctgcagcgggtgtaggtctggaaaactggaaagtcggtccgggtaaaattgatatcgcgctggttcgcgaagatgtcgatgattacgatcgcagcctgcaaaacaaacagcagattaatacccatactattgatttacgctataaagatatcccgttatgggataaagcgaccttaatggtgagtggtcgttatgtcacggcaaacgaaagcgcatcggaaaaagataatcaggataataacgggtattatgactggaaagatacctggatgttcggcacatctttaacgcagaaatttgataaaggtggcttcaacgaattctccttcctggttgcgaataactctatcgccaggaactttggccgttatgctggcgcaagtccatttaccacctttaatggtcgttattatggtgatcacaccggcggaacagcagttcgtctgacctcgcagggcgaagcctatatcggcgatcattttattgtggctaacgcgattgtttactccttcggtaacaatatttatagctacgaaacaggcgcacactctgatttcgaatctattcgtgcggttgttcgcccggcctatatttgggaccaatataaccagacaggtgttgaactgggctatttcacccagcaaaacaaagatgcgaatagtaataaatttaatgagtctggttataaaaccacgctcttccatacctttaaagtcaataccagtatgttgacctcgcgtctggaaattcgtttctacgccacgtatatcaaagccctggaaaacgaactggatggcttcaccttcgaagacaataaagacgcccagtttgctgtcggtgcccaggctgaaatctggtggtaa

SEQ ID NO: 481106 - DNA, 531 bp, Shigella flexneri; identical to SEQ ID NO: 25363

SEQ ID NO: 481107 - DNA, 234 bp, Shigella flexneri; identical to SEQ ID NO: 474259

SEQ ID NO: 481108 - DNA, 546 bp, Shigella flexneri; identical to SEQ ID NO: 475459

SEQ ID NO: 481109 - DNA, 372 bp, Shigella flexneri
gtggtgtgggtcggtaaggatgtgacaggcattgaaccccgtaacgccagtgttattgaagttcctgatattaccgccaaccgccgcattaccgcgccgggttactggttttaccgcaatgatgaatttgtctttgactacagactcaaagcggaagatgagcgtgatgcccttctggctcaggtcagtgcccggacaggggaatgggaagaagacctgttgctggggctaatcagcgacgaagataaagaaaaactgaaagcgtgtcgtatttacgcgaaatcgctgcaggcgatggatttcagtgtcatcactgataaaacctcatacaacgccattgaatggcccgcttctccggaaggttcttcctga

SEQ ID NO: 481110 - DNA, 285 bp, Shigella flexneri; identical to SEQ ID NO: 474730

SEQ ID NO: 481111 - DNA, 585 bp, Shigella flexneri
gtgcttctccgtatacaccatgttatcggagagctgcccacgtatggttatcgtcgggtatgggcgctgcttcgcagacaggcagaacttgatggtatgcctgcgatcaatgccaaacgtgtttaccggctcatgcgccagaatgcgctgttgcttgagcgaaaacctgctgtaccgccatcgaaacgggcacatacaggcagagtggccgtgaaagaaagcaatcagcgatggtgctctgacgggttcgagttctgctgtgataacggagagagactgcgtgtcacgttcgcgctggactgctgtgatcgtgaggcactgcactgggcggtgactaccggcggcttcaacagtgaaacagtacaggacgtcatgctgggagcggtggaacgccgcttcggcaacgatcttccgtcgtctccagtggagtggctgacggataatggttcatgctaccgggctaatgaaacacgccagttcgcccggatgttgggacttgaaccgaagaacacggcggtgcggagtccggagagtaacgtgcccctattaagttgtcaagcatgttatgacccctgcggggtataa

SEQ ID NO: 481112 - DNA, 156 bp, Shigella flexneri; identical to SEQ ID NO: 474739

SEQ ID NO: 481113 - DNA, 432 bp, Shigella flexneri
gtgaaaatggccatactgcccaaggtaatttatagattcaatgccatccccatcaagctaccactgactttcttcacagaattggaaaaaactactttaaagttcatatggaaccaaaaaagagcccgcattgccaagtcaatcctaagccaaaagaacaaagctggaggcatcacgctacctgacttcaaactatactacaaggctacagtaaccaaaacagcatggtactggtaccaaaacagagatatagatcaatggaacagaacagagccctcagaaataataccacacttctacaactatctgatctttgacaaacctgagaaaaacaagaaatggggaaaggattccctatttaataaatggtgctgggaaaactggctagccatatgtagaaaactgaaactggaccccttccttacaccttaa

SEQ ID NO: 481114 - DNA, 303 bp, Shigella flexneri; identical to SEQ ID NO: 473532

SEQ ID NO: 481115 - DNA, 225 bp, Shigella flexneri; identical to SEQ ID NO: 476353

SEQ ID NO: 481116 - DNA, 258 bp, Shigella flexneri; identical to SEQ ID NO: 476742

SEQ ID NO: 481117 - DNA, 1227 bp, Shigella flexneri; identical to SEQ ID NO: 471832

SEQ ID NO: 481118 - DNA, 474 bp, Shigella flexneri
atgttggctggcgtgctcgcgttccggcaactgaagcagatgctcgcgcagggcatcaattccccgaccttcggttgctgcggtgataaacagttttgcctcagcaaaaccgtattcccgcagaacctcctttacctggcgttcaacctcatcaacacgcgcttcgtccacgcgatcggctttggtcagcgccactgtcagcatcgggttaccggtcagctgcaaaatcgccagatgctcacgggtctgtgccatcacgccgtcatcgcacgccaccaccaacagcgcgtgatcgataccaccaacgcccgccagcatgttggaaagaaacttttcatgaccgggaacgtcgataaaaccaggcacgcgaccatccggctgcggccagtaggcatagccgagatcgatggtcatgccgcgctttttttcttccggcagacggtcagcatttacgccagtaatcgcctgcaataa

SEQ ID NO: 481119 - DNA, 198 bp, Shigella flexneri; identical to SEQ ID NO: 478355

SEQ ID NO: 481120 - DNA, 123 bp, Shigella flexneri; identical to SEQ ID NO: 476814

SEQ ID NO: 481121 - DNA, 210 bp, Shigella flexneri; identical to SEQ ID NO: 476166

SEQ ID NO: 481122 - DNA, 960 bp, Shigella flexneri; identical to SEQ ID NO: 474419

SEQ ID NO: 481123 - DNA, 267 bp, Shigella flexneri; identical to SEQ ID NO: 462029

SEQ ID NO: 481124 - DNA, 501 bp, Shigella flexneri; identical to SEQ ID NO: 476863

SEQ ID NO: 481125 - DNA, 501 bp, Shigella flexneri; identical to SEQ ID NO: 476862

SEQ ID NO: 481126 - DNA, 543 bp, Shigella flexneri; identical to SEQ ID NO: 478360

SEQ ID NO: 481127 - DNA, 690 bp, Shigella flexneri; identical to SEQ ID NO: 474189

SEQ ID NO: 481128 - DNA, 1002 bp, Shigella flexneri; identical to SEQ ID NO: 474241

SEQ ID NO: 481129 - DNA, 189 bp, Shigella flexneri
atgagcagaaaaacccaacgttactctaaagagttcaaagccgaagctgtcagaacggttcttgaaaatcaactttcgatcagtgaaggcgcttcccgattatcccttcctgaaggcactttaggacaatgggttcccgcacggtggctgaactggaatctgaaattctgcaactgcgtaaggcgttaa

SEQ ID NO: 481130 - DNA, 156 bp, Shigella flexneri; identical to SEQ ID NO: 7036

SEQ ID NO: 481131 - DNA, 210 bp, Shigella flexneri; identical to SEQ ID NO: 479870

SEQ ID NO: 481132 - DNA, 366 bp, Shigella flexneri; identical to SEQ ID NO: 462994

SEQ ID NO: 481133 - DNA, 273 bp, Shigella flexneri
gtggagtacggcgaaccgtggaaagtggaagaggcgacgcagatcctgcatatcaatcacggcgaaatgcagatcacctcgtcaccgaaaaaattctccggatacttccacttttaccgcaagcacaaagacaaattcgaccgcgccagtaaaaaatatcagctgtttaccctctaccagatccgcaataaacgtatgacctggcgcaccttgttgacgctgctgtcggtgcgtaacggcaaacgtctggctgatggtattcgggggcgctaa

SEQ ID NO: 481134 - DNA, 168 bp, Shigella flexneri
atgataaaagaaaaaatattatcaatagtggccttttgctatggtatagcgtacagcaaactatctgaagaaactaaatttattgaagatctttctgccgattctctttccattattactattggagatcttatttctgtagtcaaaaatagtacaaaatcaatatag

SEQ ID NO: 481135 - DNA, 951 bp, Shigella flexneri
gtgaatttccaacaactaaagataatccgcgaggctgcacgtcaggattacaacctgacagaggttgcgaatatgctttttacctcacagtcaggcgttagccgtcatattcgggaactggaggatgaatttggcatcgaaatatttgttcgacgaggtaagcgactgctggggatgactgaaccgggcaaagcattactggtcattgcagaacgtattctgaatgaagccagtaatgttcgtcggcttgcagacctgtttaccaacgatacgtctggtgttctcactattgcaacgacgcatactcaggcacgttatagcttgccagaggtcattaaagcttttcgcgaacttttcccggaggttcggctcgagctaatccagggttcgccacaggaaattgcgacgttgttgcaaaatggcgaagctgatattggtatcgccagcgagcgtttgagtaatgacccgcagctcgtcgccttcccatggttttgttggcaccatagtttgcttgttccactcgatcatcccttaacgcaaattacaccattgacgctggaatcaatagcgaagtggccgttaattacttaccgacagggaattacggggcgctcacgcactgatgacgcatttacccgcaaaggtttgccggcagatattgtattaagtgcacaggattctgatgtcattaaaacctatgttgctcttgggcttgggatcggattagttgccgaacaatccagcggcgaacaagaggaagagaatttaatccgcctggatacgcggcatcttttcgatgctaatactgtctggttgggactgaagcgaggacaacttcagcgtaactatgtttggcgctttctggaactttgtaatgcaggactgtcagttgaggatatcaagcgccaggtgatggaaaacagtgaagaggaaattgattatcagatatag

SEQ ID NO: 481136 - DNA, 174 bp, Shigella flexneri; identical to SEQ ID NO: 475749

SEQ ID NO: 481137 - DNA, 2658 bp, Shigella flexneri
atgtccggcagtgcttttgccgttacgcaccacgccttcagtagcggagcaggaaggacatctgatggaaatggaagccacgcaagcaccttaaaatcaccatcatacactaaatcagtaagttggcagcattacccattgcaggaagaagacaatgagcgcggcgtggctcattttgtagaacatatgatgtttaacggcacaaaaacatggccgggtaataaagtcatcgaaacatttgagtcaatgggcctgcgttttggtcgcgatgttaatgcctataccagctatgacgaaacggtgtatcaggtgagtttgccgactacgcagaaacaaaatctgcaacaagtgatggcaatcttcagtgaatggagtaatgccgcaacctttgaaaaactcgaagtagacgctgaacgtggcgtaattactgaggaatggcgtgcccatcaggatgcgaaatggcgcacctctcaggcgcgccgccctttcctgctggctaatacccgtaatttagaccgtgaacctatcggcctgatggatactgtcgccacggtcacgccggcacaattgcgccaattttatcaacgctggtatcaaccaaataatatgacctttatcgtggtcggcgatatcgacagtaaagaagcgctggcgctgataaaggataatttaagtaagcttccggctaacaaagcagctgaaaatcgcgtctggccgacaaaagccgaaaaccacctgcgctttaatatcattaatgataaagaaaaccgggtgaacggcatcgcactctattatcgcctgccaatggtacaagtgaacgatgagcaaagctttgtcgaacaagctgaatggagcatgttagttcagctgttcaatcaacgtctgcaggaacgcatacagtcgggcgagttgaagactatttctggcggcactgcgcgcagcgttaaaattgcacccgattatcagtcgctgtttttccgtgtaaatgcacgagacgataatatgcaggatgctgcgaatgcattaatggcagagttggcaaccattgatcagcatggtttttctgctgaagaactcgatgatgtcaaatctacccgcctcacctggctgaaaaatgcggttgatcagcaagctgaacgtgatttacgtatgctgaccagtcgcctggcatccagctcattaaataatacgccgttcttgtcgccggaagagacatatcaactttcgaaacgtctgtggcagcaaattaccgtgcaaagtctggcggaaaaatggcagcagttaagaaagaaccaggacgcattttgggagcaaatggtaaacaatgagcttgccgccaaaaaagcattgtctcctgcggctatcctggcgctggaaaaagagtacgccaacaaaaagctggcggcttacatcttcccaggcagaaatttatcgttaacagtagacgctgacccacaggcggaaattagcagcaaagaaacgctggctgagaatctgacatcattaacactttccaatggtgccaaggttattctggcaaaatccgcgggtgaagagcaaaagctacaaattattgccgtatcgaataaaggcgatttaagtttccctgcgcagcaaaaatcacttatcgcgctggcaaataaagcagttagcggaagcggcgttggcgaactctcctcttccagcctgaaacgctggagtgcggaaaactcggtaaccatgagcagtaaagtcagtggcatgaatacgttgctctccgttagcgcgcggactaataaccctgaacctggtttccagttgattaaccagcgaatcacccacagcacgattaacgacaatatttgggcatcgctacaaaatgctcaaattcaggcgttgaaaacgctcgaccagcgtccagcggagaaattcgcccagctgatgtatgagacgcgctatgctgatgaccgcacgaaattactgcaagaaaatcagattgcacagtttactgccgcagatgcgctggctgccgatcgccagttgttttcatctccagcggatatcacgtttgtcattgtcggtaatgtcgcagaagacaaactcgtggcgttaattacgcgttacttaggctcaatcaaacactctgattcgccattagccgcaggtaaaccattaactcgcgcgacggacaacgcatcggttactgtaaaagaacaaaatgaacctgtggcacaggtttcacagtggaagcgttatgattcccggatacctgttaatctggcgacgcgtatggcgctcgatgcttttaacgtcgcactggcaaaagatctacgcgttaatattcgtgaacaggcatctggggcatacagcgtttcttctcgcctctcggttgatcctcaggctaaagatatcagtcatttgctggcttttacttgtcaaccagaacgacatgatgaacagttaacgttagcgaatgaagtgatggttaagcgtttgactaaggggatcagtgagcaagaactgaacgaataccagcaaaacgttcagcgcagcctcgatatccaacagcgtagcgttcaacaattagcgaacactattataaatagtcttattcaatatgacgatcctgcagcatggactgagcaggagcaattgttggtaatgctgccaacttactga

SEQ ID NO: 481138 - DNA, 225 bp, Shigella flexneri; identical to SEQ ID NO: 476353

SEQ ID NO: 481139 - DNA, 273 bp, Shigella flexneri; identical to SEQ ID NO: 468624

SEQ ID NO: 481140 - DNA, 906 bp, Shigella flexneri
gtggatagcgcacgcgcccttattgcccggggatggggagtaagcttagtcagccgttgtctccgggtgtcgcgtgcgcagttgcacgtcattctcagacgaaccgatgactggatggatggccgccgcagtcgtcacactgatgatacggatgtgcttctccgtatacaccatgttatcggagagctgcccacgtatggttatcgtcgggtatgggcgctgcttcgcagacaggcagaacttgatggtatgcctgcgatcaatgccaaacgtgtttaccggctcatgcgccagaatgcgctgttgcttgagcgaaaacctgctgtaccgccatcgaaacgggcacatacaggcagagtggccgtgaaagaaagcaatcagcgatggtgctctgacgggttcgagttccgctgtgataacggagaaaaactgcgagtcacgttcgcgctggactgctgtgatcgtgaggcactgcactgggcggtgactaccggcggcttcaacagtgaaacagtacaggacgtcatgctgggagcggtggaacgccgcttcggcaacgatcttccgtcgtctccagtggagtggctgacggataatggttcatgctaccgggctaatgaaacacgccagttcgcccggatgttgggacttgaaccgaagaacacggcggtgcggagtccggagagtaacggaatagcagagagcttcgtgaaaacgataaagcgtgactacatcagtatcatgcccaaaccagacgggttaacggcagcaaagaaccttgcagaggcgttcgagcattataacgaatggcatccgcatagtgcgctgggttatcgctcgccacgggaatatctgcggcagcgggcttgtaatgggttaagtgataacagatgtctggaaatatag

SEQ ID NO: 481141 - DNA, 279 bp, Shigella flexneri; identical to SEQ ID NO: 463003

SEQ ID NO: 481142 - DNA, 570 bp, Shigella flexneri
atgaaagcgtcatcggacaataacgacttccgtgcccggggctggggctggctgggctcactggaaaccggtctgcccttcagtatcactgacaacctgatgctggagccacaactgcactatacctggcagggacttaccctggatgacggccaggataacgccggttatgtgaagttcgggcatggcagtgcacaacatgtgcgtgccggtttccgtctgggcagccacaacgatatgagctttggtgaaggcacctcatcccgtgacactctgcgcgacagtacaaaacaccgtgtgagtgaactgccggtgaactggtgggtacagccttctgttatccgcactttcagctcccggggtgacatgagcatggggacagccgccgccggcagtaacatgacgttctcaccgtcacagaatggcacgtcactggacctgcaggccggactggaagcccgtgtccgggaaaatatcaccctgggcgttcaggccggttatgcccacagcgtcagcggcagcagcgctgaaggttataacggtcaggccacgctgaatgtgactttttga

SEQ ID NO: 481143 - DNA, 375 bp, Shigella flexneri; identical to SEQ ID NO: 13405

SEQ ID NO: 481144 - DNA, 291 bp, Shigella flexneri; identical to SEQ ID NO: 477906

SEQ ID NO: 481145 - DNA, 222 bp, Shigella flexneri; identical to SEQ ID NO: 6179

SEQ ID NO: 481146 - DNA, 594 bp, Shigella flexneri
gtggtcagaggggctggcgatgccggagtcgttgtcacatatcacgacggaatcacagaggagaagcctggtgctgaaagccggaggaaaatactggcatgtgtacatgtcgaaaaaaacggccggcgggaggaatacggcgcgctacctgggtcgttatctgaagaagccgccgatagcggcctcccggctggcacattacaacggagggggagcctgagcttccgttacctggaccacaaaacgggagaaacggcgacggaaacgctgacacagcgtgagctggtcgcgaggctgaaacagcacatcccggagaagttttttaagatggtgaggtacttcgggttccttgccaaccgggtgtgtggagagaagctgccgcaggtgtaccgtgctctggggatggataaaccggaaccagtggcgaaagtgtgctatgcacaaatggtgaaacagttcctgagtcgtgacccgttcgaatgcgtgctgtgtggcggccggatggtataccgccgggccatcgcgggactgaatgtggaggggctgaagaaaaacgcgcgggatatcagtctgctgaggtatatgccggcctga

SEQ ID NO: 481147 - DNA, 375 bp, Shigella flexneri; identical to SEQ ID NO: 475278

SEQ ID NO: 481148 - DNA, 399 bp, Shigella flexneri
gtgaagttcgggcatggcagtgcacaacatgtgcgtgccggtttccgtctgggcagccacaacgatatgagctttggtgaaggcacctcatcccgtgacactctgcgcgacagtacaaaacaccgtgtgagtgaactgccggtgaactggtgggtacagccttctgttatccgcactttcagctcccggggtgacatgagcatggggacagccgccgccggcagtaacatgacgttctcaccgtcccggaatggcacgtcactggacctgcaggccggactggaagcccgtgtccgggaaaatatcaccctgggcgttcaggccggttatgcccacagcgtcagcggcagcagcgctgaaggttataacggtcaggccacgctgaatgtgactttttga

SEQ ID NO: 481149 - DNA, 159 bp, Shigella flexneri; identical to SEQ ID NO: 6188

SEQ ID NO: 481150 - DNA, 180 bp, Shigella flexneri
gtgtcacggctgaagacctatggatacagtatttctggtgtggagacggatgacggatataaggcgcttgtccgcgcttttcagcttcatttccggcagaaaaattatgacggcataatggatgctgaaaccgctgccatcctgtatgcattgctggagaagtatttcccgggtaaataa

SEQ ID NO: 481151 - DNA, 366 bp, Shigella flexneri; identical to SEQ ID NO: 462994

SEQ ID NO: 481152 - DNA, 330 bp, Shigella flexneri; identical to SEQ ID NO: 476379

SEQ ID NO: 481153 - DNA, 366 bp, Shigella flexneri
atggcccgttcagctaaaccccgtaaacgcaaacccgcacaacaaagaagcaaacttccccgctatgttgtgaaacttcatccggatgatttttttgacgaagaagacgctgaagttctgcgctttgataattttgacgatgccgttgagtgctgcgctgacctgggtattccgttctttctggatgctggaaacaaaaagctggtcttctggtttgttcgtgtcgatgacgaagggtatccggaaatagcccgctgtacggagcgggagtttgcaaccattcttgccggtatcagtgccggtggtatgtactgcccggaatgcagcacagttcactggccggatggcgttaccccacccgtctga

SEQ ID NO: 481154 - DNA, 231 bp, Shigella flexneri; identical to SEQ ID NO: 476092

SEQ ID NO: 481155 - DNA, 2310 bp, Shigella flexneri
atgtccggcagtgcttttgccgttacgcaccacgccttcagtagcggagcaggaaggacatctgatggaaatggaagccacgcaagcaccttaaaatcaccatcatacactaaatcagtaagttggcagcattaccaagataaacaacaagttgaacaagctatcaacagtagcgtgaatcttgtccccttcggtttatctgcatcggactggaaagtgcatcgtggcgatttagtggtagaaggtaatatagagagtaatcaaaaattgattgttcttggcaatttgacagtcaaaggtaatatttccactttctctctttctaatccatgggttattctcggtaacgtgacggcaacgaatatagttacggattcaccactgttaattaccggttcgataaatgcaagtggactggtatttatcgactcatattacgataatccgtctacgattaaggggagtattaatgcgcgtggggtatttatcaatgacataattgcacctgttgttgcgtcttcgacaaatagtgaattcatggtccgtgcgagtgacaaaaatgacactgaaaatgtcaaaaaagcgctgatgataataaatcctgatgcatattattggggtctaataaatgatgaagatgctctgaaagaaatttttaagcgaagcaatattcgcatggcagggaatgtctgtaatcagatgaaaaaagaagcgctgtttcgccctaagccttctcctgagttagtgcaggaattgcaaatgctggatgaaggcaacgttgctgcatttgaaggacgagatattgcgacatttgatcttgccataatgcgaactctcccaaggcttaaaggaatttcagctaacctacgcaaacaacttattaatagcaatgatgaacaaacgattgaaagtatggcgagatatatgcctgacaatgagattctggagttgaccgatcagcaattgggttaccagcctgttgttctggggttgctcgaccgtgaaccgctctctgtcgaaataatgacgcgaatgagtcgtctacctgatggtgtcggtccgttgaatcttgcgctacgtgaaaatctccctctggatatcgtcatgactctggcgaaaagagattgggatatgatcattcaggagctttataaagatgcgtggttattgcccgaatccattattgatggctatatccgcagtgatgattcctctattcgtcaggtcggtgctggaggacaactcacttacaatcaggcaatgcagttggcgaacgattcatcaaacaatgttgtcacaagcttagcgttcaagctggcagagatgaaacaccatggtcaattattgcggatgacgccacaagagagtgacaaagttgcagcctatttataccaaaaattcgagaatgacgatgatctaatacgtgtgttatttttagcattgccagataacttacagtttaattttgttaaaaggatggagaaaaaatcccctgcctacttttgctgtcgggatatgcaggtaattcactctgacgctgctttacaacggttattgacacgtttcaacgatcctgaggggtggagtaatctggcgaaaaatcagtatctgagcacgtcgatgaaacaaaaaatttggcaacgtgctttatcgcatcggaaaaataatccgaaagcagattcagatgcatatgaaaccagcgctgatatgattttgtctgagctgattagccacggcgaagttgatgaccagatgctattaaatgccgccgccctgatacgtttggaagactgggactttttagagagtgcattagttagttgggataatttacccgctgttgttctcaaggaattacagcaaaacacgccacgcaatgatatttgggcgaagttttttctgaggcaggaaaatagctcccgtgcgcaggttgatgaagcattacgtgtttattatgcactcgaccccgatgcgttagcacaactggatgtactggcaaaacaaccggatcgtatatggtggagtacactggcgaaaagcaatctcacatttttcaagttcggcgcacttagcaaccgccacaccccctctgcggcactggcggcagaaattgatcccgagtggtggattgtggcgatgaataatccccgctttccagttgatgtattgaaggcgaggctgaaacgtgatcctttgctggcgttagagcttgttaaccctgaactggatttagtccgccagctggcgcttaacggtaagacgcgcgcaatacgggaacaagcgatgaggaaacttgatgagttgtattga

SEQ ID NO: 481156 - DNA, 366 bp, Shigella flexneri; identical to SEQ ID NO: 476838

SEQ ID NO: 481157 - DNA, 1191 bp, Shigella flexneri; identical to SEQ ID NO: 476562

SEQ ID NO: 481158 - DNA, 819 bp, Shigella flexneri
atgcaattagtcagtcgttttggttatgcgaaccagatacgccgtgaccgtccgctgacacatgaagagctgatgcaccatgtgccggggattttcggggaagagaaacacacgtcccgaagccagaactatacgtacatccccaccatcaccgtactggaaagtctgcagcgggaaggcttccagccctttttcgcctgccagacccgtgtgcgcgacccgggccgccggggatacacaaaacacatgctgcgtctgcggcgggccggagagataaacggagaacatgtccctgaaattattctgctcaactctcatgacggtacctccagctaccagatgctgccgggttacttcagattcgtctgccagaacgggtgtgtctgtggtcagtctctgggggaagtgcgtgttccacaccggggaaatgtggtggagaaagttatcgaaggggcttacgaagtggtgggggtttttgaccggattgaggaaaagcgtgatgccatgcagtcgctggtcctgccgccaccggcacgccaggcgctggcacaggcggcactgacttaccgttatggtgacgaacatcagccagtcaccaccgctgacattctgacaccacgacgcagggaggattacggtaaagacctgtggagcgcatatcagaccatccaggagaatatgctgaaaggcgggatttccggccgcagtgcaaaaggaaaacgtatccacacccgtgccattcacaacatcgacaccgatattaagctcaaccgcgcattgtgggtgatggcagaaacgctgctggagagcctgcgctga

SEQ ID NO: 481159 - DNA, 2658 bp, Shigella flexneri; identical to SEQ ID NO: 481137

SEQ ID NO: 481160 - DNA, 375 bp, Shigella flexneri; identical to SEQ ID NO: 477340

SEQ ID NO: 481161 - DNA, 366 bp, Shigella flexneri; identical to SEQ ID NO: 476838

SEQ ID NO: 481162 - DNA, 141 bp, Shigella flexneri; identical to SEQ ID NO: 474597

SEQ ID NO: 481163 - DNA, 153 bp, Shigella flexneri; identical to SEQ ID NO: 475863

SEQ ID NO: 481164 - DNA, 471 bp, Shigella flexneri
atgctggagccacaactgcactatacctggcagggacttaccctggatgacggccaggataacgccggttatgtgaagttcgggcatggcagtgcacaacatgtgcgtgccggtttccgtctgggcagccacaacgatatgagctttggtgaaggcacctcatcccgtgacactctgcgcgacagtacaaaacaccgtgtgagtgaactgccggtgaactggtgggtacagccttctgttatccgcactttcagctcccggggtgacatgagcatggggacagccgccgccggcagtaacatgacgttctcaccgtcccggaatggcacgtcactggacctgcaggccggactggaagcccgtgtccgggaaaatatcaccctgggcgttcaggccggttatgcccacagcgtcagcggcagcagcgctgaaggttataacggtcaggccacgctgaatgtgactttttga

SEQ ID NO: 481165 - DNA, 198 bp, Shigella flexneri; identical to SEQ ID NO: 476523

SEQ ID NO: 481166 - DNA, 153 bp, Shigella flexneri; identical to SEQ ID NO: 473818

SEQ ID NO: 481167 - DNA, 354 bp, Shigella flexneri; identical to SEQ ID NO: 479437

SEQ ID NO: 481168 - DNA, 306 bp, Shigella flexneri
atggaccgtctgtgtgaagactactgcggtggtatctggaatctgtacaccctgaacaacggcggggcatttatggcacccgaaccggatgacgatgatgacgaaacatgggtactgttcaatgccatgaacggtaaccgcgctgaaatgagcccggaagccgccggcattgctgcctgtctgatgacgtacagtcatcatgcctgtcgtacggagtgttatgccatgacggtccattattaccggctgcgggattacgccctgcagcatccggaatgcagcgccattatgcgcatcatcgactga

SEQ ID NO: 481169 - DNA, 306 bp, Shigella flexneri; identical to SEQ ID NO: 479989

SEQ ID NO: 481170 - DNA, 195 bp, Shigella flexneri; identical to SEQ ID NO: 474694

SEQ ID NO: 481171 - DNA, 156 bp, Shigella flexneri; identical to SEQ ID NO: 474739

SEQ ID NO: 481172 - DNA, 210 bp, Shigella flexneri; identical to SEQ ID NO: 475253

SEQ ID NO: 481173 - DNA, 330 bp, Shigella flexneri; identical to SEQ ID NO: 476431

SEQ ID NO: 481174 - DNA, 1017 bp, Shigella flexneri
atgcagcagttacatccgggagatgaagaagcgtggcggcggatcgatagcgcagacggcgagcctgttctggaaatttatcgccagtttcaaccgatgtttgctgctggaatgtaccggatgcgccatatgcagcagtatgccgcgacaccacaagcaattttcatcgctttcgacgccagtaatattgtgagtgccgaagatcgtgagcagagaaacaccctgattattctcttcgccctggcgacggtcttgctggcaagcgtattgtcattcttctggtatcgccgctatctgcgctcgcgccagcttctacaagatgaaatgaagcgcaaagagaagctggtggcgctggggcatcttgcggcaggcgttgcccacgaaatccgtaacccactttcctcgattaaaggactggcgaaatactttgccgagcgcgcgcctgcagggggagaagcgcatcaactggcgcaggtgatggcgaaagaggccgaccgtttaaaccgcgtggtaagcgagttgctggaactggttaagccaacgcatctggctttgcaggcggtggatctcaacacgctgattaaccactcattacagctggtaagccaggatgcaaacagccgggagatccagttacgctttaccgccaacgacacattaccggaaattcaggccgatccggacaggctgactcaggtcctgttgaatctctatctcaatgctattcaggcgattggtcagcatggcgtgattagcgtgacggccagcgaaagcggcgcgggcgtgaaaatcagcgttaccgacagcggtaagggaattgcggcagatcagcttgaagccatcttcactccgtacttcaccaccaaagccgaaggcaccggattggggctggcggtcgtgcataatattgttgaacaacacggtggtacaattcaggtcgcaagccaggagggaaaaggctcaacgttcaccctctggcttccggtcaatattacgcgtaaggacccacaaggatga

SEQ ID NO: 481175 - DNA, 834 bp, Shigella flexneri
atggtctgccagatggaactgaccagccatctgctgacggctgcagccttcggcacgatgaagaacagcgaaaatgagcttgctgagcaacttatagaacaaaccggcgataacactctgacgttaatggataaaggttattactcactgggactgttaaatggctggagcctggcgggagaacaccgccactggatgatacctctcagaaagggagcgcaatatgaagagctcagaaaactgggtaaaggcgatcatctggtgaagctgaaaaccagcccgcaggcacgaaaaaagtggccgggactgggaaatgaagtgacagcccgcctgctgaccgtgacgcgcaaaggaaaagtctgccatctgctgacgtcgatgacggacgccatgcgcttccccggaggagaaatggcggatctgtacagtcatcgctgggaaatcgaactgggatacagggagataaaacagacgatgcaactgagcaggctgacgctgagaagtaaaaagccggagcttgtggagcaagagctgtggggtgtcttactggcttataatctggtgagatatcagatgattaaaatggcggaacatctgaaaggttactggccgaatcaactgagtttctcagaatcatgcggaatggtgatgagaatgctgatgacattacagggcgcttcaccgggacgtataccggagctgatgcgcgatcttgcaagtatgggacaacttgtgaaattaccgacgagaaggggaagggccttcccgagagtggtaaaggagaggccctggaaataccccacagccccgaaaaagagccagtcagttgcttaa

SEQ ID NO: 481176 - DNA, 282 bp, Shigella flexneri
atgagtatcaatgagttagagtctgagcaaaaagattgggcgttatcaatgttgtgcagatccggtgtcttgtctccatgcagacatcacgaaggtgtttatgtagatgaaggtatagatatagagtcggcatacaaatattccatgaaggtttataagtctaatgaagacaaatccccattctgcaatgtgcgagaaatgactgataccgtgcaaaattattatcatgagtacggtggaaacgatacttgccctctctgtacaaaacatatagatgattaa

SEQ ID NO: 481177 - DNA, 897 bp, Shigella flexneri
gtgagcaagattgactatcaggcactgcgtgaggcggcagaaaaagcaacgtgtggtgagtggtcgctcgaatatggagagggccaatttgatggtgatgatgcgctaattcatcgtgacgttgttggatatcttcccatttgcagaattgaaggagcgcatcctgaaagcggtttcgatgaagatttccaaatagaacagcaggccaatgctgaattcatcgccgcagccaatccagctaccgtcttggcgctgctggatgagctggaaagaaaccagcaatacatcaaacgccgtgaccaggagaacgaggagattgcgttaacggtagggaagctgcgtgttgagctggaaggcaaagacaagctgattgcagagcttggaaaacaatgcgccgaatgggagcgaaaagcattaagcaactttgaagagtgtgctgcgatggctgaacgtatcgaagagttgcagacaaaatctgcaccagattcgtttggcatcatcggtgaaaatattcgaacacaggataatcgaataacgtcagaccctatgttttgtgtgtatcaaaagcgcgaaatcgttgttgatgctgattatgactatgaccggattgtctgggttgatgaagatggcaatgaagccaataaacgccaaagtcgtcgtctcgaactacttcacgaaaactttcgagagccaccagaaaaatggcggcgcgttgctgtgaaagatattgatgaattcgttacctgctgtttcaccgaacagggttgtaaagactacctggcagccaatggtcacaatcttcgcttgccatttatatatgtaaatggcggtttcaggaacgctgaatatatcggcataagaaactggcttgctggcattcgcatcaaaggagagtga

SEQ ID NO: 481178 - DNA, 483 bp, Shigella flexneri
atgaaacaaatgacactaattgagatggatggttttctgaaaggtaaatgcatcccacgagatttaaaggttaacgaaacaaacgctgaatatcttgtgcgtaagttcggtgaacttgaatcaaaactagaaacggcgttgcgggagtgtcgttctgctggaatcacgattgataaccttgaggctaaatgcgcgaagatggctgctgaaaatacctcacttaagcaatctgagaaggaatttaatgacttttgtcgtgaggagtttagcgaatgggaagatgatgttactgaaactccagccaccgatgctttcctggctgaagtacgggcgcagggggtagagatgtacgcagataacctcgacaacggagcagacgacgcagaacgaggtggttttgattatgccgttaagtttctacgcagtgaagcatctagtgtacgtttgttcgccgaccagcttcgcaaaggaggcaaccagtga

SEQ ID NO: 481179 - DNA, 384 bp, Shigella flexneri
atggcacattcgattactgtaagactaaacaagcccgcaagagagtttcaggccggggaaaatatcggattcaacatccgtgctggcgttcagtattacgatcgccagacaaaaaagaaagaatggacaaactacagcgccgttgtatttgccaagccgggagcgcaagcggattactaccgtagtgttcttgttgaaggtggcattgtagaaattaccggagaaaacatcagggttgatgtttatcaggggcaaaatggtcaatcaatcactcttgaattactgaatgcaaagattggatttgcaacctcaggaaacagccaacagcagcaaagtagcaatcatcaaaatcatcctgaatacgacgattcaattcccttctaa

SEQ ID NO: 481180 - DNA, 606 bp, Shigella flexneri
atgagcaaagaattttatgcaaggctggcagccattcaggagaatctgaacgcgccaaagaatcagtacaactcattcggtaaatataaatacagaagctgcgaagacattcttgaaggcgttaagccgttactgaatggcctgtttttatcaatcagcgatgaagttgtgttgattggtgatcggtattacgtgaaagcaacggcaactattactgatggcgaaaacagtcatacagcaaccgctcttgcacgagaggaagaaagcaagaaaggaatggattctgcacaagttacgggagctacaagctcttatgcacgcaagtattgcctcaatggtttgttcggcattgatgatgcgaaagatgcagataccgacgagcataaacatcagcagaacgcagcagcaaagcaatcaaaaccatcacctacacctgaacaggttctaaaagcattcactgacgcagcattgcagaaaaacaccgtggaagagcttaaacaggcgttcgccaaagcgtggaagatgctcgaaggcacaccggagcagcacaaagcgcaggacgtttacaacatcagacgagacgaattagaaggagcggctgcttaa

SEQ ID NO: 481181 - DNA, 171 bp, Shigella flexneri
atgcaacagttcgctattgcaggggcggcatcggttcgccctttcaacccgattttatcggtacagcattcacgaaaaaacattttaaccggagcagactttaaacaaccaagaatgaaaagtttgctcgaaaagctttgggatattttgaaacaacaaggccgtccatga

SEQ ID NO: 481182 - DNA, 369 bp, Shigella flexneri
atgtcaaacatcaaaaaatacatcattgattacgactggaaagcatcaatagaaattgaaatcgaccatgacgtaatgacagaggaaaaacttcaccagattaataatttctggtcagactctgaacaccgactcaataaacacggctctgtattaaatgctgtattaatcatgctggcgcaacatgctctgcttatagcaatttcaagcgacttaaatgcatatggtgttgtgtgtgagttcgactggaatgatggaaatggtcaggaaggatggcctccaatggatggtagcgaaggaataagaattaccgatatcgatacatcaggaatatttgattcagatgatatgactatcaaagccgtctga

SEQ ID NO: 481183 - DNA, 333 bp, Shigella flexneri
atggtgaaaaagactatttatgttaatcctgaccgcggacaaaacagaaaagtatctgatagaggtcttacatctcgagacaggaggagaatagcgagatgggaaaaaaggatagcatatgcattaaaaaacggtgtaacacctggatttaatgctatagatgatggccctgaatataagattaatgaagacccaatggacaaagttgacaaagcattagcaacaccatttcctcgcgatgtcgaaaaaattgaagatgaaaaatatgaggatgtaatgcacagagttgttaatcacgctcaccaacgaaatccaaataaaaaatggtcatag

SEQ ID NO: 481184 - DNA, 306 bp, Shigella flexneri
atggtaaccattgtctggaaagaatccaaaggtacggcaaaaagccgctacaaagctcgcagagcagaacttattgccgagcgacgcagtaatgaagcactggcgcgaaaaattgcgctaaagctctctggttgcgtcagagcagacaaagcagcatcgctaggatgcctttgctgcaagaagaaagaagaagtcgttcgaaaaaatagaagtatttattacaaagattcaaacccattaggaaacaaaatacatgcagtccaaaaaataaaattgtacagtaaactaccgtacggtgcttattga

SEQ ID NO: 481185 - DNA, 360 bp, Shigella flexneri
atggaagctgtagagccatatcataggcgtgcaatagataactggtacgacacaacggtagattgttctgaagactctttttggctcgacgttaaaggcgattcaatgactgccccggcaggactgagtattcctgaggggatgattattctcgtcgacccagaagtcgaaccacgtaatggaaagttggtagtcgccaaacttgaaggagaaaacgaggcgacattcaaaaagttagttattgatgccggtagaaaattcctgaaaccactcaatccacaatacccaatgattgaaatcaatgggaactgtaaaatcattggcgttgtcgttgatgccaagctagcaaaccttccttaa

SEQ ID NO: 481186 - DNA, 186 bp, Shigella flexneri
atgtacaaaaaagatgttattgaccacttcggaacccagcgtgctgttgctaaagcactaggcattagcgatgcagcagtctctcagtggaaagaagttatcccagagaaagacgcctatcgattggaaatcgttacagctggcgccctgaagtatcaagaaagtgcttaccgccaagcggcataa

SEQ ID NO: 481187 - DNA, 297 bp, Shigella flexneri
atggcacaagcaagctacagcaagccaacacagcgagaaattgatcgcgctgaaactgatttactcatcaacctgtcaacgcttacccagcgcggtctggcaaagatgattggctgtcatgaatcgaagataagcagaacggactggagatttattgcttcggtcttgtgtgctttcggaatggcatcagacatcagtccgattagcagggcttttaagtatgcgcttgatgaaatcacaaagaaaaaatccccggccgccaccgaggattttaagcaaattgatatgcaattctga

SEQ ID NO: 481188 - DNA, 213 bp, Shigella flexneri
atggacaccgttaacggaatgtgttcagacgcaccgcatgccaaaaaatgtaaatgcggaaaatcaccgacaatattcgacatggagaacgggtgccaaatctactgcgctaaccatgccgctgtggcggccgcgaattatcgcagtgcggtaacggagtggaataacctgaaatctgttagagaggggagtcatgaaaaaactaacctttga

SEQ ID NO: 481189 - DNA, 360 bp, Shigella flexneri
atggattattcacagttaagtgattttgaaattaacgtggcggtattcgaagccattcataacggatcaccggattacaaagaaggtaagaatggcgcgatggtgtttatctcatttgagggagacattgtaaacggagacgcagttgaagtagaggttgagcgcggatcctttaacccatgcgcaaacccagcagacgcatggccgattattgaaaaatacaggattagcattatcaatctcgatgaagacgagtggggtgcacgcggtgtgacctaccgtaaatctaagcgagctatacatgaaaatccccttcgcgccgccatgattgtctttctcatgatgcagagaatccaataa

SEQ ID NO: 481190 - DNA, 174 bp, Shigella flexneri
atgcttagcccatcccaatcccttcaataccagaaagaaagcgtcgagcgagctttaacgtgcgctaactgcggtcagaagctgcatgtgctggaagttcacgtgtgtgagcactgctgcgcagagttaatggcagaccctaacggacaaatgctggaggaagatgatgagtga

SEQ ID NO: 481191 - DNA, 303 bp, Shigella flexneri
atgagtgagttacgcgcaggtggcatcgcaatagtcattttttcagaaaacaaacccgaaattggcagatgcgttgagttaatcgaaaaagtaacaaacggatatgtatttaattttcctggtgcaggtaagcatagttggcgtgatgacacccctgggtggctagttaaaggcgatgtatcgatttatacaaacgagccttcaggtggtttctcttatttttacagtgatgaactcatgccaatcgacggagaagacttctctcacgaagatgagcaacagaaggagctggcaaatggctaa

SEQ ID NO: 481192 - DNA, 486 bp, Shigella flexneri
atgaataactttgttgaaattacctcaagaattggtcgcatgtaccaagattttcttataagtggaaaggggtctggcgacatcatagaggaaattgacaagctaagtgcagagctgagaaggaatgggtgtgttaattctatcttttttgaaactttgctaaagcaaggctttatgtttgacatgattaattacaacaaagtcgcacccagtgcttcgcaaaaatcatatgtgtacgttctgcatgctgaagatagtgggctaacaaaaatagggtttagtcgcagggttaataaacgaatttcagagatatctcgcatgagtggtgggaagctaaatctaattgcaaagattccggccgatagagagcttgaaaccaaattgcaccaaaaatattacaactataggtcgcacggggagtggtttagcctcaatcgttgtcatttgaaagagctaaaagaaatgcctggtaacgaactgaaataa

SEQ ID NO: 481193 - DNA, 789 bp, Shigella flexneri; identical to SEQ ID NO: 476477

SEQ ID NO: 481194 - DNA, 834 bp, Shigella flexneri; identical to SEQ ID NO: 476091

SEQ ID NO: 481195 - DNA, 885 bp, Shigella flexneri
atgcaatcatggctgcaaaacaacgccaaggaactgactcgcgtcggtgttgaccctaataacgttgctcagatgtatcagcagaatccttcaggatttggtgagtttgttgatcaccttggaatggctgctcttggtccgattgattacttcaatgttcaggacaagatggctggtcgtgaaattgaccgaggcaggctggcagagacaatccgcagcaatcaggctggagaagcactaacagcgcgtggtcaggacatccagatacgtggacagaacatcagcgcacagaatgctgctctttcccgcgaaatacaaagagcagaattacaagaaaaggctctggacagacagatagccagagaaagcaatcagttaaagcttgaagagctaaagcagaaacaggcagatgttcggcaaaaggctgacatagcccgcgctgacaggcaggcagccgctcagggtgcagttgatacgttcagcaccgcgcttgattctctcaacgagatagagcaaagccccggcctttcaaaagcagtaggaattcgctcagcgtttccgacagttcctggctctgatgcggctaactttgaagcaaggctcgacacttttaaagctcaaacattccttcctatggtgcagtccctgaagggtatgggggctctttcagatgctgagggtaaaaaattatccgatgcggttggtgccctaagccccaaaatgagtgaaaaggcttttcgtgactctatcggaaagattagaaatcagcttgaaagcaagttgagcaccgttaaaaaacagtttgattatcaggagccggtgcagaatatgccagcgcaacaacctactactggcagtaatttttcttcactatggggtgattaa

SEQ ID NO: 481196 - DNA, 309 bp, Shigella flexneri
atgttttatggtgaaatcccttcaggaatgcaaattgaccataaagatggtaatgggttaaataattcaatagacaacctgcgtctagttagtctcggtgaaaacctaaaaaacaaatctaaatacacaaacaatacatctgggtgcgcaggtgtttcatggcataagacccataaaaagtgggtggcatatattagcgacgcagggaagcgcattaatctcggatactttaagagtctcgatgatgcaattgctgtaaggcgtgaggctgaaaagacctatggttatcatgagaatcatggtaggtga

SEQ ID NO: 481197 - DNA, 204 bp, Shigella flexneri
atgggacactttatctatcaggacgaaaaatcacataaattctggacggtggagcaacagggaaacgagttgcatatcagttggggaaaagttggcaccaaagggcaaagtcagataaaaagtttttcagatgctgcggcggcggaaaaagcggaactgaagctgattgcggagaaggtgaagaaggggtatgaggtagcctga

SEQ ID NO: 481198 - DNA, 219 bp, Shigella flexneri
atgactaaaaatactcgtttttcccccgaagtccgtcaacgggcagtccgtatggttctggaaagtcagggcgaatatgactcacaatgggcgacaatttgttccattgccccaaagattggctgtatactggaaactctgcgtgtctgggtacgccagcatgagcgggataccgggggcggtgaggtgggctcaccaccgctgaacgtcagcgtctga

SEQ ID NO: 481199 - DNA, 189 bp, Shigella flexneri
atggatcagacatattctctggagtcattcctcaaccatgtccaaaagcgcgacccgaatcaaaccgagttcgcgcaagccgttcgtgaagtaatgaccacactctggccttttcttgaacaaaatccaaaatatcgccagatgtcattggatttgcccctatatttccagacatctgttatcacttaa

SEQ ID NO: 481200 - DNA, 525 bp, Shigella flexneri
atgaaacgtgtttctcaaatgaccgcgctggcaatggctttagggctggcttgcgcttcttcgtgggccgctgaactggcgaagcctcttacacttgaccaacttcagcaacaaaatggcaaagctatagatactcgccccagcgcgttttataacggctggccacaaaccttaaatggcccttctggtcatgaacctgccgccttaaacctctctgctagctggctggacaaaatgagcaccgaacagctcaacgcgtggatcaagcaacataacctgaaagccgatgccccggtggcgctgtacggtaatggcaaagatgttgacgccgtcaaaacgcgactgcaaaaagcaggttttacgcatatctccattctgagtgacgcgctaagcgaaccttcccgtctacaaaaactgccgcactttgagcagctggtttatccgcaatggctgcatgacctgcaacaaggtaaagaggttacggcgaaacctgtcggtgactggaaagtcattgaagcggcctag

SEQ ID NO: 481201 - DNA, 180 bp, Shigella flexneri
atgaataatgtcttactcatgagacccgatgactcagaatttatgatacctgatgactggtcagggctaaacgcaaaaggcattacatacgaacaagataatagagtgacagagtcttttctgccttttaaatctttttattgttcaccggtgtgcacgacagttgaactcatctcataa

SEQ ID NO: 481202 - DNA, 672 bp, Shigella flexneri
atgctctgcgtgaaaaatgtttcgctacgtttaccagaaagccgcttgctgacaaacgttaactttacggttgataaaggtgacatcgtcacgttaatggggccgtctggctgtggaaaatccactctgttttcatggatgattggtgcactggccggacagttttcttgtacaggtgagctatggctcaatgagcaacggattgacatgctacccaccgcacagcgtcagattggcattctttttcaggatgcactgttatttgaccagttcagcgtcgggcaaaatttactgctggcgctaccggcgacacttaaggggaatgcccgacgtaatgccgtgaatgatgcacttgagcgttcaggccttgacggagctttccatcaggatcctgccactttgtctggcggtcagcgagcgcgcgttgctctactacgcgcccttctcgcccagccaaaagcgttactcctggatgagccattcagccgtcttgatgtggctctgcgcgataattttcgccagtgggtgttcagcgaagttcgcgccctggcgatccccgtcgttcaggtaacgcacgatctccaggatgttcctgctgatagttctgttctggatatggcgcagtggtcagaaaattacaacaaactgcgggtaatgactccaacttattga

SEQ ID NO: 481203 - DNA, 1455 bp, Shigella flexneri; identical to SEQ ID NO: 476547

SEQ ID NO: 481204 - DNA, 294 bp, Shigella flexneri; identical to SEQ ID NO: 480700

SEQ ID NO: 481205 - DNA, 123 bp, Shigella flexneri
atgttgggtggagcggacaatccaaatggtgaaggggggatgcggacgatttcctggactgctttatcattccagcccgcattgttggcggtacattttggggctgacggcacccagcgataa

SEQ ID NO: 481206 - DNA, 849 bp, Shigella flexneri; identical to SEQ ID NO: 477085

SEQ ID NO: 481207 - DNA, 918 bp, Shigella flexneri
atgaagatatctcttgtagttcctgtcttcaatgaagaagaagcgataccaattttttataaaacggtacgtgaattcgaagagttgaagccatatgaagtagaaattgttttcataaatgacggaagcaaagacgctacggagtcaatcattaacgctctggctatttctgatccgctagttgttccgctgtcatttacacgcaactttggtaaagaaccagcattgtttgcagggttagaccatgcaactggcgatgccgtgattccaattgatgttgacctgcaagacccgattgaggttattcctcatcttattgaaaagtggcaggcaggtgctgacatggtgcttgctaaacgttcagaccgctcaactgatggacgactgaaacgtaagacagctgagtggttctataaattacacaacaaaataagcaccccaaaaatcgaggaaaatgtcggagattttcgactcatgtctcgtgaggttgtggagaacattaaactattgcctgagcgcaatcttttcatgaaaggcatactgagctgggtgggtggtccgacggatgtcgttgaatatgtacgcgcagagcgtgttgctggcatctcaaaatttaatggctggaaattatggaatctggcactggaaggtatcacaagtttttcaacctttcctcttcgcgtatggacttatataggcttgtttgttgcaagcatttcatttttatatggtgcatggatgattatagacacccttgtctttggtaacccagtacgcgggtatccctccctgcttgtatcaatacttttcctgggtggagtgcaactgatcgggattggtgttctcggtgaatatataggtagaatttatttagaaacaaaatcaagaccacggtacttaattaaaagcagaaaataa

SEQ ID NO: 481208 - DNA, 363 bp, Shigella flexneri
atgttaaagctatttgcaaagtacacctctataggtgtgctgaacacacttatacactgggtggtttttggtgtatgtatctatgccgcgcataccaatcaggctctggcaaacttcgcaggtttcgttgtggctgtgagttttagcttcttcgcgaatgcaagattcacattcaaagcattgactacagcgatgcgctacatgttatacgtgggatttatgggaatattgagtgtgattgttggttgggcagctgataaatgctcacttcctccaattgtcactcttatcaccttctccgccatcagcctggtgtgcggtttcgtctattcaaagttcattgtctttagggatgcgaaatga

SEQ ID NO: 481209 - DNA, 360 bp, Shigella flexneri; identical to SEQ ID NO: 475478

SEQ ID NO: 481210 - DNA, 849 bp, Shigella flexneri
atggcggattcgaatctcaatacacctgttattgttcaggcgacgcggctcgatacatcaatccttccacgcaatatcttctcgcagtcatatctgctttacgttatcgcacagagtactgatgttggtaacgtggctagcaaggccaacgaggccggacagggcgcttatgatgcacaggtcaggaacgatgagcaggatgtgattctggtcgatcacgaaattcgactggcatcagctgaagctaagattcaggaccacgaaacaaggatcactaacgcagaagcggcgatagtcggccttgattcacgattaacgacagcagaaaacgatattgattatctgacggatgaagttgtctccattcaaaacacgctttcagaccatgaaacgcgcatcgatgctctggagtatgccactacgcgcaagaagtcagaagttgtttactcgggcgtatcagtaaccatcccgacagcgccgaccaaccttgtcagtctgctgaaaacgctcacaccgtcatccggctcgttggcaccattcttcgacaccgttaacaacaagatggttgtgttcaacgagaacaaaaccctgctcttcaagttgtcgattgtcggcacgtggcccagcggaaccgccaacaggtcaatgcagctaaccttttccggctctgttcctgacacactggtcagcagtcgtaatgcggcgacaacaaccgacaacatcctgttagctacgttcttcagcgtggataaagacggctttcttgccacaaatggcagtacgttaaccattcagtcgaatggtgcggcgtttactgccacaaccatcaagataatcgcggagcagtga

SEQ ID NO: 481211 - DNA, 438 bp, Shigella flexneri
gtgttgaaaactggcttatatgacgatgtgtaccgcgctatcgacttcatttacgaaggcaatcagataacgtgcggcgataagctggagtccgtgaccgggaaattgcaattcgacatcagcagccagtacgacaagcaacaggaacacctgctgtttactccactgttcaaagcggataacgccagagtgttcgaccttgaggttgaatcgtcaactggcgttgcgcagtatgctgaccgcctttttctctctgcaaccactgacggcatcaattacgggcgtgagcagatgattgagcagaatgaaccgttcgtttacgacaaacgcgttttgtggaagcgagtagggcgcatcaggaaaaatgtcggcttcaaattgcgcgttatcacgaagtcacctgtcactctgtctggctgccagataaggattgagtaa

SEQ ID NO: 481212 - DNA, 285 bp, Shigella flexneri; identical to SEQ ID NO: 477030

SEQ ID NO: 481213 - DNA, 294 bp, Shigella flexneri; identical to SEQ ID NO: 480737

SEQ ID NO: 481214 - DNA, 207 bp, Shigella flexneri; identical to SEQ ID NO: 476087

SEQ ID NO: 481215 - DNA, 207 bp, Shigella flexneri; identical to SEQ ID NO: 476087

SEQ ID NO: 481216 - DNA, 576 bp, Shigella flexneri
atggtgcttgctaaacgttcagaccgctcaactgatggacgactgaaacgtaagacagctgagtggttctataaattacacaacaaaataagcaccccaaaaatcgaggaaaatgtcggagattttcgactcatgtctcgtgaggttgtggagaacattaaactattgcctgagcgcaatcttttcatgaaaggcatactgagctgggttggtggtcagacagatgtcgttgaatatgtacgcacagagcgtgttgctggcatctcaaaatttaatggctggaaattatggaatctggcactggaaggtatcacaagtttttcaacctttcctcttcgcgtatggacttatataggcttgtttgttgcaagcatttcatttttatatggtgcatggatgattatagacaccattgtctttggtaacccagtacgcgggtatccctccctgcttgtatcaatacttttcttgggtggagtgcaactgatcgggattggtgttctcggtgaatatataggtagaatttatttagaaacaaaatcaagaccacggtacttaattaaaagcagaaaataa

SEQ ID NO: 481217 - DNA, 363 bp, Shigella flexneri
atgttaaagctatttgcaaagtacacctcgattggtgtgctgaacacacttatacactgggtggtttttggtgtatgtatctatgccgcacataccagtcaggctctggcaaacttcacaggtttcgtagtggctgtgagctttagcttcttcgcgaatgcaagattcacattcaaagcattgactacagcgatgcgctacatgttatacgtgggatttatgggaatattgagtgtgattgttggttgggcagctgataaatgctcacttcctccaatagtcactcttatcaccttctccgccatcagtctggtgtgcggtttcgtctattcaaagttcattgtctttagggatgcgaaatga

SEQ ID NO: 481218 - DNA, 363 bp, Shigella flexneri
atgttaaagctatttgcaaagtacacctcgattggtgtgctgaacacacttatacactgggtggtttttggtgtatgtatctatgccgcgcataccaatcaggctctggcaaacttcgcaggtttcgttgtggctgtgagttttagcttcttcgcgaatgcaagattcacattcaaagcatcgactacaacgatgcgctacatgttatatgtcgggttcatgggaacactgagtgcaactgttggatgggctgctgatagatgttcacttcctccaattgtcactcttgtcaccttctccgccatcagcctggtgtgcggtttcgtctattcaaagttcattgtctttagggatgcgaaatga

SEQ ID NO: 481219 - DNA, 207 bp, Shigella flexneri; identical to SEQ ID NO: 479610

SEQ ID NO: 481220 - DNA, 390 bp, Shigella flexneri
atgaaaggcatactgagctgggttggtggtcagacagatgtcgttgaatatgtacgcacagagcgtgttgctggcatctcaaaatttaatggctggaaattatggaatctggcactggaaggtatcacaagtttttcaacctttcctcttcgcgtatggacttatataggcttgtttgttgcaagcatttcatttttatatggtgcatggatgattatagacaccattgtctttggtaacccagtacgcgggtatccctccctgcttgtatcaatacttttcttgggtggagtgcaactgatcgggattggtgttctcggtgaatatataggtagaatttatttagaaacaaaatcaagaccacggtacttaattaaaagcagaaaataa

SEQ ID NO: 481221 - DNA, 390 bp, Shigella flexneri
atgaaaggcatactgagctgggtgggtggtccgacggatgtcgttgaatatgtacgcgcagagcgtgttgctggcatctcaaaatttaatggctggaaattatggaatctggcactggaaggtatcacaagtttttcaacctttcctcttcgcgtatggacttatataggcttgtttgttgcaagcatttcatttttatatggtgcatggatgattatagacaccattgtctttggtaacccagtacgcgggtatccctccctgcttgtatcaatacttttcttgggtggagtgcaactgatcgggattggtgttctcggtgaatatataggtagaatttatttagaaacaaaatcaagaccacggtacttaattaaaagcagaaaataa

SEQ ID NO: 481222 - DNA, 504 bp, Shigella flexneri; identical to SEQ ID NO: 479351

SEQ ID NO: 481223 - DNA, 207 bp, Shigella flexneri; identical to SEQ ID NO: 476087

SEQ ID NO: 481224 - DNA, 297 bp, Shigella flexneri
gtgaccgagccaaatcaggtgtggtgcggtgatgtgacctatatctggacgggtaagcgctgggcgtacctcgccgttgttctcgacctgttcgcaagaaaaccagtgggctgggccatgtcgttctcgccggacagcaggctcaccatgaaagcgctggaaatggcatgggaaacccgtggtaagcccggcggggtgatgttccacagcgatcagggcagtcattatacgagcaggcagttccggcagttattgtggcgataccagaatgagccggcgcggaaactgctgggataa

SEQ ID NO: 481225 - DNA, 378 bp, Shigella flexneri; identical to SEQ ID NO: 474621

SEQ ID NO: 481226 - DNA, 216 bp, Shigella flexneri; identical to SEQ ID NO: 5123

SEQ ID NO: 481227 - DNA, 348 bp, Shigella flexneri
atgatggagatcgccaaaaaagtgggcaaagggttacatcctgattgctacattgaattggtgattgaagacagttactacaatatgcgcgagaaagtggttgagcatccgcatattctcgatatcgcccagcaggcgatgcgtgactgcgatattgaaccggaactgaaaccgatccgcggcggtaccgacggcgcgcagttgtcgtttatgggattaccttgcccgaacctgttcactggcggttacaactatcatggtaagcatgagtttgtgattctggaaggtatggaaaaagcggtgcaggtgatcgtccgtattgccgagttaacggcgcaacggaagtaa

SEQ ID NO: 481228 - DNA, 318 bp, Shigella flexneri
atgtcaacgattattatggatttatgtagttacacccgactaggtttaaccgggtatctgttgagtagaggggttaaaaaaagagaaatcaacgacattgaaaccgttgatgaccttgccatagcttgtgattcacagcgtccttcagtggtgtttattaatgaggactgtttcatccacgatgcttctaacagtcagcgcatcaagcacatcattaatcaacatcccaatacgttatttatcgtttttatggcaattgccaatgttcattttgatgaatatctattggtcagaaaaaaatttattgatcagttctaa

SEQ ID NO: 481229 - DNA, 216 bp, Shigella flexneri
atggatgataacggaaaccaatgggtcaatgttgaacaccggctaccagaaagcaaagaagggatgtggtctaaagaggttatagctcttactgatactggtgacgtgttcaaactatcatgtatgggctcttactggcagagaaccaaggcattcatcgattcaggagcaagcaaggttacacactggatgccgcttaattacccagatgattaa

SEQ ID NO: 481230 - DNA, 543 bp, Shigella flexneri
atgaactacccaaccgttgttaacgatatagatttcagagacctaatttttgtagcaaacaacgatccggttacagattcttttatggtggcaaaagcatttggaaagctgccgaagaacgtagttcgtgacattgagcgaaccatagaagcttgccctcctgagtttgatacaaagctcaactttgagctttgctataaaaacaatgagttacagaatggtaagccgcaaaaattctaccgtctccgcaaggatgggttgatgcttttggttatgtcctacaccaaaaaagaagcaatgcgtatcaaaattgcttacatcaacgcatttaactggatgtacgccatgcttcaggttggtcatcgtcaatttgaagaagagagaaatgccgtaatgctggagtacatgaaagagaaggatgttgccagcatgtcaggtcgcctgctaaatcgctggggcaaaattaagaagccacagctgatggctagaattgaacgccttgaacagcacgggcaaaccgtaatccccggactcatcaattaa

SEQ ID NO: 481231 - DNA, 591 bp, Shigella flexneri
atgaacaaataccgacttatttacgcagatccgccttggcaatatcgcgacaaagccaacgatggcaatcgcggtgctggacataaatacgatgttatgaatgttcaggacatttgccgactgccagtatgggatttagcggatccagaatcttgcttgttagcgatgtggtgggtgccgacacagccagccgaagcgctaaaggtaattgaggcgtggggattcaggttgatgactatgaaaggctttacttggcacaaaaccaataagcacaaaggcaacagtgcgatcggaatggggcatatgaccagggcaaatagcgaggattgcttgtttgccgttcgagggcggttacctgagagaatggacgcttcaatatgccagcactttaccgcaccgagaatggagcacagtgcaaaaccaccgatcgtaagagacatgttagctaagttgcttggcgacgtgccgcgctgtgagttatttagccgcgacaaagtgaccgggtgggatatgtggggaaatcagtgcgactccgattttgaacttgctcccggcatggcgattaaaccatgcaaaatggtgatcgcatga

SEQ ID NO: 481232 - DNA, 189 bp, Shigella flexneri
atggacgatagcttagaaatatttgaagagtggtgcgctgatgaacttggtgtctccgcttacttcattcgacaaatgcgaagcaagaatattttgggcgtgattgagtataaacgagttgaaataaacaagagatacagggcttggatggccgcagttcgcgccgccggagtcaaagtgaaggagtga

SEQ ID NO: 481233 - DNA, 327 bp, Shigella flexneri
gtggctgactggcaaattccaatcatcattcttgccggagcttcgctggttgctggctttatcctgctgaaaaagcataaagaccgtgatcaaaaagttgaagttctctatgggtatccagcgaacagcacaacatggctgaccatttaccactaccgaaaatcaggacgctgggtattcgaatgggatgatctgttcgctgaaaagcgaccaaagtcatggggagacatcagcgaatgcatgatgtttgaagaaagaaaatccggcgcaacccgagaagagtttaacgaagcgtgggcgcgattaagtgagagagggtatttgtga

SEQ ID NO: 481234 - DNA, 471 bp, Shigella flexneri
atgacaaaatcatggagcgtaccttttcctgaatcagaaactgaacatgatggaatgcctgttttctggagattccaggcgacagttgaagaagatggaatcaaaatattcgcacttcaatatatagcttttcatcagacagagcattatgcatggttggttcctgcgcattggattgttaattttaaaccagcaccaaatcagtggttacaggaatggaaacaaaagagaaatagatatgcaattaagaaagtagcaaaaaatgcagaaagatcttttgcattcccaacgaagaaacttgccattgaaagtttattgcgccggaagaaataccatttaatgagaatcaaacaggatttggctgttgtatcaactcttgttgatgggatgaagaatattgatacatcaacaccagatattgaatataactttgggcacaaccaagaaacagaaaattgggtattttattag

SEQ ID NO: 481235 - DNA, 135 bp, Shigella flexneri
atgatgcactttcagctcgcgggtagcggcgtcatgtccgctttctacccgcacgaatctgaattatcacgccgagttaaacaattaatcagtgcagcaaagaaacaactggaggcgttatgcgcaatgaaatag

SEQ ID NO: 481236 - DNA, 576 bp, Shigella flexneri
atgaaacaaatgtcactaattgagatggatggttttctgaaaggtaaatgcatcccatgtgatttaaaggttaacgaaacaaacgctgaatatctggtgcgtaaatttgctgaagcggaggccaagatttcggctctgtacgaagaccaccagaaagcgattgagtcaattaagcaggctgatgcggctgttaagttggcacacgagaagttttcggcgctggcggcggagaatgcggggatgaagtcggtcattgaatactgcattaatcccgacaatcagcctgaataccatgaccagggcatgggatgtggagttgaagaccacggctaccagcgcgacggctattcggcttgttactacggatgggagtcggcaatggatcgcgtctactcagaggttattccagacgccattccagaaaccccagccaccgacactttcctggatgaagtgcgggcgcagggcgtggagatgtttgctgccagcatgaaggttgttggcggtcatgagcacccatattcagcgatggctaacgagttcgccgcccagcttcgcaaaggaggcggccagtga

SEQ ID NO: 481237 - DNA, 582 bp, Shigella flexneri
gtgagcgaaattaactatcaggcactgcgtgaggcggcggaacgtgcaattccagcaatggaacgcctgttaatgttgccagctgatgatttgttaagtgaacaggaacttaaagattacggtgtggatattgatgcgctcaacgccttcaaatttctggccggaccagaaaccgtgctggcactactggatgaacgggtaaggaatcagcaatacatcaaatcccgcgaccaggagaacgaggatattgcgctaacggtagggaagctgctaatcgaaaacggccggcttgttgccgatacgctacgccacttagctgataacgaaatcgactctgattattttgctatcacctcaacgaatgagaacggtactgaaattgatcatgagatggctattaccgattacgcactgcaagctgccggaactgtagacgaattggttgcggcgctggaatccgcagagaatcgcatagcagaactgggggagcggggaatactgctcccggaacgtagcagcatgcttcatcgaacagattttcacgatgattaccaaacggtaatggctagactggccccctga

SEQ ID NO: 481238 - DNA, 549 bp, Shigella flexneri
atgaccctgaatcacttcaccagcggtatctttgatccagtcgatgttgttggaaacgaaagtatcgcccagccacgcaacacccaggatacaaatacaggcgctcatacctgctttgaaggtgctggagttgaggatgttgtcggtatcgactttacagataacggtggtcagagttgcaacgctgagcatgatgatcaggattgcgttggtggtgttcatcagcggtttttcaaccagacccatgcttgggctgttgatgattgcatagataaccacgccaactacgcccagcaggaacagccagacggacgtttttgcaccggatttgatttcaatctgcttttcaccgcgcagttcaaccaagccctcttccagacgcttgcgataaatcggatcgtcagagagtttggagttgaacagcatagtgaccaggaaggacatcaccagaaccgccagcagggtggacgggatgaccacggagagcagatggaggtagctgatgccatgaccttccatcacggaagacatgtaaaccactgccgctga

SEQ ID NO: 481239 - DNA, 645 bp, Shigella flexneri
atgacatctctgtcagaaaagttttccactgacaacgcgggcattgcctatttaatttccggtatcggtttggggcgattgatcagtattttattcttcggtgtgatctccgataagtttggtcgtcgggcggtgatattaatggcagtaataatgtatctgctattcttctttggtattcccgcttgcccgaatttaactctcgcctacggtctggcagtgtgcgtaggtatcgctaactcagcgctggatacgggtggctaccccgcgctcatggaatgctttccgaaagcctctggttcggcggtcatactggttaaagcgatggtgtcatttgggcaaatgttctacccaatgctggtgagctatatgttgctcaataatatctggtacggctatgggctgattattccgggtattctgtttgtactgatcacgctgatgctgttgaaaagcaaattccccagccagttggtggacgccagcgtagctaatgaattaccgcaaatgaacagcaaaacctttagtctggctggaaggtgtttcatcggtactgttcggtgtagccgcattctcgaccttttatgtgattgtggtgtggatgcccaaatatgcgatggcttttgctggtatgtcagaagctga

SEQ ID NO: 481240 - DNA, 771 bp, Shigella flexneri
atgattccacagatttccctggcacccggcgtcgttcaactggtgcttaattttttgcaagagctggagcaacaaggttttaccggcgatgcggcgacaagttatgccgatcgtctgacaatgtcgaccgacaacagtatttaccaacttctccccgatgcggtggtatttccgcgttcaaccgcagatgtggcgctgatcgcccgtcttgccgcgcaggaacgctattcatcgctgatctttaccccccgcggcggcggcaccggcactaacggtcaggcgctcaaccaggggattattgttgatatgtcccgccatatgaaccgcatcatcgaaattaaccctgaagagggctgggtgcgcgttgaggccggggtgataaaagaccaactcaatcagtacctgaaaccgttcggctacttttttgcgccggaactttcgaccagcaaccgggcaacgctcggtgggatgatcaataccgatgcatccggtcagggatcgctggtctatggcaaaacgtcagatcacgtacttggcgtacgcgcggtgttgttggggggcgatattctcgatacgcaacctttacccgtcgagctggcggaaacgctgggtaaatccaataccacaatcgggcgaatttataacacggtttatcaacgttgccgtcagcaacgccagttaatcatcgacaacttccccaaacttaaccgctttcttaccggttacgatctgcgtcatgaagtggtcaacaaaaactggccaccgagttag

SEQ ID NO: 481241 - DNA, 633 bp, Shigella flexneri
atgaagatattcataatgcgcaattggcacaagatatcaatttttatacttgcatttactttgatttggcttagacgcattgacattttgacaaatgcccagttttgggctgaggatgcagttttttggtataaagatgcatacgaacaaggttttttcagttcactcataaccccaagaaatggttattttcaaacagtatcaacactcattgttggtgcgacgacatttattaatccaatttacgcaccattattatcaaacttttttggaataataattagagctataattatatggttcttatttaccgatagatttaaattcctaagcaccacatcaaaaatcttcatctctgtatatttaatttgcatgcccgggcttgatgaagtccaagccaatataacaaatgctcactggtatttatcattgtatgttgcaatgataataatatctgaagaatccaagtcaaaattatggaaagcacatgatttattttttatagtattatctggattgagcggtccatttattatattcataattgcatcatctgtttttaaatatttacacttatcaaaaggagtaataagcataagagattttatactcgactgccatatttggcaatga

SEQ ID NO: 481242 - DNA, 192 bp, Shigella flexneri
atggacggacaaatatcaattgttcgaccaggagcatgtgacgatcgcgagatacgactgattattcgtctggcgatggggaaaacaataactgctctcattactccagaaaatctcgcattagcgttaacaggaaagtcagacctgccagtagagctaaagctgcgaaatattgagattaaggtgaaatag

SEQ ID NO: 481243 - DNA, 180 bp, Shigella flexneri; identical to SEQ ID NO: 481201

SEQ ID NO: 481244 - DNA, 849 bp, Shigella flexneri
atggcggattcgaatctcaatgtgccggtaatcattcaggctacacggctcgacacatcagtccttccacgcaatatcttctcgcagtcgtatctgctttacgttatcgcacagggcactgatgttggtaacgtggccaacaaggccaacgaggccggacagggcgcttatgacgcacaagtcaggaacgatgagcaggatgtgattctcgctgaccatgagcagcgaatttctgctgcggaagcaacgcttgttaatcatgaggagcgaatcagccaggcagaatcaactcttcaggaacatgaaacgcgaatcgctcagaatgaaagcgatattgcgtcgcttgataccagagttcagtcgctggaatcgcaggtttcagaccatgaaacgcgcatcgatgctctggagtatgccactactcgcaagaagtcagaggttgtttactctggcgtatctgtaaccatcccgacagcgccgaccaaccttgttagcctactgaaaacgctcacgccgtcatccggcacgttggcaccattcttcgacaccgttaacaacaagatggttgtgttcaacgagaacaaaaccttgttcttcaagctgtcgatcgtcgggacgtggcccagcggaaccgccaacaggtcaatgcagctaaccttttccggctctgttcctgatacgctggtcagcagtcgtaatgcggcgacaacaaccgacaacatcctgttagctacattcttcagcgtggataaagacggatttcttgccacaaatggcagtacgttaaccattcagtcgaatggtgcggcgtttactgccacaaccatcaagataatcgcggagcagtga

SEQ ID NO: 481245 - DNA, 825 bp, Shigella flexneri; identical to SEQ ID NO: 478357

SEQ ID NO: 481246 - DNA, 501 bp, Shigella flexneri
atgaacctgacaacgaagggtgatttagttcttgcggcattacgtaagctcggtgtggcatcaaatgccacgttaaccgatgtagaaccgcagtctatggaagacggcgtcaacgaccttgaaatgatgatggctgaatggcttggcggtgatgtgtcacctggtatcaacgttggctacatttttgctgatgcagatgttgctccagaaccgggcgatgagcacggtttatcaaataacgctatcaatgccgtcattttcaaccttgcctgccgcattgctccagattatgcgctggaagcgccagcaaaacttataaccactgccagatacgggaaagagcgactcgtcaaactgtctgcaatggacagagcaaaagccgctaaatgtaagtccggttatccaaaccgtatgcctgttggtagcggtaaccagttggcgaagtggaatggttggaattacttccaccgaaaggaaccttgcgataacgggagcgaataa

SEQ ID NO: 481247 - DNA, 366 bp, Shigella flexneri; identical to SEQ ID NO: 462994

SEQ ID NO: 481248 - DNA, 303 bp, Shigella flexneri; identical to SEQ ID NO: 476494

SEQ ID NO: 481249 - DNA, 543 bp, Shigella flexneri
atggaatcgctgcggtttgatgcgcatgagttgctgattatccaccttccgcgccatgtactggtgtacgacgcatcttcaagcgccaatggtccgcaatggtgtgtgctgaaaacaggcctgtatgacgatgtgtaccgcgctatcgacttcatttacgaaggcaatcaaataacgtgcggcgataagctggagtccgtgaccgggaaattgcaattcgacatcagcagccagtacgacaagcaacaggaacacctgctgtttactccactgttcaaagcggataacgccagagtgttcgaccttgaggttgaatcgtcaactggcgttgcgcagtatgctgaccgcctttttctctctgcaaccactgacggcatcaattacgggtgtgagcagatgattgagcagaatgaaccgttcgtttacgacaaacgcgttttgtggaagcgagtagggcgcatcaggaaaaatgtcggcttcaaattgcgcgttatcacgaagtcacctgtcactctgtctggctgccagataaggattgagtaa

SEQ ID NO: 481250 - DNA, 504 bp, Shigella flexneri; identical to SEQ ID NO: 479351

SEQ ID NO: 481251 - DNA, 264 bp, Shigella flexneri
atgaacagtgtacaactgacagcgcaaaaaaaacggatttcagcgaaatgtcagcaatgtgcatataaacctatctgcaatggcggttgtcctaagcatcgtattactaaagtaaacaatgagactgtttcttatttttgcgaaggttataaaatccttttttcaaccatggtaccttatatgaacgccatggttgagttagctaagaacagagtaccgctttaccacattatggatgttgcaaaacaaatggagaataattaa

SEQ ID NO: 481252 - DNA, 810 bp, Shigella flexneri; identical to SEQ ID NO: 471750

SEQ ID NO: 481253 - DNA, 324 bp, Shigella flexneri; identical to SEQ ID NO: 480928

SEQ ID NO: 481254 - DNA, 897 bp, Shigella flexneri
gtgccacttcagatcgtgcgtccgggttatgccattgagtatgacttcttcgatcctcgcgacctgaaaccgacgctggagagcaagtttatccaggggctgttctttgctggtcagattaacggcactaccggttacgaagaagccgctgcgcaaggtttgctggccggtcttaacgctgcccgtctgtctgctgacaaagaaggttgggctccggcacgttctcaggcgtatctcggcgtactggttgatgacctgtgcactttaggaaccaaagaaccgtatcgtatgtttacttcgcgcgcagaatatcgtctgatgctgcgcgaagataatgcggatctgcgtttgactgaaatcggtcgtgaactgggcctggtggatgacgaacgttgggcgcgctttaacgagaaacttgagaatatcgagcgtgagcgtcagcgtctgaaatcgacctgggtaaccccgtcggcggaagctgcagccgaagtgaatgctcacctgactgcgccgctttcccgtgaagccagtggtgaagatctgctgcgtcgtccggaaatgacttatgaaaaattaaccacgctgacgccgtttgcccctgcgttgacagacgaacaggcggcggaacaggttgagattcaggttaaatacgaaggttatatcgcgcgccagcaagatgagatcgaaaagcagctgcgtaacgagaacaccctgctacccgcgacactggattaccgccagatatccggtctttctaacgaagtgatcgccaaacttaacgatcacaaaccggcctctatcggccaggcttcgcgtatttctggcgtcacgcctgcggccatctccattctgctggtgtggctgaaaaaacagggtatgctgcgtcgtagcgcataa

SEQ ID NO: 481255 - DNA, 285 bp, Shigella flexneri
atgagaaactttcctgttccgtactcgaatgagctgatttatagcactattgcacgggcaggcgtttatcaagggattgttagtcctaagcagctgttggatgaggtgtatggcaaccgcaaggtggtcgctaccttaggtctgccctcgcatttaggtgtgatagcaagacatctacatcaaacaggacgttacgctgttcagcagcttatttatgagcataccttattccctttatatgctccgtttgtaggcaaggagcgccgagatgaagtggcacactga

SEQ ID NO: 481256 - DNA, 693 bp, Shigella flexneri; identical to SEQ ID NO: 473368

SEQ ID NO: 481257 - DNA, 543 bp, Shigella flexneri
atggttgataaaataatatttacggttactcctattttttcaattcctcctcgcggagcggctgctgttgaaacgtggatgtatcaggttgctcagcgtaccaattttccaaatcgtattgtttgtatcaaaaatccaggatactcaaattacacctttgttaatgataattgtagtattcatagggttggattcagtcgcatatataagcggttatttcaaaaatggacaagacttgatcctcttccatattcacagagaatattgaatattgcacatgattttcctataacgaaagaaagtgttattgtagttcataatagcatgaagctatacactcaaattcgtaagctagctcctcaggcaagagtggttatacatatgcataatgcatttgaaccaaaattgcttgagcaaaatgttaaaatgatagtccctagtttatacttgaaaaagtattaccaatcttatttagcaaatgcagatattgagattgtaccaaatggaattgatttagaaacctatcaatctaattttcactag

SEQ ID NO: 481258 - DNA, 261 bp, Shigella flexneri
atggaagcgcgggaagcaaccgctacgggtgaatcatgcatgcgcgtcgatgccattgctaaggtcaccgggcgggcacgatatactgacgattatgttatggcgggcatgtgttacgcgaaatatgtacgtagccctatcgcacatggttatgccgtaagtattaatgatgaacaagccagaagtttaccgggcgtactggcgatttttacttgggaagatgtgcctgatattccattcgctacagctgggcatgcctag

SEQ ID NO: 481259 - DNA, 300 bp, Shigella flexneri
gtgcagcaggaaatgacagatataacagtcacgatggttaatgcccgcagcatgcatatcgcgcaccatcgtcgcgacacgcttaataagcatacgctttacgcgaacatctggtgggttggtcgcccagtcagcacagtaatcttccagactgatggttggtgtcagatcttcggtaataataaacgaggttctggtcagcggattcatgcctttttcgccgaatgccaccccatacatagtatcaacgccgacatcccgcagtcgatgaatcgcattccattcgcggtctgcgcctaa

SEQ ID NO: 481260 - DNA, 957 bp, Shigella flexneri; identical to SEQ ID NO: 476538

SEQ ID NO: 481261 - DNA, 300 bp, Shigella flexneri
atgactaataagaaaatgtattttatattaatacttgttttcacattgctacaggtgtgtttttttgctctctggaaggctcgtgatggtagcacaacgtctcttgaatgtacgtcgacgttaacaagaaatgctaaaacagatcattctttatactactctgctaacctttcagtcattttaaaaaaagatggtagcggtagttttacgattgttggcttaactgatgtaaaagcctactttgggtatcgtaagaatcacattttcttcaacaccaatatttttaaaacttttgcgtaa

SEQ ID NO: 481262 - DNA, 849 bp, Shigella flexneri; identical to SEQ ID NO: 473541

SEQ ID NO: 481263 - DNA, 225 bp, Shigella flexneri; identical to SEQ ID NO: 476353

SEQ ID NO: 481264 - DNA, 372 bp, Shigella flexneri; identical to SEQ ID NO: 476556

SEQ ID NO: 481265 - DNA, 1149 bp, Shigella flexneri
atgggggaaacaatctcagagcaactggatatcattaataccgcctttaaagttatcgaaaccatacgtcccaaactggcctgtagccggtgtgatgtcatcgttcaggcaccacttcctcctaaaccgatcgaacgcggttatgccagtgcagggttacttgcacggatcctggtcagcaaatatatggaacatatccctttatatcgccagtcagaaatatacgcgcgacagggcgtggagctgagccgtaataccatggtgcgctgggtatcagaaatggcagacaaactccgtcctctgtatatagcgctgaatgactatgttctggaggcaggaaaggtgcacgcagatgacactccggtgaaagtactggccccggggaacggaaagacgaaaacgggtcgtctgtgggtatacgtcagggatgatcgtaatgcgggttcatccctgccggcagccgtctggttcgcgtattcggcagatcgcaaaggagaacatccgcagctccacctggcaaagtatcagggcgtactgcaggctgatgcctatgcaggttataacgtactgtacgaaacgggccgggtgaaggaagccgggtgcctggcccacgcccgccgaaaaacccatgacgaggatgtgcgccgtccgacagaaatgactcaggaagcgctcagacggatagcagagttatacgacatagaagcggagatacgtggcagtccggcagaggaacggcttgcagtcagaaaagccagaagcgtccagttgatgcaatcgttgtacgactggatacagttgcagaggaaaacgctgtcgaaacatgcggagatggcgaaggcgttcgactatatcctgaatcactggaatgcgctgaacgagttctgtcgtgacggctgggtggaaatagacaacaacatcggtgaaaacgcgttacgatcggtggcggttggaagaaaaaattatctctttttcggctcagacaagggaggagaaagtgcggcgatcatctacagtctgctggtcacctgcaaacagaacgaagtggagccggaggactggttgcgcgaagtgatcgagaagctcaatgactggccgtcgaaccaagtgcataaactgctgccctggaacttctcgtctgtaaaataa

SEQ ID NO: 481266 - DNA, 354 bp, Shigella flexneri; identical to SEQ ID NO: 466835

SEQ ID NO: 481267 - DNA, 921 bp, Shigella flexneri
  misc_feature (256)..(265): n is a, c, g, or t
  misc_feature (872)..(881): n is a, c, g, or t
atgatgacgacaaaactatcactccctgaacttgacacaactaaactgcctgacaggtgccaggcattacttgatgaaatgcatgaagaaacaggaatacgccgtgaaatacttctgtctgttatgctgacggtcatggctgcctcggtccaggatacgcatgaagttgaactttccggagggcaacgtaccagccttcagatatttatgtgtctttcatcagcatcaggcagtggaaaaacctctgcctgcgcannnnnnnnnngcgcaaaattaatcgctcctgttcatgaaacagaagaagaactacatcaggcatatatcgacgataaaaaaaactatgaccgaatgatggaaatgtggacaacagataaaaaaatcctggagcggagatataaaaaggaaattgaaagatccccggaaaatgctgctgctgcacgagcagcacttgaaaagtgtatagcaaataaacccgaacctcccgtacaacaggttctcatcgtgaatgacgcgacaccagaagggatagctttgaaactcagccagtcaccctctcttctgttgctgtctgatgaaggaggtactattctggataagcgtttcgaacgcaaatcggcactgtacaacacattatggagtgggcaaccagtcaacgttgaacgggcatccagacccgggttccggctgaatgatgtccgtctcactatacttatactgactcaaccggtaatatttaataagttttttactctcactggcgatcagatccggggcaatggctttctggcccggttgctattttgcgaacccggagcaattaaaataatgacgacagaaccgcatactgccactcctgttgtgacgcaacaatnnnnnnnnnncgtaagaaaagttttggcagtcagatcagagactctctga

SEQ ID NO: 481268 - DNA, 429 bp, Shigella flexneri
atgggacgctggcttgctggcaggctcatgaaagagctggggctggtcagctgtcagcagccgactcaccggtataaacgtggtggtcatgaacatgttgctatccctaactaccttgaaaggcagttcgccgtgaccgagccaaatcaggtgtggtgcggtgatgtgacctatatctggacgggtaagcgctgggcgtacctcgccgttgttctcgacctgttcgcaagaaaaccagtgggctgggccatgtcgttctcgccggacagcaggctcaccatgaaagcgctggaaatggcatgggaaacccgtggtaagcccggcggggtgatgttccacagcgatcagggcagtcattatacgagcaggcagttccggcagttattgtggcgataccagaatgagccggcgcggaaactgctgggataa

SEQ ID NO: 481269 - DNA, 327 bp, Shigella flexneri; identical to SEQ ID NO: 477013

SEQ ID NO: 481270 - DNA, 363 bp, Shigella flexneri
atgttaaagctatttgcaaagtacacatctataggcgtgctgaacacacttatacactgggtggtttttggtgtatgtatctatgccgcacataccagtcaggctctggcaaacttcacaggtttcgtagtggctgtgagctttagcttcttcgcgaatgcaagattcacattcaaagcattgactacagcgatgcgctacatgttatacgtgggatttatgggaatattgagtgtgattgttggttgggcagctgataaatgctcacttcctccaatagtcactcttatcaccttctccgccatcagtctggtgtgcggtttcgtctattcaaagttcattgtctttagggatgcgaaatga

SEQ ID NO: 481271 - DNA, 315 bp, Shigella flexneri; identical to SEQ ID NO: 474620

SEQ ID NO: 481272 - DNA, 327 bp, Shigella flexneri
  misc_feature (243)..(252): n is a, c, g, or t
atgaacatgacaaaaggtgcactcatcctcagcctttcatttttgcttgccgcatgtagttcaattccgcaaaatatcaaaggcaataaccaacctgatattcaaaaaagttttgttgctgttcataaccagccggggttatatgttggtcaacaagcgcgctttggtgggaaggttatcaacgttatcaatggcaaaacggatacgttgttagaaatcgctgtattaccgttggatagctannnnnnnnnnatgcgaagcctgatattgaagccaactatcagggccgactgctcgccagacaaagcggcttccttgatccagtga

SEQ ID NO: 481273 - DNA, 828 bp, Shigella flexneri
atgcagagaataatcgaattacgccagcagaaaaccgccattaaaaatcagatgcgcgacatgctggagaacgctgaaaaagaaaaccgcagtcttaacgatgctgagggcgcaaaatttgacgaattacgcgctaaagctgaatccctcgataaagacatttcccgccttgaagccattgcagacgaagagcgcagcaagccaggtaaaagcagccagaccactgaccccgcagaactacgtaactacattctgaccggtgaaacccgcgcattaagtacaggcgttcccgctgatggtggttataccgttatccctgaactgaacaccgaaatcatgcgaatgctggcggatgaatccaccatgcgtcgcatctgtaccgtgaagaaaatcagcagcaacgagtttaagcagcttgtttccgctggcggtgcgaccgttaaccacggtgaagagggtaaggcacgcgaacagaccagcaccccgcagattaacgaggtgagcattaagctgtatccggtctatgcgtacccgcgcaccacacaggaaatcgtggatttttccgatgtggacatcctttcatggctgacgggtgagattggcgacaccttcacggaaaccgaagaaagcgatctggttgtgggcgacggtgacaaaaaagcaaaaggttttttatccgtaccccgtgcagagaagaacgacaaagagcgtgattttggtacgttgcaggtaattaaaccttccgaatctctggcgtggacatctgcggacccgctgatcgacctgaaatttgcattacgtaaaaaataccgcaaaaacgcggtctga

SEQ ID NO: 481274 - DNA, 1062 bp, Shigella flexneri; identical to SEQ ID NO: 472465

SEQ ID NO: 481275 - DNA, 366 bp, Shigella flexneri
atgcagacgctggcgaaggcaaatttgccgccgttgctttctgttcctgtaggtgaaaaagctaaattcagctggacgccaacctggttgccacagggttttagcgaagtttccagtagtcgacgtccgctaccgacgatggacaacatgcctatcgaatcacgtctctattccgacggattattcagcttctcggtaaacgttaaccgcgctacgccatcgagcaccgatcagatgttgcgcaccggacgcagaaccgtcagtacaagcgtacgtgataacgccgaaatcaccattgtcggtgaactgccgccgcaaacggcgaaacgcattgccgagaatattaagttcggggcagcgcaatga

SEQ ID NO: 481276 - DNA, 489 bp, Shigella flexneri
atgacgccttttattgataatttacatatgaaaaaattttccttttgttatattatttctgttttcactccctctgattatttttaccaaccctgggtcactgcattatcgccaacgccccgacacgtaagtcctgagcaattagaaaaaacagttcgttatcttacacaaactgtgcatccacgtaatgccggcaatattgataatctgaataggtccgcagagtatataaaagagttctttgtcagtagcggtgccagagttaccgcgcagggcgtccccgattggctattacgactctgcgcctggaagccagaattacccttacccggcaatgtcctggctttatcccgatcggggagactttattgctgtggtcggcagaatgcaggatatcaacgccgttcgtcaggtaaaagcggcattgttgtcatcccgggatttatctgtttattctatgaatgccccagggtttattcccggtattga

SEQ ID NO: 481277 - DNA, 198 bp, Shigella flexneri
atgtcccccattgaaaaatccagcaaattagagaatgtctgttatgacatccgtggtccggtgctgaaagaagcaaaacgcctggaagaagaaggtaacaaggtactgaaactgaacatcggcaacccagccccattcggttttgacgcgccagatgaaatctatggtcacccccgtttttgcaacactgatttttga

SEQ ID NO: 481278 - DNA, 543 bp, Shigella flexneri
gtgaaagaaagcaatcagcgatggtgctctgacgggttcgagttctgctgtgataacggagagagactgcgtgtcacgttcgcgctggactgctgtgatcgtgaggcactgcactgggcggtgactaccggcggcttcaacagtgaaacagtacaggacgtcatgctgggagcggtggaacgccgcttcggcaacgatcttccgtcgtctccagtggagtggctgacggataatggttcatgctaccgggctaatgaaacacgccagttcgcccggatgttgggacttgaaccgaagaacacggcggtgcgtagtccggagagtaacggaatagcagagagcttcgtgaaaacgataaagcgtgactacatcagtatcatgcccaaaccagacgggttaacggcagcaaagaaccttgcagaggcgttcgagcattataacgaatggcatccgcatagtgcgctgggttatcgctcgccacgggaatatctgcggcagcgggcttgtaatgggttaagtgataacagatgtctggaaatatag

SEQ ID NO: 481279 - DNA, 411 bp, Shigella flexneri
  misc_feature (391)..(400): n is a, c, g, or t
atgatattgaatgagttgcatcaacatgtttttttaaaggacgatgcgataaccccttgtatcttccttggggatcatacaggcgatagatttagtactatttttggtgataaatatatccttactttgctaaattctatgcgaaatatggagggtaataaagatagccgtattaataaaaatgtcatcgttctggctggaaatcatgaaatcaattttaatggtaactatactgcacgactagaaaattataaactctctgccggtgatacgtataacttaattaaaacgctcgatgtttgtaattataactcagaaactaaagttttaaccagtcatcacggaataataagaaatgaagaaaatcaatgttattgtctcggtgctttgnnnnnnnnnnaatatatgtaa

SEQ ID NO: 481280 - DNA, 543 bp, Shigella flexneri; identical to SEQ ID NO: 464540

SEQ ID NO: 481281 - DNA, 1071 bp, Shigella flexneri; identical to SEQ ID NO: 476467

SEQ ID NO: 481282 - DNA, 543 bp, Shigella flexneri; identical to SEQ ID NO: 478585

SEQ ID NO: 481283 - DNA, 543 bp, Shigella flexneri; identical to SEQ ID NO: 481278

SEQ ID NO: 481284 - DNA, 474 bp, Shigella flexneri; identical to SEQ ID NO: 475593

SEQ ID NO: 481285 - DNA, 627 bp, Shigella flexneri
atggtagtgtccgctattgccagtacacctcagatctttaaaaagcgcgacccacaagggcatcacgttgcttataaagccttccgtgaagatccgcaggcaaacccactgactacgccatcgggcaaaattgagatttattcgcaggcgctggctgacattgccgctacctgggaattgccagaaggcgatgtgatcgatccactgccgatctacacgccgggctttgaaagttatcaggatccgctgaacaaacagtatccgctgcagcttacaggtttccactataaatctcgcgttcactcaacttacggcaacgttgatgtgctgaaagcggcttgccgtcaggaaatgtggatcaacccgcttgatgcccaaaaacgcggtatccacaacggcgataaagtcaggatctttaacgatcgtggtgaggttcatattgaggcgaaagtgacgccacgaatgatgccgggcgtggtcgcactgggtgaaggcgcctggtatgacccggatgcaaaacgtgtcgataagggcggttgtatcaacgtactgaccactcaacgtccgtctcctctcgctaaggggaatccgtcacatacaaaccttgttcaggttgaaaaggtgtaa

SEQ ID NO: 481286 - DNA, 543 bp, Shigella flexneri; identical to SEQ ID NO: 481278

SEQ ID NO: 481287 - DNA, 543 bp, Shigella flexneri; identical to SEQ ID NO: 464540

SEQ ID NO: 481288 - DNA, 483 bp, Shigella flexneri; identical to SEQ ID NO: 477014

SEQ ID NO: 481289 - DNA, 1188 bp, Shigella flexneri
atgctcccccgttttgccgatatttttcagcagggaaaccgctggcttaactggctggagaaacaaccggaaggggcagtccgtccggtggtaattgaatcagtgacaaaaatcatggcctgcgggaccacactgatgggctacacgcagtggtgttgttcatcaccggactgttgccatacaaaaaaggtctgcttccggtgtaaaagccgctcctgcccgcactgcggggtgaaggctggcgcacagtggatacagtatctgctgagcctggtcccctactgcccgtggcagcatattgtgttcacacttccctgccagtactggtccctggtgttccacaaccggtggttactggcagagatgagccgcattgcagcggatgtgatactggaaatctgccatcaggcagatgtggagccggggatattcacggtgatccacacatgggggcgtgaccagcagtggcatccgcatatccatttatcgacaactgccggtggtgtgacgtcgggccacacctggaaaaatcttcatttttacgcccgtaaggtgatgagcatgtggcgctaccggataacacggttgctgtcacggaaataccctgacctggtgatgccggatgcgctggcagcagaaggaagcagtaaacgggaatggaatcgcttcctggacacgcattaccgccgtggctggaatgtcaacgtatcccgggtaatggataataccacccatgtggcggtgtactttggctcttacctgaaaaagccaccggtgccgatgagtcgtctggagcattatgccggtcaggatgaaatcggtctgcgttacaacagtcaccgaacaaaacgggaagaatacctgttgatgagtggagatgagttcatggaaaggttctcctggcatgtggcggataaggggttccgtatggtgaggtactacggttttttaagtccggcgaaacggcggttactggaagaagtggtgtacatcataacggagacagtgagaaaaacggcgatgcaaatcacctggagagggatgtatcagaggttactgaaggttgacccgctgaagtgcgtgctgtgcgggagtcagatgcgttttacggggctgaagcggggctaccgtctggcagagcaggtcctgatgcatgagccgctggcccggatgcggtggtgcggctga

SEQ ID NO: 481290 - DNA, 543 bp, Shigella flexneri
gtgaaagaaagcaatcagcgatggtgctctgacgggttcgagttctgctgtgataacggagagagactgcgtgtcacgttcgcgctggactgctgtgatcgtgaggcactgcactgggcgaggactaccggcggcttcaacagtgaaacagtacaggacgtcatgctgggagcggtggaacgccgcttcggcaacgatcttccgtcgtctccagtggagtggctgacggataatggttcatgctaccgggctaatgaaacacgccagttcgcccggatgttgggacttgaaccgaagaacacggcggtgcggagtccggagagtaacggaatagcagagagcttcgtgaaaacgataaagcgtgactacatcagtatcatgcccaaaccagacgggttaacggcagcaaagaaccttgcagaggcgttcgagcattataacgaatggcatccgcatagtgcgctgggttatcgctcgccacgggaatatctgcggcagcgggcttgtaatgggttaagtgataacagatgtctggaaatatag

SEQ ID NO: 481291 - DNA, 279 bp, Shigella flexneri; identical to SEQ ID NO: 127146

SEQ ID NO: 481292 - DNA, 543 bp, Shigella flexneri; identical to SEQ ID NO: 478594

SEQ ID NO: 481293 - DNA, 543 bp, Shigella flexneri
gtgaaagaaagcaatcagcgatggtgctctgacgggttcgagttctgctgtgataacggagagagactgcgtgtcacgttcgcgctggactgctgtgatcgtgaggcactgcactgggcggtgactaccggcggcttcaacagtgaaacagtacaggacgtcatgctgggagcggtggaacgccgcttcggcaacgatcttccgtcgtctccagtggagtggctgacggataatggttcatgctaccgggctaatgaaacacgccagttcgcccggatgttgggacttgaaccgaagaacacggcggtgcggagtccggagagtaacggaatagcagagagcttcgtgaaaacgataaagcgtgactacatcagtatcatgcccaaaccagacgggttaacggcagcaaagaaccttgcagaggcgttcgagcattataacgaatggcatccgcatagtgcgctgggttatcgctcgccacgggaatatctgcggcagcgggcttgtaatgggttaagtgataacagatgtctggaaatataa

SEQ ID NO: 481294 - DNA, 156 bp, Shigella flexneri; identical to SEQ ID NO: 474739

SEQ ID NO: 481295 - DNA, 219 bp, Shigella flexneri; identical to SEQ ID NO: 474644

SEQ ID NO: 481296 - DNA, 489 bp, Shigella flexneri; identical to SEQ ID NO: 33913

SEQ ID NO: 481297 - DNA, 354 bp, Shigella flexneri
atggtcaaaaaactacttggcggttttatccttgcctttgcttttttattatccggttgcggtggtgataatggtgaattagccggaacatatatagaaaaaaatcctgacaatggtgatgcacctcaaaaatggattatcaaatacgacaaaaaggataattattacactcaagaaatataccggaaatattctcccaatggggaatactctaattctaacactaatacttttctgtttagggatggcgactggcttggtggaaataaagaaaaacatttcattcgcgtgattgataaaaacacgcttcagttcagagatgatgaaaacgatctgtatatacgtacgaactga

SEQ ID NO: 481298 - DNA, 192 bp, Shigella flexneri
atgagtaatgttattgcatcgcttgaaaaggtactcctcccttttgcagttaaaataggaaagcagccacacgttaatgcaatcaaaaatggctttattcgcttaatgccgttaacccttgcgggggccatgtttgtattaattaacaacgtttttctaagctttggggaggggtcgttttttattccttag

SEQ ID NO: 481299 - DNA, 375 bp, Shigella flexneri; identical to SEQ ID NO: 475278

SEQ ID NO: 481300 - DNA, 2310 bp, Shigella flexneri; identical to SEQ ID NO: 481155

SEQ ID NO: 481301 - DNA, 771 bp, Shigella flexneri
ttgccccattgtgctgatggtgcggcggcaaccacgggcgacaatgccgatgggaggactgctgtaaaatcggcaaagccatttcctgtaagtaaacgacaggtatgggaagcttataaacgagtaaaagccaaccgtggggcggcaggcattgacgggcagacactggccgggtttgacgagaatgttacagacaatctctacaaactgtggaacagaatggcttccggcagttatatgccgcaggcggtaaggcgtgtggacattcccaaagctgacggtggtgtacgtccgctcggtattccggccgtgtcggaccggatcgcccagatggtcgttaagcagatactcgagccggtactggaacccctgttccatgcagactcgtatggttatcgaccgggtaaatccgcacaccaggcgattgcgcaggcgaggaaacgctgctggaagtttgactgggtggtggaagtcgatattaaaggcttcgttgatgatatcgatcatgacctgctactgaagacagtgcagcatcatactcaggcacgctgggtggtgatgtacattgagcgcaggctgaaggcaccggtgcaaatgccggatggagcaatgctggcacggggtcgaggaacgccgcagggcggcgtaatctcccccctgctctcaaatctgttcctgcactatgcctttgatatgtggatgcaacgtcagtttcccggcgttcccttcgaaaggtacgccgatgatgttgtatgccactctcggatatga

SEQ ID NO: 481302 - DNA, 252 bp, Shigella flexneri; identical to SEQ ID NO: 478639

SEQ ID NO: 481303 - DNA, 195 bp, Shigella flexneri; identical to SEQ ID NO: 478406

SEQ ID NO: 481304 - DNA, 375 bp, Shigella flexneri; identical to SEQ ID NO: 13405

SEQ ID NO: 481305 - DNA, 375 bp, Shigella flexneri; identical to SEQ ID NO: 13405

SEQ ID NO: 481306 - DNA, 375 bp, Shigella flexneri; identical to SEQ ID NO: 475278

SEQ ID NO: 481307 - DNA, 381 bp, Shigella flexneri; identical to SEQ ID NO: 458903

SEQ ID NO: 481308 - DNA, 267 bp, Shigella flexneri; identical to SEQ ID NO: 474742

SEQ ID NO: 481309 - DNA, 375 bp, Shigella flexneri; identical to SEQ ID NO: 475278

SEQ ID NO: 481310 - DNA, 375 bp, Shigella flexneri; identical to SEQ ID NO: 475278

SEQ ID NO: 481311 - DNA, 303 bp, Shigella flexneri; identical to SEQ ID NO: 477206

SEQ ID NO: 481312 - DNA, 375 bp, Shigella flexneri; identical to SEQ ID NO: 475278

SEQ ID NO: 481313 - DNA, 375 bp, Shigella flexneri; identical to SEQ ID NO: 475278

SEQ ID NO: 481314 - DNA, 840 bp, Shigella flexneri; identical to SEQ ID NO: 478435

SEQ ID NO: 481315 - DNA, 375 bp, Shigella flexneri
atgaaagcgctggaaatggcatgggaaacccgtggtaagcccggcggggtgatgttccacagcgatcagggcagtcattatacgagcaggcagttccggcagttattgtggcgataccagatcagacagagtatgagccggcgcggaaactgctgggataacagcccaatggaacgcttcttcaggagtctgaagaacgaatggatgtcggtggtgggttacgtaagcttcagcgaggcagctcacgccataacggactatatcgttggatattacagcgcactaagaccgcacgaatataacggtgggttacccccaaacgaatcggaaaatcgatactggaaaaactctaactcggtggccagtttttgttga

SEQ ID NO: 481316 - DNA, 375 bp, Shigella flexneri; identical to SEQ ID NO: 475278

SEQ ID NO: 481317 - DNA, 372 bp, Shigella flexneri; identical to SEQ ID NO: 475842

SEQ ID NO: 481318 - DNA, 543 bp, Shigella flexneri; identical to SEQ ID NO: 464540

SEQ ID NO: 481319 - DNA, 543 bp, Shigella flexneri; identical to SEQ ID NO: 464540

SEQ ID NO: 481320 - DNA, 573 bp, Shigella flexneri
gtgagcgagattaattaccaggcactgcgtgaggccgcagagaaggctacgaaaggtcagtgggctgttgaattcgacgatgagatttactccactgacggcgtgaaccatgagcaaatagctatggtgttcagtgaaaacgaatcgcgtgatgctgctttcatcgccgcagccaatcccgctaccgtcttggcgctgctggatgagctggaaagaaaccagcaatacatcaaatcccgcgaccaggagaacgaggaaattgcgctaacggtagggaagctgcgcgttgagctggaagccgcagaagcgctgaataaacacttggagttagcaatccgaaaagctgatggttgtagcgaggcgttaaggagaaaaacagaagccgcagagaagcgcatcgctgaactggaggcgcgggaggttgtgcttccgcaatgctatagcatgttgcatcgcgtcgattttgacgagccttaccacactgaaatggtttacaggcagcatcaggttcttgaggcactgcacaacgctggaataaacgtcaccgaagcatgtaaaggagaggcatcatga

SEQ ID NO: 481321 - DNA, 168 bp, Shigella flexneri
atgagaggacttgcatacaatcccggcattcttccggcagaaatgattattcgccaacgcgtaaagccaatgccatcgagagaggaattgcttaagagaaattcttttccatcagtgaatcaaaacaaatatctgaatgcgatgtggcgtaaaggaggcaaccagtga

SEQ ID NO: 481322 - DNA, 483 bp, Shigella flexneri
gtgagcaaactgtatgaaatagccaatgaatacgcaaagctgatggattcagatttagagccagagatgattgctgacacaatagaaggcatggaaggagaatttaccgataaaatagagcaacttcttgccattattaaaaatgaatatggttatgctgaacgcctcaaggacgaggcaaagtcactaaatgagcgagccgcagtaattcaaaataagattgacagcattatggcgtatatagcgtcatcgcttgaaatggttggcaagaaaaagattcgagcaggtattcaccaggtaacaatccgcaaaccgtcagaaactgtagaaatcatcgactcaagcgcccttcctcctgaatacgttgagttcgaaacgacaattaaagccgacaaactggcaatcaaacaccaactaaaagcaggaataaatatccccggtgctcaactcaaagttgggaaaccttcacttcttatcaaataa

SEQ ID NO: 481323 - DNA, 903 bp, Shigella flexneri
atgagcaatatcgttgaattcgttaaacagcaggagcagttattctgcggagcattgactgaacagacggtgacatgggctaaggaaagccagtttgcaattcagtatttccagaaaaacgattacctggctaaaacagcactggcaaatccaaccagcgcacagaacgccatcatcaatgttgcggcgatcggcatcaccttaaacccggccagcaaactggcttatctggttcctcgcgacggcatggtgtgccttgatatcagttacatgggattacttcatcttgcgcaatcgacaggatcaattaagtgggggcaatgcaaactggtgtactcaaacgacacctatgaatcaaatggccttgattcagcaccaacccacaaatacaacgcatttggtgagcgaggctctattgttggaggttattgcacggttaaaacagcagatggtgactacctgactgaagaaatgagtctggcagaaattaaagctgtggaagcaacgagcaaggcaaagaatggaccgtggaaaacattctgggaagagatggcgcgtaaaacaatagttaaacgcgccagcaaatactggcctaaagcccagcgactggataatgccattcacctgcttaacgaagatgaaggtatgcatcaggaaccagttatgccgcacaaatcagaggaagatatccgcgaagatgaacggaaacgccagcaggaaataatggataaagcacaacttctttgcgatgaaatggctcaggcagaaaacatggatgatttgaagcgatattttgcagaagcatatcgcctgacatctggaatgaaattgcagcagaacgtacaagccatttacatagaatgcaaagcgaaactggaggttgccagtgagcaaactgtatga

SEQ ID NO: 481324 - DNA, 309 bp, Shigella flexneri
atgattctgactctgaatgataagcgtgaaatatcgcaaatcatcgcaagttttaccgatgatgattacgaacgaatcaacagtgaagttgatcgcctctgcaaacgttgcgacccaataagcgaaatgcttcgctcatataaaccagatgaacacactaaggacgctatcgactggctggaagatgatgactgtaactatcaggaaaaagccgctgaatggttctgggatgcaataaccgaaagagttaaggctgaatatgccttcgcaatattcaaacgcagacacatttttggagaagctgcatga

SEQ ID NO: 481325 - DNA, 225 bp, Shigella flexneri
atgaatcagacatacattccatcatgcttgagaaatctgccaaagcagaaagcaaagccccgcaagcaagccataaaggacgctaaggcagaggttattgatcaagcaatacaattgctcagggaggagttaagaagtggcaagctcgaaggaatgatgatgccttatcagcgcggatatctatcggctattagtaagttggaagtattgaagagtgaattatga

SEQ ID NO: 481326 - DNA, 309 bp, Shigella flexneri
atgacggtaatcgtgtacgggaaatcaacatttgcaggaaatgccaaaactcgccgtcatgagcggcgcagaaagctggctatcgagcgtgatgctatatgcaacatcatcgattcgatcttcggcacagacagtgaggaacctgttcaggaagccccgagaaaacgtttaatcctttctgaaaaagcaatatcactcggcaacattcgtaaccaaaataccgacgaatgcagtggaagtatttgcctgccaaacgtagctctttacgcggcaggctaccggaaatcaaaacaactgacagccaggtaa

SEQ ID NO: 481327 - DNA, 654 bp, Shigella flexneri
atgaaatggtatgaactggctagatccagaatgaaagaactcggcataactcaagagaagttagctgaagagcttggtatgacgcagggtggaattggtcactggttgcgcggatctcgtcatccatctcttgacgagattggtgtggtgtttaaataccttggtattgataacgtctcattcaaccacgacggtacattttcacctgttggcgaatactcatctgcccccgttaaaaaacaatatgagtaccctgttttttctcatgttcaggccgggatgttctcgcctgagcttagaacctttaccaaaggtgatgcggagagatgggtcagcacaaccaaaaaagccagtgattgtgcgttttggcttgaagttgaaggtaattccatgaccgcaccaacaggatccaagccaagctttcctgacgggatgttaattctcgttgaccctgagcaggctgttgagccaggtgatttctgcatagccagacttggtggtgacgagtttaccttcaagaaactgatcagggatagcggtcaggtgttcctacaaccactaaacccgcaatatccaatgatcccatgcaatgatagctgttccgtagtagggaaagttatcgccagccagtggcctgaagagacatttagttaa

SEQ ID NO: 481328 - DNA, 216 bp, Shigella flexneri; identical to SEQ ID NO: 380568

SEQ ID NO: 481329 - DNA, 297 bp, Shigella flexneri
atggaacaaacaagttacagcaaactatcacagcgcgacgttgatcgcgcagaaacagatttactcatcaacctgtcaacgcttacccagcgcggtctggcaaagatgattggctgtcatgaatcgaagataagcagaacggactggagatttattgcttcggtcttgtgtgctttcggaatggcatcagacatcagtccgattagcagggcttttaagtatgcgcttgatggactcaccaataaaaaacgcccggaggcaaccgagcgttctgaacaaatccagatggaattctga

SEQ ID NO: 481330 - DNA, 306 bp, Shigella flexneri
ttgttaacgcccagccaaatctttttatataagcgccgctatgttccggtagaaggccatgcaccgtggctgttttctggcaatgccagcgaactggaacgcattcactatgaaggtatggatgatgtgatcctgctggattttctgcccaaagagttaggttttgatatgaacatgcatatcctctcttttgcaccaggtgccagccacggttatatcgaaacacacgttcaggaacatggtgcctatattctttccggtcagggggtttataacctcggtaatgctgccaacttactgatttag

SEQ ID NO: 481331 - DNA, 210 bp, Shigella flexneri; identical to SEQ ID NO: 9340

SEQ ID NO: 481332 - DNA, 834 bp, Shigella flexneri
atggtctgccagatggaactgaccagccatctgctgacggctgcagccttcggcacgatgaagaacagcgaaaatgagcttgctgagcaacttatagaacaaaccggcgataacactctgacgttaatggataaaggttattactcactgggactgttaaatggctggagcctggcgggagaacaccgccactggatgatacctctcagaaagggagcgcaatatgaagagctcagaaaactgagtaaaggcgatcatctggtgaagctgaaaaccagcccgcaggaacgaaaaaagtggccgggactgggaaatgaagtgacagcccgcctgctgaccgtgacgcgcaaaggaaaagtctgccatctgctgacgtcgatgacggacgccatgcgcttccccggaggagaaatggcggatctgtacagtaatcgctgggaaatcgaactgggatacagggagataaaacagacgatgcaactgagcaggctgacgctgagaagtaaaaagccggagcttgtggagcaagagctgtggggtgtcttactggcttataatctggtgagatatcagatgattaaaatggcggaacatctgaaaggttactggccgaatcaactgagtttctcagaatcatgcggaatggtgatgagaatgctgatgacattgcagggcgcttcaccgggacgtataccggagctgatgcgcgatcttgcaagtatgggacaacttgtgaaattaccgacgagaaggggaagggccttcccgagagtggtaaaggagaggccctggaaataccccacagccccgaaaaagagccagtcagttgcttaa

SEQ ID NO: 481333 - DNA, 594 bp, Shigella flexneri
atgccggggggggcagaccttgctatagataatactgggacgcgccctgtaactgtggttataaacggtggaaattttcatcgcgtgagcagtgcaagatacacgcacactaatattcaagtaacaagctcaggtgggggaaaagttacagtcatactcaacggcacaacgttccagagcgcaggggattatcagccaagtgcagatcgaccatactggataacaggagctaattgcgaggtagttgacattgggtgtgtttttacagaaacaaccagtaaggcaacatcggcttctgcattgtcagtcacacgctcgggaaaaattaacgccaatggtagtatcgacgttgctactggtgtttcatcggttaacgtggttgctacaggtgtgtatgaggttagcttttctcatccgctcgcagcagttgctagcggttatattgtgcagataacacctatatctgcgcctgattcagttagttgtgatgttacttatattggcgtagatacatttagggtgaccctgcgcaatacgcttagcggagcaggaatctccagttcgtttgcatttagcattaccaggctactataa

SEQ ID NO: 481334 - DNA, 543 bp, Shigella flexneri; identical to SEQ ID NO: 478585

SEQ ID NO: 481335 - DNA, 255 bp, Shigella flexneri; identical to SEQ ID NO: 8418

SEQ ID NO: 481336 - DNA, 2148 bp, Shigella flexneri
atggcgatttatcatctcagcatgaaaattatctccagaagcagcggctacagcgccgtagcttccgctgcctatcgttccggttcactgatgcttgatgagcgtaccggactgactcacgactacacccgcaaaagcggtgtggctgaggctgtgattctgacccccgccaccgcccctgcctggtgtacgaaccgtgccgaactctggaatgccgttgagaaggccgaacgccggaagaactcacaacttgcgcgggaaattgaactcgccatcccccacgaactgccgcaggatgccgcacgggaaaccgttctcgcctttgtcagagaaaactttgtcagtcagggcatgattgctgatgtggcgttccatcacatggataaaacaaatccccatgcgcacatcatgctgaccacgagggctatcggacctgctgggttcagcggaaaggtcagggactggaacgaccggacacatgccgagacgtggcgggcatcatgggctgaccatgcaaacagggcactggcgaacgccagttatcaggaagagatagaccatcgttcatacgagcgacaggggcttgagaaaacgcctggtattcacctcggaaagtctgcctgtgcgatggaaacacgcggtatcgaaacagaacgcggcgaacagaatcgtctgattaacaggcttaacctggaaatacagatttcccgcaccgaactcaggaacggagggctgacagagcctgcccgccgtgtggctgaccttctgaatatcgggcttcctgacaacgcaacttcgtacacactacgtgacattatcgaagcgttgccgaaggacagtaactcggcatggaaactcaccagtaatgccatgtcgatgatggcagatatgcaggcgacgcgcagacgctgggaagagctgaacaccgaacgaaaggaagcgatgagccatgctgccagcctgaaaaaatcatcgccgttttcgtccggtttttcccgtattcccctgatgcaatgggcggcaccggaataccgtagtgagcagggaaaaatccagtctctgagccagcaaatggaaaaattacgacagcattaccggaaggtggagaaacaggacattcccgcgagtcagatggcatttgaaaaacagtggcagcagtggggggaatccggccttgcagctctcagagcccagttgcttaaacgtgaagaggaattgcgccggaaggaacaggaagatactgaacgtagtcgcgcggagcagctcaggaaaaatgacaatgccgttatggattcaggggtgctgagagcagtcgttacggggtatggcgaggctcccatgcctggtaacggggaaatgacctgttaccttctgcttcacaaccggaacggagaatatacgctctgggggaacgagctggagaaataccgcaccagaatctttgagagtgttgatttaatgcgtgacaggagtggttatatctgtgaccgaagcgaaatcggccaacgtccgccactgcaacgtgtttattcctctgcaacctttgagcaactgctgacgcaggtttgccagacatggccgcaacatacccgcaatctccgccagccgaagacatggccggagtctttctgtcttggagaagaccgccagccagccatgccatcaccagcggcaaggaaggtggattttatgcagggacgtctgccaccgacgctgatgccggtcatgagttctgtcgaccgggaaacccgccagcttcagcttttgctggtcatgggcgtggatgactctctgggcggtgttatccggcttaatggtacgctgtatcccgcgtttgccgttccctcagccgataacaggcatctggtcatcagtgcgctgaccgataaggggttacggtatgcagggtatggtgttgccgtaaatcacgatgcagacagccacatatcacctgcaccagaactgatgcagtttcatctgaaaacccgtgaggcaccgctttttgctgccgtcaacacaccagaaaaacagccggatcatctgttccgctcgctgggttttaatcgtacctgggaggaatggcagcgcgaggaagatgcacgaacacacaccaccgagaggagacatgatcgcggttggtcacagtga

SEQ ID NO: 481337 - DNA, 702 bp, Shigella flexneri; identical to SEQ ID NO: 8416

SEQ ID NO: 481338 - DNA, 543 bp, Shigella flexneri; identical to SEQ ID NO: 464540

SEQ ID NO: 481339 - DNA, 834 bp, Shigella flexneri
atggtctgccagatggaactgaccagccatctgctgacggctgcagccttcggcacgatgaagaacagcgaaaatgagcttgctgagcaacttatagaacaaaccggcgataacactctgacgttaatggataaaggttattactcactgggactgttaaatggctggagcctggcgggagaacaccgccactggatgatacctctcagaaagggagcgcaatatgaagagctcagaaaactgggtaaaggcgatcatctggtgaagctgaaaaccagcccgcaggcacgaaaaaagtggccgggactgggaaatgaagtgacagcccgcctgctgaccgtgacgcgcaaaggaaaagtctgccatctgctgacgtcgatgacggacgccatgcgcttccccggaggagaaatggcggatctgtacagtcatcgctgggaaatcgaactgggatacagggagataaaacagacgatgcaactgagcaggctgacgctgagaagtaaaaagccggagcttgtggagcaagagctgtggggtgtcttactggcttataatctggtgagatatcagatgattaaaatggcggaacatctgaaaggttactggccgaatcaactgagtttctcagaatcatgcggaatggtgatgagaatgctgatgacattgcagggcgcttcaccgggacgtataccggagctgatgagcgatcttgcaagtatgggacaacttgtgaaattaccgacgagaaggggaagggccttcccgagagtggtaaaggagaggccctggaaataccccacagccccgaaaaagagccagtcagttgcttaa

SEQ ID NO: 481340 - DNA, 294 bp, Shigella flexneri; identical to SEQ ID NO: 480700

SEQ ID NO: 481341 - DNA, 543 bp, Shigella flexneri
gtgaaagaaagcaatcagcgatggtgctctgacgggttcgagttctgctgtgataacggagagagactgcgtgtcacgttcgcgctggactgctgtgatcgtgaggcactgcactgggcggtgactaccggcggcttcaacagtgaaacagtacaggacgtcatgctgggagcggtggaacgccgcttcggcaacgatcttccgtcgtctccagtggagtggctgacggataatggttcatgctaccgggctaatgaaacacgccagttcgcccggatgttgggacttgaaccgaagaacacggcggtgcggagtccggagagtaacggaatagcagagagcttcgtgaaaacgataaagcgtgactacatcagtatcatgcccaaaccagacgggttaacggcagcaaagaaccttgcagagacgttcgagcattataacgaatggcatccgcatagtgcgctgggttatcgctcgccacgggaatatctgcggcagcgggcttgtaatgggttaagtgataacagatgtctggaaatatag

SEQ ID NO: 481342 - DNA, 540 bp, Shigella flexneri
atgttggaacagcaatttgaagactttgaacagcaaaaacggcgagatcatcaggtacaagatcaatccaagaacgctaagcaaaaacgagatcggttgaatcctccagactggtcgcaggttactaaggctggttggaatatgttggacgctatatcagaaaaagttcctagagcatttcggttatattctttttttgcccagaatatagataaatcatgtggggctgttgtatgtgatcaaaaattcttagctgattatttcggtgttagtttaagaacgatccaatattggattggagatttagaaagtattggcgcaatagttaaaataccagtaggcatatattatgcctatgcattagatccttatcaggtatggcgtggatataacaatactaaaaaatatgcagcatttaacgcaaaaacattaactcaaaaagatggggttatagatcgtaaattgcggcttatgctttctaggcgtgaagagtttgaaagttccttaaagtactctaatcatgactcagagcaggggtga

SEQ ID NO: 481343 - DNA, 288 bp, Shigella flexneri; identical to SEQ ID NO: 28764

SEQ ID NO: 481344 - DNA, 207 bp, Shigella flexneri; identical to SEQ ID NO: 476087

SEQ ID NO: 481345 - DNA, 135 bp, Shigella flexneri
gtgttcctgttgcttgtcgtactggctgctgatgtcgaattgcaatttcccggtcacggactccagcttatcgccgcacgttatctgattgccttcgtaaatgaagtcgatagcgcggtacacatcgtcatataa

SEQ ID NO: 481346 - DNA, 336 bp, Shigella flexneri
atgagcgtgaccatgaaggataaggactttaatccgctgattgggcgtaccggtgttgatgtgggtaaatccttctccggtaaggactggaaagtcacagcccgcgccggccttggctaccagtttgacctgtttgccaacggtgaaaccgtactgcgtgatgcgtccggtgagaaacgtatcaaaggtgaaaaagacggtcgtattctcatgaatgttggtctcaacgccgaaattcgcgataatcttcgcttcggtcttgagtttgagaaatcggcatttggtaaatacaacgtggataacgcgatcaacgccaacttccgttactctttctga

SEQ ID NO: 481347 - DNA, 543 bp, Shigella flexneri; identical to SEQ ID NO: 464540

SEQ ID NO: 481348 - DNA, 543 bp, Shigella flexneri; identical to SEQ ID NO: 464540

SEQ ID NO: 481349 - DNA, 543 bp, Shigella flexneri; identical to SEQ ID NO: 481293

SEQ ID NO: 481350 - DNA, 822 bp, Shigella flexneri
atgaacaatgaactccccgatgatattgagctgcttaaagccatgttgcgtaagcaacagagtcggcttcgacagtatgcctgtcaggtcgcgggctatgagcaggaaattgaacggctgaaagcgcaactcgacaggttgcgtcgtatgttgttcggccagagttcagagaaaaagcgtcataagcttgaaaatcagatccgacaggcagaaaaacgactgtcggaactggaaaaccggctgaacacagccagaaatcttctggaagatgcatcgtcagtcacagattcacctgacaccagtcccccgtcagaaaacccgatcgccagtaagcctgaattcccgggacgaaaatcttcacgaaaaccgctgccggcagaacttccccgggagacacatcgccttctgcctgctgaaaccagttgcccggcctgtggaggtgttctgaaagaaatgggggaaacaatctcagagcaactggatatcattaataccgcctttaaagttatcgaaaccatacgtcccaaactggcctgtagccggtgtgatgtcatcgttcaggcaccacttcctcctaaaccgatcgaacgcggttatgccagtgcagggttacttgcacggatcctggtcagcaaatatatggaacatatccctttatatcgccagtcagaaatatacgcgcgacagggcgtggagctgagccgtaataccatggtgcgctgggtatcagaaatggcagacaaactccgtcctctgtatatagcgctgaatgactatgttctggaggcaggaaaggtgcacgcagatgacactctgaggtag

SEQ ID NO: 481351 - DNA, 378 bp, Shigella flexneri; identical to SEQ ID NO: 478651

SEQ ID NO: 481352 - DNA, 372 bp, Shigella flexneri
atgaaacaggattttcgctgcggttgctggctgatggagaaaccggaaaccgcaatgaaagccatcacacgcaatcttgatcgcgaactctggcgtgatctgatgcaacgttccgggatgctgagtctgatggatgcgcagacccgggacacatggtaccggtcactggagtacgataattttccggaaatcagcgaagcgaacattctgagcacatttgaacaactgcaccagaataaggatgaggtgtttgagcgaggggtgatcaacgtcttcagagggctgaactggaattacaaaaccaattgcccctgtaaatttggcagtaaaattatcgtcaacaatctggtgagatgggaccggtggggataa

SEQ ID NO: 481353 - DNA, 207 bp, Shigella flexneri; identical to SEQ ID NO: 476087

SEQ ID NO: 481354 - DNA, 543 bp, Shigella flexneri; identical to SEQ ID NO: 478584

SEQ ID NO: 481355 - DNA, 198 bp, Shigella flexneri
atgaaatcattaaccacggaaacagcgctggatattctgattgcgtggctgcaggacaatattgactgcgaatcagggattatcttcgacaacgatgaggataaaacggattcggcagcactgctgccctgtatcgaacaggcccgggaggatgtccgtaccctgcgtcatctgcagcttctgcaccagaaccggtga

SEQ ID NO: 481356 - DNA, 195 bp, Shigella flexneri
atgctggagaatgagtaccctcagagggtggctgaccggctgaaagcatccggtctgagcgatgatgcggatgcggagagggaagccggtgcacaggtgatgcgtgagactgaacagcagatttaccgtcagctgactgacgaggtactggccctgcgattgtctgaaaacggctcacaactgcaccattcataa

SEQ ID NO: 481357 - DNA, 156 bp, Shigella flexneri; identical to SEQ ID NO: 474739

SEQ ID NO: 481358 - DNA, 156 bp, Shigella flexneri
atgctggagaatgagtactctcagagggtggctgaccggctgaaagcatcaggtctgagcggtgatgcggatgcggagagggaagccggtgcacaggtgatgcgtgagactgaacagcagatttaccgtcagctgactgacgaggtactggcctga

SEQ ID NO: 481359 - DNA, 303 bp, Shigella flexneri
atgagcagaaaaacccgacgttactctaaagagttcaaagccgaagctgtcagaacggttcttgaaaatcaactttcgatcagtgaaggcgcttcccgattatctcttcctgaaggcactttaggacaatgggttaccgccgccagaaaagggctcggtactcctggttcccgcacgctggctgaactggaatctgaaattctgcaactgcgtaaggcgttaaatgaagctcgccttgagcgagatatattaaaaaaagcaacagcgtattttgcacaggagtcgctgaaaaatacgcgttaa

SEQ ID NO: 481360 - DNA, 207 bp, Shigella flexneri; identical to SEQ ID NO: 24440

SEQ ID NO: 481361 - DNA, 138 bp, Shigella flexneri
atgggttaccgcacggtggctgaactggaatctgaaattctgcaactgcgtaaggcgttaaatgaagctcgccttgagcgagatatattaaaaaaagcaacagcgtattttgcacaggagtcgctgaaaaataggtaa

SEQ ID NO: 481362 - DNA, 288 bp, Shigella flexneri
atggaacaacaagaattacctcgctggcagtgtcacaagcaggtatgggcgttaaagattcgacatatcgaccacaaaccaaacccagacctttctggcgtgtcgggcgcatcaagctatggggccaccattcacccggaagatggcacatacgcgccattcgatgtaagccctgagtacgttaacaaacatcaaccggtcgctggcgggtattacgttgtgtatgaggatggctatgcatccttctctcctgctgactcgtttgaatccgggtacacgaaaatctga

SEQ ID NO: 481363 - DNA, 489 bp, Shigella flexneri
atgactacagtcgcatgggatggaaagacactggcatctgacacccaggcatcaactggcagtgtcgtttgctccctttctgaacagaagatatacaccccgccagagtcaggttgggagatttacggaagcaaagtccttgccttcggttgctctggtgactgcggcgcagagatggaattacaggatctgcttaagcacaacctcacgtatgcctccgagttcctgccgacattctccttcacggctctggctatcatcggtgctgggcgagcatacatcatcaccaaagagaaaggcgaaacgcgggcgagcatatcgctacaggttgagccatacgcaataggcagtggcgacctgatcgcgcgcactgccatgcactgtggcaaaaatgcgagagaagcggtacaagtcgcaattgatcttgactgctattccggcggcagcgttgattcgttccccgctgggaagcaaacagaagggaaataa

SEQ ID NO: 481364 - DNA, 426 bp, Shigella flexneri
atggcgactgagaaaaagaaaggtggtcgcccctctgattatatgccggaggtggctaatgacatttgcgcattgctttcctccggtgagagtctgcgcaaagtttgcgaacgcccaggaatgccgagcaaaacatcagtttttcgctggctggctgaacatcaggagtttcgtgaccagtacgcgaaggcaacagagactcgggccgactctattttcgaagagatattcgaaattgctgacggcgtaatccctgatgccgccgaggtggcaaaggcaagacttcgcgttgatacccgcaaatgggcgctggccagaatgaatccccgtaagtatggcgacaaggtaactaatgagcttgtcggcaaagacggcggcgcaatccagattgaaacatcaccgatgagcactctattcggaaaatga

SEQ ID NO: 481365 - DNA, 1413 bp, Shigella flexneri
atgacctcgattaatcctatctttgaaccgttcattgaggcgcatcgctacaaagtcgccaaaggcggtcgaggtagcggtaaatcatgggcaattgcgaggctgcttgttgaagcggcgcgccgacagcctgtgcgtattctctgcgctcgtgaactgcaaaacagtatcagcgattcggtaatccggttgcttgaagacaccatcgagcgggaagggtattcggctgagtttgaaattcagcgttcaatgattcgtcatctcggaactaatgctgaattcatgttctacggcatcaaaaacaacccgacgaagattaaatcgctcgaaggcattgatatctgctgggtggaagaagcggaagcggtaacgaaggaatcatgggatatcctgattccaaccatccgtaagccgttctctgaaatatgggtgagctttaacccgaagaacatcctcgacgatacctatcagcgattcgtcgtaaatcctcctgatgatatttgtctgctgacggtgaactacaccgacaacccgcactttcctgaagttctccgtctggagatggaagagtgtaaacgcagaaatccgacactgtatcgtcacatctggcttggtgagccagtaagcgcaagtgatatggcaatcatcaaacgtgaatggcttgaagccgcaaccgatgcgcacaagaaactcggatggaaagcgaaaggcgctgttgtttctgcacatgacccatcagatacagggccggatgccaaaggttatgcatcgcgccacggttcggtagttaagcgcattgccgaaggtctgctgatggacatcaacgagggtgctgactgggcaacttcgctggcgattgaagacggtgctgaccattacctgtgggatggtgatggtgttggtgccgggctacgcagacagacaacggaagcgttctccggcaagaaaatcaccgccacgatgttcaagggcagcgaatcgccattcgatgaagatgctccgtatcaggccggagcatgggctgatgaagtcgtacagggtgacaacgttcgcactattggcgatgtgttccgcaataagcgagcacaattctattacgcgctggctgacaggctgtatctgacatatcgggcggttgttcacggtgagtatgcagacccagacgacatgctgagtttcgacaaagaagcgataggcgagaagatgctggagaagctgtttgcagaactgacgcagattcagcgcaaattcaataacaacgggaagctggagctaatgactaaggtcgaaatgaagcagaagctcggtattccatctcctaacctggctgatgcgctgatgatgtgtatgcattgcccggcattggtccgcgaagaaacagaaatatacgttccctcatcctccggttggtaa

SEQ ID NO: 481366 - DNA, 2091 bp, Shigella flexneri
atgctcaggtttgaccgcgcctattctccacagaaggaagtgcgcgaaaagtgcattgaagctacgaggtttgctcgtgtccccggaggtcaatgggaaggagcaacggcggctggaactaagcttgatgagcagttcgagaagtatcctaagtttgaaatcaataaggtagcaactgaacttaaccgcatcattgcagaataccgcaataacagaatcactgttaagtttcgtcctggtgacagagaggcaagcgaagagttagccaataaattaaatggtctgttccgtgctgactacgaagaaactgatggcggtgaggcttgcgataatgcatttgacgacgctgctactggtggtttcggttgcttccgtttgacgtcgatgctggtcaatgaatacgaccccatggacgatcgtcagcgtattgctattgaaccaatatacgacccgtcgcgctctgtgtggtttgaccctgacgctaagaagtacgacaaatctgacgcgttgtgggcgttctgtatgtattcgttgtcacctgaaaaatatgaggctgaatacgggaagaaacctcctacttctctggatgtaacgtctatgaccagttgggaatataactggtttggtgcagatgttatttacatagcgaagtattacgaagttcgtaaagagtctgttgacgtcatcagttatcgacatccaatcactggagagattgcaacatacgacagtgatcaggttgaagatattgaagatgaactggcaatagctggatttcatgaagtggcaaggcgctcagtgaagcgccgtcgtgtgtatgtatccgtagtggatggtgatggtttccttgagaaacctcgacgtattcctggtgagcatatccccctcatcccggtttatggaaaacgctggttcattgatgacattgagcgtgtcgaagggcacattgcaaaagcaatggatccacagcgtttgtataaccttcaggtatcaatgctggctgatactgcagcgcaagaccccggtcagatccctatagttggcatggagcaaattcgtggacttgagaagcactgggaggctcgcaacaagaaacgaccagcgttcttgccgttgcgcgaagtgagagataaatctggcaacattatcgctggagctaccccggcaggatatacacagcctgcggttatgaatcaggcattggctgcattactacagcaaaccagtgcagatattcaggaggttacaggcggcagtcaggccatgcagcagatgccaagtaatattgctcaggaaacggttaacaacttgatgaacagagcagatatggcttcgtttatctatctggacaatatggcgaaaagtcttaaacgcgctggtgaagtatggctgtcaatggcgcgtgaagtgtacggttcagaacgtgaagtgcgcatcgttaacgaagatggaagtgatgatatcgctgtcctgagcgcacaggttgttgacaggcaaacaggggctgttgttgcgttaaatgacctttctgtcggtcgatacgatgtgacggttgatgttggaccaagctacacagcacgacgtgatgcaacggtttctgtactgacaaatgtccttagctctatgcttccaacagacccaatgcgcccggcaattcagggtattattctggacaatatcgatggcgaaggccttgatgacttcaaagagtacaaccgaaaccaactgctgatatctggtattgcaaaaccacgcaatgagaaagagcagcagattgttcaacaggcgcaaatggcagcacaaagccagccaaatcctgaaatggttctcgctcaggcgcaaatggtagcagcgcaggcagaagcgcaaaaagcaactaacgaaactgctcaaactcaaatcaaagcatttactgcccagcaggatgcgatggagagtcaggcaaacactgtctataaactggctcaagccagaaacatcgatgacaaagcagtgatggaggcaatacgccttctgaaagatgtcgccgagtcacaacaacagcaattccagtcaccaccacagtcaccggcagacttaatgccgagttaa

SEQ ID NO: 481367 - DNA, 885 bp, Shigella flexneri
atggaaaacgaactgatcatcgacggtcaggttattgacctgtctgaaacacaggaaaatgcagaagaaaccatcatccaaacagagtcacagcctgagaatgaaagccaggatgacaacggtaaagaggtggcaactgagcctgaaaaaaccgaagagacaccagaagattacgccttgcgtattggtgatgaagaaattcagcttaacgctgacgatgatgatcacattgacgggcaacctgcaccacaatgggtgaaagatcttcgcaaaggcttcaaagaaacacagaaagaaaaccgtgagttgcgccgccagcttgaggaagcattagccaagcctgcggaacatcagcaaccacaaccagacgctattccaccaaaaccgactcttgagtcgtgtgattatgacgaacaggcgtttgaacaggcattgactgattggcatgagaaaaaaggccgtgtcgaacagcagcagcaacaaaaactacgtcagcaacaggaataccaacagcgtttccagcaaagggtagaagcgcataaacaacgggcagccaaacttcctgtgaaagattatcaggaaatggaggccattgttcttagtgagctaccaccaattcagcaggaaatcatcattcactgtgcagacgaaggctctgaactactcgcctatggcttaggtaagagccagcaattacgccagcgtgtagccgctgagacagatccaattcgcgcagcattcctcttggggcagattagcaaacaggtaagccttgctccaaaaccaaagaaagccatcaagccagagccggaagtacgtggtggcggtgctgatgcgaaacaagacgaattcaacaaattatgccccggcgcaaaaatcgaataa

SEQ ID NO: 481368 - DNA, 1272 bp, Shigella flexneri
atgcctaacaatctcgacagtaacgtcagtcaaatcgttctgaaaaaattccttccgggttttatgtcagatttagttctggcgaaaaccgtagaccgtcagttgctggcaggtgaaatcaactccagcactggcgatagcgttagctttaaacgtccgcatcaattctcatccctccgtactcccactggtgatatttcagggcaaaataaaaacaacctgatctcaggtaaagctacggggcgtgtaggtaactacatcactgttgctgttgaatatcagcaactggaggaagcgatcaagcttaaccaactggaagaaattctcgcgccggttcgccagcgaatcgttaccgaccttgaaacagagcttgctcacttcatgatgaataacggtgcgttgtcacttggtagccccaatactccaatcaccaaatggtctgatgttgcgcagacggcatctttcctgaaagacctcggcgttaatgaaggtgaaaactatgctgtaatggatccatggtctgcacagcgacttgctgatgcgcagactggtttgcacgcttcagatcaattggttcgtactgcatgggagaatgcgcagattccaaccaattttggcggcattcgcgcactgatgtctaatgggcttgcctctcgtacgcagggggcatttggaggaacactgacagtcaaaacacagccaactgttacctataacgcagttaaagactcataccagttcactgtaacattgaccggagcgacagccagcgttacaggttttctgaaagctggtgatcaggttaaattcaccaatacctactggctgcaacagcagaccaaacaggcgttgtataacggagccacaccaattagcttcactgcaacggttactgctgatgctaattcagacagcggtggcgatgtgacggttacgctttctggtgttccgatttatgacactacaaacccgcagtacaactctgtaagtcgtcaggtagaggcaggcgatgccgtatctgtagtaggcactgctagccagacaatgaagccaaacctgttctataacaagttcttctgtggacttggctctatcccactgccgaaactgcacagtattgattctgctgttgcaacatatgaaggtttctccatccgcgtacataaatacgcagatggcgatgccaacgtgcaaaaaatgcgcttcgacttacttcctgcatatgtgtgctttaaccctcacatgggcggtcagttcttcggtaatccgtaa

SEQ ID NO: 481369 - DNA, 186 bp, Shigella flexneri
atggatcgcatgagtgtattccttgccgcagataacgaatccggacatgtacaggccgttatcgcagaaaaagacttccagtttttcgaaaagttgggctttgttgcctcagttgatgaattgaaaccgaccagtaagcgaggtcgtaaggcggcagacaatggcaacagtactgacaaagggtga

SEQ ID NO: 481370 - DNA, 483 bp, Shigella flexneri
atggcaacagtactgacaaagggtgagatcgtcctttttgcgcttcgtaagtttgctattgcttctaatgcatcgctgactgatgttgagccgcaatcaattgaagatggtgtaaatgatctggaagatatgatgtccgagtggatgattaaccccggcgacattggttacgctttcgcaactggagatgagcagccattaccagatgatgagtcaggtcttccaagaaaatacaaacacgcagtaggctatcagttattgctgagaatgctatctgattacagccttgaaccaactccgcaagttctcagtaacgcccaacgctcatatgatgccttgatgaccgacactctggttgttccttcaatgcgacgacgtggagattttcctgtaggacagggtaataaatatgacgtgtttacatctgaccgatattatccaggcgatctccctctgattgatggcgatatcccaaacgcatag

SEQ ID NO: 481371 - DNA, 186 bp, Shigella flexneri
atgctcgttcactttattaatatgaaattcaacgggaatctcagggaagaaactttcaagattttgtttcttgaaatagtccccggttttaaatacgacacggtaatcgccagtagtcgcagtttgctcgggccacagtgccttaattcgtccatccttatctgttttggcggtattaagttgtaa

SEQ ID NO: 481372 - DNA, 195 bp, Shigella flexneri; identical to SEQ ID NO: 478406

SEQ ID NO: 481373 - DNA, 1182 bp, Shigella flexneri
atgacggcgaaaacagcaccgaaagtcacgctgtgggagttcttccagcagttaggcaaaaccttcatgttacccgtggcattattgtcgttctgcggcattatgctcggcattggtagttctcttagcagccatgatgtcataaccctgatcccggtcctgggcaaccccgtgttgcaggctatctttacctggatgagtaagattggctcgtttgcttttagtttcctgcctgtcatgttctgtatcgccatcccgctgggcctggcacgcgaaaataaaggcgtagcggcattcgctggcttcgtcggttatgcggtaatgaacctcgcggtaaacttctggttgaccaataaaggcattctgccaaccacagatgccgccgttctgaaagccaataacatccagagcattcttgggatccagtcgatcgataccgggatcctcggtgcggtgatcgccggtattatcgtctggatgctgcatgagcgtttccataatatccgcctgccggatgcgctggcattcttcggcggtacgcgcttcgtaccaattatctcctcgctggtgatgggccttgtcggcctggtgattccattagtctggccgattttcgccatgggtattagcggcttgggccatatgataaacagcgcgggtgatttcggaccgatgctgtttggtaccggtgaacgtctgctgttgccgtttggtctgcatcacattctggtggcattaattcgctttaccgacgcaggcggcacgcaggaggtctgcggtcaaaccgtcagcggcgcactgaccatcttccaggcgcaattgagttgcccgaccactcacggtttttctgaaagcgtcacgcgtttcctttcgcaaggtaaaatgcctgcgtttctcggcggtctaccaggtgcagcgttagctatgtatcactgcgcgcgcccggaaaatcgccataaaattaaaggtctgctgatttctggcctgatcgcctgcgtcgttggcggcactaccgaaccgctggaattcctgttcctgttcgtagcgccagttctgtatgtcatccacgcgctgttaaccggcctcggcttcaccgtcatgtctgtgctcggcgtcaccatcggtaataccgacggcaatatcatcgacttcgtgggtaatgctgccaacttactgatttag

SEQ ID NO: 481374 - DNA, 957 bp, Shigella flexneri; identical to SEQ ID NO: 476538

SEQ ID NO: 481375 - DNA, 1215 bp, Shigella flexneri; identical to SEQ ID NO: 476539

SEQ ID NO: 481376 - DNA, 690 bp, Shigella flexneri; identical to SEQ ID NO: 474568

SEQ ID NO: 481377 - DNA, 198 bp, Shigella flexneri; identical to SEQ ID NO: 81716

SEQ ID NO: 481378 - DNA, 483 bp, Shigella flexneri; identical to SEQ ID NO: 479970

SEQ ID NO: 481379 - DNA, 216 bp, Shigella flexneri; identical to SEQ ID NO: 5123

SEQ ID NO: 481380 - DNA, 717 bp, Shigella flexneri
gtggctaacaaagccaacgaggccggacagggcgcttatgatgcacaggtcaggaacgatgagcaggatgtgattctcgctgaccatgagcagcgaatttctgctgcggaagcaacgcttgttaatcatgaggagcgaatcagacaggcagaatcaactcttcaggaccatgaaacacgaatagctcagaatgaaagcgatatttcgtcgcttgacacaagagttcagtcgctggagtcgcaggtttcagaccatgaaacgcgcatcgatgctctggagtatgcaaccacacgcaagaagtcagaggttgtttactctggtgtatctgtaaccatcccgacagcgccgaccaaccttgttagcctgctgaaaacgctcacaccgtcatccggctcgttggcaccattcttcgacaccgttaacaacaagatggttgtgttcaacgagaacaaaaccctgctcttcaagttgtcgattgtcggcacgtggcccagcggaaccgccaacaggtcaatgcagctaaccttttccggctctgttcctgacacactggtcagcagtcgtaatgcggcgacaacaaccgacaacatcctgttagctacgttcttcagcgtggataaagacggctttcttgccacaaatggcagtacgttaaccattcagtcgaatggtgcggcgtttactgccacaaccatcaagataatcgcggagcagtga

SEQ ID NO: 481381 - DNA, 195 bp, Shigella flexneri; identical to SEQ ID NO: 474694

SEQ ID NO: 481382 - DNA, 219 bp, Shigella flexneri; identical to SEQ ID NO: 13129

SEQ ID NO: 481383 - DNA, 570 bp, Shigella flexneri
gtggcgaacaaggccaacgaggccggacagggcgcttatgacgcacaagtcaggaacgatgagcaggatgtgattctggtcgatcacgaagaaagaattcgtcagctccgcattgaagtagatgaccatgaaatccgtattgctgcgaatactgcggcaattgcagcgctggatgtcagactaaccacggctgaaggtgaaatagtcaccttgcaggctgatgtcagtgctcttgatggtagagtgacggaggctgaaggaaatatttctgcattgcaggacgattacgtatcgaaaacagcaacagcaacacaatcgctggcatcccccctcaacgtaacaacatcctattcagtcggcggcaccaaggttatcggtgctcgtcagacaggatggacagcggcaaccggaacggcactcctcggcgcattcaacgctaaccagtcatacactgtcggcactacgtacacgcaatccgaagtcgcagcactcgctacaggtttgcagcaggcgcggcagcgtattctggcgcttgaaacggcacttagattacatgggctgattgactga

SEQ ID NO: 481384 - DNA, 219 bp, Shigella flexneri; identical to SEQ ID NO: 13129

SEQ ID NO: 481385 - DNA, 615 bp, Shigella flexneri
atgaaacgtgtcggaataaaggctcaggtcggataccgaagcccgcgggcacgtaaaggcgaggccagtatcgtgtcacccaacaggctccagcgacagttcaatccggatgctcctgatgagcgttgggtaacggacataacctacatcaggacccacgaaggctggctgtatcttgccgttgttgttgatctgttctcacgcaaaattatcggctggtccatgcaatcccggatgacaaaggacattgtcctgaacgcactgctgatggctgtatggcggcgtaatcccgaaaaacaggtgctggttcattcggatcagggcagtcagtacacaagccatgagtggcagtcgttcctgaaatcacacggcctggagggtagcatgagccgtcgcggtaactgccatgataatgcggttgcagaaagttttttccagttgttgaaacgtgaacggataaagaaaaagatctacggaacgcgggaagaagcccgcagtgatatttttgattacatcgaaatgttttataacagtaagcgtcggcatggttctagcgaacagatgtcaccgacagaatatgaaaaccagtattatcaacggctcggaagtgtctag

SEQ ID NO: 481386 - DNA, 216 bp, Shigella flexneri; identical to SEQ ID NO: 5123

SEQ ID NO: 481387 - DNA, 219 bp, Shigella flexneri; identical to SEQ ID NO: 13129

SEQ ID NO: 481388 - DNA, 195 bp, Shigella flexneri; identical to SEQ ID NO: 464447

SEQ ID NO: 481389 - DNA, 195 bp, Shigella flexneri; identical to SEQ ID NO: 464447

SEQ ID NO: 481390 - DNA, 171 bp, Shigella flexneri
atggaatcacccgatagttataaaacaacgtttggattacttcgtaagtatatgattgaaccggcggtaaaggagttaacagagaaagatcactggatgatcgactggaaacctattaagaaggggagaaaagtcgttcgtcttgagttctggtttaggaaagaaaactaa

SEQ ID NO: 481391 - DNA, 306 bp, Shigella flexneri; identical to SEQ ID NO: 481330

SEQ ID NO: 481392 - DNA, 594 bp, Shigella flexneri; identical to SEQ ID NO: 481333

SEQ ID NO: 481393 - DNA, 216 bp, Shigella flexneri; identical to SEQ ID NO: 5123

SEQ ID NO: 481394 - DNA, 252 bp, Shigella flexneri; identical to SEQ ID NO: 478639

SEQ ID NO: 481395 - DNA, 381 bp, Shigella flexneri
atgctgggagcggtggaacgccgcttcggcaacgatcttccgtcgtctccagtggagtggctgacggataatggttcatgctaccgggctaatgaaacacgccagttcgcccggatgttgggacttgaaccgaagaacacggcggtgcgtagtccggagagtaacggaatagcagagagcttcgtgaaaacgataaagcgtgactacatcagtatcatgcccaaaccagacgggttaacggcagcaaagaaccttgcagaggcgttcgagcattataacgaatggcatccgcatagtgcgctgggttatcgctcgccacgggaatatctgcggcagcgggcttgtaatgggttaagtgataacagatgtctggaaatatag

SEQ ID NO: 481396 - DNA, 525 bp, Shigella flexneri; identical to SEQ ID NO: 477205

SEQ ID NO: 481397 - DNA, 822 bp, Shigella flexneri; identical to SEQ ID NO: 481350

SEQ ID NO: 481398 - DNA, 540 bp, Shigella flexneri
ttgcagagccgcttttttacgatactgagatcaaacagacataatctatgcggagatttacagcagggcatggttcacaaatctgacagcgatgaattatcggcactgcgggcagaaaatgctcgaatcatcaagcccctgttacctcctgaacccgccacaccacgggccggacgcccatgggctgagcaccgtaaaatcatcaatggcatgttctgggtgttatgttccagtgcaccatggcgcgatttacccgaacgatatggggcatggaaaactgtttataaccgctttaaccgatggtcaaagtcaggcgtgattaatattattttcaacaggttgctttcgctacttgatgcaaacggctttattgactggtctgccaccgcgctggatggcagtaatatccgggcgctgaaatgtgccgccggtgctcaaaaaaacatcccgatatcgacggagataatgggccgggtcgctctcgcggcggttttggcaccaaaatccatctggcaacagacggaagtggcctcccgttaa

SEQ ID NO: 481399 - DNA, 156 bp, Shigella flexneri; identical to SEQ ID NO: 474739

SEQ ID NO: 481400 - DNA, 180 bp, Shigella flexneri; identical to SEQ ID NO: 474761

SEQ ID NO: 481401 - DNA, 252 bp, Shigella flexneri; identical to SEQ ID NO: 477060

SEQ ID NO: 481402 - DNA, 756 bp, Shigella flexneri; identical to SEQ ID NO: 476359

SEQ ID NO: 481403 - DNA, 282 bp, Shigella flexneri
atgaatcttgtgacactcaaaacgtggggaaaactcagatatccggataacccaccatcaatatcaacgctgagacgatgggcaaggaatggaaacatttatcctgcacctgaactacacgggaggagttacagggtggttccggaggctttctatatcaacccaaataaggttgataccgatataacacaccatcagcctaatgggcgacaagggagagacagtccgttaatggagaagttaaaacatgcagcggaaaaaatacgatcccaatttgcctag

SEQ ID NO: 481404 - DNA, 153 bp, Shigella flexneri; identical to SEQ ID NO: 476447

SEQ ID NO: 481405 - DNA, 1071 bp, Shigella flexneri; identical to SEQ ID NO: 476467

SEQ ID NO: 481406 - DNA, 153 bp, Shigella flexneri; identical to SEQ ID NO: 475863

SEQ ID NO: 481407 - DNA, 342 bp, Shigella flexneri
atgtataataacaaaatcgacagcaacagaaaaataagacatgattgggttgatgctttaaaatttctcggtatttttgctatatatttaggtcaccttgggttgggggctggcaaattgtatccttttgtttttagttatcacgtcccactattctttttcgctgctggtttttttactatcaaaaaaaatgacttatctgttttcgattatatcaagtcaaagttttacagattaatgattccatatttcacttttgcattttctatattaataataaacacaattaactcaggtgagacgattgattatatatacaaccacatttatgatataatataa

SEQ ID NO: 481408 - DNA, 366 bp, Shigella flexneri; identical to SEQ ID NO: 480664

SEQ ID NO: 481409 - DNA, 177 bp, Shigella flexneri
gtgttcctgttgcttgtcgtactggctgctgatgtcgaattgcaatttcccggtcacggactccagcttatcgccgcacgttatttgattgccttcgtaaatgaagtcgatagcgcggtacacatcgtcatacaggcctgttttcagcacacaccattgcggaccattggcgcttga

SEQ ID NO: 481410 - DNA, 366 bp, Shigella flexneri; identical to SEQ ID NO: 462994

SEQ ID NO: 481411 - DNA, 180 bp, Shigella flexneri
atgaataagccgcaactggcggaatcacagaagaccgctttgcttaccgaagcggagtctgtcatccggccgccggggtgtgcggtcaggctgaacagagaaacggatgaatccggggaggcccgggggcgggcctctgtttttccggagtcagtccggtctgtggtttatgcgatgtga

SEQ ID NO: 481412 - DNA, 378 bp, Shigella flexneri
atgcagtcgttgtacgactggatacagttgcagaggaaaacgctgtcgaaacatgcggagatggcgaaggcgttcgactatatcctgaatcactggaatgcgctgaacgagttctgtcgtgacggctgggtggaaatagacaacaacatcggtgaaaacgcgttacgatcggtggcggttggaagaaaaaattatctctttttcggctcagacaagggaggagaaagtgcggcgatcatctacagtctgctggtcacctgcaaacagaacgaagtggagccggaggactggttgcgcgaagtgatcgagaagctcaatgactggccgtcgaaccaagtgcataaactgctgccctggaacttctcgtctgtaaaataa

SEQ ID NO: 481413 - DNA, 294 bp, Shigella flexneri
atgagaaccgacagcaacaaggcatggaagggagcgttaaagcgggcaggcattagcaacttccgcttccatgacctgaggcatacctgggcaagctggctggttcagtccggtgtctctcttcttgcgcttaaagagatgggaggatgggaaactctcgaaatggttcaaagatacgcccacctttcagccgggcatcttaccgagcacgcgagcaaaatcgatgcgattataagtcgcaatggcacaaatacggcacaagaggagaacgtggtttacttaaatgcgaggtaa

SEQ ID NO: 481414 - DNA, 363 bp, Shigella flexneri; identical to SEQ ID NO: 476531

SEQ ID NO: 481415 - DNA, 210 bp, Shigella flexneri; identical to SEQ ID NO: 477043

SEQ ID NO: 481416 - DNA, 363 bp, Shigella flexneri
atgttaaagctatttgcaaagtacacatctataggcgtgctgaacacacttatacactgggtggtttttggtgtatgtatctatgccgcgcataccaatcaggctatggcaaacttcgcaggtttcgttgtggctgtgagttttagcttctttgcgaatgcaaaattcacattcaaagcatcaactacaacgatgcgctacatgttatatgtcgggttcatgggaacactgagtgctactgttggatgggttgctgatagatgttcacttcctccaattgtcactcttgttaccttctccgccatcagcttggtgtgcggtttcgtctattcaaagttcattgtctttagggatgcgaaatga

SEQ ID NO: 481417 - DNA, 363 bp, Shigella flexneri; identical to SEQ ID NO: 476531

SEQ ID NO: 481418 - DNA, 225 bp, Shigella flexneri; identical to SEQ ID NO: 133446

SEQ ID NO: 481419 - DNA, 156 bp, Shigella flexneri; identical to SEQ ID NO: 474739

SEQ ID NO: 481420 - DNA, 378 bp, Shigella flexneri; identical to SEQ ID NO: 474621

SEQ ID NO: 481421 - DNA, 186 bp, Shigella flexneri
gtggccgccggagaacaggtcgttcctgcctctgaacttgctgctgccatgaagcagattaaagaactccagcgcctgctcggcaagaaaacgatggaaaatgaactcctcaaagaagccgttgaatatggacgggcaaaaaagtggatagcgcacgcgcccttattgcccggggatggggagtaa

SEQ ID NO: 481422 - DNA, 375 bp, Shigella flexneri; identical to SEQ ID NO: 475895

SEQ ID NO: 481423 - DNA, 1035 bp, Shigella flexneri; identical to SEQ ID NO: 472571

SEQ ID NO: 481424 - DNA, 321 bp, Shigella flexneri
atgaaagtgcaattaggcggcggaaccaatatcgccagtgccatggagtatggtcggcaacttattgaacaacctgcaaaaagcgtcattatcctcgtgagcgatttttatgaagggggttcatcatcattgctgacgcaccaagtgaaaaagtgtgtccagagcggcatcaaagtgctgggactggcagcgctcgatagcacagcaacaccttgctatgaccgcgatacggcccaggcgctggttaatgtcggcgcacaaatagccgccatgacaccgggcgagctggcatcatggcttgcggagaatcttcagtcatga

SEQ ID NO: 481425 - DNA, 234 bp, Shigella flexneri
atgcctctatcaaccgcattgccgcgtgcgttgctggaacctaccgctgagctgcgcaagctggaagcggcgggcgattacactgcgcgtctggcactgctggaagagcagaaatcgttgccgcggcaggcggtctgggaaatgtattgccaacatcacgatacgccagcaggtagcgaatggctggagagcgtgcgggcttatgagaaagcgattttgagccagcgtgggtaa

SEQ ID NO: 481426 - DNA, 714 bp, Shigella flexneri
atgtctcaacaagtagtcatctttaacaatgaattctctatgtcttcctatgaatttctaatcgaggttgtcaaccctgcccgtgcagaggctggcgaggctccggtccgtaatgaccaattcttagcccgtgtccgcgatgagctggacgattgcaaaacttttgcaaccgaacggataacacctagaggaggtggtcgccagatggaatcaatcacgctgaccggagaccaattgttactggtcggcatgcgcgagtctaaagctgtgcgtcgcaaagtccttgactacatccgacgaattgagaaggacaagcagttattggaagaccagaagaagcgagcagccattcagtctgctaaccgtcgaggcgtgacttggggggactactgcaaaacctatggtctgcccgctcagaagctaatgaccgcacttcttcagcatcgtggtctctttcgtaagaacccaatcagtaacgagtggtctgtaaatccaaagtattccgactgcttccgtatcattaagccgtcagaccagaagttctcagcaggtgggtataacttccggttcaacgcaaagggactggaggtcttcggtaagccgacgacagtcgataaactgcgaggcatccttattgccttcactggcaccgaccagcagaagcaagagcacctcctgaagcaggcccaatccggcaagctggagggactctaa

SEQ ID NO: 481427 - DNA, 129 bp, Shigella flexneri
atggccttatcaggtagcaaatcttataccctcactatagggaatggacccttagctatcactatagggaccaacattccgcctctggtcttgatgcgtcaagttgtgcggaagctctcccgacattaa

SEQ ID NO: 481428 - DNA, 657 bp, Shigella flexneri
atggcgataccgtttgaggcacctgagtttgaaaaagaagcctttaactgcccatattgtaacgcttttgcacatcaaaaatggcagcagttgtactattactattcaagtactggaggcctccctgttcatacttctacctgtgagcattgtgaagaaaaaagtttttggtttcagcgccgcttacttataccgtttgcttccacagccgaactaccaaacccggacatgcccgacaactgtaaggctgactacatggaagccagaagcatcgttggcctgtcacctaaaggggccgctgcactccttcgtctatgccttcagaagctaatggtccacttaggcgaaccggggaataacattaacgctgacatccggtcactcgttcagaaaggactacctgtacgcatccagcaggcagcagacatctgccgtattgtcggcaatcaggcggtccatcccggagagattagccttgatgatgacccgcagttggctcatggcctctttaagctgctgaacattattgtcgatgaccgaatcacgagaccgaaagaaattgaggctatgttccagagtatgcctgaaggtccacgccaaggtattgagaatcaggacagacaggcgagggaacagcagcaggccgctaacgaataa

SEQ ID NO: 481429 - DNA, 294 bp, Shigella flexneri; identical to SEQ ID NO: 478581

SEQ ID NO: 481430 - DNA, 303 bp, Shigella flexneri; identical to SEQ ID NO: 476494

SEQ ID NO: 481431 - DNA, 450 bp, Shigella flexneri; identical to SEQ ID NO: 480785

SEQ ID NO: 481432 - DNA, 483 bp, Shigella flexneri; identical to SEQ ID NO: 376336

SEQ ID NO: 481433 - DNA, 216 bp, Shigella flexneri
gtgaagttcgggcatggcagtgcacaacatgtgcgtgccggtttccgtctgggcagccacaacgatatgagctttggtgaaggcacctcatcccgtgacactctgcgcgacagtacaaaacaccgtgtgagtgaactgccggtgaactggtgggtacagccttctgttatccgcactttcagcttgcgtattaccgtgaaggagatcggtgagtaa

SEQ ID NO: 481434 - DNA, 621 bp, Shigella flexneri
atgcgccagaatgcgctgttgcttgagcgaaaacctgctgtaccgccatcgaaacgggcacatacaggcagagtggccgtgaaagaaagcaatcagcgatggtgctctgacgggttcgagttctgctgtgataacggagagagactgcgtgtcacgttcgcgctggactgctgtgatcgtgaggcactgcactgggcggggactaccggcggcttcaacagtgaaacagtacaggacgtcatgctgggagcggtggaacgccgcttcggcaacgatcttccgtcgtctccagtggagtggctgacggataatggttcatgctaccgggctaatgaaacacgccagttcgcccggatgttgggacttgaaccgaagaacacggcggtgcggagtccggagagtaacggaatagcagagagcttcgtgaaaacgataaagcgtgactacatcagtatcatgcccaaaccagacgggttaacggcagcaaagaaccttgcagaggcgttcgagcattataacgaatggcatccgcatagtgcgctgggttatcgctcgccacgggaatatctgcggcagcgggcttgtaatgggttaagtgataacagatgtctggaaatatag

SEQ ID NO: 481435 - DNA, 150 bp, Shigella flexneri; identical to SEQ ID NO: 193044

SEQ ID NO: 481436 - DNA, 279 bp, Shigella flexneri
atgagcggtaagcgttatcccgaagagtttaaaactgaagcagtcaaacaggttgttgatcgcggttattctgttgccagcgttgcaacacgtctcgatatcaccacccacagcctttatgcctggataaagaagtacggtccggattcttccactaataaagaacagtcagatgctcaggccgagatccgccgtctccagaaagagctgaaacgggttaccgacgaacgggacatattaaaaaaagccgcggcatacttcgcaaagctgtccgactga

SEQ ID NO: 481437 - DNA, 366 bp, Shigella flexneri; identical to SEQ ID NO: 462994

SEQ ID NO: 481438 - DNA, 510 bp, Shigella flexneri
atggtcgggaagcgctgtcatgagcgcactgaccagcgtatccagttcccagccggtgcgggccgatacggcaacaaccggatgtacgggccggaacagacggaataccgcctccgttttctcacgaatgttctgttcctgtgcgggagaaggctgaatacctgccatatcccattcatggcagggttccgttttgtcagcctgcgtcaccacaaacagcacctgctgatgtccgcactgcaggatgtgtcgccagaaatactcatccacagacagggcccggtcatcggctttaatcagccacagcaccaggtccagttcaggcagaatgtcacggtacagggcttcatactctgcatccctgtcccggctctcgcccaccccgggcaggtcagtgataaccatgctgtgaccgtgaccactcagacggaagcgctgcacttcccgggtgccggcgtgaacatcactgaccggtgtgacctccccctgaaacagtgcattacagagtga

SEQ ID NO: 481439 - DNA, 354 bp, Shigella flexneri; identical to SEQ ID NO: 474642

SEQ ID NO: 481440 - DNA, 378 bp, Shigella flexneri
atgcaatcgttgtacgactggatacagttgcagaggaaaacgctgtcgaaacatgcggagatggcgaaggcgttcgactatatcctgaatcactggaatgcgctgaacgagttctgtcgtgacggctgggtggaaatagacaacaacatcggtgaaaacgcgttacgatcggtggcggttggaagaaaaaattatctctttttcggctcagacaagggaggagaaagtgcggcgatcatctacagtctgctggtcacctgcaaacagaacgaagtggagccggaggactggttgcgcgaagtgatcgagaagctcaatgactggccgtcgaaccaagtgcataaactgctgccctggaacttctcgtctgtaaaataa

SEQ ID NO: 481441 - DNA, 306 bp, Shigella flexneri; identical to SEQ ID NO: 460748

SEQ ID NO: 481442 - DNA, 156 bp, Shigella flexneri; identical to SEQ ID NO: 474739

SEQ ID NO: 481443 - DNA, 225 bp, Shigella flexneri; identical to SEQ ID NO: 133446

SEQ ID NO: 481444 - DNA, 669 bp, Shigella flexneri; identical to SEQ ID NO: 478898

SEQ ID NO: 481445 - DNA, 549 bp, Shigella flexneri; identical to SEQ ID NO: 478683

SEQ ID NO: 481446 - DNA, 501 bp, Shigella flexneri
atggcgggccgttttgtatggaaaccagaccttatgttcaaaacgacgctctgcgccttattaattaccgcctcttactccacatttgctgcccctcaacaaatcaacgatattgtgcatcgcacaattaccccgcttatagagcaacaaaagatccccggtatggcggtggcggtaatttatcagggtaaaccttattactttacctggggctatgcggacatcgccaaaaagcagcccgtcacacagcaaacgttgtttgagttaggttcggtcagcaaaacatttacgggcgtgcttggtggcgacgctattgctcgaggggaaatcaagttaagcgatcccgcaacaaaatactggcctgaacttaccgctaaacagtggaatgggatcacactattacatcttgcgacctacaccgctggcagcctgcatgggctccaggaacacaacgtctgtatgccaactccagtatcggtttgttcggcgcactggctgtga

SEQ ID NO: 481447 - DNA, 2064 bp, Shigella flexneri; identical to SEQ ID NO: 478921

SEQ ID NO: 481448 - DNA, 267 bp, Shigella flexneri; identical to SEQ ID NO: 462029

SEQ ID NO: 481449 - DNA, 366 bp, Shigella flexneri; identical to SEQ ID NO: 475638

SEQ ID NO: 481450 - DNA, 525 bp, Shigella flexneri; identical to SEQ ID NO: 477205

SEQ ID NO: 481451 - DNA, 372 bp, Shigella flexneri; identical to SEQ ID NO: 477910

SEQ ID NO: 481452 - DNA, 522 bp, Shigella flexneri; identical to SEQ ID NO: 477184

SEQ ID NO: 481453 - DNA, 834 bp, Shigella flexneri; identical to SEQ ID NO: 476091

SEQ ID NO: 481454 - DNA, 726 bp, Shigella flexneri
gtgggtatttcagtgccattatcgctgggtgacgaaaatcaaatttatgcgtcttcacagatgagtcgttcgggagagcagggtaataactatcaggtttcattatcaggtcagaatagtggtggtgtatggtgggatgtagcgacaaatataactaacgctcatcagtcacaaccgaagagcacgatgaacattgtgcaagttggcaaaaatggatcatatggtcagtttagtagccattacagctccagcgaaaacatgaaacagctaggtgcaaatttaagcggtgggatacttattacaagggatggacttacatttggtcaaaatgtggatgggacattagcccttatagaggcacccggagcaacgggggttaacgttaatggctggccgggactgagtactgattttcgtgggtatgcaatactgccagtgcagccataccgaagagacgatgttattctggatgaaaaaacgataggtaagaattacgacttaccacaaactagtcaattggttgtaccgacagctggagccgttgtgcctgcgacattggcagtgaagagcggggataaaggattagtaaccttaaaacagaaagagggtaaacccgtccccttcggcgctgtgattagttatagcaaagacactgaaaatatggccggcattgtaggtgaagatggtattgcttatgtttctggcttgagtgcggaaggcgggtaa

SEQ ID NO: 481455 - DNA, 747 bp, Shigella flexneri
atgggggaaacaatctcagagcaactggatatcattaataccgcctttaaagttatcgaaaccatacgtcccaaactggcctgtagccggtgtgatgtcatcgttcaggcaccacttccccctaaaccgatcgaacgcggttatgccagtgcagggttacttgcacggatcctggtcagcaaatatatggaacatatccctttatatcgccagtcagaaatatacgcgcgacagggcgtggagctgagccgtaataccatggtgcgctgggtatcagaaatggcagacaaactccgtcctctgtatatagcgctgaatgactatgttctggaggcaggaaaggtgcacgcagatgacactccggtgaaagtactggccccggggaacggaaagacgaaaacgggtcgtctgtgggtatacgtcagggatgatcgtaatgcgggttcatccctgccggcagccgtctggttcgcgtattcggcagatcgcaaaggagaacatccgcagctccacctggcaaagtatcagggcgtactgcaggctgatgcctatgcaggttataacgtactgtacgaaacgggccgggtgaaggaagccgggtgcctggcccacgcccgccgaaaaacccatgacgaggatgtgcgccgtccgacagaaatgactcaggaagcgctcagacggatagcagagttatacgacatagaagcggagatacgtggcagtccggcagaggaacggcttttctga

SEQ ID NO: 481456 - DNA, 234 bp, Shigella flexneri
atgattaaaatggcggaacatctgaaaggttactggccgaatcaactgagtttctcagaatcatgcggaatggtgatgagaatgctgatgacattgcagggcgcttcaccgggacgtataccggagctgatgcgcgatcttgcaagtatgggacaacttgtgaaattaccgacgagaaggggaagtgaaccgccccgggaatcctggagactaaacttcctgagaaagaggtaa

SEQ ID NO: 481457 - DNA, 354 bp, Shigella flexneri; identical to SEQ ID NO: 476372

SEQ ID NO: 481458 - DNA, 267 bp, Shigella flexneri; identical to SEQ ID NO: 462029

SEQ ID NO: 481459 - DNA, 267 bp, Shigella flexneri; identical to SEQ ID NO: 462029

SEQ ID NO: 481460 - DNA, 261 bp, Shigella flexneri
atggttgccaatattaatctcattaaacaagaaagttattctgttgttaatttagaaaaacaactaatgagtaataaatcaccgaagcaaacgctattaaatcaattttcactttgccttaaaatggaaggtgaggagcaactgtgcgattgtgttaacgaactgaagcatggtttgtcgggtaatgactccaacttactgatagtgttttatgttcagataatgcccgatgaccttgtcatgcagctccaccgattttga

SEQ ID NO: 481461 - DNA, 147 bp, Shigella flexneri; identical to SEQ ID NO: 476209

SEQ ID NO: 481462 - DNA, 603 bp, Shigella flexneri; identical to SEQ ID NO: 480891

SEQ ID NO: 481463 - DNA, 159 bp, Shigella flexneri
atgaatctgacagtgcgtgatggaatgcgtaagccatgtcgtcgtttactgcaaccggcactgccggcgctgcgtaaagcggtgttatatctgcccgaaaatcacatgctttatgcagtcgtacccaacgctcaacttccgctttgtaaaaatatatag

SEQ ID NO: 481464 - DNA, 960 bp, Shigella flexneri; identical to SEQ ID NO: 474419

SEQ ID NO: 481465 - DNA, 438 bp, Shigella flexneri
atgtctgagcgagcgtgcgcggtccgacattcccacatcctgtcccgaaaattcccgccgtttctcggttttttgagcgtcgcagaccgcacgacaaacgaaacgaagtgtagtttgtatgagtgcgcacttcgtgagattccccgactgccagtttgtcgatcgcgcggaacagctgtggcacgaaaacggcagaatgatttgctgtccggttgccagaactgcgcgcttacgtggagggcggcgcggcgcaaaaaactgctgacattgcgccagtgttccggtgacacaaacccgcagaaatcgggacaggatgtgggaatgtcggaccgcgcacgctcgctcagacattccccacctggtcagggcttcgccccgacaccccgccaacgcctcacggcacgcgaaaaaattccgcgtaccgctcaccgttcttga

SEQ ID NO: 481466 - DNA, 237 bp, Shigella flexneri; identical to SEQ ID NO: 9405

SEQ ID NO: 481467 - DNA, 1161 bp, Shigella flexneri
  misc_feature (447)..(456): n is a, c, g, or t
gtggcatccgtcagtgaagatgcgatgacggttgttgtgccgggacgggctgaaccggccaccctgcctgtgagcgattcaccgttcacggcactgaagctggagaacggctgggtggaaacgcccgggcattccgtcagcgacagtgcgacggtttttgcctccgtcacacagatggcaatggacaatgccaccctgaatggtctggcccgcagtggtcgtgatgtccggctgtattcctcactggatgaaacccgtactgcggaaaaacttgcccgccatccctcctttacggtggtttctgagcagataaaggcgcgtgccggtgagacattgctggaaaccgctatcagtctgcagaaagccgggcttcacacgccggcacagcaggccattcatctggcccttcctgtgctggaaagtaaaaacctggccttcagcatggtnnnnnnnnnnatggtggacctgctgacagaggcgaagtcgtttgctgcagaaggaaccggttttgctgacctgggaggggaaatcaatgcgcagataaaacggggtgatttactgtatgtggatgtggcaaaaggctatggcacaggcctgctggtttcccgtgcgtcgtatgaggcagaaaagagcattcttcgccatattctcgaaggtaaggaggcggtcacgccgctgatggagagagtacctggcgaactcatggagaaactgacatcaggacagcgcgccgccacccgtatgatactggaaacgtctgaccgtttcacggtggtgcagggctatgccggtgtgggtaagaccacacagttccgggcggtgatgtcagccgtgaacatgctgccggagagtgaacgtccccgtgtcgtggggctggggcccacacaccgtgcggtcggggagatgcgcagcgccggcgtggatgcacagacactggcgtcctttctgcatgacacgcagctgcagcagcgcagcggagaaacgccggatttcagcaacacgctgttccttctcgatgagagctctatggtgggcaataccgacatggcacgggcatacgccctgattgcagcggtgacacggaccagctgcaggccatcgcgcccggtcagcctttccgtctccagcagacgcgcagtgctgccgatgtggtcatcatga

SEQ ID NO: 481468 - DNA, 189 bp, Shigella flexneri; identical to SEQ ID NO: 470416

SEQ ID NO: 481469 - DNA, 495 bp, Shigella flexneri
atgcggcttccgttattctgccggattcgtacaacgcccggtaaccaccgtaagcatcggcctgaagcactccgctgtaaccggccagatgattctgtggatggatacctttccggtccggtgagtacgcgaaccagaccgccggaggcatttccgaaccgctgcccggctcctggaccggaacggggatatcatcggcatggactttaccgggcatcagcacatactggcgcaggatgtcatacagcggttccagcagttcagcaacagcacctgtccagcgccccagtgtggcacggctcagctccacgccctgacgacggtatatttctgactggcggtataacggcagatagtctgcatattttccagcaacaacatgggccagaagccccgctccggcataactgcgtgcaatgggttttgaaggcaccggtgcctgcacgatatggtcacaccggcaacaggccagtttcggacgttgtgtttcgataa

SEQ ID NO: 481470 - DNA, 471 bp, Shigella flexneri
atgcactgtggcacgtctcatggcggggcttcgtctatgtggcgttcatcattgatgtgtttgccggatacatcgtggggtgccatggaaacgacattcgtgctggatgcactggagcaggcgttatgggcccgtcgaccgtccggcacggtccatcacagtgataaaggttctcagtatgtatcgctggcctacacacagcggcttaaggaagccggattactggcatcaacaggaagtacaggcgactcgtatgacaacgcgatggcggagagcatcaatggtctttacaaagcggaggtaatacaccgtaagagctggaaaaaccgtgcagaagtggaactggccacactcacgtgggtggactggtataacaatcgacgattgctggaaaggctgggccacatccctccggcagaagcagaaaaagcttattatgcttccatcggaaacgatgatctggcagcctga

SEQ ID NO: 481471 - DNA, 453 bp, Shigella flexneri
atgatgacgaccagaatagtggttggcctcacggcagggacgtgtctgattttctcgcaaaacctgatggccgaggtcagtgtattcaatccggcgcttctggaaatcaaccatcaatccggagtcgatattcgccagtttaatcgggcaaacctgatgcccccaggtgtttatagcgttgatatttttatcaacggtaaaatgtttgaacgtcaggatgtgacatttgttcaggataatccagatgctgatctgcacgcttgctttattgccattaaaaaaacactgtcctcctttggcataaaagttgatgcgctcaaatcgttcaatgatgtggatgagacggtttgcctcgatcctgctccacgtattgaaggctcatcctggcagtttgacagtgataaattgcagctgaatatatccattcaccaggtaatgactccaacttactga

SEQ ID NO: 481472 - DNA, 252 bp, Shigella flexneri; identical to SEQ ID NO: 475276

SEQ ID NO: 481473 - DNA, 372 bp, Shigella flexneri; identical to SEQ ID NO: 475842

SEQ ID NO: 481474 - DNA, 279 bp, Shigella flexneri; identical to SEQ ID NO: 127146

SEQ ID NO: 481475 - DNA, 216 bp, Shigella flexneri; identical to SEQ ID NO: 474498

SEQ ID NO: 481476 - DNA, 321 bp, Shigella flexneri
atggatcacgcaatttatactgcgatgggagcagccagccagacgctgaatcaacaggcggtaaccgccagtaatctggccaatgcctctacgcccggttttcgcgcgcagttaaacgccttgcgcgcagtgccggtggaagggctttcactgcccacgcgcacgctggtaacggcgtcaacaccgggtgcagacatgacgcccggcaagatggattacacctctcgcccgctggacgttgcgttgcagcaggatggctggccgtgcagaccgctgacggcagcgaagtgcagcgcggtgacgacggcatttttcgtttaa

SEQ ID NO: 481477 - DNA, 177 bp, Shigella flexneri; identical to SEQ ID NO: 479261

SEQ ID NO: 481478 - DNA, 450 bp, Shigella flexneri; identical to SEQ ID NO: 472585

SEQ ID NO: 481479 - DNA, 645 bp, Shigella flexneri; identical to SEQ ID NO: 480929

SEQ ID NO: 481480 - DNA, 279 bp, Shigella flexneri
  misc_feature (255)..(264): n is a, c, g, or t
atgacagacttaatccaacgccctcgtcgcctgcgcaaatctcctgcgctgcgcgctatgtttgaagagacaacacttagccttaacgacctggtgttgccgatctttgttgaagaagaaattgacgactacaaagccgttgaagccatgccaggcgtgatgcgcattccagagaaacatctggcacgcgaaattgaacgcatcgccaacgccggtatccgttccgtaatgacttttggcatctctcaccatacnnnnnnnnnntcaccataccgatga

SEQ ID NO: 481481 - DNA, 327 bp, Shigella flexneri
atgagcgccctgcacgccagctatgacgacgggcagtcaggcgaaaaatttttgcgggagctgtgcgaagtggatctgctggttcttgatgaaattggcattcagcgcgagacgaaaaacgagcaggtggtgctgcaccagattgttgatcgccggacagcgtcgatgcgcagcgtggggatgctgacaaacctgaactatgaggtgatgaaaacattgctcggcgagcgggtgatggatcgcatggtcatgaacggcgggcgctgggttaattttaactgggagagctggcgtccgaatgttagccattcgagggttgttaagtag

SEQ ID NO: 481482 - DNA, 543 bp, Shigella flexneri; identical to SEQ ID NO: 464540

SEQ ID NO: 481483 - DNA, 543 bp, Shigella flexneri; identical to SEQ ID NO: 464540

SEQ ID NO: 481484 - DNA, 957 bp, Shigella flexneri; identical to SEQ ID NO: 476538

SEQ ID NO: 481485 - DNA, 987 bp, Shigella flexneri; identical to SEQ ID NO: 479588

SEQ ID NO: 481486 - DNA, 243 bp, Shigella flexneri; identical to SEQ ID NO: 478732

SEQ ID NO: 481487 - DNA, 288 bp, Shigella flexneri
atgggacttgccggtgttctccggggtaaaaaggtccacactaccgtcagccggaaagccgttgccgcaggcgaccgcgtaaaccgtcatcaaggcaatgtgccgcgtactccgggtggcccgcagcggctggtatacgtggtgtcagcggcggacaaggataaacacacgtccgcagttccgtcagcactgcgacagcgttgtccgcaaggcttttacccagtccagcgttacggtgccccacgcctgacggatgaactgtgtgctctggttaccactttaacgtaa

SEQ ID NO: 481488 - DNA, 312 bp, Shigella flexneri
atgccatggtccccagagggagaaccagtccgtaaattcattctcttcacggcttctgaccatggcttcggcagtgcggaggtcatttgctgtcactcccgacacgccatagaaacgcatttccttcacggcagtggagagctgaagtttctctgcgagcatggtctggaaggccaggtagacttctatctcatccacaaaatggagagttctgactttatcccgggcaatgtcctccagaatttcgaggcggaacatttccctgcccagggagagcagagcgccggtatcattatcgaaaaggccttctga

SEQ ID NO: 481489 - DNA, 171 bp, Shigella flexneri
atgactaagaaaataaaatgtgcttatcacctttgcaataaagaaattgaagaaagcaaaatcattacaagaccacttcatttcatgcgtggagttataccaacgacggaaatgaaaaaatattgtagtgaaatctgcgccgaaaaagaccagatggcacacgaactttaa

SEQ ID NO: 481490 - DNA, 222 bp, Shigella flexneri
atgattgctcatcacttcggaactgatgaaataccacgtcagtgtgtgactcctggcgattatattcttcatgaaggtcggacatatatcgcctcggcaaacaatattaaaaagcgaaaactttatattcgtagcctgactacaaaaacatgcatttctgactgcatgattaaagtcttcctcggtcgtgatggtttacctgtaaaggcggagtcatggtaa

SEQ ID NO: 481491 - DNA, 543 bp, Shigella flexneri; identical to SEQ ID NO: 464540

SEQ ID NO: 481492 - DNA, 543 bp, Shigella flexneri; identical to SEQ ID NO: 481293

SEQ ID NO: 481493 - DNA, 543 bp, Shigella flexneri; identical to SEQ ID NO: 478585

SEQ ID NO: 481494 - DNA, 279 bp, Shigella flexneri; identical to SEQ ID NO: 478446

SEQ ID NO: 481495 - DNA, 279 bp, Shigella flexneri; identical to SEQ ID NO: 478446

SEQ ID NO: 481496 - DNA, 279 bp, Shigella flexneri; identical to SEQ ID NO: 478448

SEQ ID NO: 481497 - DNA, 222 bp, Shigella flexneri; identical to SEQ ID NO: 6179

SEQ ID NO: 481498 - DNA, 444 bp, Shigella flexneri; identical to SEQ ID NO: 477932

SEQ ID NO: 481499 - DNA, 363 bp, Shigella flexneri; identical to SEQ ID NO: 476531

SEQ ID NO: 481500 - DNA, 222 bp, Shigella flexneri; identical to SEQ ID NO: 13320

SEQ ID NO: 481501 - DNA, 294 bp, Shigella flexneri; identical to SEQ ID NO: 480737

SEQ ID NO: 481502 - DNA, 219 bp, Shigella flexneri; identical to SEQ ID NO: 474644

SEQ ID NO: 481503 - DNA, 195 bp, Shigella flexneri; identical to SEQ ID NO: 464447

SEQ ID NO: 481504 - DNA, 195 bp, Shigella flexneri; identical to SEQ ID NO: 464447

SEQ ID NO: 481505 - DNA, 189 bp, Shigella flexneri; identical to SEQ ID NO: 470416

SEQ ID NO: 481506 - DNA, 375 bp, Shigella flexneri; identical to SEQ ID NO: 475109

SEQ ID NO: 481507 - DNA, 375 bp, Shigella flexneri; identical to SEQ ID NO: 475278

SEQ ID NO: 481508 - DNA, 510 bp, Shigella flexneri
  misc_feature (485)..(494): n is a, c, g, or t
atggttgataaaataatatttacggttactcctattttttcaattcctcctcgcggagcggctgctgttgaaacgtggatgtatcaggttgctcagcgtaccaattttccaaatcgtattgtttgtatcaaaaatccaggatactcaaattacacctttgttaatgataattgtagtattcatagggttggattcagtcgcatatataagcggttatttcaaaaatggacaagacttgatcctcttccatattcacagagaatattgaatattgcacatgattttcctataacgaaagaaagtgttattgtagttcataatagcatgaagctatacactcaaattcgtaagctagctcctcaggcaagagtggttatacatatgcataatgcatttgaaccaaaattgcttgagcaaaatgttaaaatgatagtccctagtttatacttgaaaaagtattaccaatcttatttagcaaatgcagnnnnnnnnnnggcgtatcgtccctga

SEQ ID NO: 481509 - DNA, 354 bp, Shigella flexneri
atgccactgctggataagctgcgtgagcagtacggggtcggaccggtatgcagtgaactgcatattgccccatcaacgtattaccactgtcagcaacagcgacatcatcatgataaacgcagtgcccgtgcgcagcgcgatgactggctgaagaaagagatactgcgcgtatacgatgagaatcatcaggtatacgctgtaaagtctggcatcagttgttacgggaaggtatcagagtggccagatgcactgtggcacgtctcatggcggttatggggcttgccggtgttctccggggtaaaaaggtccacactaccgtcagccggaaagccgttgccgcaggcgaccgcgtaa

SEQ ID NO: 481510 - DNA, 522 bp, Shigella flexneri
gtgaccgagccaaatcaggtgtggtgcggtgatgtgacctatatctggacgggtaagcgctgggcgtacctcgccgttgttctcgacctgttcgcaagaaaaccagtgggctgggccatgtcgttctcgccggacagcaggctcaccatgaaagcgctggaaatggcatgggaaacccgtggtaagcccggcggggtgatgttccacagcgagcagggcagtcattatacgagcaggcagttccggcagttattgtggcgataccagatcagacagagtatgagccggcgcggaaactgctgggataacagcccaatggaacgcttcttcaggagtctgaagaacgaatggatgccggtggtgggttacgtaagcttcagcgaggcagctcacgccataacggactatatcgttggatattacagcgcactaagaccgcacgaatataacggtgggttacccccaaacgaatcggaaaatcgatactggaaaaactctaactcggtggccagtttttgttga

SEQ ID NO: 481511 - DNA, 375 bp, Shigella flexneri; identical to SEQ ID NO: 13405

SEQ ID NO: 481512 - DNA, 522 bp, Shigella flexneri; identical to SEQ ID NO: 476593

SEQ ID NO: 481513 - DNA, 294 bp, Shigella flexneri; identical to SEQ ID NO: 480700

SEQ ID NO: 481514 - DNA, 957 bp, Shigella flexneri; identical to SEQ ID NO: 476538

SEQ ID NO: 481515 - DNA, 987 bp, Shigella flexneri; identical to SEQ ID NO: 479588

SEQ ID NO: 481516 - DNA, 522 bp, Shigella flexneri; identical to SEQ ID NO: 477184

SEQ ID NO: 481517 - DNA, 279 bp, Shigella flexneri; identical to SEQ ID NO: 127146

SEQ ID NO: 481518 - DNA, 522 bp, Shigella flexneri; identical to SEQ ID NO: 477184

SEQ ID NO: 481519 - DNA, 522 bp, Shigella flexneri; identical to SEQ ID NO: 476460

SEQ ID NO: 481520 - DNA, 195 bp, Shigella flexneri; identical to SEQ ID NO: 474694

SEQ ID NO: 481521 - DNA, 294 bp, Shigella flexneri; identical to SEQ ID NO: 16023

SEQ ID NO: 481522 - DNA, 495 bp, Shigella flexneri
atgtcaaccatttttatgcaatgggttaaaaacgatgtgggtgaaattttcattcgtcagtttgaaagctttgtcagccgttttttggggaatgggcatacaagttgtattttccaggagtcctgcaaggataatctggttgttgaaagtaatggagacatttacgaatgcgaccattttgtctatccacagtacaaaattggaaacattaataaatctgaactcaaaacgatgaacagtgtacaactgacagcgcaaaaaaaacggatttcagcgaaatgtcagcaatgtgcatataaacctatctgcaatggcggttgtcctaagcatcgtattactaaagtaaacaatgagactgtttcttatttttgcgaaggttataaaatccttttttcaaccatggtaccttatatgaacgccatggttgagttagctaagaacagagtaccgctttaccacattatggatgttgcaaaacaaatggagaataattaa

SEQ ID NO: 481523 - DNA, 243 bp, Shigella flexneri; identical to SEQ ID NO: 464992

SEQ ID NO: 481524 - DNA, 243 bp, Shigella flexneri; identical to SEQ ID NO: 464973

SEQ ID NO: 481525 - DNA, 312 bp, Shigella flexneri; identical to SEQ ID NO: 475318

SEQ ID NO: 481526 - DNA, 525 bp, Shigella flexneri
atgacagaaaaagtaaaacaacatgccgctccggtaacgggcagtgatgaaatcgatattggtcgcctggtcggcaccgtcattgaagcgcgctggtgggtgattggcatcaccgtcgtatttgccctctgtgccgtggtttacactttcttcgccacgccgatttatagtgccgacgcactggtacaaatcgagcaaaacagcggcaattcgctggtgcaggatatcggctcggcattagccaacaaaccgcctgcatcggacgccgagatccagttgattcgttcgcgtctggtgcttggtaaaacggtggacgatctcgacctcgatattgcggtgagcaaaaacacgttcccgattttcggggcgggctgggatcgcctgatggggcgtcagaacgagacggtgaaagtgactacctttaaccgcccgaaagagatggcggatcaggtgtttacgcttaatgtgctggatgacaaaaactacaccctgagcagtgatggcggctttagcgcccgtgggtaa

SEQ ID NO: 481527 - DNA, 330 bp, Shigella flexneri; identical to SEQ ID NO: 476431

SEQ ID NO: 481528 - DNA, 303 bp, Shigella flexneri; identical to SEQ ID NO: 476494

SEQ ID NO: 481529 - DNA, 450 bp, Shigella flexneri; identical to SEQ ID NO: 480785

SEQ ID NO: 481530 - DNA, 429 bp, Shigella flexneri; identical to SEQ ID NO: 478631

SEQ ID NO: 481531 - DNA, 861 bp, Shigella flexneri
atgacattcggtcgcttgtgggaaaaattcctcgccagcgcctattacagtgacctcagtccaagaacacaaaaagattatctgcaacatcaaaaaaagttgcttgccgtattcggtaaggtgccggcagattccataaaaccagaacacatccgtcgatacatggacaagagaggggaacagagtaaaacgcaagccaaccatgaaaaaagcagtatgtcccgcgtttacagttgggggtatgagcgagggtacgtgaaggctaacccatgtgcaggtgtaagtaaattcaaggccaaaaaccgcgaacgatatgtaaccgacaaagaataccaggcagtattaagcgttgcacctcttcctgtttttatcgcaatggaaattgcctatctgtgtgcagcgagggtttccgatgtgttatcgctgaaatgggagcagattggaaacgacgggatctttatccagcaagggaaaacaggaaaaaaacagataaaagcatggagtccacgattacaggcggcgatcgaaaaagcaaaacagttaccaacatccgcctatgtaatcagcaatcaatacggcaaccgatatatgtacaaaggctttaacgaaatgtgggtagaagcaagaaatcgcgcaggcaaaatttcaggtattttaaccgacttcacctttcatgatctgaaggcgaaaggaatttcagactatgaaggaagcagtcgggataagcaacttttctctggtcacaaaaccgaggggcaagtgctaatctatgacaggaaggttaaagtttcaccgacacttgatgtcccgttacctgaaaatattccaagaaaatattccaagtgtgatttttgtcactga

SEQ ID NO: 481532 - DNA, 366 bp, Shigella flexneri; identical to SEQ ID NO: 479955

SEQ ID NO: 481533 - DNA, 375 bp, Shigella flexneri; identical to SEQ ID NO: 13405

SEQ ID NO: 481534 - DNA, 378 bp, Shigella flexneri; identical to SEQ ID NO: 481412

SEQ ID NO: 481535 - DNA, 309 bp, Shigella flexneri
atgtttgccgtggcttttaaagatacctacagtataacggattatccattggttaaatcaggtaagattgacacctgtgatttatatctttcagagaatcttaacgagattggcctcgctaaatctcaaatagaggccgctgaaatttcgaaaaagcatttaccctgtgtgccaggtgcaaattttatatatgatgtaaatagtatgcattatttgcttggggaagggcagcggtatttatcaagatgtataaaatcctctaatgacgaaacttatgcaatttgttcagaggtgctattatatgactaa

SEQ ID NO: 481536 - DNA, 573 bp, Shigella flexneri
atgctgatcacctttaccgttattctttggcaaagcgcgggtacgctctcattcactgttggtggaacagaatggaatatccaggggtatatggtctataccgtcgtgctcattgtgatcggtggaactttatttacccataaggtgggtaaacgtattcgtccgcttaatgtggaaaaacaacgtagcgaagcgacatttcgaactaatcttgtgcagcataataagcaggcagaactgattgcgctaagcaatgctgagtctctacaacgccaggagttgcgcgacaattttcataccattaaagagaactggcatcgtttaatgaatcgtcagcggtggcttgattactggcaaaatatttattcgcgctcgcttagcgttcttccctactttctgttattgccgcagtttattagcgggcagatcaatctgggcggactgatgaaatcgcgccaggcatttatgctagtatcgaacaatttaagctggtttatttataaatatgacgaacttgctgaactggctgcggttatcgatcgcttgtatgagttccatcaactcactgaatag

SEQ ID NO: 481537 - DNA, 435 bp, Shigella flexneri; identical to SEQ ID NO: 476567

SEQ ID NO: 481538 - DNA, 480 bp, Shigella flexneri
gtggcggacctgacgtatgttgccacacaggagggatggttgtacctcgctggcatcaaagatgtttatacgtgtgaaattgtcggctacgccatgggagagcgcatgacaaaagagctgacaggtaaagccctgtttatggcgctcaggagccagcgcccacctgccgggctaatccaccactctgatcgaggttcacagtactgcgcatacgattaccgggtcatacaggagcagtctggtctgaaaacatcaatgtcgcgtaaaggtaactgttacgacaacgctccgatggaaagcttctggggaacgctgaaaaatgagagcctgagccactatcgttttaataaccgggatgaagccatctcagtaatacgggaatacattgagattttctacaatcgtcagcgtcgtcactctcgtctggggaatatctccccggcagccttcagggaaaaatatcatcagatgactgcttaa

SEQ ID NO: 481539 - DNA, 222 bp, Shigella flexneri
atgctggcaaaatctgtcgcggcacaaacacatatggtgtggagtgatgcggataatcagcaggtgaaactgtcgatgccggaactggaagaactggcggcagcaatggtgcaggcgcaggtcgatcgcaacgatgagatttatcgccgtcagcgggagatgaaagaggagctgagcagtctggatgatttggcttcaattcgggcgtttgacgttaagtaa

SEQ ID NO: 481540 - DNA, 303 bp, Shigella flexneri
atgtgcccgtttcgatggcggtacagcgagttttcgctcaagcaacagcgcattctggcgcatgagccggtaaatacgtttggcattgatcgcaggcataccatcaagttcggcctgtctgcgaagcagcgcccatacccgacgataaccatatgtgggcagctctccgataacatggtgtatacggagaagcacatccgtatcatcagtgtgacgactgcggcggccatccatccagtcatcggttcgtctgagaatgacgtgcaactgcgcacgcgacacccggagacaacggctgactaa

SEQ ID NO: 481541 - DNA, 321 bp, Shigella flexneri; identical to SEQ ID NO: 481424

SEQ ID NO: 481542 - DNA, 1419 bp, Shigella flexneri
atgcatgtacaccccatttcaactttccgtttgttccaggaaggtcatctgctacgtaatagcatcgctatttttgcgctaaccacgctgttctattttattggtgcagagttacggctggttcacgaactttctcttttctggccgctgaatggcgtaatggcgggggtgtttgcccgctatgtctggcttaatcgactgcattactatgcgatcagttatgtggcgatgctggtttatgatgccataaccaccgaatggggactggtttcactggttatcaatttctccaatatgatgtttattgttaccgtcgccttactggtcgtgcgggataagcgtctggggaaaaataagtatgagccagtaagtgctttacggctatttaattactgtctgattgccgcattattatgcgctattgtcggggcgattggttcggtcagtattgatagtctggatttctggcctttgcttgcggactggttcagtgagcaattctcaacgggcgtgttgatcgtgccttgtatgctgacgttggctattcctggagtgctgccgcgctttaaagcagaacagatgatgcccgccatcgcgtttattgtgtcggttattgcctcggtagtcattggcggagcggggagtctggcgttcccgctgcctgcattaatctggtgtgcagtgcgctatacgccgcaggtaacatgtctgttgacctttgtcaccggtgcggtggaaatcgtactggtggcaaattcggtgattgatatctcggtcggttcgccgttctccattccggaaatgttctccgcacgtctcggtattgccacgatggcgatatgcccaattatggtttcttttagcgtggcagcgatcaatttgctaatgaagcaagttgcgctgcgagccgactttgattttctgactcaggtttactcacggtccggtctttatgaggtgctgaaaagtccatcgctgaaacagacacaacatctgacggtcatgctgcttgatatcgactatttcaaaagcattaacgataactatggacatgaatgtggcgataaagtgttaagcgtgtttgcccggcatattcagaagattgtcggtgataaggggctggtggcgcgcatgggcggcgaagaatttgctgttgcagtgccgtcggtgaatcctgtcgatggtctgctaatggcggaaaaaatccgtaaaggcgttgaactgcaaccattcacctggcaacaaaaaacgctttatctcacggtaagtattggcgtcggtagtggtcgcgcatcgtaccgaacgctgaccgatgattttaataaattgatggtcgaagccgatacgtgtctgtatcgctcgaagaaagatgggcgcaaccgtaccagcactatgcgttacggtgaggaagttgtctga

SEQ ID NO: 481543 - DNA, 546 bp, Shigella flexneri; identical to SEQ ID NO: 471944

SEQ ID NO: 481544 - DNA, 450 bp, Shigella flexneri; identical to SEQ ID NO: 472585

SEQ ID NO: 481545 - DNA, 450 bp, Shigella flexneri; identical to SEQ ID NO: 480785

SEQ ID NO: 481546 - DNA, 417 bp, Shigella flexneri
ttgtgtattgcggacggttctgctgcagaaaagtttgcaggtagttttcaggatgatgccagcatagaaggtgttgaatttgagtatgatgaagaggacgaatttgccggtattaagaacacatatcctgatgaaatgctgaaagagttggttgaacgcacgccaggttatcatggatggcaacaggaattctggcttgcgcattgtggcgatttctgtgcttttatcggctatgtgggctggaatgatataaaagatcgcctcgatgaatttgccaaccttgaagaagattgtgagaatttcggtattagaaattctgatctagctaaatgcctgcaaaagggtggtgattgtcagggttatctcttccgctgtctccactgcggcaagctgagactgtggggtgatttttcgtag

SEQ ID NO: 481547 - DNA, 246 bp, Shigella flexneri
gtgatctcctttcatgaaaatacgcacagctcccggggtgacatgagcatggggacagccgccgccggcagtaacatgacgttctcaccgtcccggaatggcacgtcactggacctgcaggccggactggaagcccgtgtccgggaaaatatcaccctgggcgttcaggccggttatgcccacagcgtcagcggcagcagcgctgaaggttataacggtcaggccacgctgaatgtgactttttga

SEQ ID NO: 481548 - DNA, 207 bp, Shigella flexneri; identical to SEQ ID NO: 24440

SEQ ID NO: 481549 - DNA, 360 bp, Shigella flexneri; identical to SEQ ID NO: 475478

SEQ ID NO: 481550 - DNA, 279 bp, Shigella flexneri; identical to SEQ ID NO: 127146

SEQ ID NO: 481551 - DNA, 279 bp, Shigella flexneri; identical to SEQ ID NO: 481436

SEQ ID NO: 481552 - DNA, 501 bp, Shigella flexneri; identical to SEQ ID NO: 146706

SEQ ID NO: 481553 - DNA, 168 bp, Shigella flexneri
atggctgaccggctgaaagcatcaggtctgagcggtgatgcggatgcggagagggaagccggtgcacaggtgatgcgtgagactgaacagcagatttaccgtcagctgactgacgaggtactggccctgcgattgcctgaaaacggctcacaactgcaccattcataa

SEQ ID NO: 481554 - DNA, 897 bp, Shigella flexneri
gtgtcctcgctgctggctgagaaggtccagaccctgaagtcctccagctacaaggacctctcgtcctcactaaatactgtctcccggttcctgcctgaagacatggacctgatgtctcgctctgagtggctggctgtcagggacgctatgctggcttctgaggtgagaccgtcgacgattaacaagctgctgactaaggcgaagatgtgtctggactatggcctgatgaatgggcaacttgagggccgcaacccgattgagcgcatgaagttaactaaggatgtagactccaagcgtagagcattcactgacgaggagatggagagacttctggtccgtgttgagtctgagtatcagttcacacgacacacggctcacacgacctctgaggcccgtagatgggcgtctctggtgtctgtagttactggcgctcggtctgctgaggtctgccacctgactaaacgtgacattgtaaccttggacaatgggctggtctgtatcgacatcaatgaagatggggacggtaagtctgtgaagaacaagcattcagtccgacttgtgccgttgaccgatggggcctgtggtcttgacctgaagtccttcctcgaatgggtagacatgcagcctgacgagggtcctctcttcgggatgactccaagcgcatactctagctggtttaactcaagggtcctgactgaagctctgggagacgctacggatgtctctctccacagtctgaggcactggctagcgaccagaatgaaagagcgtggagccaatctggtggacgctcagggcatcttaggtcacagcagtcagtccattacgtatgacctgtacgggaaaggacacgctgttggtaggctggctgaggtgctgaagacagctttactttaa

SEQ ID NO: 481555 - DNA, 207 bp, Shigella flexneri; identical to SEQ ID NO: 476087

SEQ ID NO: 481556 - DNA, 570 bp, Shigella flexneri; identical to SEQ ID NO: 474696

SEQ ID NO: 481557 - DNA, 207 bp, Shigella flexneri
atgctggcttctgaggtgagaccatcgacaatcaacaagctgctgaccaaagcgaagatgtgtctcgattatggcctgatgaatgggcaacttgagggccgcaaccctattgagcgcatgaagttaactaaggatatcgactccaagcgcagagcgttcacagacgaggagctggagagacttctggtccgtgttgagtctgagtga

SEQ ID NO: 481558 - DNA, 195 bp, Shigella flexneri; identical to SEQ ID NO: 475320

SEQ ID NO: 481559 - DNA, 204 bp, Shigella flexneri
atggctatgattgaccctcgcacacctatcggcaaagcgacccttcgttaccgtggtctgcctacacgtcacctcctgtctctgctgagacttggagtcgaagaccccgagcgtcctttctacagtcgagacgagctgatagccatgctggtggaccgtgatttgaataatcagttacgccgagcgtttgctaagcagtcctga

SEQ ID NO: 481560 - DNA, 528 bp, Shigella flexneri
atgagattaacgacgaaattttcggcctttgttacgctgctcaccgggttaacaatttttgtgactttgctgggctgttcgctaagtttctacaacgccattcagtataagtttagtcatcgcgttcaggcggtggcgacggcgattgatacccaccttgtgtcgaatgacttcagcgcattaaggccacaaattaccgaattaatggtgtcagcagatatcgttcgtgtagacctgctgcatggtgataaacaggtttataccctggccagaaatggtagttatcgtccggttggcaccagcgatctgtttcgtgaactgagcgttccgttgataaagcatccggggatgtcgttgcgtctggtttatcaggatccgatgggcaactatttccattcgttgatgaccaccgcgccgctcacggggcgattggctttatcattcttatgctctttctggcggtacgctggttacaacggcaacttgccgggcaagaattgctggaaacccgggctactcgtatcttaa

SEQ ID NO: 481561 - DNA, 381 bp, Shigella flexneri
  misc_feature (354)..(363): n is a, c, g, or t
atgatttcccgctatttcactcactccttaaatgtagtgaaatattataactcgccgcgtcaatataattttttcttgaccagaaaagaatctgtcattcttaatgaagtactcaatagatttgttgatgctttaacaaatgaagttcgctatgaagtatcacaaaattggcttgatacaggaaacctggcctttctgaacaaaccattagaactcactgaacatgaaaaacagtggattaagcagcatcccaatttaaaggtgctggaaaatccttactcgcccccctattctatgacggatgaaaatggctcggttcggggcgttatgggggacattcttaatattattacnnnnnnnnnnccggaggatgggatataa

SEQ ID NO: 481562 - DNA, 1035 bp, Shigella flexneri; identical to SEQ ID NO: 475565

SEQ ID NO: 481563 - DNA, 498 bp, Shigella flexneri
atgcacgggcatgattatgagcatcatcaccatcatcacgatcacgatcacgaacatcatcaagaccacgaacatcaccacgaccaaggacatcatcaccatcacgaatatggcgagtatcaggatgcccatgcacgagcccatgccaatgacattaaacgacgctttgatggtagagaggtcatcaactggcaaattttgttatttggcttaaccggtggctttatcccctgcccggcagcaattaccgtgctgttgatatgcattcagttgaaagccctgacactgggcgcaacactggtcgtcagtttcagcattggcctggcgttaacgcttgtcaccgtaggcgttggcgcagcaatcagcgttcagcaggtcgcaaaacgctggagcggatttaacactctcgctaaacgcgccccctatttttccagtctgttgattggcttagtcggtgtgtatatgggcgtacatggcttcatgggcataatgcgataa

SEQ ID NO: 481564 - DNA, 2319 bp, Shigella flexneri
atgtacggaatgcgtgactgcctcgcgtttggcgagccgatgaaaataggttatttacccgattcctttggcatgtccgggcaactgccgcatatctacaatggatttggcattacctgcaccatgttctggcgtggatgttctgagcgccacggtacggataaaaccgagtttttgtggcaaagcagtgacggtagcgaagtgacggcgcaggtgatgccgttgggttatgccatcggtaagtacttacctgcggacgaaaacggattacgcaaacgcctcgacagttattttgacgtgctggaaaaagcgtctgtaaccaaagagattttgctgccgaatgggcatgatcagatgccattgcagcaaaatatcttcgaagtgatggagaaactgcgcgaaatttatcctcaacgaaagtttgtgatgagccgctttgaagaggtatttgagaagatcgaagcgcagcgagataatctggcaaccctgaaaggggaatttattgatggcaaatatatgcgcgtgcatcgcaccatcggttccacgcgcatggatatcaaagttgcccacgcacgtattgaaaataagattgttaatctgctggaaccgctggcaacgctggccaggacgttgggttttggataccaccacggcttgctggagaaaatgtggaaagagatcttaaaaaatcatgcccacgacagcatcggctgctgctgtagtgacaaagttcatcgcgaaatcgtcgcccgcttcgaactggctgaagacatggcggataatctgctgcgtttctatatgcgtaaaatcgccgacaacatgccgcagagcgacgccgacaaactcgtcctgtttaacctgatgccctggccgcgggaagaagtgatcaacaccactgtgcggctgcgcgccagccagtttaatctacgagacgatcgcggtcagcctgtaccgtattttattcgccatgcccgtgagatcgatccaggcctaatcgatcggcaaatagttcattacggtaattacgatccctttatggagtttgatatacagatcaaccagattgtcccttctatgggctatcgcacgctttatatcgaagcgaatcagcctggcaacgtgattgcggcaaaaagtgacgctgaagggatactggaaaatgctttctggcaaattgcgctcaatgaggatggaacgctacaactggtagataaagatagcggtgtgcgctatgaccgggtgttgcaaattgaagaaagctctgatgatggtgatgaatatgactattcacccgcaaaagaagagtgggtaattacttcggcgaatgcgaaaccgcaatgcgagattattcatgaggcctggcagagcagggctgttatccgctatgaaatggcggtgccgcgtaatctgcaacaacgcagcgcaagacaatccactggcagagtagatgtcgagttggttgtcactcttagtcataacaacaggcgcattgatgtggatatcaaccttgataaccaggctgacgatcatcgccttcgcgtcctgatccctacatcttttaacaccgatagtgttctggcagatacccagtttggttcgctaacgcgccccgtgaacgacagtgcaatgaacaactggcagcaagaaggctggaaagaagcgccggttccggtatggaatatgctcaactatgcagccttacaggaagggcgtaacggcatggctgtctttagcgaagggctacgtgaatttgaagtcatcggtgaagagaagaaaacctttgccattacgttgctgcgcggcgtgggcttactggggaaagaagatctgcttttaaggcctaggcggccttcgggaattaaaatgccagtcccggactcacaactacgtggtctgctttcttgtcgcctaagtttattgagttataccggtacgccaaccgccgctggtgtagctcagcaggcgcgagcatggctgactccagtacagtgttacaacaaaatcccatgggatgcgatgaagctcaacaaagccggattcaacgtgccggaaagttatagtttgttgaaaatgcccccagtgggatgcctgataagcgcacttaagaaagctgaagaccgacaagaagtgattttacggctgtttaatccggctgaatcagcaacctgtgatgcgactgttgctttcagtcgcgaggtgatttcttgctcagaaacgatgatggatgaacacattaccaccgaggaaaatcaaggttcaaatctatcggggccttttttacccggccagtcacggacgttcagttaccggcttgcctga

SEQ ID NO: 481565 - DNA, 219 bp, Shigella flexneri; identical to SEQ ID NO: 478904

SEQ ID NO: 481566 - DNA, 294 bp, Shigella flexneri; identical to SEQ ID NO: 478908

SEQ ID NO: 481567 - DNA, 153 bp, Shigella flexneri; identical to SEQ ID NO: 479440

SEQ ID NO: 481568 - DNA, 768 bp, Shigella flexneri; identical to SEQ ID NO: 480153

SEQ ID NO: 481569 - DNA, 150 bp, Shigella flexneri
atgaagcgagttcttattcctggcgtcattttatgtggcgctgatgtggcgcaggccgtcgatgacaaaaacatgtacatgtattttttagatgacggtctatgctcctgtccctgtacccgtaaacggcaacacgcattacaccagtga

SEQ ID NO: 481570 - DNA, 216 bp, Shigella flexneri; identical to SEQ ID NO: 478917

SEQ ID NO: 481571 - DNA, 483 bp, Shigella flexneri; identical to SEQ ID NO: 479445

SEQ ID NO: 481572 - DNA, 213 bp, Shigella flexneri
atgctgaacacatgtaggttagcctcttacgtgccgaaaggcaaggagaagcaggctatgaagcagcaaaaggcgatgttaatcgccctgatcgtcatctgtttaaccgtcatagtgacggcactggtaacgaggaaagacctctgtgaggtacgaatccgaaccggccagacggaggtcgctgtcttcgtagactacgaatccaggaagtaa

SEQ ID NO: 481573 - DNA, 627 bp, Shigella flexneri; identical to SEQ ID NO: 479864

SEQ ID NO: 481574 - DNA, 204 bp, Shigella flexneri; identical to SEQ ID NO: 475480

SEQ ID NO: 481575 - DNA, 429 bp, Shigella flexneri
atgatacctctcagaaagggagcgcaatatgaagagctcagaaaactgggtaaaggcgatcatctggtaaagctgaaaaccagcccgcaggcacgaaaaaagtggccgggactgggaaatgaagtgacagcccgcctgctgaccgtgacgcgcaaaggaaaagtctgccatctgctgacgtcgatgacggacgccatgcgcttccccggaggagaaatggcggatctgtacagtcatcgctgggaaatcgaactgggatacagggagataaaacagacgatgcaactgagcaggctgacgctgagaagtaaaaagccggagcttgtggagcaagaactgtggggtgtcttactggcttataatctggtgagatatcagatgattaaaatggcggaacatctgggtaatgctgccaacttactgatttag

SEQ ID NO: 481576 - DNA, 267 bp, Shigella flexneri; identical to SEQ ID NO: 462029

SEQ ID NO: 481577 - DNA, 267 bp, Shigella flexneri; identical to SEQ ID NO: 462029

SEQ ID NO: 481578 - DNA, 267 bp, Shigella flexneri; identical to SEQ ID NO: 462029

SEQ ID NO: 481579 - DNA, 402 bp, Shigella flexneri
atgatcgtcagcgacggtggctgtaccacgccgggcgatgtggcgaaagcctttggcggcggtgccgatttcgtcatgcttggcggcatgctggcgggccacgaagagagcggcggtcgcatcgttgaggagaacggcgagaaatttatgctgttctacggcatgagctccgagtctgcgatgaaacgtcacgttggcggcgttgcggaataccgcgcagcagaaggtaaaaccgttaagctgccgctgcgaggccaggttgaaaataccgcgcgtgatattttgggcggcctgcgttcagcttgtacatacgttggggcttcacgcctgaaagagctgaccaagcgcaccacgtttattcgtgtgctggaacaagaaaaccgcatcttcaacaacctgtaa

SEQ ID NO: 481580 - DNA, 249 bp, Shigella flexneri
atgcttgctgattcctcactggatatggttttgcttgatgaactgacgtatatggtggcgtatgactatttgccactggaagaagtggtgcaggcgttaaatgaacgtccacatcaacagacggtgattatcacgggtcgaggctgtcatcgggatattcttgaactggcggatacggtaagtgagctgcgccccatcagacatgcgtttgatgccggtgttaaggcgcaaatagggattgattattaa

SEQ ID NO: 481581 - DNA, 477 bp, Shigella flexneri; identical to SEQ ID NO: 475559

SEQ ID NO: 481582 - DNA, 765 bp, Shigella flexneri
atggagcggagatgttttttcattatcaatgacgcgattatttttgatccgaacaaatgctcgctctcgaatgtaaatacccaggatgagataaattttccagctacggcggggtgtattttggcagtgttactggaaagtaatggtggagcggttgacaggaactcaatcattgatagcgttttggagagattttcatttgatctgtcaaacaacacattgaaccaatatatatccctgttacgcaaaagttttaaaaatattggtgttgaagaaaatgtgattcttacgatacccaaagtaggcttttacatcagtgaaaacataacaataagtaaacaatcttatgatgattctcatttacaagaagatgttgttgaaaaagtagagcgcaaaaggagtattcctctttttcgcattttgatttcgcttgtggtagtaattgttattattgaaatgtttgccgtggcttttaaagatacctacagtataacggattatccattggttaaatcaggtaagattgacacctgtgatttatatctttcagagaatcttaacgagattggcatcgctaaatctcaaatagaggccgctgaaatttcgaaaaagcatttaccctgtgtgccaggtgcaaattttatatatgatgtaaatagtatgcattatttgcttggggaagggcagcggtatttatcaagatgtataaaatcctctaatgacgaaacttatgcaatttgttcagaggtgctattatatgactaa

SEQ ID NO: 481583 - DNA, 513 bp, Shigella flexneri; identical to SEQ ID NO: 474472

SEQ ID NO: 481584 - DNA, 834 bp, Shigella flexneri
gtgggtatttcagtgccattatcgctgggtgacgaaaatcaaatttatgcgtcttcacagatgagtcgttcgggagagcagggtaataactatcaggtttcattatcaggtcagaatagtggtggtgtatggtgggatgtagcgacaaatataactaacgctcatcagtcacaaccgaagagcacgatgaacattgtgcaagttggcaaaaatggatcatatggtcagtttagtagccattacagctccagcgaaaacatgaaacagctaggtgcaaatttaagcggtgggatacttattacaagggatggacttacatttggtcaaaatgtggatgggacattagcccttatagaggcacccggagcaacgggggttaacgttaatggctggccgggactgagtactgattttcgtgggtatgcaatactgccagtgcagccataccgaagagacgatgttattctggatgaaaaaacgataggtaagaattacgacttaccacaaactagtcaattggttgtaccgacagctggagccgttgtgcctgcgacattggcagtgaagagcggggataaaggattagtaaccttaaaacagaaagagggtaaacccatccccttcggcgctgtgattagttatagcaaagacactgaaaatatggccggcattgtaggtgaagatggtattgcttatgtttctggcttgagtgcggaaggcgagtttaatgtgaaatggggttattctaaagatcaatcctgtatcgcaaaataccaacttcctgcgaagaaaagtgcatcagggttataccagatagcggcgacatgtttatag

SEQ ID NO: 481585 - DNA, 483 bp, Shigella flexneri; identical to SEQ ID NO: 479970

SEQ ID NO: 481586 - DNA, 273 bp, Shigella flexneri; identical to SEQ ID NO: 476080

SEQ ID NO: 481587 - DNA, 315 bp, Shigella flexneri; identical to SEQ ID NO: 474620

SEQ ID NO: 481588 - DNA, 579 bp, Shigella sonnei
atgaatgattcactcaaggcgcaatgcgttgccgagtttttgggcaccggactgttcctcttttttggcattggttgtttgtgcgccctgaaagttgccggggcaagtctgggactgtgggaaatttgtatcatttgggggttagggatttcgcttgctgtttaccttacggcaggtatttccggcgctcatctcaacccggcagttaccattgctctgtggctgtttgcctctttcccagcccgtaaagtgctgccattttgtctggcgcaattagcgggtgcctttggtggtgcagttctggcatattctctatacagtagtctgtttaccgattttgaatctgctcacaatatggtgcgtggtagcgcagaaagtttacaactcgccagtatcttcagtacttatccggcagcggcgattaatgtatggcaagctgcgttggtcgaagtggtcataacgtccatgttaatggggttgattatggcgttgaccgatgacggtaatggcgtacccaaaggaccgcttgcacctttacttattggtattctggttgctgttattggtgcttctacctga

SEQ ID NO: 481589 - DNA, 285 bp, Shigella sonnei
atgcaacaagaagcgttaggaatggtagaaaccaaaggcttaactgccgccatagaggccgcagacgccatggtgaagtcggcaaatgttttgctggtcggctacgaaaaaataggttccgggctggtgaccgtcatcgttcgtggtgatgtcggggcggtaaaagcggcaacagacgcgggtgccgcagctgcgcataacgtcggcgaagtaaaagccgtacacgttattccccgcccacataccgatgtcgaaaaaatcttaccaaagggaattaacccatga

SEQ ID NO: 481590 - DNA, 813 bp, Shigella sonnei
atgagcagcaatgaactggtcgaacagatcatggcgcaggtcatcgctcgcgtagcgacgccagagcatgaggttctcccgaaaaccactcatcaaatacgagagacggctatggcagaaaaaagctgcacgctaacagaatttgttggcaccgctattggcgacactgtaggtctggtcattgcgaacgttgatagcgccctgttggacgcgatgaaacttgaaaaacgctatcgttccattggcattctgggtgcgcgtattggcgcagggccacacattatggccgctgatgaagcggtaaaagccaccaacactgaagttattagcattgaacttcctcgcgatactaaaggcggtgccggacacggctcactgatcctcttaggtggcaacgatgtttccgacgtgaaacgcggtattgaagtcgccctgaaagaactcgatcggacctttggcgatgtctatgccaacgaagccggacatcttgaactgcaatataccgcccgcgccagctatgcactggaaaaagcgtttggtgcaccactgggacgggcttgcggcgttattgtcggcgctccggctgctgtgggtgttctgatggccgacaccgcgctgaagtccgccaatgtggatgttgtggcatacagctccccagctcaagacaccagctacagcaatgaagtcattctgattatctcgggtgactccggcgcagtccgccaggcggtcatctccgcacgcgaaatcggtaaaaccgtgctttcgactctcggcgatacaccgaaaaacgatcacccttcctacatctga

SEQ ID NO: 481591 - DNA, 1665 bp, Shigella sonnei
atgagatcgaaaagatttgaagcactggcaaaacgcccggtcaaccaggacggtttcgttaaagagtggattgaagaaggctttattgcgatggaaagcccgaacgatcctaaaccgtcaatcaaaattgttaacggcgtcgttaccgaactggatggaaaacccgccagccagtttgacctgatcgaccactttatcgcccgctacggcatcaatctcgcgcgcgccgaagaagtcatcgcgatggattcggtaaaacttgccaatatgttgtgcgatccaaatgtcaaacgtagcgatatcgttccccttaccacagcaatgacgcctgcaaaaatcgtcgaagtggtttcgcagatgaacgtggtagagatgatgatggcgatgcagaaaatgcgcgcccgtcgaacaccatcacaacaggctcacgtcaccaacgtcaaagataacccagtacaaattgccgccgacgcagctgaaggcgcatggcgcgggtttgatgaacaggaaaccaccgttgccgttgctcgctatgcaccgttcaacgccatcgccctgctggtcggctcacaggtgggacgtccgggcgtcttgacccagtgttcactggaagaagccaccgaactgaaactcggtatgttaggccacacctgttacgccgaaacaatttctgtctatggtacagaacctgttttcaccaatggtgatgataccccgtggtcaaaagggtttctcgcgtcatcctatgcttctcgtggcttaaaaatgcgctttacttccggctccggctctgaagtacagatgggttacgcggaaggcaaatcaatgctttacctcgaggctcgttgcatttacatcaccaaagccgcaggcgttcagggtctgcagaatggttcggtaagctgcatcggtgttccatcagctgtgccatcaggcatccgcgcagtattagcggaaaacttaatttgctcatcgctggatctggaatgcgcctccagtaatgaccagacctttacccactcggatatgcgccgtaccgcacgtttcctgatgcaatttctgccaggcaccgactttatctcttccggtttttccgctgtgccgaactacgacaacatgtttgctggttcaaacgaagatgctgaagacttcgatgattacaacgtcattcagcgtgacctgaaggttgatggtgggctgcgaccagtacgcgaagaagatgttatcgctatccgcaataaagccgctcgcgctttacaggctgtctttgccggtatgggactaccgcctattaccgatgaagaagtcgaagcggcaacctatgcccacggttcaaaagatatgcctgagcgcaatattgtggaagacatcaagttcgcccaggagattatcaataaaaaccggaacagcctggaagtggtgaaagccttggcgcaaggcagttttaccgatgtcgcccaggacatgctcaacatgcaaaaagcaaaactgaccggcgattatctccatacctcagccatcatcgtcgatgacggacaagtgctctctgcggtcaatgacgtcaatgattacgccggaccggctacaggttaccgcctgcaaggggaacgctgggaagagatcaaaaatattcccggtgcacttgatcccaacgaaattgactaa

SEQ ID NO: 481592 - DNA, 669 bp, Shigella sonnei
atggaaattaacgaaaaattactgcgtcagattatcgaagacgtgctggcagaaatgcaacccagcgacaagtccgtttcatttcgcgcacctgtctctgcaactgtcccttccgcgccagataccggaaattttctgaccgaaattggcgaagcccaacaaggcactcagcaagatgaagtcattattgctgtaggcccggcgttcggcctggcgcaaaccgtcaatatcatcggtattccgcataaaaacatcttgcgcgaagtgattgccggtatcgaagaagaaggcattaaagcccgtgtaattcgctgctttaaatcgtccgatgtcgcattcgtagcagtcgaaggcgatcgtcttagtggttcaggtattgctatcggtattcagtcgaaaggcacaacggttatccaccagcagggacttcctcccttgtctaacctggaacttttcccacaagcgcctttgttgacgctggatacttatcgtcagattggcaaaaacgccgcgcgttatgcgaagcgcgagtctccacaaccggtgccgaccctcaacgatcaaatggcgcggccgaaataccaggccaaatctgccattttgcatattaaagagacgaagtacgtggtcactggcaaaaaaccgcaagaactgcgcgtgacgttttaa

SEQ ID NO: 481593 - DNA, 519 bp, Shigella sonnei
atgaataccgatgcaattgagtcgatggtcagggacgtgttgaaccgcatgaacagtttacaggatgcagctcctgtttctgcggtccccaacgcatcaatactgagcgccaaagtgacggattacccgctggcaaataaacatccggaatgggttaaaacagcgaccaataaaacgctcgacgatttcactctggaaaatgtgctaagcgataacgtcaccgccctggatatgcgcattacccctgaaacattgcgtattcaggctgcgattgccagagatgctggtcgcgatcgtctggcgatgaattttgaacgcgccgctgagcttacctcagtaccagatgatcgcatcctcgaaatctacaatgcgttacgcccttatcgttcaactaagcaagaacttattgccattgctgacgatcttgaacagcgttatcaggccaaaatttgtgctgcatttgtccgtgaagctgcggaactttatgtcgagcgcaaaaaactgaaaggcgacgattaa

SEQ ID NO: 481594 - DNA, 1833 bp, Shigella sonnei
atgcgatatatagcaggcattgatatcggcaactcatcaacagaggttgcgctggcaacgctcagtgcaactggagagttgtcgttcgtgagtagcgccctggaggaaaccaccggaatcaaaggtacgttgcgtaacgtccatggtattcaggaggcgctcgcacaggcaacgaaaaaagtcggcatcaatgttagcgatatttcgcttattcgtatcaacgaagcaactccggtcattggtgatgtggcgatggaaaccatcactgaaactatcatcaccgaatcaaccatgatcggtcacaacccgaaaactccgggcggagtggggctgggcgtagggttcaccatcactccgcaagagttattaacacgcccggcggacacaccttacatcctggtggtgtcatcggcatttgattttgccgatatcgcgacgatgataaacgcctccgtacgcgccggatatcagctgactggcgttattctgcaacgcgacgatggcgtactggtcaataaccgcctggaaattcctttacctattgtggatgaagtcctctacatcgatcgtattccgctcggcatgctggcagcaattgaagttgccgttcccgggaaagttatcgaaaccctgtctaacccgtatgggattgccaccgtattcgccctcaatgctgaagagactaaaaatattgttcctgtcgcgcgggcgctaatcggcaaccgttcagcagtggtagtgaaaacgccctctggcgacgttaaagcccgttcgatacccgccggaaatatcgaactgctttctgccgggcgcacaacgcgcgttgatgtagctgctggtgccgatgccattatgaaagcggtcggtgagtgcccaaaactggaaaacgtgacgggagaaccaggcaccaacatcggcggaatgctggaacatgttcgccagaccatggcggaactgaccaacaaacccagcaacgaaatttttattcaggatttgctggcgatagatacctctgtccccgtcagcgtaaccggtggtctggcaggtgaattttcactggaacaggctgtgggtattgcctctatggtgaaatccgaccgtctgcaaatggcgatgatcgccagtgaaattaagcaaaaactgcatgttgatgttcaggtcggaggcgcagaagcagaagccgccattcagggggccttgactacccctggaaccacacgtccactggcaattctggacttaggtgcaggctctaccgatgcctccatcatcaatcagagtggggaaatcgttgccactcaccttgcgggagcgggcgacatggtaacgatgattatcgctcgtgagctgggcttaaatgatcgttatctggcagaagaaatcaaaaagtacccgttagcaaaagtagaaagcctgttccacttacgccatgaagacggtagcgttcagttcttccctactcccctatccccccatgtatttgcccgcgtctgtgtagtgaaacccgacgaactggtgcctattcccggtgatttgacgctggaaaaagtacgcgctgttcgtcgcagtgcgaaagagcgtgtcttcgtaaccaatgccctgcgcgcgctacgtcaggtaagccctgccggaaatattcgcgacattccgttcgtcgttctggtgggtggttcttcgctggatttcgaagtaccgcaattggtcaccgacgcgctggcacattatcgactggtcgccgggcgggggaatatccgtggtagcgaaggtccgcgcaacgcggtagctactgggctactcatcgcctggcacaaggagtcgattcatggaaagtaa

SEQ ID NO: 481595 - DNA, 351 bp, Shigella sonnei
atggaaagtaaagagcgtgcaccagccatcgttgtcatggagatcggtgactgtatcactacatgggatgaggtgcttcttggcattgaagaggaaggtattccctttcgcattcaacacattccgtcaggtgaagttatcgatagcgcctggctggctgctcgtcaatctcccctgttggttggcattgcctgcgaccgggaagaactgattgtgcattacaaaaacttaccggcatcagcgccactgtttacgctgacgtatcaacaagataaccatacccggcgcagcatcggcactaacgctgcccgcctggtaaaaggaattcccttccgggaattccactcataa

SEQ ID NO: 481596 - DNA, 276 bp, Shigella sonnei
atgaacaacgcactaggactggttgaaacaaaagggttagttggcgcaattgaagctgcagatgccatggttaaatccgccaacgtgcagctggttggctatgaaaagattggttcgggtctgattacggtgatggtccgcggtgatgttggcgcagtaaaggccgccgttgatgcggggagcgctgcggcaagcgccgttggcgaagtgaaatcctgccatgtcatcccgcgcccacacagtgatgttgaggctattttacctaaatcggcataa

SEQ ID NO: 481597 - DNA, 423 bp, Shigella sonnei
gtgaagcaatcactgggattacttgaagccagtggtctggctctcgccatcagttgcgcagacgctatggcaaaagccgcgtccatcacgctggttggccttgagaagaccaatggctcaggctggacgctcatcaaaatcaccggtgacgtcgcctcggttaatgcggcgatcgcgacgggagccagtttcgccggacagcgaaatggccttgtcgcacacaaagtgattgcccgcccgggagacggcattctgccccacacaactgaagcattgaccgtgacggttgaaacaagcaaaacaccagcaacaaccgtcacctcagagattatcagttgtaatttgtgtcttgacccggcatgtcagcggcaaaaaggtgagccccgctcactttgcctgtacgccaataagcgaggggagtag

SEQ ID NO: 481598 - DNA, 633 bp, Shigella sonnei
gtggataaacaaaccttgcaggaaacagtgagccagattctggatgagatgcgcgagcgccctatcccactgggcgtttccagtcgccatatacatctttcatcagcggattatttgcgtctttttcctgaacaaccgattagcgagaaaaagccgttaatgcaacctggccaatacgctgctgaacaggttgttacgctggagggaccaaaaggcaaattgcacaacgttcgcttgttggggccgctacgcaatgcaagccaggtggaaatttcccggacggacgccagaacgttagggatcaccgccccgctacgcatgtcaggcgatctcagcggcactccggggattcgtttgataagcccatttgcggaactggagatcacatctggcgtcattgtcgcgcaacggcatattcatatgtctccgctggatgccctgatttatggcgttacgcatggcgataaagtggcggttgccattgaaggtgatgagcgacgactgatattcgaaaacgtcgctgttcgcgtctctccggatatgcgtcttgaaatgcatattgataccgatgaggccaacgccgcaggcgctgatagccctgacgtttttgccacactggtgtcagtgccatga

SEQ ID NO: 481599 - DNA, 492 bp, Shigella sonnei
atgaataacatgctgatgcaacgtattgttgacgaagtggtttttcgccttaaacaacgtgcgggaaaaacactcgtgctgactgtttttcaattgcgagacgccagcgttcaagagagcgttcatcagtatgcgtcattacaaatccgatatgtcgatctgccgctgctgcgacaacttgcggagaacgaaacgtcagatcgagcatctatccagatacacgaagcgttagcctggggaatgcacattcaattgtcgttgcagcgtcatttcctgaacgccatcgaattgaagactctcgcccgtctaccgctaagctggtgcgacgaacaagggcagccgatctaccttcatcataatcgacttttaagttatgccgatatcgcacagttaagctcgggaatactggtgttacagcggaaatgttgtgtgaccgcactggctcgtgaagcggcaattacccgaaatattcagttaatcaggcaggagtaa

SEQ ID NO: 481600 - DNA, 276 bp, Shigella sonnei
atgcatctggctcgagtcactggcgcggtagtatccacgcaaaaatcaccttctctgatcgggaaaaaactgctgctggttcgccgggtcagtgctgacggcgaactgcctctcacgccattaaccggcgacgaagttgccgttgattcagtcggcgcaggcgttggtgagttggtactcctcagcagtggttccagcgccagacatgtgttttcaggccctaacgaggccatcgacctggcagtggtcggcattgtcgatacgctttcgcgctaa

SEQ ID NO: 481601 - DNA, 1008 bp, Shigella sonnei
atggcaatttatacccgaacaggtgattcaggaagtacgtctttatttaccggacagcgcgtcagcaaaactcatctacgtgtcgaaacctatggcacgctggatgaactgaacgcgacactcagtctgtgttattgcgccaccgccatcgaaagccatcgcatcttactggaagccattcaacaacagatattttggtttagcgccgaactcgccagtgaaagcgaacagccgtcagcgcaacagcgttacatcggtacggaagaaattgccgcgttggaaaacgcgatcgatagtgcaatgaacgccgtccccccagttcacagcttcattctgcctagtcgatgtgaagccgcaagccgcatgcatttcgcccgcacggtggctcgacgggctgaaagacggctggttgaactgacaacggaaaccaccgtccggaatgttttgctgcactatatcaaccgactttccgattgcctgtatgccctcgcccgcgtggaagacaacgttgctcatcaaaacctgatgattcaggaaatcacaaaacgttatcacgaagccaaccacacaccagcattgaaggaacgcacaatgccgctcacttttcaggatcttcaccagctcattcgtagtgcggcaatgcgcgcggatgaactgcatattcccgttgtcatcagcattgttgatgccaacggaacagaaagtgttacctggcggatgcctgatgccctgttggtcagcagtgaactggcaccgaaaaaagcctggaccgccgtggcgatgaaaacggcaacccacaagcttgctgataccgtgcaacccgacgcgccgctttacgggctcgaaagccatatgcaaggaaaagtcgtcacttttggtggcggcttccccctctggcgtgacggaaaattgcttggcgggcttggcatcagcggcggtagcgttgaacaagacatggatattgcccaaagcgcaatggcggcaattaacgtgggagtaaaccaatga

SEQ ID NO: 481602 - DNA, 129 bp, Shigella sonnei
atgaataactctgaattagaaacactgatccgcaatattctgcgtgagcaacttgtccccgctacaccacgaacgcaaagaaacgctattttccagactgtcgatgaagcggtctgcgcagcacactag

SEQ ID NO: 481603 - DNA, 1185 bp, Shigella sonnei
atgccccgccttaccgaactggcagaagaaagcgccaaagaaacggggatgggaaataaagaagataagtacctaaaaaacaaagcggcactcgataacacgccaggaattgaagatttaaccaccacagcactaaccggtgatggtggcatggttttgtttgagtactctccgtttggggtgattggctcggtcacgccaagcaccaaccccacggaaaccatcattaacaacagcatcagcatgctggcagcaggtaatagcgtctacttcagtccacacccgggtgccaaaaacgtttcgttaaaactgattaccacaatcgaagacatcgcgtttcgctgtagtggcattcataacttgatcgttaccgtatctgaaccgacctttgctgccaccgaacagatgatggcgcaccctaaaatcagcgttctggcgattaccggcggtccggggatcgtcgccatgggaatgaaaagtggcaagaaagtgattggtgccggagcgggtaaccctccgtgcatcgtcgatgaaacggcggatattgtgaaagccgccgaggacatcatcaacggcgcttcatttgattacaacctgccgtgtattgctgaaaaaagcctgattgtcgtggcatcagtggcagattatttaattcagcagatgcaaagttttggcgcacttcttcttaactatgagcaaactgagaaattgcgtgcaatttgcctgccagacggtagcgccaacaaaaaactggttgggaaaagcccatcagccttgctggaagcggcaggcctccctttgcccgcaaaagcgccgcgcctactgattgctgttgtcgacgccgatgatagttgggttacttgtgagcaactaatgccaatgctgcccattgtgaaggtcaaggattttgacagcgctctaaccctggcgctgaaagtggaagacggcttgcaccacacggcaattatgcactctcagaacgtctcacgactcaaccttgccgcgcgcgttatgcaaacctcaatatttgtcaaaaacggcccctcctgggcgggtattggcgtcggcggcgaaggctttacgacctttaccattgcaacaccgactggagagggtacaacgtcagcacggacttttgcccgctcacgacgctgcgtgttaaccagcggcttttcaattcgctag

SEQ ID NO: 481604 - DNA, 1113 bp, Shigella sonnei
atgaatactttttcactgcagacgcgtttatacagcggaccaggaagtctcaaggtacttagccgtttctctcatagacacatctggattatttgcgatgcctttctggcacgctcaccacttattgacacgttgcatcaggcgctgcccgacagtaatcgtctcagtatttttagcgaaataacgcccgccccaactatccagaccgtggtgaaaggcattgcgcaaatgcagactttacgcccggatgtagttatcggttttggcggcggttctgccctggacgccgcaaaagcaattgtctggttcggtcgccagtgtggcattgaaattgaaacctgcgtagccattcctaccaccagcggtatcggttccgaagtgaccagtgcttgtgtcatcagcgatcctgagaaagggattaaatatccccttttcgataatgcactttatccggatatcgcgatccttgatccatctttggtcgtcagcgtgccaccggcgataacggccaataccgggatggatgttttaacccatgcgcttgaagcttatgtttctcctcgcgccagcgacttcacggatgcactggtcgaaaaaaccgtgcaaattgtttttcaatacctgcccactgcagtgaaaaaaggcgattgtcttgccacccgtggcaaaatgcataatgcatcgacgcttgcaggaatggcctttagccaggccggactcggtttaaaccatgcaattgctcatcaactcggcggacagtttcatctgccgcatggactggcgaatgcgctcctgctcacggcagttatccgctttaatgctggcgatccgcgcacagccaaacgctatgcccggctggcgaaaacgtgccatttatgcccggacaacgccaatgacaccgccagcctgaatgcacttattcaacatattgagcagcttaatacaacctgtacgctgccgactcttgccaatgcgctgaaagaaaaaaaagcagaatggtcaatacgcataccagatatggttcaggcggcgctggcggatgcaacgttgcgtaccaacccgcgtgcagctgatgcctccgcgattgcagaactgctcaaggggttgttatga

SEQ ID NO: 481605 - DNA, 903 bp, Shigella sonnei
atgaacgtcggattaatctcctgcgacgaccagaccatccgcgagcgagtacaagcagcaggtgtcgtgggtgctggcggcgcaggttttccaacccatattaagctacaagcgcgtgctgacactttcctggtgaatgcggcggaatgcgaacccatgttgaaagtagatcaacagttaatggcgcagcaagccagccgcctgcttcgcggtgttcactatgcgatgaaagccaccggggccagtagcggaatcatcgcgctgaaagaaaaatatcaacgggcaataaacgcactcacaccactgttaccaccggatatccgcctgcatattttgcccgacgtttaccccgcaggagacgaagtgctgaccatctggatggcaactggtcgccgcgttccacccgctgcattacccgttagcgtcggtgtggtggtcaataatgttcaaaccgtacttaatattgccagagccgtcgagcaacagtatccagtgacgcgccgcacactcaccgttaatggtgcagtggcgaagccaataacggtaaccgtccccatcggcatgtctttacgtgaagtcctggcgctggcgggcggcgcaacagtggatgctcctggttttatcaatggcgggccgatgatgggaagtttgatcacatcgctcgacacaccagtcagcaaaaccactggcggcttgctggttttacccaactctcattcactgatccaacgtcgaatgcagaatgaccgcagcgtacttgccgtcgcgaaaactgtttgtgagcaatgccgcttgtgtaccgatctctgcccacgtcatttaatcggtcacgaactggcaccccatttattagtacgtgcgcggttaactaccaacagctcgccacgccgcaactgttactga

SEQ ID NO: 481606 - DNA, 378 bp, Shigella sonnei
atgcgcataaaccgcctgcttaagcaggaattacgcgcacaaaatctccgctacgaaggtgccttaaatcctgcagatcccatggcaaattatcgactgattcccgtaaaacggctggtaaccagacttggcttaaccccgtggtatcaggatgcgccattgtctgaacaggtgcctcagcccgaaaaagtgacgttattgttacgccagcacatcggtgccagcgcaattgcgtgtgtacaaaaaggcgatcgcgtcgttcatgggcaatgtgtaggtcaaattccacacggcacattaggtgcccccattcatgccagtattgatggcatggtcagcgatgtgacagaaaacgcgattacgcttgtgagaggttaa

SEQ ID NO: 481607 - DNA, 555 bp, Shigella sonnei
atgtcgaaagcggtaggtattttagaacttagcagtatcgcgaaagggatggaaaccggcgacgccatgctgaaaagcgccaacgttgagttactggtcagcaaaacgctatgccccggaaaatttctgctgatgctcggtggcgatgtgggcgcggtgcaacaggccatcaacagcggagcgtcccttgctggtgaaatgctggtcgacagtcttgtcctgccgaatattcatcccagcctcctttctgcaatcagcggacttaaccatgttgaacagcaccgggctgtcggcgtagtcgaaacctggagtgtcgccgcctgcattgacgctgccgattgtgctgtcaaagctgcaaatgtcattcttgttcgcgtacatatggcttttggcattggcggtaaatgctacatggtggttgctggcgatatttcagatgttaataacgcggtctctgccgccagcgtgcgcgcgggggaaaaaggtttgttggtctatcggtcggtgattgcccgtccacatgaagccatgtggcgtcagatggtggagggataa

SEQ ID NO: 481608 - DNA, 351 bp, Shigella sonnei
atgacaactcagcacacaactgaacggatgattcaggaatatgtcccaggtaagcaggtcacgctggcacatgtcatcgccaatccagggaaggatctgtttaagaaattgggtttaccagacaccatttccgctattggtattctgacaattacccccagcgaagcatctatcatcgcatgcgatatcgccacaaaatcaggcgctgtagagatcggttttcttgatcgttttaccggtgccgtagtgctgactggtgatgtttctgcgatcgaatatgcacttagccaggttacccgtacgctgggtgaaatgatgcgctttaccgcctgccccattacgcggacctga

SEQ ID NO: 481609 - DNA, 444 bp, Shigella sonnei
atgcaacgtatgatgctcatcggccccagccagtgcggaaaaacgtcactcacgcaatgtctgcgtggcgaaaatattcattatcagaaaacgcaggcaatcgtctggtccccgaccaccattgatacaccaggcgaatacctcgaaaaccgcagcctctacagtgcactgttggtcagtgcctgcgaagcggacattatcgcgctggtgcttaatgcggacgcaccgtggtcacctttttcgccaggctttacctcgtcaatgaatcgcccggtcattggagtagtaaccaaagcagatttagccaacatggaacaaatatctttggtgaaatgttggttacgggaagctggagcgcacaacgtgttagtaaccagtgcggttaataaccatggagttgcagaacttttagccttgctgcatacagaagaaggctgtcgctaa

SEQ ID NO: 481610 - DNA, 330 bp, Shigella sonnei
atggaaactaccaagccttcattccaggacgtactggaatttgttcgtctgttccgtcgtaagaacaaactgcaacgtgaaattcaggacgttgagaaaaagatccgtgacaaccagaagcgcgtcctgctgctggacaacctgagcgattacatcaagcctgggatgagcgttgaagcaatccagggcatcatcgccagcatgaaaggtgactatgaagatcgcgttgacgattacatcatcaaaaatgccgagctctccaaagaacgccgcgatatctccaaaaagctgaaagctatgggcgaaatgaaaaacggcgaagcgaagtaa

SEQ ID NO: 481611 - DNA, 1059 bp, Shigella sonnei
gtgcgtgccgataagtcattaagcccgtttgaaatccgggtataccgccattaccgcatagtgcatggtactcgggtcgcgctggcattcctgctcacttttctcattatccgcctgtttactatcccggaaagcacctggccgctggtcaccatggtggtgattatggggccaatctcgttctggggtaacgttgtccctcgtgccttcgaacgtattggcggtacggtgttgggttcgattttaggtcttatcgctctgcaactggagttaatttcgttaccgctgatgttagtctggtgcgcggcggcgatgtttctttgcggttggctggcgctgggcaagaaaccgtatcaaggattattgattggggtgacgctggcaattgttgttggttccccgacaggtgaaattgatacggcgttatggcgaagcggcgatgtgatcctcggctctttactggcaatgttgtttaccggtatctggccacaacgggcgttcatccactggcgcattcaactggcgaaaagtctgaccgagtataatcgggtctatcaatctgcattctcaccgaacttactcgaacgcccacgtctggaaagccatctacaaaaactcctgaccgatgccgtgaaaatgcgtgggctgattgcgcccgccagcaaagaaacccgtattccaaaatcgatatatgaaggtatccagaccattaaccgcaatctggtttgtatgctggagttgcaaatcaatgcgtactgggccacgcgccccagccatttcgtgttattgaacgcgcaaaaacttcgtgatacccagcacatgatgcagcaaatactgctgagctttgttcatgcgctgtacgaaggtaatccgcagccggtttttgccaatacggaaaaattgaacgatgctgtggaagagctgcgtcagttgctcaataaccaccatgacctgaaggtagtggaaacaccaatctatggttatgtgtggctgaacatggaaacggcgcatcagcttgagttgctatcgaatctgatttgccgggccttgcgcaaataa

SEQ ID NO: 481612 - DNA, 474 bp, Shigella sonnei
atgaactacgagattacgcaggaagagaaacgtaccgttgcaggtttccatctcgttggcccgtgggaacagacggtaaagaaaggctttgagcagttgatgatgtgggtagataacaaaaatattgtgccgaaggagtgggttgctgtctattacgacaatccagatgaaacacccgccgaaaaattacgctgcgacaccgttgtgacggtaccgaataactttacgcttcccgaaaacagtgagggcgtcattctgacagaaatttcaggtggtcagtatgcggtggcggtggctcgtgtagtcggtgatgattttgctaaaccctggtatcagttctttaatagcctcttgcaggacagtgcttatgaaatgttaccaaagccctgcttcgaggtttatttgaacaatggcgcggaagatgggtactgggatatcgaaatgtatgttgcggtgcagccaaaacatcactaa

SEQ ID NO: 481613 - DNA, 1167 bp, Shigella sonnei
ttgaaacgccgtcttattattgctgcttctttgttcgtttttaacttatcgtctggttttgcggcggaaaacattcctttttcacctcagcctccagagattcatgccgggtcctgggtattgatggattacaccaccggtcagatcctcaccgcgggtaatgagcatcaacagcgcaatcccgccagcctgacaaagctgatgacgggttatgtcgtggatcgcgctatcgatagtcatcgcattacgccagacgatattgtcaccgtggggcgcgatgcgtgggcgaaagataatccggtgtttgtcggttcttcactgatgtttttgaaagagggcgatcgcgtatcggtacgtgatttaagccgtggtttaattgtggattccggaaatgacgcttgtgttgctctggctgactatattgccggtgggcaacggcagtttgttgaaatgatgaacaactatgccgagaagctgcatctcaaggatacgcattttgaaacagtgcatggtctggatgcacctggccagcatagctcggcttatgatttagctgtgttttctcgcgctatcatccacggcgagcccgagttttatcatatgtacagtgagaaaagtctcacctggaacggtatcacccagcaaaaccgtaacgggttgttgtgggataaaaccatgaatgttgacggcctgaaaacgggtcatacttctggtgccgggtttaatctcattgcttcggctgtagatgggcagcgtcgtctcattgcagtggtaatgggggctgacagtgcaaaaggtcgtgaggaagaggcaagaaaattactgcgttgggggcaacaaaactttactacggtgcaaattttgcaccgtgggaaaaaggtcggaacggaacgcatctggtatggcgataaagaaaatatcgacctaggaacggaacaagagttctggatggtgctaccgaaagccgaaattccacatatcaaagccaaatatacccttgatggtaaagagctcaccgcgccaattagcgcccatcagcgggtaggggaaattgaactttacgaccgtgataaacaggtggcgcactggccgctggttaccctggaatctgtcggggaaggcggcatgttttcccgcctgagtgattatttccaccataaggcctga

SEQ ID NO: 481614 - DNA, 1428 bp, Shigella sonnei
atgatgaatgacggtaagcaacaatctacctttttgtttcacgattacgaaacctttggcacgcaccccgcgttagatcgccctgcacagttcgcagccattcgcaccgataacgaattcaatgtcatcggcgaacccgaagtcttttactgcaagcccgctgatgactatttaccccagccaggagccgtattaattaccggtattaccccgcaggaagcacgggcgaaaggagaaaacgaagccgcgtttgccgcccgtattcactcgctttttaccgtaccgaagacctgtattctgggctacaacaatgtgcgtttcgacgacgaagtcacacgcaacgttttttatcgtaatttctacgatccttacgcctggagctggcagcatgataactcgcgctgggatttgctggatgttatgcgtgcctgttatgccctgcgcccggaaggaataaactggcctgaaaatgatgacggtctaccgagctttcgccttgagcatttaaccaaagcgaatggaattgaacatagcaacgcccacgatgcgatggctgatgtgtacgccactattgcgatggcgaaactggtaaaaacgcgtcagccacgtctgtttgattatctctttacccatcgtaataaacacaaactgatggcgttgattgatgttccgcagatgaaacccctggttcacgtttccggaatgtttggggcatggcgcggcaataccagctgggtggcaccgctggcgtggcatccagaaaatcgcaatgccgtaattatggtggatttggcaggagacatttcgccattactggaactggatagcgacacattgcgcgagcgtttatatactgcaaaagccgatcttggcgataacgccgccgttccggttaagctggtgcatatcaataaatgtccggtgctggcccaggcgaatacgctacgcccggaagatgccgaccgactgggaattaatcgtcagcattgcctcgataacctgaaaattctgcgtgaaaatccgcaagtgcgcgaaaaagtggtggcgatattcgcggaagccgaaccgtttacgccttcagataacgtggatgcacagctttataacggctttttcagtgacgcagatcgtgcagcaatgaaaattgtgctggaaaccgagccgcgtaatttaccggcactggatatcacttttgtcgataaacggattgaaaagctgttgttcaattatcgggcacgcaacttcccggggacgctggattatgccgagcagcaacgctggctggagcaccgccgccaggtcttcacgcccgagtttttacaaggttatgcagatgaattgcagatgctggcacaacaatatgccgataacaaagagaaagtggcgctgttaaaagcgctttggcagtacgcggaagagatcgtctaa

SEQ ID NO: 481615 - DNA, 228 bp, Shigella sonnei
atggcgattaaaaagctggatgtggtgacgcaggtctgtccgtttccactcatagaagcaaaagcagcactggcagaaatggccagcggcgatgagttggtaattgagtttgattgcacccaggcaactgaagcaatcccacagtgggcggcagaagaagggcatgccatcaccgattatcagcagattggcgatgcagcgtggagtatcaccgttcaaaaagcctga

SEQ ID NO: 481616 - DNA, 1005 bp, Shigella sonnei
atgcagcgtgggcgtttttgcctgacaggtggttttcgcgatatgtatatcgcgaaaaataatcgcatgttttacgccttgctgattgcaatttcggtacaaagcgtgggggtttttgcgttaattcaggcgggcctactgacttacgaagccgaggcgttcccgtggcttggtactgttataggtgggtatatcttcgggctgggaattgttctggcgggtggatgtgccaccgggacctggtatcgcgcgggtgagggattgatcggcagttggatcgcgcttttcacttatatggtgatgagtgcggtgatgcgttctccacatgccagtggtttaaatcaaaccttgcagcactacagtactgaacataactctattgctgagacttttaatttgtctgtttggccgttggttgccgttttgctggtgataacgctctgggtggtgatgaaagagttgaagaagccaaaactcaaagtcgcgaccttaccgccgcgccgaactgggatcgctcatattctgtttgaaaaacgctggcatccctttgtcactgctgtactcatcggtttgattgcgcttttagcctggcccctgagtgaagcaaccggacgcatgtttgggttaggaatcacttccccaacggccaatattctgcaatttctggtcgcgggtgacgtgaaatacattaactggggcgttttcctggtgttagggatcttcgtggggtcatttattgcagccaaagcgagccgtgagttccgcgttcgcgcagctgatgcacaaacaacattacgtagcgggttaggtggtgtactgatgggcttcggtgccagtattgcaggtggttgctttatcggtaatggactggttatgactgcaatgatgacctggcagggctggattggccttgtatttatgattctcggagtctggactgcgtcctggcttgtgtatgttcgaccgcagcgtaaggcgcgactggcaactgctgcggcaaattaa

SEQ ID NO: 481617 - DNA, 1359 bp, Shigella sonnei
atgtcgcataacgttactccaaacacctctcgcgtggaattgcgtaaaacgcttacgttagttccggttgtaatgatgggtcttgcctatatgcagccgatgacgctgtttgatacttttggtatcgtttcaggcctcacggatggtcatgtgccgacagcctatgcgttcgcattgattgcgatcctgtttacggctctgagctacgggaagctggttcgccgctatccttctgctggctctgcatatacttacgcccagaaatccattagcccgactgtcggctttatggtgggttggtcttctctgctcgactatctgttcgcgccgatgatcaacattctgctggcgaaaatctattttgaagctctggtgccttccatcccatcgtggatgtttgtggtggcgctggtggcctttatgaccgcctttaacctgcgtagtctgaaatccgtagcgaacttcaacactgtaatcgtcgtgttgcaggtagtgctgatcgcggtgattctgggcatggttgtttatggcgtatttgaaggtgaaggcgctggtacgctggcgagcactcgtccgttctggtctggcgatgcgcatgttattccgatgattaccggggcgacaatcctgtgcttttcctttaccggctttgacggcatcagcaacctgtcggaagaaaccaaagatgcagagcgcgtgatcccgcgtgcgattttcctgaccgcgctgattggcggcatgatcttcatctttgcaacttacttcctgcagctgtacttcccggatatctctcgctttaaagatccggatgcgtcacagcctgaaatcatgctgtacgttgcgggtaaagcgttccaggttggcgcgctgatcttctccaccattaccgtactggcgtccggtatggcggcgcatgcaggcgtagcgcgtctgatgtacgtaatgggtcgtgacggcgtattcccgaaaagcttcttcggttatgtacacccgaaatggcgtactccggcgatgaacatcatcctggttggcgcgattgccctgctggcaatcaacttcgacctggtaatggctacagcgctgattaactttggtgcgttggtggcgttcaccttcgttaacctgtcggtcatctcgcagttctggatccgtgagaagcgtaataagacgctgaaagatcacttccagtatctgttcctgccgatgtgtggtgcgctgaccgttggtgcgctgtgggttaacctggaagaaagctcaatggttctgggtctgatttgggctgctatcggtctgatttacctggcttgcgtcaccaagagcttccgtaacccagttccgcagtacgaagacgttgcataa

SEQ ID NO: 481618 - DNA, 951 bp, Shigella sonnei
atgcactgcaagggggcgtgtatgaaacaactgctggatgtgttgatgatcctcgatgccttagaaaaagaaggcagttttgcggcggcgtcggctaaactctacaagacgccgtccgctctgagttacaccgttcacaagctggaaagcgaccttaatattcaattacttgatcgtagcggtcaccgcgctaaattcacccgtaccggaaaaatgttattagagaaggggcgggaagttctgcataccgtgcgagaactggaaaagcaggcgatcaaactgcatgaaggctgggaaaacgagctggtgattggcgtggacgacacgtttcctttttctctgcttgcgccactgattgaagctttttatcaacatcatagcgtgacgcgcctgaagtttatcaatggcgtactcggtggttcctgggatgccctgactcaggggcgagcggatattattgttggcgcgatgcatgagccaccatcttccagtgagtttggtttctcgcggttgggcgatctggaacaagtctttgcggtcgcgcctcatcatccgttagcccaggaagaagagccgttaaaccgtcgtatcattaagcgatatcgggcgattgtggtgggggacactgcgcaggcaggcgcttctacggcctcacaacttctcgacgaacaagaagccattaccgttttcgattttaaaaccaagctggagctgcaaattagcggcctcggctgcggctatttaccccgttatctggtgcaacgttttctcgatagtggcgcgttaatcgagaagaaagtggtcgcccaaactctctttgaacccgtctggattggctggaacgaacagaccgcagggcttgccagcggctggtggcgggatgaaattttagcaaatagtgcgatcgccggtgtttatgcaaaatctgatgacggaaaatcagccatttaa

SEQ ID NO: 481619 - DNA, 825 bp, Shigella sonnei
atgaaaaaggtcgcaattgtcgggttagggtggttaggcatgccgctggcgatgtcactttcagcgcgaggctggcaagtcaccgggagtaaaaccacacaagatggtgtcgaagcggcccgaatgagtggcattgatagctatctgcttcgcatggagcctgagttagtttgcgattctgacgatctggatgccctgatggatgccgatgcgctggtcattacgcttccggcacgtcgtagcggccccggcgatgagttctatttacaagcggtacaagagttagtggatagcgcgctggcccatcgtattcctcgcattatttttaccagctcaacgtctgtctatggcgacgcgcaaggcacggtgaaagaaaccaccccgcgtaatccggtgaccaacagtggacgagtattagaagaactcgaagactggctgcacaatttacccggtacttcggtcgatattctgcgtcttgcggggctggtcggaccgggacgtcatcccggacgcttctttgccggaaaaaccgcgcctgatggtgaacatggtgttaatttagtccatttagaagatgttattggcgctatcactctgttgttacaggcacctaaaggcggacacatctataatatatgtgcgccagctcaccctgcgcgtaatgttttctatccgcagatggcccgtttactggggctggaacctccgcagttcagaaatagtctggacagcggcaaaggtaagattattgatggcagtcggatttgtaatgaactgggatttgaataccagtatcccgatccgctggtaatgccgctggagtaa

SEQ ID NO: 481620 - DNA, 255 bp, Shigella sonnei; identical to SEQ ID NO: 459512

SEQ ID NO: 481621 - DNA, 252 bp, Shigella sonnei
atgcgtacaattagctacagcgaagcgcgtcagaatttgtcggcaacaatgatgaaagccgttgaagatcatgccccgatccttattactcgtcagaatggagaggcttgtgttctgatgtcactcgaagaatacaactcgctggaagagacggcttatctactgcgctcccccgctaacgcccggagattgatggactcaatcgatagcctgaaatcaggcaaaggaacagaaaaggacattattgagtga

SEQ ID NO: 481622 - DNA, 900 bp, Shigella sonnei
atgacagacaacactcgtttacgcatagctatgcagaaatccggccgtttaagtgatgactcacgcgaattactggcgcgctgtggcattaaaattaatcttcacacccagcgcctgatcgcgatggcagaaaacatgccgattgatattctgcgcgtgcgtgacgacgacattcccggtctggtaatggatggcgtggtagaccttgggattatcggcgaaaacgtgctggaagaagagctgcttaaccgccgcgcccagggtgaagatccgcgctactttaccttgcgtcgtctggatttcggcggctgccgcctttcgctggcaacgccggttgatgaagcctgggacggcccgctctccttaaacggtaaacgtatcgccacctcttatcctcacctgctcaagcgttatctcgaccagaaaggcatctcttttaaatcctgcttactgaacggttctgttgaagtcgccccgcgtgccggactggcggatgcgatttgcgatctggtttccaccggtgccacgctggaagcaaacggcctgcgcgaagtcgaagttatctaccgctcgaaagcctgccttatccagcgcgatggtgaaatggaagaatccaaacagcagctgatcgacaaactgctgacccgtattcagggtgtgatccaggcgcgcgaatcaaaatacatcatgatgcacgcaccgaccgaacgtctggatgaagtcatcgccctgctgccaggtgccgaacgcccaaccattctgccgctggcgggtgaccaacaacgcgtagcgatgcacatggtcagtagcgaaaccctgttctgggaaacgatggaaaaactgaaagcgctgggtgccagttcaattctggtcctgccgattgagaagatgatggagtga

SEQ ID NO: 481623 - DNA, 1305 bp, Shigella sonnei
atgagctttaacacaatcattgactggaatagctgtactgcggagcaacaacgccagctgttaatgcgcccggcgatctccgcttctgaaagcattacccgcactgttaacgatattctcgataacgtgaaagcacgcggtgatgacgccctgcgggaatacagcgcgaagtttgataaaaccacggttaacgcgctgaaggtgtctgctgaggagattgccgccgctagcgaacgcctgagcgacgagctaaaacaggcgatggcggtggcagtaaaaaatattgaaaccttccacactgcgcaaaaactgccgccggtagatgtagaaacgcagccaggcgtgcgttgccagcaggtcacgcgcccggtcgcttcagttgggttgtatattcctggcggctccgccccgctcttctcaacggtattaatgctggcgactccggcgcgtattgcgggctgtaaaaaagtggtgctgtgctcaccgccgccgattgccgatgagatcctttatgcggcgcagctgtgcggtgtgaaggacgtgtttaacgtcggcggcgcacaggccattgccgcgctggcgtttggtacggaatctgtgccgaaagtggacaaaatcttcgggccgggtaacgcctttgtcaccgaagcgaaacgtcaggtgagccagcgtctggacggtgcggctatcgatatgcccgcaggcccgtcggaagtgttggtcattgccgacagcggcgcaacgccggatttcgtggcttctgatttgctttctcaggctgaacacggcccggactcacaggtgattttactgacgcctgacgctgatatggcgcatcaagttgccgaagccgtcgaacgccagttagcagaactgccgcgtgccgaaaccgcccgccaggcactgaacgccagccgcctgatcgtgactaaagatttagcgcagtgcgtagagatctccaaccagtacggcccggagcacctgatcatccagacccgcaacgcccgcgatctggtcgatggcatcaccagcgccggttcggtatttcttggtgactggtcaccggaatcggcaggtgattacgcctccggcaccaaccacgttctgccgacttacggttacaccgccacctgttccagcctcgggctggcagatttccagaagcgtatgaccgtgcaggaactgtcgaaagaaggtttctccgcgctggcttcgaccattgaaacattggccgccgccgagcgcctgaccgcccataaaaatgccgttactttgcgtgttaacgcccttaaggagcaagcatga

SEQ ID NO: 481624 - DNA, 1071 bp, Shigella sonnei
atgagcaccgtgactattaccgatttagcgcgtgaaaacgtccgcaacctgacgccgtatcagtcggcgcgtcgtctgggcggtaatggcgacgtctggctgaacgccaacgaataccccactgccgtggagtttcagcttactcagcaaacgctcaaccgctacccggaatgtcagccgaaagcggtgattgaaaattacgcgcaatatgcaggcgtaaaaccggaacaggtgctggtcagtcgtggcgcggacgaaggtattgaactgctgattcgcgctttttgcgaaccgggtaaagacgccatcctctactgcccgccaacgtacggcatgtacagcgtcagcgccgaaacgattggcgtcgagtgccgcacagtgccgacgcaggacaactggcaactggacttacagggcatttccgacaagctggacggcgtaaaagtggtctatgtttgcagccccaacaacccgacagggcaactgatcaatccgcaggattttcgcactctgctggagctaacccgcggaaaagccattgtggttgccgatgaagcctatatcgagttttgcccgcaggcatcgctggctggctggctgacggaatatccgcacctggctattttgcgcacactgtcgaaagcttttgctctggcgggccttcgttgcggatttacgctggcaaacgaagaagtcatcaacctgctgatgaaagtgatcgccccctacccgctctcgacgccggttgccgacattgcggcccaggcgttaagcccgcagggaatcgtcgctatgcgcgaacgagtgacgcaaattattgcagaacgcgaatacctgattgccgcactgaaagagatcccctgcgtagagcaggttttcgactccgcaaccaactacattctggcgcgctttaaagcctccagcgcagtgtttaaatctttgtgggatcagggcattatcttacgtgatcagaataaacaaccctctttaagcggctgcctgcgaattaccgtcggaacccgtgaagaaagccagcgcgtcattgacgccttacgtgcggagcaagtttga

SEQ ID NO: 481625 - DNA, 1068 bp, Shigella sonnei
atgagtcagaagtatctttttatcgatcgcgatggaaccctgattagcgaaccgccgagtgattttcaggtggaccgttttgacaaactcgcctttgaaccaggcgtgatcccggaactgctgaagctgcaaaaagcgggctacaaactggtaatgatcaccaatcaggatggtctgggaacacaaagtttcccgcaggcggatttcgatggcccgcacaacctgatgatgcagatcttcacctcgcaaggcgtacagtttgatgaagtgctgatttgtccgcacctgcccgccgatgagtgcgactgccgtaagccgaaagtaaaactggtggaacgttatctggctgagcaagcgatggatcgcgctaacagttatgtgattggcgatcgcgcgaccgacattcaactggcggaaaacatgggcattaatggtttacgctacgaccgcgaaatcctgaactggccaatgattggcgagcagctcactaaacgagaccgttacgctcacgtagtgcgcaacaccaaagagacacagattgacgttcaggtgtggctggatcgcgaaggtggcagcaagattaacaccggtgttggcttctttgatcacatgctggatcagatcgccacccacggtggtttccgtatggaaatcaacgtcaaaggcgacctctatatcgacgatcaccacaccgtcgaagataccggcctggcgctgggcgaagcgttaaaaatggctcttggcgacaaacgcggtatttgccgctttggttttgtgctaccgatggacgaatgccttgcccgctgcgcgctggatatctctggtcgcccgcacctggaatacaaagccgagtttacctaccagcgcgtgggcgatctcagcaccgagatgatcgagcacttcttccgttcgctctcatacaccatgggcgtgacgctacacctgaaaaccaaaggtaaaaacgatcaccaccgtgtagagagcctgttcaaagcctttggtcgcaccctgcgccaagccatccgcgtggaaggcgacaccctgccctcgtcgaaaggagtgctgtaa

SEQ ID NO: 481626 - DNA, 591 bp, Shigella sonnei
atgaacgtggtgatccttgataccggctgcgccaatctgaactcggtgaagtcagccattgcgcgccacggttatgaaccaaaagtcagccgtgacccggacgtggtgttgctggccgataaactatttttacccggcgttggcactgcgcaagcagcgatggatcaggtgcgtgagcgcgagctgtttgatctcatcaaagcctgtacccaaccggtactgggcatctgcttagggatgcaactgctgggtcggcgcagcgaagagagcaacggcgtcgacttgctgggcatcattgacgaagacgtgccgaaaatgaccgactttggtctgccgctgccgcatatgggctggaatcgcgtttacccgcaggcaggcaaccgcctgtttcaggggattgaagacggcgcgtacttttactttgttcacagttacgcaatgccggtcaatccgtggaccattgcccaatgtaattacggcgaaccgttcaccgcggcggtacaaaaagataacttctacggcgtgcagttccacccggagcgttctggtgccgctggcgctaagttgctgaaaaacttcctggagatgtga

SEQ ID NO: 481627 - DNA, 738 bp, Shigella sonnei
atgattattccggcattagatttaatcgacggcaccgtggtgcgtctccatcagggcgattacggcaaacaacgcgattacggtaacgacccgctgccgcgcttacaggattacgccgcgcagggtgccgaagtgctgcatctggtggatctgaccggggcaaaagatccggcaaaacgtcaaatcccgctgattaaaaccctggtcgcgggcgttaacgttccggtgcaggttggcggcggtgtgcgtagcgaagaagacgtggcggcgttactggaagcgggcgttgcgcgcgtggtggttggctccaccgcggtgaaatcaccagaaagggtgaaaggctggtttgaacgtttcggtgccgatgccttagtgctggcgctggatgtccgtattgacgagcaaggcaacaagcaggtggcggtcagcggctggcaagagaactcgggcgtttcactggaacaactggtggaaacctatctgcctgtcggcctgaaacatgtgctgtgtaccgatatctcgcgcgacggcacgctggcaggctctaacgtctctttatatgaagaagtgtgcgccagatacccgcaggtggcatttcagtcctccggcggtattggcgacattaacgatgttgctgccctgcgaggcactggcgtgcgcggcgtaatagttggtcgtgcattactggaaggtaaattcaccgtgaaggaggccatcgcatgctggcaaaacgcataa

SEQ ID NO: 481628 - DNA, 777 bp, Shigella sonnei
atgctggcaaaacgcataatcccatgtctcgacgttcgtgatggtcaggtggtgaaaggcgtacagtttcgcaaccatgaaattattggcgatattgtaccgctggcaaaacgctacgccgaagaaggtgcagacgaactggtgttctacgatatcaccgcttccagcgatggccgtgtggtagataaaagctgggtatctcgcgtggcggaagtgatcgacattccgttctgcgtggcgggtgggattaagtctctggaagatgccgcgaaaattctttcctttggcgcggataaaatttccatcaactcccctgcgctggcagacccaaccttaattactcgcctggcggatcgctttggcgtgcaatgcattgtggtcggcattgatacctggtacgacggcgaaaccggtaaatatcatgtgaatcaatataccggcgatgaaagccgcacccgcgtcactcagtgggaaacactcgactgggtacaggaagtgcaaaaacgtggagccggagaaatcgtcctcaacatgatgaatcaggacggcgtgcgtaacggttacgatctcgaacaactgaaaaaagtgcgtgaagtttgccacgtcccgctaattgcctccggtggcgcgggcaccatggaacacttcctcgaagccttccgcgatgccgacgttgacggcgcgctggctgcttccgtattccacaaacaaataatcaatattggtgaattaaaagcgtacctggcaacacagggcgtggagatcaggatatgttaa

SEQ ID NO: 481629 - DNA, 612 bp, Shigella sonnei
atgttaacagaacaacaacgccgcgaactggactgggaaaaaaccgacggactaatgccggtaattgtgcaacacgcggtatccggcgaagtgttaatgctgggctatatgaacccggaagccttagacaaaaccatcgaaagcggcaaagtcaccttcttctcgcgcactaaacagcgactgtggaccaaaggcgaaacgtcgggcaatttcctcaacgtagtaaatattgcgccggactgcgacaacgacacgctactggtactggcgaatcctatcggaccaacctgccacaaaggcaccagcagctgcttcggcgacaccgctcaccaatggctgttcctgtatcaactggaacaactgctcgccgaacgcaaatctgccgacccggaaacctcctataccgccaaactgtatgccagcggcaccaaacgcattgcgcagaaagtgggcgaagaaggcgtagaaaccgcactggcagcgacggtacatgaccgctttgagctgaccaacgaggcatcggacttgatgtatcacctgctggtgctgttgcaggatcaggatctggatttaacgacggtaattgagaacctgcgtaaacggcatcagtga

SEQ ID NO: 481630 - DNA, 978 bp, Shigella sonnei
atgagagtagaaaataataatgtttctgggcaaaaccatgacccggaacagattgatttgattgatttactagtgcagttgtggcgtggcaagatgacaatcatcatttccgtcattgtggctattgccctggctattggatatttggcagtagcgaaggagaaatggacgtcaacagcaattatcactcagcccgacgtggggcaaattgctggctataacaatgccatgaatgttatctatggtcaggctgcaccgaaagtatcggatttacaggagacgttaattggtcgcttcagttctgccttctctgcattagcagaaacgctggataatcaggaagaaccagaaaaacttaccatcgaaccttctgttaagaaccagcaattaccattgactgtttcttatgttgggcaaactgcagagggagcacaaatgaagttggcccaatacattcagcaagttgatgataaagtgaatcaagagctagaaaaggatctcaaagacaacattgctctgggacggaaaaacttgcaggactctttaagaacgcaggaagtagtcgcgcaggagcagaaagatctgcgtatccgtcagattcaggaagcgttgcagtatgcgaatcaggcgcaggtggcaaagccacaggttcagcagactgaagatgtgacacaagatacgttgttccttttggggagcgaagcgctggagtcgatgattaagcatgaggcgacccgtccgttggtgttctcaccaaactactatcagacacgtcaaaacctgttggatattgaaaacttaaaggttgatgatcttgatattcatgcttaccgttatgtgatgaaaccgacgttacctattcgtcgcgatagcccgaaaaaggcaattaccttgattctggcggtgctgctgggcggcatggttggcgcggggattgtgctggggcgtaacgctctgcgtaattataacgcgaagtaa

SEQ ID NO: 481631 - DNA, 1167 bp, Shigella sonnei
atgaaaatcaccatttccggtactggctatgtaggcttgtcaaacgggcttctaatcgcacaaaatcatgaggttgtggcattagatattttaccgtcacgcgttgctatgctgaatgatcggatatctcctattgttgataaggaaattcagcagtttttgcaatcagataaaatacactttaatgccacattagataaaaatgaagcttaccgggatgctgattatgtcatcatcgccactccaaccgactatgatcctaaaactaattatttcaatacatccagtgtagaatcagtaattaaagacgtagttgagataaatccttatgcggttatggtcatcaaatcaacggttcccgttggttttaccgaagcgatgcataagaaatatcgtactgaaaatattattttctctccggaatttctccgtgaaggtaaagccctttacgataatctccatccttcacgtattgtcatcggtgagcgttcagaacgcgcagaacgttttgctgcgttgttacaggaaggcgcgattaagcaaaatatcccgaccctgttcaccgattcgaccgaagcagaagcgattaaactttttgcaaacacctacctagcgatgcgcgtggcatactttaacgaactggatagctacgcagaaagtttaggtctgaatactcgccagattatcgaaggcgtttgtctcgatccgcgtattggcaaccattacaacaacccgtcgtttggttatggtggttattgcttgccgaaagataccaagcagttactggcgaactatcagtctgtgccgaataacctgatctcggcaattgtcgatgcaaaccgcacgcgtaaggattttattgccgatgccattttgtcacgcaaaccgcaagtggtgggtatttatcgtctgattatgaagagcggttcagataacttccgtgcgtcttctattcaggggattatgaagcgtatcaaggcgaaaggcgttgaagtgatcatctacgagccagtgatgaaagaagactcattcttcaactctcggctggaacgtgatctcgccatcttcaaacaacaagccgacgtcattatctctaaccgaatggcagaagagcttaaagatgtggcagataaggtatacacccgcgatctctttggcagcgactaa

SEQ ID NO: 481632 - DNA, 1407 bp, Shigella sonnei
atgtcaaagcaacagatcggcgtagtcggtatggcagtgatggggcgcaaccttgcgctcaacatcgaaagccgtggttataccgtctctattttcaaccgttcccgtgaaaagacggaagaagtgattgccgaaaatccaggcaagaaactggttccttactatacggtgaaagagtttgttgaatctctggaaacgcctcgtcgcatcctgttaatggtgaaagcaggtgcaggcacggatgctgctattgattcgctcaaaccatatctcgataaaggcgacatcatcatcgatggtggtaacaccttcttccaggacaccattcgtcgtaaccgtgagctttctgccgaaggctttaacttcatcggtaccggtgtttccggcggagaagagggggcgctgaaagggccgtccatcatgcctggtggccagaaagaagcctatgaactggttgcgccgatcctgaccaaaatcgccgccgttgctgaagatggcgaaccgtgcgttacctatatcggtgctgatggcgcaggccattatgtgaagatggttcacaacggtattgaatacggtgatatgcaactgattgctgaagcctattctctcctgaaaggcggcctgaatctctctaacgaagaactggcacagacctttaccgagtggaataacggtgaactgagcagctacctgatcgacatcaccaaagatatcttcactaaaaaagatgaagacggtaactacctggttgatgtgatcctggatgaagcggctaacaaaggtaccggtaaatggaccagccagagcgcgctggatctcggagaaccgctgtcgctgattaccgagtctgtgtttgcacgttatatctcttctctgaaagatcagcgcgttgccgcatctaaagttctctctggtccgcaagctcagtcagcaggcgacaaggctgagttcatcgaaaaagttcgccgtgcgctgtatctgggcaaaatcgtttcttacgctcagggcttctctcagctgcgtgctgcgtctgaagaatacaactgggatctgaactacggcgaaatcgcgaagattttccgtgctggctgcatcatccgtgcgcagttcctgcagaaaatcaccgatgcatatgccgaaaatccgcagatcgctaacctgctgctggctccgtacttcaagcaaattgccgatgactaccagcaggcgctgcgtgatgtcgttgcttatgcagtacagaacggtatcccggttccgaccttcgccgctgcggttgcctattacgatagctaccgtgccgctgttctgcctgcgaacctgatccaggcacagcgtgactatttcggtgcacatacttataagcgcattgataaagaaggtgtgttccatactgaatggctggattaa

SEQ ID NO: 481633 - DNA, 1371 bp, Shigella sonnei
atgaaaaaattaacctgctttaaagcctatgatattcgcgggaaattaggcgaagaactgaatgaagatatcgcctggcgcattggtcgcgcctatggcgaatttctcaaaccgaaaaccattgtgttaggcggtgatgtccgcctcaccagcgaaaccttaaaactggcgctggcgagaggtttacaggatgcgggcgtcgatgtgctggatattggcatgtccggcaccgaagagatctatttcgccacgttccatctcggcgtggatggcggcattgaagttaccgccagccataacccgatggattacaacggcatgaaactggtgcgcgaaggggctcgcccgatcagcggtgataccggactgcgcgatgtccagcgtctggcagaagccaacgactttcctcccgttgatgaaaccaaacgcggtcgctatcagcaaatcaatctgcgtgacgcttacgttgatcacctgttcggttatatcaatgtcaaaaacctcacgccgctcaagctggtgattaactccgggaatggcgcagcgggtccggtggtggacgccatcgaagcccgctttaaagcccttggcgcacccgtggaattaatcaaagtgcacaacacgccggacggcaatttccccaacggtattcctaacccgctactgccggaatgccgcgacgacacccgcaatgcggtcatcaaacacggtgcggatatgggcattgcttttgatggcgattttgaccgctgcttcctgtttgacgaaaaagggcagtttattgagggctactacattgtcggcctgctggcagaagcattcctcgaaaaaaatcccggcgcgaagatcatccacgatccgcgtctcttctggaacaccgttgatgtggtgactgccgcaggcggcacgccggtgatgtcgaaaaccggacacgcctttattaaagaacggatgcgcaaggaagacgccatctacggtggtgaaatgagcgcccaccattacttccgtgatttcgcttactgcgacagcggcatgatcccgtggctgctggtcgccgaactggtgtgcctgaaaggaaaaacgctgggcgaactggtgcgcgaccggatggcagcgtttccggcaagcggtgagatcaacagcaaactggcgcaaccctttgaggcgattaaccgcgtggaacagcattttagccgcgaggcgctggcggtggatcgcaccgatggcatcagcatgacctttgccgactggcgctttaacctgcgcacctccaacaccgaaccggtggtgcggttgaatgtggaatctcgcggtgatgtgccgctgatggaagaaaagacaaaacttattcttgagttactgaacaagtaa

SEQ ID NO: 481634 - DNA, 1437 bp, Shigella sonnei
atggcgcagtcgaaactctatccagttgtgatggcaggtggctccggtagccgcttatggccgctttcccgcgtactttaccccaagcagtttttatgcctgaaaggcgatctcaccatgctgcaaaccaccatctgccgcctgaacggcgtggagtgcgaaagcccggtggtgatttgcaatgagcagcaccgctttattgtcgcggaacagctgcgtcaactgaacaaacttaccgagaacattattctcgaaccggcagggcgaaacacggcacctgccattgcgctggcggcgctggcggcaaaacgtcatagcccggagagcgacccgttaatgctggtattggcggcggatcatgtgattgccgatgaagacgcgttccgtgccgccgtgcgtaatgccatgccatatgccgaagcgggcaagctggtgaccttcggcattgtgccggatctaccagaaaccggttatggctatattcgtcgcggtgaagtgtctgcgggtgagcaggatacggtggcctttgaagtggcgcagtttgtcgaaaaaccgaatctggaaaccgcccaggcctatgtggcaagcggcgaatattactggaacagcggcatgttcctgttccgcgccggacgctatctcgaagaactgaaaaaatatcgtccggatattctcgatgcctgtgaaaaagcgatgagcgccgtcgatccggatctcgattttattcgtgtggatgaagaagcgtttctcgcctgcccggaagagtcggtggattacgcggtcatggaacgtacggcagatgccgttgtggtgccgatggatgcgggctggagcgatgtcggctcctggtcctcattatgggaaattagcgcccacaccgccgagggcaacgtttgccacggcgatgtgattaatcacaaaactgaaaacagctatgtgtacgccgaatctggcctcgtaaccaccgtcggggtgaaagatctggtagtggtgcagaccaaagatgcggtgctgattgccgaccgtaacgcggtgcaggatgtgaaaaaagtggtcgagcagatcaaagccgatggtcgccatgagcatcgggtgcatcgcgaagtctatcgcccgtggggcaaatatgactctatcgacgcgggcgaccgctaccaggtgaaacgcatcaccgtgaaaccgggcgagggcttgtcggtacagatgcaccatcaccgcgcggaacactgggtggttgtcgcgggaacggcaaaagtcaccattgatggtgatatcaaactgcttggtgaaaacgagtccatttatattccgctgggggcgatgcattgcctggaaaacccggggaaaattccgctcgatttaattgaagtgcgctccggctcttatctcgaagaggatgatgtggtgcgtttcgcggatcgctacggacgggtgtaa

SEQ ID NO: 481635 - DNA, 1224 bp, Shigella sonnei
atgaaaatactggtctacggcattaactactcgccggagttaaccggtatcggcaaatacaccggcgagatggtggaatggctggcggcacaaggtcatgaggtgcgggttattaccgcaccgccttactacccgcagtggcaggtgggcgagaactattccgcctggcggtacaaacgagaagagggggccgccacggtgtggcgctgcccgctgtacgtgccaaaacagccgagcaccctgaaacgcctgttacatctcggcagttttgccgtcagcagtttctttcctctgatggcgcaacgtcgctggaagccggatcgcattatcggcgtggtgccaacgctgttttgcacgccgggaatgcgcctgctggcgaaactttctggtgcgcgtaccgtgctgcatattcaggattacgaagtggacgccatgctggggctgggccttgccggaaaaggcaaaggcagcaaagtggcacagctggcaacggcgttcgaacgtagcggactgcataacgtcgataacgtctccacgatttcgcgttcgatgatgaataaagccatcgaaaaaggcgtggcggcggaaaacgtcatcttcttccccaactggtcggaaattgcccgttttcagcatgttgcagatgccgatgttgacgcccttcgtaaccagcttgacctgccggataacaaaaaaatcattctttactccggcaatattggtgaaaagcaggggctggaaaacgttattgaagctgccgatcgtctgcgcgatgaaccgctgatttttgccattgtcgggcagggcggcggcaaagcgcggctggaaaaaatggcgcagcagcgtggactgcgcaacatgcaatttttcccgctgcaatcgtatgacgctttacccgcactgctgaagatgggcgattgccatctggtggtgcaaaaacgcggcgcggcagatgccgtattgccgtcgaaactgaccaatattctggcggtaggcggtaacgcggtgattaccgcagaggcccacacagaactggggcagctttgcgaaacctttccgggcattgcggtttgcgtagaaccggaatcggtcgaggcgctggtggcggggatccgtcaggcgctcctgctgcccaaacacaacacggtggcacgtgaatatgccgaacgcacactcgataaagagaacgtgttacgtcaatttataaatgatattcggggataa

SEQ ID NO: 481636 - DNA, 483 bp, Shigella sonnei
atgatgtttttacgtcaggaagactttgccacggtagtgcgctccaccccgcttgtctctctcgactttattgtcgagaacagtcgcggtgagtttctgcttggcaaaagaaccaaccgcccggcgcagggttactggtttgtgccgggagggcgcgtgcagaaagacgaaacgctggaagccgcattcgagcggctgacgatggcggaactggggctgcgtctgccgataacagcaggccagttttacggtgtctggcagcacttttatgacgataacttctccggcacggatttcaccactcactatgtggtgctcggttttcgcttcagagtcgctgaagaagagctgatactgccggatgagcagcatgacgattaccgctggctgacgccggacgcgctgctcgccagtaacgatgttcacgctaacagccgcgcctattttctcgctgagaagcgtgccggagtacccggattatga

SEQ ID NO: 481637 - DNA, 966 bp, Shigella sonnei
atgagtaaacaacgcatttttatcgctggccatcgtgggatggtcggttctgccatcaggcggcagctcgaacagcgcggtgatgtggaactggtattacgcacccgcgacgagctgaacctgctggacagccgcgcggtgcatgatttctttgccagcgaacgcattgaccaggtctatctggcggcggcgaaagtgggcggcattgttgccaacaacacctatccggcggatttcatctaccagaacatgatgattgagagcaacatcattcacgccgcgcatcagaacgacgtgaacaaactgctgtttcttggatcgtcctgtatctacccgaaactggcaaaacagccgatggcagaaagcgagttattgcagggcacgctggagccgaccaacgagccttacgccattgccaaaatcgccgggatcaaactgtgcgaatcatacaaccgccagtacggacgcgattaccgctcagtcatgccgaccaacctgtatggcccgcatgacaacttccacccgagtaattcgcatgtgatccctgcattgctgcgtcgcttccacgaggcgacggcacagaatgcaccggacgtggtggtatggggcagcggtacaccgatgcgtgaattcctgcacgtcgatgatatggcggcggcgagcattcatgtcatggagctggcgcacgaagtctggctggagaacacccagccgatgctgtcgcacattaacgtcggcacgggcgttgactgcactatccgcgagctggcgcaaaccatcgccaaagtggtgggttacaaaggtcgggtggtttttgatgccagcaaaccggatggtacgccgcgcaaactgctggatgtgacgcgcctgcatcagcttggctggtatcacgaaatctcactggaagcggggcttgccagcacttaccagtggttccttgagaatcaagaccgctttcgggggtaa

SEQ ID NO: 481638 - DNA, 1122 bp, Shigella sonnei
atgtcaaaagtcgctctcatcaccggtgtaaccggacaagacggttcttacctggcagagtttctgctggaaaaaggttacgaggtgcatggtattaagcgtcgcgcatcgtcattcaacaccgagcgcgtggatcacatttatcaggatccgcacacctgcaacccgaaattccatctgcattatggcgacctgagtgatacctctaacctgacgcgcattttgcgtgaagtacagccggatgaagtgtacaacctgggcgcaatgagccacgttgcggtctcttttgagtcaccagaatataccgctgacgtcgacgcgatgggtacgctgcgcctgctggaggcgatccgcttcctcggtctggaaaagaaaactcgtttctatcaggcttccacctctgaactgtatggtctggtgcaggaaattccgcagaaagaaaccacgccgttctacccgcgatctccgtatgcggtcgccaaactgtacgcctactggatcaccgttaactaccgcgaatcctacggcatgtacgcttgtaacggaattctcttcaaccatgaatccccgcgccgcggcgaaaccttcgttacccgcaaaatcacccgcgcaatcgccaacatcgcccaggggctggagtcgtgcctgtacctcggcaatatggattccctgcgtgactggggccacgccaaagactacgtaaaaatgcagtggatgatgctgcaacaggaacagccggaagatttcgttatcgcgaccggcgttcagtactccgtgcgtcagttcgtggaaatggcagcggcacagctgggcatcaaactgcgctttgaaggcacgggtgttgaagagaagggcattgtggtttccgtcaccgggcatgacgcgccgggcgttaaaccgggtgatgtgattatcgccgttgatccgcgttacttccgtccggctgaagttgaaacgctgctcggcgacccgaccaaagcgcacgaaaaactgggctggaaaccggaaatcaccctcagagagatggtgtctgaaatggtggctaatgacctcgaagcggcgaaaaaacactctctgctgaaatctcacggctacgacgtggcgatcgcgctggagtcataa

SEQ ID NO: 481639 - DNA, 549 bp, Shigella sonnei; identical to SEQ ID NO: 462802

SEQ ID NO: 481640 - DNA, 747 bp, Shigella sonnei
atgttgcttagcataatcactgtcgcgtttcgtaacctcgaagggatagtcaaaacacatgcctcgctggcgcatctggcgcaggcggaagatatcagcttcgaatggattgttgtcgatggcggttccaatgacggcacccgtgagtatctggaaaatctcaatggtatctataacctacgctttgtcagcgagccagataacggtatctacgacgccatgaacaaaggcattacgatggcacaaggcaagttcgcgttgtttctcaattcgggcgatatttttcatcaggatgccgcaaattttgtccgtaagttaaaaatgcaaaaagataacatgatgatcaccggcgatgcgctgctggattttggcgacgggcataaaattaaacgtagcgccaaaccgggctggtatatttatcacagcctgcccgccagtcatcaggcgatatttttccctgtatccggcttgaaaaaatggcgttatgacctggaatataaagtttcttccgactacgcgctggcagccaaaatgtataaagccggttatgcatttaaaaaactcaatggcctggtgtctgaattttccatgggtggggtatctaccaccaataatatggaattgtgtgctgacgcgaaaaaagtccaacgacaaatattacatgtgcctggcttttgggctgaattatcctggcatttacgccaacgtactacctcaaagacgaaagccttatataacaaagtctga

SEQ ID NO: 481641 - DNA, 1218 bp, Shigella sonnei
atgtcaacttctatcagaatctgtagctacctgctgctgccgctgatctacctgctggttaacgtcaaaatcgcccagcttggcgaaagtttccccatcaccatcgtcacttttttacctgtcttgttactgctgtttttagaacgcatcagcgttaaaaaattgatgattgccttagggattggtgcgggactcacggcgtttaactatctgtttggtcagtcgctggatgccagtaaatacgtcacttcaaccatgctgtttgtctatattgtgatcattattggcatggtgtggagtattcgctttaaaacgatttcgccacacaaccatcgcaagatattacgtttcttttatctggtgatcgggctggtggtggcgctggcggcggtggagatggcgcaaattatcctcaccggtggcagcagtattatggagtcgatttcgaaatatctgatttacagcaacagctatgtactgaatttcattaaattcggcggcaagcgcacgacagcactttatttcgaaccggcatttttcgctctggcattaatctcaatttggctcagcatcaaacagtttggtatcaaaacgcctaaaaccgatgctatgattctcgcagggataatattatccggatcgttttcaggggttatgacttttatcctgttttatttgctggagtgggcatttcaatatctgaataaagaggcgattaagaaaaagttaccgttggcattgatttctctggctgtattcctggttggtgtggtaatcgcgtttccttatatttccacccgtctgggcgatttaggtacggaaggatcgtcatcgtattatcgtattgtcggtccgctggtgatggtcggttattctttgacccatattgacggtgtagtcagatttggctcactttatgaatacgtcgcatcattcggaatatttaacggtgcggatgtcggaaaaaccatagacaatggtttgtatctgctgattatttatttttcctggttcgcagtgtttttatcgctgtggtacatggggaaagtgataaaaatgatgatcaacgcttttggtgataaccgcaattttcgcgtgcaattatatctttttactccggtatcgctgttttttaccggttcgatatttagcccggaatatgcatttttaatcgtctgtccgtttattttgcgaaaagcgttaaatattacgaggtaa

SEQ ID NO: 481642 - DNA, 1218 bp, Shigella sonnei
atgaatattctgcaatttaatgtgcgactggcggaaggcggggcagcaggtgtggcgttagatctccaccagcgtgcgctgcaacaggggctggcgtcacattttgtctacggttatggcaaaggcggcaaagagagcgtcagccatcagaactatccgcaggtcatcaaacatacgccgcggatgaccgcgatggcgaatattgccctgtttcgtctgtttaatcgcgatctgtttggcaatttcaatgagttatatcgcaccattactcgcacaccgggtccggtggtcctgcattttcatgtgctgcacagctactggctaaatcttaagagcgtggtgcgcttttgcgaaaaagtgaaaaaccataaaccggacgtcactctggtctggacgctgcacgaccactggagtgttaccggacgctgcgcctttaccgacggttgcgaaggctggaaaacgggctgccagaaatgcccgaccttaaataactatccgccggtgaagattgatcgcgcacaccagctggtggcgggcaaacgccagttattccgtgagatgctggcgctgggctgtcagtttatttcccccagccagcatgtggctgacgctttcaatagcctgtacggtccagggcgttgccggattatcaataatggtattgatatggcaaccgaagcgattctggcggacttgcctccggtgcgcgaaacccagggcaagccgaaaatcgcggtggtggcgcatgacttgcgttacgacggcaagactaaccagcaactggtgcgtgagatgatggcgctgggcgacaaaatcgaactgcatacctttggtaagttctcgccgttcaccgctggcaacgtggttaatcacggctttgaaactgacaagcgcaagttgatgagcgcgctcaatcagatggatgcgctggtattcagttctcgcgtcgataactacccgctgattttgtgtgaggcgttatcaattggcgtgccggtgattgccacccatagcgacgcggcacgggaagtgttgcaaaaatccggcggtaaaaccgtcgacgaagaagacgtgctgcaactggtgcagttaagcaaaccggaaatcgcgcaggcgatatttggtaccacgctggctgagttcagccaacgcagccgcgccacctacagtggacaacagatgctggaggagtatgtcaacttctatcagaatctgtag

SEQ ID NO: 481643 - DNA, 489 bp, Shigella sonnei
atgctggaagatctgcgtgccaacagctggagtttacgcccgtgctgcatggttcttgcctatcgtgttgctcatttttgttcggtgtggcgcaaaaagaacgtcctcaacaatctgtgggcggccccgctgctggtgctgtatcgcattatcaccgaatgctttttcggttatgaaatccaggccgccgcgaccattggccgccgctttactatccatcacggttacgccgtagtgatcaataaaaacgtggtagcgggggatgatttcaccattcgccacggcgtcactatcggcaatcgtggtgccgataacatggcatgtccacacattggcaacggcgtcgaactcggtgccaacgtcattattcttggtgatatcacgcttggtaacaacgtcaccgtgggtgcgggcagcgtggtgctcgactctgtcccggacaacgcgctggtggtgggagaaaaagcgcgagtgaaggtaattaaatga

SEQ ID NO: 481644 - DNA, 840 bp, Shigella sonnei
atgaaagagaatccgctgatttcaatctatatgccgacctggaaccgtcaacaactggcgattcgggcgataaaatcggtcctgcgccaggactacagcaactgggagatgatcatcgtggatgattgctccacctcctgggaacaactgcaacagtacgtcactgccctcaacgatccgcgtatcacctacattcacaacgacattaacagcggggcgtgcgcggtacgtaaccaggcgattatgctggcgcaaggggaatacattaccgggatcgatgacgatgacgaatggacacccaaccgtctgagcgtcttcctcgcccataaacagcaactggtcactcacgcctttttgtacgctaacgactacgtatgccagggagaagtttattcccaaccggcaagcttaccactgtatcccaaatcgccgtactcacgccgcctgttctataaacgcaatatcattggcaatcaggtctttacttgggcatggcgtttcaaagagtgtttgttcgataccgaactgaaagcagcacaggattacgacatcttcctgcggatggtggtggagtacggcgaaccgtggaaagtggaagaagcgacgcagatcctgcatatcaatcacggtgaaatgcagatcacctcgtcaccgaaaaaattctccgggtacttccacttttaccgaaagcacaaagataaatttgaccgtgcaagcaaaaaatatcagctgtttaccctctaccagatccgcaataaacgtatgacctggcgcactttgctgacgctgctgtcggtgcgtaacggcaaacgtctggctgatggtattcgggggcgctaa

SEQ ID NO: 481645 - DNA, 2163 bp, Shigella sonnei
atgacagaaaaagtaaaacaacatgccgctccggtaacgggcagtgatgaaatcgatattggtcgcctggtcggcaccgtcattgaagcgcgctggtgggtgattggcatcaccgctgtatttgccctctgtgccgtggtttacaccttcttcgcaacgccgatttatagtgccgacgcactggtacaaatcgagcaaaacagcggcaattcgttagtgcaggacattggttcggcattagccaacaaaccgcctgcatcggacgccgagatccagttgattcgttcgcgtctggtgcttggtaaaacggtggacgatctcgacctcgatattgcagtgagcaaaaacacgttcccgattttcggggcgggctgggagcgactgatgggacgccagaacgagacggtgaaagtgactacctttaaccgcccgaaagagatggcgggccaggtgtttacgcttaatgtgctggacaataaaaactacaccctgagcagtgatggcggctttagcgcccgtgggcaagcgggccagatgctgaaaaaagaaggcgtcacgctgatggttgaagccattcacgcccgcccgggcagtgagtttaccgtcaccaaatactccacgttggggatgatcaaccaactgcaaaacagcctgacggtaacggagaacggcaaagacgcaggcgtactgagcctgacttataccggtgaagatcgcgaacagatccgcgacattcttaacagcatcgcccgtaactatcaggaacaaaatattgagcgcaaatcggcggaagcgtcgaaaagcctcgctttcctcgcgcaacagttaccggaagtacgtagccgcctcgatgttgccgaaaacaaactgaatgccttccgtcaggataaagattctgttgatctgccgctggaagcgaaagcggtgctcgattcgatggtgaacatcgacgcgcagttgaacgaactgacctttaaagaggcggaaatctccaagctgtacaccaaagttcacccggcgtaccgcacgctgctggagaaacgtcaggcgctggaagaagagaaagccaaacttaacggtcgcgtaacggcgatgccgaaaacccagcaggagattgtgcgcctgacccgcgatgtcgagtctggtcagcaggtctatatgcaactgctgaataaagagcaggagctgaaaatcaccgaagccagcaccgtcggcgatgtgcgcattgttgacccggcaatcacccagcctggcgtgctgaaaccgaagaaaggactgattatcctcggcgcaattatcctcggcctgatgctctctatcgtgggtgtgctgctgcgctcgttgtttaatcgcggcatcgaaagcccgcaggtgctggaagaacatggtatcagcgtctatgccagcatcccgctgtcggaatggcagaaagcgcgcgatagcgtcaaaaccatcaaagggattaaacgctataaacagagccagctactggcggtggggaatccaaccgatctggcgattgaagccatccgcagtctgcgtaccagtctgcacttcgcgatgatgcaggcgcagaacaatgtgttgatgatgacaggggtgagcccgtcaatcggtaaaacctttgtctgcgccaacctggcggcggtgatcagtcagaccaataaacgggtgttgttgatcgactgcgatatgcgcaaaggctacacccacgagctgttgggtaccaataacgtcaatggcctgtcggaaattctgattggccagggcgatattactaccgcagctaaaccgacctctattgccaaatttgacctgatcccgcgcggtcaggtgccgccaaatccttctgaactgttgatgagcgaacgctttgccgaattggtgagctgggcgagtaaaaactacgacctggtgttgattgatacgccgccgattctggcagtgaccgatgcagcaattgtcgggcgtcacgctggaaccacgttaatggtggcgcgctatgcggtcaacacattgaaagaagtggaaaccagtctgagccgctttgagcaaaacggtattccggtgaaaggggtgattctgaactccatcttccgccgcgccagcgcgtatcaggattatggctattacgaatacgaatataagtcggatgcgaaataa

SEQ ID NO: 481646 - DNA, 444 bp, Shigella sonnei; identical to SEQ ID NO: 27474

SEQ ID NO: 481647 - DNA, 1140 bp, Shigella sonnei
atgatgaaatccaaaatgaaattgatgccattattggtgtcagtaaccttgataagcggttgcacagtacttccgggcagcaatatgtcgacgatgggcaaagacgtcatcaaacagcaggacgctgatttcgatctcgacaaaatggtgaatgtttatccgctgaccccgcgcctgattgaccaattacgcccacgcccgaatgtagcgcgccccaatatgacgctggaaagcgagatcgcgaattaccagtatcgcgtcgggccgggcgacgttctgaatgtcaccgtctgggatcacccggaactcaccacgccagccggtcagtaccgcagctccagcgacaccggcaactgggtacagcctgacggcactatgttttacccgtatatcggcaaggttcacgtagtcgggaaaacgctcgctgaaatccgcagtgatattaccgggcgcttagcgacgtacatcgctgacccgcaggtggacgttaatatcgccgccttccgctcacaaaaggcctatatctccggtcaggtgaataaatccggtcaacaggcgatcaccaacgtgccactgactattctcgacgccatcaacgccgcaggtggcctgaccgacaccgctgactggcgcaacgtagtgctaacacacaatggtcgtgaagaacgcatttctttgcaggcgctgatgcaaaacggcgacctcaatcagaaccgactgctttatcccggcgatattctctacgtgccgcgtaatgatgatctgaaagtatttgtgatgggtgaagtgaagaaacagagcaccctgaaaatggactttagcggcatgaccctgactgaagccctgggtaatgctgaaggtatcgacatgaccacctccaacgccagcggcatctttgtcattcgtccgctgaaaggcgagggcgggcgtaatggcaagattgccaatatctaccagctggatatgtccgatgccacgtcgctggtgatggcgacagaattccgcctgcaaccttatgacgtggtgtatgtcaccaccgccccggtttcccgctggaaccgtctgatcaatcagttgttgccaactattagcggtgtccgttacatgacggatacagccagcgacattcataactggtaa

SEQ ID NO: 481648 - DNA, 1584 bp, Shigella sonnei
atggaatggattgccgatccgtctatctgggccgggttaatcacgctgattgtgatcgaactggtcctcggcattgataacctggtctttattgccatcctcgccgaaaaactaccgccgaggcagcgcgaccgcgcacgggttaccgggctgctgctggcgatgttaatgcgcctgttactgctggcgtcaatctcctggctggtcaccctgactcaaccgctgttcagcttccgctcgtttacctttagcgcccgcgacttaatcatgctgtttggtggtttcttcctgttgttcaaagccacgatggagctgaacgaacggctggaagggaaagacagcaataatcccacacaacgcaaaggtgcgaagttctggggcgtggtgacgcaaattgtggtactggacgccattttctcactcgactcagtgattaccgccgtcgggatggtcgaccatttactggtcatgatggccgccgtggttatcgctatcagcctgatgttgatggccagcaagccgttaacgcaatttgttaacagtcacccgacgatcgttattctctgcttaagcttcctgttgatgattggctttagcctggtggcagaaggtttcggcttcgtcattccgaaaggctacctgtacgctgccattggtttctcggtgatgatcgaggcgctcaatcagttggctatctttaaccggcgacgttttctttccgctaaccagacgctgcgccagcggactaccgaagcggtaatgcgcctgcttagcgggcaaaaagaagatgcggaactggacgccgaaaccgcgtccatgctggtggatcatggtaaccagcagatctttaatccgcaggaacggcggatgattgagcgggtacttaatcttaaccagcgtaccgtcagcagcattatgacgtcgcgccacgatattgagcatatcgatctcaacgcgccggaagaagaaatccgccagttgctggagcgaaatcagcatacgcggctggtggttaccgacggtgatgacgcagaagatttgctcggtgttgttcacgttatcgacctgctacaacagtctctgcgcggcgaaccgctcaacctgcgggtgttgattcgccagccgctggtgttcccggaaaccttgccgttgttacctgccctggagcagttccgtaatgcccgcacgcactttgcttttgtggtggatgagtttggctcggtggaagggattgtgacattaagtgacgtcactgaaaccattgtcggtaacttaccgaacgaagtggaagagatcgacgcccgccatgatattcagaagaatgcggacggttcctggacggcgaatggtcatatgccgctggaagatctggtgcaatatgtgccgctgccgctggatgaaaaacgtgaatatcacaccattgccgggctgttgatggaatatttacagcgtattccaaaacctggcgaagaagttcaggtgggggattatttgcttaaaacgttgcaggtggaaagccatcgcgtgcagaaggtgcagattattccgctgcataaggatggcgagttggagtacgaggtgtga

SEQ ID NO: 481649 - DNA, 1854 bp, Shigella sonnei
atgagacgatttctgacgacgctgatgatactcctggtcgtgctggtggccgggttatctgtgttagtgttgctggtgaatccgaatgatttccgcgactatatggtcaagcaagttgctgcacgtagcggttatcaattgcagctcgacgggccactgcgttggcacgtctggccgcagcttagtatcctctccgggcgaatgtctctcaccgcccagggcgcaagccagccactggttcgcgccgacaacatgcgtctggacgtggcgcttttaccactactgagtcatcaactgagcgttaagcaggtgatgctaaaaggggcagtgatccaactgacgccgcagacggaagcggtgcgcagtgaagacgctccggttgcaccgcgcgacaataccttgccggatctgtcagacgatcgcggatggtcgtttgatatatccagtcttaaggtggcggacagcgtgctggtgttccagcatgaagatgacgagcaggtgacaatccgcaatatccgcctgcaaatggaacaagatccccaacatcgtggctcatttgagttctccgggcgggttaatcgcgatcagcgcgatctcacaatatcccttaacggtacggtggatgcttctgattatccgcatgatttaacggcggctattgaacaaattaactggcagttgcagggtgccgatttaccaaaacaaggtattcaggggcaggggagtttccaggcccagtggcaggagtcacataaacgcctttcatttaaccaaatcagcttgaccgccaatgacagtacgctgagcgggcaagcacaggtcacgctgacagagaaaccggaatggcagctgagactgcaattcccgcaactgaatcttgacaacctcatcccgcttaatgaaaccgcgaatggtgaaaacggtgccgcgcagcaggggcagagccaatcaacgttgccgcgcccggtcatttcttcgcgtattgatgaaccggcctatcagggactgcaaggctttacggctgatattttgttgcaggccagtaacgtgcgctggcgcggaatgaattttacagatgttgccacgcaaatgaccaacaagtcgggtttgctggaaattactcaactgcagggcaaacttaacggtggacaggtttcactgccgggcacgctggacgcgacatcaataaatccgcggataaacttccagccacggctggaaaacgttgagattggtaccattctgaaggcgtttaactatccgatttcgttgaccggaaaaatgtcactggctggtgatttctccggtgctgacatagatgccgacgcattccgccacaactggcaaggacaggcacatgtcgaaatgaccgacacgcgcatggaagggatgaacttccagcagatgattcagcaagcggtagagcgtaatggcggtgatgtgaaggccgctgaaaactttgataacgtgacgcggcttgaccgctttaccaccgatttgacgttgaaggatggcgtcgtgacgttaaacgacatgcaaggtcaatcgcctgtgctggcgctgacaggggaaggcatgttgaatctggcagatcaaacctgcgatacccagtttgatattcgggtcgtgggtggctggaacggggaaagtaaactgattgatttcctgaaagaaacgccagtaccgctgcgggtttatggcaactggcagcaactcaattacagcctgcaagtggatcagttactgcgcaaacatctacaggacgaagcgaaacgtcgcctgaatgactgggccgagcggaataaagattcccgcaatggcaaggatgtgaagaagttgctggagaagatgtag

SEQ ID NO: 481650 - DNA, 582 bp, Shigella sonnei
atgcgtctgtgtgaccgagatattgaagcctggcttgatgaaggccgtttgtcgatcaacccacgtccgccagtggagcgtattaacggcgcgacggtggatgtacgcctgggcaataaatttcgtaccttccgtggtcacacggcagcgtttatcgatctgagcggtcccaaagatgaagtgagcgccgcgcttgaccgcgtgatgagcgatgagatcgttctcgacgagggcgaggcgttctatcttcacccaggagagctggcgctggcggtgacgctggagtcggtgacgctgccagccgatctggtgggctggctggacgggcgttcctctttggcgcgtctggggctgatggtgcacgtcaccgcgcaccgtatcgatccgggctggtctggttgcattgtgctggagttctacaactccggtaagctgccgctggcgctgcgtccgggcatgttaattggtgcgctgagctttgagccgctttccggcccggcggcgcgaccttacaaccgccgtgaagatgcgaaatatcgcaaccagcagggcgcggtagccagccgaatcgataaagactaa

SEQ ID NO: 481651 - DNA, 642 bp, Shigella sonnei
atgactgatcagtctcatcagtgcgtcattatcggtatcgctggcgcatcggcttccggcaagagtcttattgccagtaccctttatcgtgaattacgtgagcaagtcggtgatgaacacatcggcgtaattcccgaagactgctattacaaagatcaaagccatctgtcgatggaagaacgcgttaagaccaactacgaccatcccagcgcgatggatcacagcctgctgcttgagcatttacaagcgttgaaacgcggctcggcaattgacctgccggtttacagctatgttgaacatacgcgtatgaaagaaacggtgacggttgagccgaagaaggtcatcattctcgaaggcattttgttgctgacggatgcgcgtttgcgtgacgaacttaacttctccattttcgttgataccccgctggatatctgcctgatgcgccgcatcaagcgtgacgttaacgagcgtgggcgttcaatggattccgtgatggcgcaatatcaaaaaaccgtgcgcccgatgttcctgcaattcattgagccttctaaacaatatgcggacattatcgtgccgcgcggcgggaaaaaccgcatcgcgatcgatatattgaaagcgaaaataagtcagttctttgaataa

SEQ ID NO: 481652 - DNA, 3318 bp, Shigella sonnei
atgagcaaacaatcacagcatgtattaattgccctgccccacccgctgcttcacctggtcagtttaggtttagtctcgtttatctttacccttttctcgcttgagctttcgcagtttggcacccaactcgccccactgtggttcccgacgtccatcatgatggtggcgttttatcgccatgccgggcgcatgtggccgggaattgcgctgagctgttcgctgggaaatatcgccgcatccatcctgcttttttccaccagctcgctgaacatgacctggacgaccatcaatattgttgaagccgtggtcggggcagtgctgctacgtaaattgctgccgtggtataaccccttgcaaaatctggctgactggctgcgtctggcactcggcagcgccattgttccgcctctgttggggggtgttctggttgtcctgctgacgcccggagacgatcctctcagggcatttttgatatgggtactgtcagaatccatcggcgctctggcactggtgccgctgggattgttatttaaaccacactatctgctgcgccatcgcaacccacggttgctttttgagtcgctgctcacgttagccatcacactgacgttaagctggctttcgatgctgtatctgccgtggccttttactttcattattgtgctgttgatgtggagcgccgtgcgcctgccacgaatggaagcctttttgatcttccttaccacggtgatgatggtgtcgctgatgatggccgcggatccctccctgcttgctacgccgcgtacgtacctgatgagccatatgccgtggctaccgtttttgctgatcctgctgcccgccaacatcatgaccatggtgatgtatgcctttcgtgcggaacgcaaacacatttccgaaagcgaaacccgctttcggaacgcgatggaatattccgctatcggtatggcgttagtgggcaccgagggacaatggctgcaaaccaacaaagcgctctgccagtttctcgggtacagtcaggaagagctgcgcggactcacctttcagcaactgacctggccggaggatctcaataaagatctccaacaggttgaaaagctgataagcggtgaaataaacacctattcaatggaaaaacgctactacaaccgcaatggcgatgttgtctgggcgttgcttgccgtctcactggtgcgccacacggatggcacgccgctctattttatcgctcagattgaagacattaacgagctaaaacgcaccgaacaggtcaatcagcaactgatggagcgcatcacgctggctaacgaagcgggcgggattggcatctgggagagggagttgaagccgaatgtttttagctgggataagcggatgttcgagctgtatgaaattcctccacatatcaaaccgaactggcaggtgtggtacgagtgcgtgctgccggaagatcgccagcatgccgaaaaagtgattcgtgattcgttgcaatcacgctcgccctttaaactggaatttcgcattaccgtaaaagacggtattcgccatatccgcgccctcgccaaccgggtactgaataaagaaggcgaagtcgaacgtctcctcggcatcaatatggatatgaccgaagtgaaacagcttaacgaggcattgtttcaggaaaaagagcgcctgcacattacgcttgattccatcggtgaagccgtggtctgtattgatatggcgatgaaaattacctttatgaatccagtggcggagaagatgagcggctggacgcaggaagaagcgttaggtgttccgctcctgacggtgttgcatattacttttggcgacaacggaccattaatggagaacatttacagtgccgacacctcacgttccgcaatcgaacaagatgtggtgttgcactgtcggagcggcggcagttacgacgtgcattacagtattacgccgttaagtactctggacggcagcaatattggttcggttctggtgattcaggacgtcaccgaatcacgcaaaatgctgcgccagctgagctacagcgcctcccatgatgcactgacgcatctcgccaaccgcgccagttttgagaaacaactgcgtatcctgctgcaaacggtaaacagtacgcatcagcgacatgccctggtgtttatcgatcttgatcgctttaaagcggtgaatgacagcgccgggcatgcggcgggcgacgctttgctgcgcgaactggcgtcgttgatgctgagtatgctgcgctccagtgacgtgctggcgcggctcggcggtgatgaatttggtctgctgctgccagactgcaatgttgaaagcgctcgttttatcgctacacgtattatcagtgctgtgaatgactatcactttatatgggaaggccgggtacatcgggtaggtgccagcgccgggattaccttgatcgatgacaacaatcatcaggcggcagaagtgatgtcgcaggctgatatcgcctgttatgcctccaaaaatggtggacggggccgggtgacggtttacgaaccacagcaagctgccgcacatagcgaacgggcggcgatgtcgcttgatgaacagtggcggatgattaaagagaatcagttgatgatgatcgcccacggtgtcgcttcgccgcggatcccggaagcgcgtaatttgtggctgatttcgcttaagctctggagttgcgaaggcgaaattattgatgaacaaacatttcgtcgtagcttcagcgatccggcacttagccatgctcttgaccgacgggtattccacgaatttttccagcaggccgccaaagcggttgccagtaaaggcataagcatcgccctccccctttccgttgccggtttgagtagcgccacgctggtgaatgatctgcttgagcagctggaaaatagccctctaccaccacggttattacatctgattattccggctgaagcgattttagatcacgcagaaagcgtgcaaaaactgcagctggcgggatgtcggatagtgctcagccaggtgggccgcgatctgcaaatcttcaactcgctgaaagcgaatatggcagattacctgctacttgatggtgagttatgcgccaacgtgcagggtaatttgatggatgagatgctgattacgattattcaggggcacgctcagcgactcgggatgaaaaccatcgccgggccagtcgttttacccttagtgatggatacgctttctggcatcggcgtcgatctgatttatggtgatgtgattgccgatgcccaaccgctggatttgctggtgaatagcagttatttcgcgattaactga

SEQ ID NO: 481653 - DNA, 849 bp, Shigella sonnei
atgtataccctgaactggcagccgccgtatgactggtcgtggatgttgggatttctcgccgcccgtgcggtgagcggtgtggaaacggtcgcggacaattattatgcccgtagtctggcggtgggcgaatatcgcggcgtagtgactgctattccggatatagcccgccatactctgcacataaatttaagtgcaggtttagaacctgttgccgcagagtgtctggcgaaaatgagccgcctgcttgatctgcaatgtaacccgcagattgttaacggtgcgttgggaaagttaggcgcggggcggcccggattgcgtttacccggctgtattgatgcttttgagcagggtgtgcgggcgattttaggccaactggtgagcgtggcgatggcggcaaaattgactgccaaagtggtacagctttatggcgaacggctggatgattttccggagtatatctgcttccccacgcctcagcggctggcagcagccgacccgcaggcattaaaagcgttaggcatgccgttgaaacgggcagaggcactgattcatctggcaaatgcggcgctggagggcagcttaccaatgacaattccgggcgatgtggagcaggcgatgaaaacgctgcaaacttttccgggtatcgggcgctggacggcgaattattttgctttgcgtggctggcaggcgaaagatgtttttctgccggatgattatctgattaaacggcgatttccgggaatgacaccggcacaaatccgccgttatgccgagcgctggaagccctggcgttcttatgcgctgttgcatatctggtatacggaaggctggcaaccagacgaagcatga

SEQ ID NO: 481654 - DNA, 1353 bp, Shigella sonnei
gtgtttattggttttgattacggtacagcaaactgttcagtggcggtcatgcgtgacggtaaaccgcaattactgaaaatggaaaacgacagcacgctgctgccttcaatgctttgcgcgccaacgcgtgaatcggtaagcgaatggctgtaccgccatcatgatgttccggcagacgacgatgaaacgcaggcgctgttacgtcgggcgattcgttataaccgcgaagaagatatcgatgttacggcgaaaagcgtgcagttcggtctttcctcactggcacagtacattgatgatccagaagaagtgtggtttgtgaaatcaccaaaatcgttcctcggtgccagcggcttaaaaccgcagcaggtagcgctgtttgaggatctggtctgcgcaatgatgttgcacattcgccagcaggcgcaggcgcagctgccagaagcgattactcaggcggtgattggtcgcccgatcaacttccaggggctgggcggcgatgaagcaaacgcccaggcgcaagagattctggaacgcgcggcgaagcgtgccggattcagggacgtggtattccagtacgagccgatcgcggctgggctggattacgaagccaccttgcaggaagaaaaacgggtgctggtggtggatatcggcggtggtacgactgactgttcattgctgctgatggggccgcagtggcgttcgcgtctcgatcgtgaagccagtctgctgggtcacagtggttgtcgtattggcggtaacgatctggatatcgccctggcgtttaaaaacctgatgccactgctgggtatgggtggcgaaaccgaaaaaggcatcgccctgccgatcctgccgtggtggaatgcggttgccatcaacgacgtacctgcgcagagtgatttctacagtagtgccaacggtcgtctgcttaacgatctggtacgcgatgcccgcgaaccggaaaaagtggccctgttacagaaagtctggcgtcagcgtttaagctatcgcctggtgcgtagcgcagaagagtgcaaaattgctctttcaagcgtagcggaaacccgcgcctcactgccgtttatcagcaatgaactggctacgctgattagccagcgagggctggaaagcgccctcagccagccactggcgcggattctggaacaggtgcaactggccctggataacgcccaggaaaaaccggacgttatctacctgaccggcggtagcgcccgttctccgcagattaaaaaagcgctggcagaacagttgccgggcattccgattgcaggcggcgatgactttggctccgtcaccgccgggctggcacgctgggcggaagtggtgtttcgttaa

SEQ ID NO: 481655 - DNA, 1941 bp, Shigella sonnei
atgaaacccactttatatactgctactggtgagtgcgttacgccaggccgtgaactgggcaaaggcggtgaaggcgcggtttatgatatcaatgagtttgtcgatagcgtcgccaagatttatcacacgccgccacccgccttaaaacaggacaaacttgcctttatggctgcgacagctgacgcgcaattgttgaattatgtcgcctggccgcaggcaacgcttcacggtggacgaggcggaaaagttatcggttttatgatgccaaaagtttctggtaaagaaccgattcatatgatctatagcccggcacatcgtcgtcaacgttaccctcattgtgcgtgggattttctactctatgttgcgcgcaatattgcttcatcttttgctacggttcacgagcacgggcacgtcgtgggtgacgtaaaccagaacagttttatggtaggtcgcgacagcaaagtggtgttgattgatagcgactcctttcagattaacgccaatggcacactgcatttatgcgaagtcggcgtgtcgcattttacgccgccagagctacaaaccttgtcgtcatttgtcggctttgaacgcacagaaaatcacgataattttggccttgcgttgctgatttttcacgtcttgtttggtggccggcatccttattctggtgtgccgcttatctctgatgcgggtaatgcgctggagacggatattacccatttccgttatgcctacgcgtcagataatcagcgacgtggtttaaaaccgccgccacgatcgattccgctatcgatgttaccgagtgatgttgaagccatgtttcagcaggcgtttacggaaagtggcgtggcaaccgggcgtccgacggctaaagcgtgggtatcagcactggattctctacgccaacagttaaagaaatgtaccgtttcggcaatgcatgtttatcccggtcatttggctgactgcccatggtgtgcgctggataatcaaggtgttatctattttattgatctcggcgaagaggtcattaccaccggcggggattttgtgctggcaaaagtctgggcgatggtgatggcgtcagtagcaccgccagcattgcaactgccattacccgatcatttccaaccgactggcaggccgcttcctttaggcctgttacggcgcgaatacatcattctgcttgagatcgcactgtcagcattatcgctgctgctttgcggccttcaggcagaaccgcgttatattattttggttcctgtgctggcggctatctggattattggcagtttgacaagcaaagcgtacaaagcagaagttcagcaacgccgtgaggcatttaatcgtgcgaaaatggactatgaccatttagtccgccagatccagcaggtaggcggcctggaaggttttatcgccaaacggacgatgctcgaaaaaatgaaggacgaaattctcgggttaccggaagaagagaaacgcgctctggcagcacttcatgacactgcaagggaacggcagaagcagaagtttctggagggattttttattgatgttgcctctattcccggcgttggccctgcgcgtaaagcggcgttacggtcttttggtattgaaacagccgcagatgttacccgtcgtggcgttaagcaagtgaaagggtttggcgaccatctgacccaggcggttatcgactggaaagcgaactgtgaacgccgttttgtgttcaggccgaatgaagcgataacgccagcagacagacaagcggtaatggcgaaaatgaccgccaaacgacatcggctggaatcggcgttgacagtcggcgcgacagagttgcagcgattccgccttcatgctccagcacggaccatgccgttgatggaaccgttacgtcaggcagcagaaaaactggctcaggcgcaggcagatttaagccgctgctga

SEQ ID NO: 481656 - DNA, 681 bp, Shigella sonnei
atgcaggttgtctggttaaacgaccagcaaccattactggtgatgttccttgctgatggcgcaggtagcgtttcgcagggaggagaaggcgcgacgctcgccgtcaatgaagcgatggcgtttatggtgcaaaaagtacaggacggtgaattggggcttaatgatgtcctcgccacaaatatggtactgactattcgtcaacgactttttgccgaggcagaagccaaagcattagcagttcgcgattttgcctgcacgtttctgggattgatttcatcgcctgacggcaccttgattatgcagattggcgatggcggcgtggtggtagatttgggtcacggtctgcaattgcctctcacgccgatggtgggtgaatatgccaacatgacgcacttcattaccgacgaagatgccgtttccagactggaaactttcaccagcactgggcgtgcgcataaagttgcagcatttacggatggtattcagcggctggcgttaaatatgctggataattctcctcatgtgcctttctttaccccgtttttcaatggactggcgtcagcaacgcaggaacaactcgatttattacctgaattgttaaagcagtttttgtccagcccggcggtaaacgagcgtacggatgatgataaaacgttggcactggcgctgtggttaccatga

SEQ ID NO: 481657 - DNA, 660 bp, Shigella sonnei
atgagcgaacaaatcacgtttgccaccagcgattttgccagtaacccggaaccacgttgcccctgcattttgctgctggatgtttctggctcgatgagcggcagacctattaatgaacttaacgccggattggttacctttcgtgatgaactgcttgctgatccgctggctttaaaaagagtggaactcggcattgtgacgttcggcccggtgcatgtggaacaaccctttaccagcgccgctaactttttcccgcccatcctgtttgcccagggggatacgcctatgggggccgccattaccaaagccctggatatggttgaagagaggaaacgtgagtaccgcgcaaatggtatttcgtattatcgcccgtggattttcctgatcaccgatggcgctccaaccgatgagtggcaggctgccgccaacaaagtgtttcagggggaagaagataagaagtttgccttcttttccatcggtgttcagggggcggatatgaagactctggcacaaatcagcgttcgtcagcctttgccactgcagggattacaattccgtgaactgtttagctggttatccagttcgctgcgttcggtttcccgctccacgccgggaacggaagttgtgctggaagcgccaaaaggctggacgtcagtgtga

SEQ ID NO: 481658 - DNA, 129 bp, Shigella sonnei
atgatgagtagcttcatcatgaccctttccttatttatggccccttcctcgggaggggctttcccgtttcagcgtcccgctgaaatcggcggcttacctcctttcgccatgcaagcagtctatcgctaa

SEQ ID NO: 481659 - DNA, 1362 bp, Shigella sonnei
atgtgcccgtcattcagacgattcccgacagtgtttcataattcctccatttttctcccttattggctggctacactagtatcattccgcgaaacgtttcaggaagagaaactcttaacgatgaaaggcagttataaatcccgttgggtaatcgtggtggttatcgccgccatcgccgcattctggttctggcaaggccgcaatgactcccagagtgcagccccaggggcgacgaaacaagcgcagcaatcgccagcgggtggtcgccgtggtatgcgttccggcccattagccccggttcaggcggcgaccgccgtagaacaggcagttccgcgttacctcaccgggcttggcaccattatcgccgctaatactgttacggtgcgcagccgcgtggacggtcaactgatggcgttacatttccaggaaggccagcaggtcaaagcaggcgatttactggcagaaattgaccccagccagttcaaagttgcattagcacaaacccagggccaactggcaaaagataaagccacgcttgctaacgcccgccgtgatctggcgcgttatcagcaactggcaaaaaccaatctcgtctcccgtcaggagctggatgcccaacaggcgctggtcagtgaaaccgaaggcaccattaaggctgatgaagcaagcgtcgccagcgcgcagttgcaactcgactggagccgcatcaccgcaccagtcgatggtcgcgttggtctcaagcaggttgatgttggtaaccaaatctccagtggtgataccaccggaattgtggtgatcacccagacgcatcctatcgatttagtctttaccctgccggaaagcgatatcgctactgtagtgcaggcgcaaaaagccggaaaaccgctggtggtagaagcctgggatcgcaccaattcgaagaaattaagtgaaggcacgctgttaagcctcgataaccaaatcgatgccacaaccggtacgattaaagtgaaagcacgctttaataatcaggatgatgcgctgtttcccaatcagtttgttaacgcgcgcatgttagtcgacaccgaacaaaacgccgtagtgatcccaacagccgccctgcaaatgggcaatgaaggccattttgtctgggtgctgaatagcgaaaacaaggtcagcaaacatctggtgacgccgggcattcaggacagtcagaaagtggtgatccgtgcaggtatttctgcgggcgatcgcgtggtgacagacggcattgatcgcctgaccgaaggggcgaaagtggaagtggtggaagcccagagcgccaccactccggaagagaaagccaccagccgcgaatacgcgaaaaaaggagcacgctcctga

SEQ ID NO: 481660 - DNA, 3123 bp, Shigella sonnei
atgcaggtgttacccccgagcagcacaggcggcccgtcgcgcctgtttattatgcgtcctgtcgccaccacgctgctgatggtggcgatcttactcgccgggattatcggttatcgcgccctgcccgtttcggcgctgccggaagtggactatccgaccattcaggtggtcacgctctacccaggtgccagcccggatgtcatgacctctgccgttaccgcgccgctcgaacgccagttcgggcagatgtctggcctgaaacagatgtcgtcgcaaagttccggcggtgcgtcagttatcactttgcagttccagctaacattaccgctcgatgtcgccgagcaggaagtgcaggccgcgattaacgctgcgaccaacttgttgccgagcgatctgcctaacccgccggtttacagcaaagtgaacccggcagatccgccgatcatgacgctcgccgtcacctcaaccgccatgccgatgacgcaagtggaagatatggtggaaacccgcgtcgcgcagaaaatctcgcagatttccggcgtcggcctggtgacgctttccggcggtcagcgtccggctgttcgcgtcaaacttaacgctcaggcgattgccgccctcggcctgaccagcgaaaccgtgcgcaccgccattaccggcgctaacgttaactcggcaaaaggtagcctcgacggcccttcccgtgcggtcacgctttccgcgaacgaccagatgcaatccgccgaagagtatcgccagctaatcatcgcctaccagaacggcgcgccaattcgtctgggcgatgtcgcaactgtagagcaaggtgcagaaaacagctggctcggcgcgtgggcgaacaaagaacaggccattgtgatgaatgttcagcgccagcccggtgctaacattatctccaccgccgacagcattcggcagatgctgccacagctcactgagagtctgccgaaatcggtgaaggtgacagtgctttccgatcgcaccaccaatatccgcgcatccgtcgatgatactcagtttgaattgatgatggctatcgcgctggtagtcatgattatctacctgtttttgcgcaatattccggcgaccatcattcccggtgttgctgtaccgctgtcgttaatcggcactttcgcggttatggtgtttctcgatttttcaatcaataacctgacactgatggcgttaactatcgccaccggattcgtggtcgatgacgccatcgtggtgatcgaaaacatttcccgctatatcgaaaaaggcgaaaaaccgttggcggcggcgctcaagggcgcaggtgaaatcggctttaccattatctcgctgaccttctcactgattgcggtgttgatcccactgctgtttatgggcgatatcgtcgggcgactgttccgcgaatttgctattaccctggcggtagcgattttgatctcagcggtggtgtcgctgaccctgacaccgatgatgtgcgcgcggatgctcagccaggagtcgttgcgtaaacagaaccgcttctcccgtgcctcggaaaaaatgttcgacaggataatcgccgcctatggtcgtggactggcgaaagtgctgaatcatccgtggctgaccttaagcgtggcactcagcacgctgctgcttagcgtgctgctgtgggtgttcattccgaaaggtttcttcccggtacaggacaatggcattattcagggcactttgcaggcaccgcaatccagctcctttaccaatatggcccagcgacaacgccaggtcgcggacgtgattttgcaggatccggcagtgcaaagcctgacctcatttgttggcattgatggcactaacccgtcgctgaatagtgcacgtttacaaatcaacctcaaaccgttggatgaacgtgatgatcgggtgcaaaaagtcatcgcccgtctgcaaacggcggtagataaagtgccgggcgtcgatctcttcctgcaaccaacgcaggatctgactattgatactcaggtcagccgcacccagtaccagtttaccttgcaggccacctcactggatgcgctcagtacctgggtgccacagttgatggaaaaactccagcaactgccacagctttctgatgtctccagcgactggcaggaccaagggctggtggcgtatgtcaatgttgatcgcgacagcgccagccgtctggggatcagcatggcggatgtcgataacgccctgtacaacgcgtttggtcagcgactgatttccactatttatactcaggctaaccagtatcgcgtagtgctggagcacaacaccgaaattaccccgggcctcgcggcgctggataccattcgcctgaccagtagcgacggcggcgtggtgccgttaagctcaattgccaaagttgaacagcgttttgcgccgctttccatcaaccatctggatcagttcccggtaacgaccatctcctttaacgtgccggataactattcgctgggcgatgcggtgcaggagattatggacaccgaaaagacgctgaatctgccggtggatatcaccacgcaattccagggcagcaccctcgccttccagtcggcgctgggcagcactgtctggctgattgtcgcggcggtggtggcgatgtatatcgtgctcggcattctgtacgagagctttattcacccgatcaccattctctcgacgctacccaccgcaggggtcggcgcgctgctggcattaatgattgccggtagcgaactggatgtgattgcgattatcggcattattttgctgatcggtattgtgaagaagaacgccatcatgatgatcgacttcgcgctggctgctgagcgcgagcaaggcatgtcgccgcgcgatgcaatctaccaggcttgtctgttgcgttttcgtccgatcctgatgaccaccctggcggctctgcttggcgcgctgccgctgatgttgagtaccggggtcggcgcggaactgcgtcgtccgttaggtatcggcatggtcggcggtctgattgtcagccaggtgctgacgctgttcaccacgccggtgatttatctgctgttcgaccgcctggcattgtggaccaaaagtcgctttgctcgccatgaagaggaggcgtaa

SEQ ID NO: 481661 - DNA, 3078 bp, Shigella sonnei
gtgaagttttttgccctcttcatttaccgcccggtggcgacgattttactgtcggtcgccattaccctgtgcggcatactgggcttccgtatgctgccggtcgccccgctgccgcaggtcgattttccggtgattatggtcagcgcctcgctgcccggtgcgtcaccagaaacaatggcgtcttccgttgccacgccgctggagcgctcgcttgggcgcattgccggggtcagcgaaatgacctccagcagttcgctcggcagcacacgtattattttacagtttgattttgaccgggacatcaacggcgcagcgcgtgatgtgcaggcggcgatcaacgctgcacaaagtttgctgcccagtgggatgcccagccgtccgacctatcgcaaagcgaacccgtcggatgcgccaattatgatcctcacgctgacatccgatacttattcgcagggtgaactgtacgatttcgcctcgacgcagctggctccgacgatttcgcaaatcgacggtgttggtgatgtcgatgtcggaggcagctcactgcccgccgtacgcgtcgggctgaatccgcaggcgctgtttaatcagggcgtgtcgctggacgacgtacgcaccgccatcagcaatgccaacgtgcgtaaaccgcagggcgcgctggaagatggcactcaccgctggcagatccagaccaatgatgagctaaaaaccgccgctgaatatcagccgttgattattcactacaacaacggcggcgcggttcgtctgggcgatgtggcgacggtgaccgactcagtgcaggatgtgcgcaacgccgggatgaccaacgccaaaccggctattttactgatgatccgcaaactgccggaagccaatattatccagacggttgacagcatccgggcaaaattaccggagttgcaggaaaccattccggcggcgattgatctgcaaattgcccaggatcgctcccccaccattcgcgcctcgctggaagaagtcgagcaaacgctgattatctcggtggcgctggtgattctggtggtgtttttattcctgcgctcgggtcgcgccactattattcccgccgtttcggtgccggtttcgctgattggtacgtttgcggcgatgtacctgtgcggattcagtctcaataacctttcgttaatggcgctcaccatcgctactggtttcgtggtggatgacgccatcgtggtgctggaaaacattgcacgtcatctggaagcgggaatgaaaccgttgcaagccgcactgcaaggtactcgcgaagtcggttttacggtgctgtcgatgagtctgtcactggtggcggtgttcctgccgctgctgttgatgggcggattgccgggccgactgttacgcgagtttgccgtgacgctttctgtcgccattggtatttcgttgctggtttctctgacattaacgccaatgatgtgtggctggatgctgaaagccagcaagccgcgcgagcaaaagcgactgcgtggttttggtcgcatgttggtagccctgcaacaaggctacggcaagtcactgaaatgggtgctcaatcatacccgtctggtgggcgtggtgctgcttggcaccattgcgctgaatatctggctgtatatctcgatcccgaaaaccttcttcccggagcaggacactggcgtgttgatgggcgggattcaggcggatcagagtatttcgtttcaggcgatgcgcggtaagttgcaggatttcatgaaaattatccgtgacgatccggcagtggataatgtcaccggctttacaggcggttcgcgagtgaacagcgggatgatgtttatcaccctcaagccacgcgacgaacgcagcgaaacggcgcagcaaattatcgaccgtctgcgcgtaaaactggcgaaagaaccgggggcgaatctgttcctgatggcggtacaggatattcgcgttggtgggcgtcagtcgaacgccagctaccagtacacgttgttatccgacgacctggcggcactgcgcgaatgggagccgaaaatccgcaaaaaactggcgacgttgccggaactggcggacgtgaactccgatcagcaggataacggcgcggagatgaatctggtttacgaccgcgacaccatggcacggctgggaatcgacgtgcaggccgccaacagcctgttaaataacgccttcggtcagcggcaaatctcgaccatttaccagccgatgaaccagtataaagtggtgatggaagtggatccgcgctatacccaggacatcagtgcgctggaaaaaatgttcgttatcaataacgaaggcaaagcgatcccgctgtcgtatttcgctaaatggcaaccggcgaacgctccgctgtcggtgaatcatcagggattatcggcggcctcgaccatctcgttcaacctgccgaccggaaaatcgctctcggacgccagtgcggcgatcgatcgcgcaatgacccagcttggtgtgccttcgacggtgcgcggcagttttgccggaacagcgcaggtgttccaggagacgatgaactcacaggtgatcctgattatcgccgccatcgccacggtgtatatcgtgctgggtatcctttacgagagttacgtacacccactgacgattctctccaccctgccctcggcgggcgttggtgcgctgctggcgctggagctgttcaatgccccgttcagcctaatagccctgatagggatcatgctattaatcggcatcgtaaagaaaaacgccattatgatggtcgattttgcgctcgaagcccaacggcacggtaacctgacgccgcaggaagctattttccaggcctgtctgctgcgttttcgcccgattatgatgactaccctggcggcgctgtttggcgcgctgccgctggtgttgtcgggcggtgacggctcggagctgcggcacctcctggggatcaccattgtcggtggactggtaatgagccagcttctgacgctgtataccacgccggtggtgtatctctttttcgaccgtctgcggctgcgtttttcgcgtaaacctaaacaaacggtaaccgagtaa

SEQ ID NO: 481662 - DNA, 1416 bp, Shigella sonnei
atgacagaacttcccgacagcacccgctggcaattgtggattgtggctttcggcttctttatgcagtcgctggacaccaccatcgttaacaccgcccttccctcaatggcgcaaagcctcggggaaagtccgttgcatatgcacatggtcattgtctcttatgtgctgaccgtggcggtgatgctgcccgccagcggctggctggcggacaaagtcggcgtgcgcaatattttctttaccgccatcgtgctgtttactctcggttcactgttttgcgcgctttccggcacgctgaacgaactgttgctggcacgcgcgttacagggcgttggcggtgcgatgatggtgccggtcggcaggttgacggtgatgaaaatcgtaccgcgcgagcaatatatggcggcgatgacctttgtcacgttacccggtcaggtcggtccgctgctcggtccggcgctcggcggtctgctggtggagtacgcgtcgtggcactggatctttttgatcaacattccggtggggattatcggtgcgatcgccacattgctgttaatgccgaactacaccatgcagacgcggcgctttgatctttccggctttttattgctggcggttggcatggctgtattaaccctggcgctggacggcagtaaaggtacaggtttatcgccgctggcgattgctggcctggtcgcagttggcgtggtggcactggtgctttatctgctgcacgccagaaataacaaccgcgccctgttcagtctgaaactgttccgcactcgtaccttttcgctgggcctggcggggagctttgccggacgtattggcagtggcatgttgccctttatgacaccggttttcctgcaaattggcctcggtttctcgccgtttcatgccggactgatgatgatcccgatggtacttggcagcatgggaatgaagcgaattgtggttcaggtggtgaatcgctttggttatcgtcgggtactggtagcgaccacgctgggtctgtcgctgatcaccctgttgtttatgactaccgctctgttgggctggtactacgttttgccgttcgtcctgtttttacaagggatggtcaactcgacccgtttctcctccatgaacaccctgacgctgaaagatctcccggacaatctggcgagcagcggcaacagtctgctgtcgatgattatgcaattgtcgatgagtatcggcgtcaccatcgccgggctgttgctgggactttttggttcgcagcatgtcagcgtcgacagcggcaccacacaaaccgtctttatgtacacctggcttagcatggcgtttatcatcgcccttccggcgttcatctttgccagagtgccgaacgatacgcatcaaaatgtagctatttcgcggcgaaaaaggagcgcgcaatga

SEQ ID NO: 481663 - DNA, 1404 bp, Shigella sonnei
atgaagttctggcgacctggtattaccggcaaactgtttctggcgattttcgccacctgcattgttttgctgatcagtatgcactgggcggtgcgtatcagttttgagcgtggctttattgattacatcaagcatggtaatgaacagcgattacaactgttaagtgatgcgcttggcgagcagtatgcgcagcatggcaactggcgcttcctgcgcaacaatgatcgctttgtctttcagatcctgcgttcatttgaacacgataattcggaagataaacccggcccgggtatgccaccgcacggctggcgtacccagttctgggtggttgatcaaaacaacaaagtgctggttggtccgcgagcgccgattccacctgacggtacacggcgacccattctggtcaacggtgcggaagttggcgcggtgatcgcctcccccgttgagcggttaacgcgcaatactgatatcaatttcgataaacaacagcggcaaaccagctggttgattgtcgccctggcaacgttactcgcggcacttgccacttttctgctggcgcgcggtttactggcaccggtaaaacgacttgtcgatggcacgcacaaactggcggcgggcgatttcactacccgcgtaacgcccaccagtgaagatgaactgggcaaactggcgcaagacttcaaccagcttgccagcacactggagaaaaaccagcaaatgcggcgcgattttatggccgatatttctcacgaactgcgtacgccattagcggtgctgcgcggtgaactggaagctattcaggatggcgtgcgcaaattcacgccggagacggtggcgtctttacaggcggaggtcggtacactgaccaaactggttgacgatctccatcagttgtcgatgtctgatgaaggcgccctcgcctatcaaaaagcaccggtagatttgatcccactgctggaagtggcgggcggcgcatttcgcgaacgattcgccagccgtggcctgaaactgcaattttccctgccagacagtattaccgtatttggcgatcgcgaccgtttaatgcagttattcaataatttacttgaaaacagcctgcgctacactgacagcggcggcagcctgaaaatctctgccgagcagcacgacaaaacggtgcgcctgacctttgccgacagtgcgccaggtgtcagtgacgagcagctacaaaaattatttgaacgtttttatcgcaccgaaggttcccgcaaccgcgccagcggtggttccgggctggggctggcgatttgcctgaacattgttgaagcacataatggccgcattattgctgcccattcgccttttggcggggtaagcattacagtagagttaccgctggaacgggatttacagagagaagtatga

SEQ ID NO: 481664 - DNA, 723 bp, Shigella sonnei
atgaccgagttaccaatcgacgaaaacacaccgcgtattttgatcgtggaagatgaaccgaagctggggcagttgctcattgattatctgcgtgctgcgagctatgcgccgacgcttatcagccacggcgatcaggtactgccgtatgtgcgccagacaccaccggatctgatcctgttggatctgatgctccctggcaccgatggcttgacgctgtgccgggaaattcgtcgtttttctgacattcctatcgtgatggtgacggcaaaaatcgaagagatcgaccgcctgctcggactggagattggcgcagatgactacatctgcaagccgtacagcccacgggaagtggtagcgcgcgtcaaaaccattttgcgccgttgcaaaccgcagcgcgaattgcagcaacaggatgccgaaagcccgttgattatcgacgaaggtcgttttcaggcttcatggcgcggtaaaatgcttgacctgacgcctgcggaatttcgtctgttgaaaacgctctctcatgaaccaggaaaagtgttctcccgcgagcaattgctcaatcatctttatgacgactaccgcgtagtaaccgaccgcaccattgacagccacattaaaaacctgcgccgcaagctggaatctctcgacgccgaacagtcatttatccgcgccgtttacggcgttggttaccgctgggaagccgacgcctgccgcatcgtttag

SEQ ID NO: 481665 - DNA, 1119 bp, Shigella sonnei
atgaaatacgatctcatcattattggcagcggttccgtaggcgctgccgccgggtattatgcaacccgcgccggtttaaacgtgctaatgaccgacgcccatatgccaccgcatcaacacggcagccaccacggcgatacgcgattaattcgccatgcttatggtgaaggcgaaaagtatgtcccgctggtcctccgcgcgcaaacgctgtgggatgaactttcccgccacaacgaagatgatcccatttttgtacgctctggtgtcattaacctcggcccggctgactccgcatttctcgccaacgtcgcccacagcgccgaacagtggcaactcaacgttgaaaagctcgatgcgcaagggattatggcccgctggccagaaatacgcgtcccggacaactacatcggcttatttgagactgattccggttttttgcgcagcgaactggcgattaaaacctggatccaactggcgaaggaagcgggctgtgcgcaactgttcaactgcccggtcaccgcaattcgtcatgacgatgatggcgtaactattgaaacggttgacggtgagtatcaggcgaaaaaagcgattgtctgcgcgggaacatgggtaaaagacctgctcccggagctgcctgtccagcccgtacgtaaagtatttgcctggtatcaggccgatggccgctatagcgtgaagaataaattcccggcgtttaccggtgaactgcccaatggcgatcaatattatggttttccggcagaaaacgacgcgttgaagattggcaaacataacggaggccaggttatccattcagcggatgaacgtgttccgtttgcggaagtggtcagcgatggttcggaagccttcccgttcttgcgcaatgtattgccgggtatcggttgctgcctgtacggcgctgcctgcacctatgataattcgcctgacgaagattttattatcgataccctacccggccacgataatacactgctcattaccggcctgagtgggcacggttttaaatttgcgtcagttttaggggaaatagctgccgattttgcgcaagacaaaaaaagcgattttgatttgacgccattcaggctttcccgcttccaataa

SEQ ID NO: 481666 - DNA, 255 bp, Shigella sonnei
atggaaaaaaataatgaagtcattcagactcatccgctcgtagggtgggacatcagcaccgttgatagctatgatgcgctgatgttgcgtttgcactaccagaccccaaataagtccgagcaggaagggactgaagttggtcaaacgctctggttaaccactgatgttgccagacaatttatttcgatattagaagcaggaatcgccaaaattgaatccggtgatttccaggtaaacgagtatcggcgtcattaa

SEQ ID NO: 481667 - DNA, 246 bp, Shigella sonnei; identical to SEQ ID NO: 261771

SEQ ID NO: 481668 - DNA, 1047 bp, Shigella sonnei
atgactgcaccatcccaggtattaaagatccgccgcccagacgactggcaccttcacctccgcgatggcgacatgttaaaaactgtcgtgccgtataccagcgaaatttatggacgggctatcgtaatgcccaatctggctccgcccgtgaccacagttgaggctgccgtggcgtatcgccaacgtattcttgacgccgtacctgccgggcacgatttcaccccattgatgacctgttatttaacagattcgctggatcctaatgagctggagcgcggatttaatgaaggcgtgttcaccgctgcaaaactttacccggcaaacgcaaccactaactccagccacggcgtgacgtcaattgacgcaatcatgccggtacttgagcgcatggaaaaaatcggtatgccgctactggtgcatggtgaagtgacacatgcagatatcgacatttttgatcgtgaagcgcgctttatagaaagcgtgatggaacctctgcgccagcgcctgactgcgctgaaagtcgtttttgagcacatcaccaccaaagatgctgccgactatgtccgtgacggaaatgaacggctggctgccaccatcactccgcagcatctgatgtttaaccgcaaccatatgctggttggtggcgtgcgtccgcacctgtattgtttacccatcctcaaacgcaatattcaccaacaggcattgcgtgaactggtcgccagcggttttaatcgagtattcctcggtacggattctgcgccacatgcacgtcatcgcaaagagagcagttgcggctgcgcgggctgcttcaacgccccaaccgcgctgggcagttacgctaccgtctttgaagagatgaatgctctgcagcactttgaagcattctgttctgtaaacggcccgcagttctatgggttgccggtcaacgacacattcatcgaactggtacgtgaagagcaacaggttgctgaaagcatcgcactgactgatgacaccctggtgccattcctcgccggggaaacggtacgctggtccgttaaacaataa

SEQ ID NO: 481669 - DNA, 561 bp, Shigella sonnei
atgaacaagtttttatttgccgctgcattgatcgtcagtggcctgctcgttggctgtaatcaactcacccaatacaccatcaccgaacaagaaattaaccagtcgcttgcgaaacataataatttctcaaaagatatcggtttacccggcgtggctgacgcccatattgttctgacaaacttgatcagccaaattggtcgcgaagagccgaataaggttaccctaaccggagacgccaatctggacatgaactccctgttcggtagtcagaaagcgaccatgaaactgaagctgaaagcgctgcccgtgtttgataaagaaaaaggtgcgatcttcctgaaagagatggaagtggtcgatgcgacggtacaaccggaaaaaatgcaaacggtgatgcaaacgttgcttccctatttgaaccaggcattacgcaattactttaaccagcaacctgcttacgtcctgcgcgaagatggcagtcagggcgaagcaatggcgaaaaaactggcgaaaggcattgaagtgaagccaggcgaaattgtcattccgtttacggattaa

SEQ ID NO: 481670 - DNA, 648 bp, Shigella sonnei
gtgaagctatacatttacgatcactgcccttactgcctcaaagcccgcatgattttcggcctgaaaaatatccccgtcgaattacatgttctgctcaacgacgacgcagaaacacccacccggatggtcggtcaaaaacaggttcccattctgcaaaaagatgacagccgctatatgccagaaagcatggatatcgttcactatgtcgataaactcgacggcaaaccgttactgaccggcaaacgttcccctgccattgaagagtggctgcgcaaggtcaatggctacgccaacaaactgctgttgccgcgttttgccaaatcggcatttgatgagttttctactcccgccgcgcgcaaatatttcgtcgacaagaaagaggccagcgcgggtaattttgccgacctgctggcccactctgacggtctgattaagaatatcagcgatgatttgcgtgcgctggacaaactgatcgtcaaaccgaacgccgtgaatggcgaactttcggaagatgatattcagctatttccgctactgcgtaatctgacgctggtagccggaatcaactggccaagccgcgttgctgattaccgcgataatatggcgaaacagacacaaatcaatttgttatcatcaatggcgatttaa

SEQ ID NO: 481671 - DNA, 1209 bp, Shigella sonnei
atgtcccgcgtatcgcaggcgaggaacctgggtaaatatttcctgctcatcgataatatgctggtcgtgctggggttctttgttgtcttcccgctgatctctatccgcttcgttgatcaaatgggctgggccgccgtcatggtcggtattgctctcggtctacgccagtttattcagcaaggtctgggtattttcggcggcgcaattgccgaccgctttggtgccaaaccgatgattgttaccggtatgctgatgcgcgccgccggattcgccacaatgggtatcgcccacgaaccgtggctattgtggttttcatgcctgctctcgggactcggcggcacgttgtttgatccgccgcgttcggcgctggtggtgaaactaatccgtccacaacaacgttgtcgttttttctcgctgttgatgatgcaggacagtgccggtgcggtcattggcgcattgttggggagctggctgttgcaatacgactttcgcctggtctgcgccacaggggccgttttgtttgtgctgtgtgcggcgttcaatgcgtggttgttaccggcatggaaactctccaccgtacgcacgcccgttcgcgaaggcatgacccgcgtgatgcgtgacaagcgttttgtcacctatgtcctgacgctggcgggttactacatgctggctgtacaagtgatgctgatgctgccaattatggtcaacgacgtggctggcgcgccctctgccgttaaatggatgtatgccattgaagcgtgtctgtcgttaacgttgctctaccctatcgcccgctggagtgaaaagcattttcgtctggaacaccggttgatggctgggctgttgataatgtcattaagcatgatgccggtgggcatggtcagcggtctgcaacaacttttcaccctgatttgtctgttttatatcgggtcgatcattgccgagcctgcgcgtgaaaccttaagtgctttgctggcggacgcaagagctcgcggcagctatatggggtttagccgtctgggtctggcgattggcggcgctattggttatatcggtggtggctggctgtttgacctgggcaaatcggcgcaccagccagagcttccgtggatgatgctgggaattattggcatcttcactttccttgcgctgggttggcagtttagtcagaaacgcgcaacgcgtcgtttgctggaacgcgacgcctga

SEQ ID NO: 481672 - DNA, 585 bp, Shigella sonnei; identical to SEQ ID NO: 458735

SEQ ID NO: 481673 - DNA, 648 bp, Shigella sonnei
atgaaatatcaacttactgcccttgaagctcgcgtgattggttgcttgctggaaaagcaggtgaccacgccggagcaatacccgctctcagtcaatggtgtagtcacggcctgtaatcagaaaacgaaccgtgaaccggtcatgaatctgagtgaatctgaagtgcaggagcaactggataatctggtcaaacgccattatctgcgcacggtgagtggctttggtaatcgggtcaccaaatatgaacaacgtttttgtaattcagaatttggcgatctgaaactgagcgcagcggaagtggcgttaatcaccacgttgttattgcgtggtgcccagacgccgggtgaactgcgcagccgcgccgcgcgaatgtatgaattcagcgatatggcggaagtggagtcgacgctggaacaactggcaaatcgcgaagatggtccttttgtggtgcgtctggcccgcgaaccgggtaaacgcgaaagccgctacatgcatcttttcagtggtgaggtagaggatcagccggcggtaacggatatgtcgaacgcggttgatggtgatttacaggcccgcgtcgaagccctggaaatcgaagtggcagaactgaaacagcgtcttgattcgttgctggcccatctgggagattaa

SEQ ID NO: 481674 - DNA, 924 bp, Shigella sonnei
gtgaaaaaattacgtatcggcgttgtgggattaggcggcattgcgcaaaaagcgtggttaccggtgctggcggcagcgtctgactggatgttacaaggagcctggtcgcctacgcgcgcgaaagccctgccaatttgtgaaagctggcgcattccttatgccgattcgttatccagccttgccgccagttgcgatgcggtttttgtgcattccagcaccgccagccactttgacgtggtcagtacgttactcaatgcgggtgtacatgtctgtgtcgataaaccgctggcagaaaatctgcgcgatgctgaacggctggtggaactggcggcgcggaaaaaactgacgttgatggtcggttttaaccgtcgtttcgcaccactctacggtgagttaaaaacgcaactcgctaccgcagcttcgctaagaatggataaacatcgtagcaatagtgtcgggccacacgatctttatttcacgttgctggatgattatctgcatgtggtggataccgcgctgtggttgtcgggcggcaaagcctctctggatggcggtacgctactgactaacgacgctggcgaaatgctgtttgccgagcaccatttttcggccgatcctttgcagatcaccacctgtatgcatcgccgtgccggaagtcagcgtgaaaccgtgcaggccgtgactgacggtgcgctcatcgacattacggatatgcgcgaatggcgtgaggagcgcgggcagggcgtagtgcataaaccgattcctggttggcagagcactcttgagcaacgtggatttgtcggctgtgcgcggcacttcattgaatgtgtgcaaaatcagacagttctgcaaaccgccggcgaacaggcagtgctggcgcaacgtatcgttgacaagatctggcgcgatgcgatgagtgaataa

SEQ ID NO: 481675 - DNA, 1536 bp, Shigella sonnei
atgaatttattaaaatcgctggccgccgtcagctcgatgaccatgttttcgcgtgtgcttggcttcgcacgagacgcaattgtcgccagaatctttggcgcagggatggcaaccgacgcctttttcgtcgcttttaaacttcctaacttgttacgccgtatctttgccgaaggggcattttcccaggcatttgtaccgattctggcggaatataaaagtaagcagggtgaagacgccacgcgggtctttgtctcttatgtttctggcctgctgacacttgcgctggcggttgtgacggtcgctggcatgctcgccgcaccgtgggtgatcatggtgaccgcgccaggcttcgctgacacagctgacaaatttgccctgaccagccagctactaaagattacctttccctatatcttgctgatctccctggcgtcgctggtgggagcgattctgaatacgtggaaccgcttctcgattccggcgtttgcgccaacactgcttaacatcagcatgattggtttcgcgctgtttgccgcaccgtactttaacccaccggtgctggcgctggcgtgggctgttacggtcggcggcatcctgcagctggtgtatcagctaccgcacctgaagaagatcggcatgctggtcctgccgcgcattaacttccacgatgccggagcaatgcgcgtggtgaaacagatgggaccggcgatccttggcgtctctgtgagccagatctccttaatcatcaacaccatttttgcctcgtttcttgcttccggttcggtgtcttggatgtattacgccgaccgcttaatggagtttccctccggtgtgctgggcgtggcgcttggcaccattttgctgccgtcgctgtcgaaaagttttgccagtggcaatcatgatgaatacaaccgtttgatggactgggggttgcgtctttgtttcctgttggcgctgccgagtgcggttgcgttgggcattctttcgggtccgttaaccgtttcgctgttccagtacggtaaatttaccgcgtttgatgcgctgatgacccagcgggcgttaattgcctactcggtgggtttgattggcctgattgtagtgaaagtgttggctcctggcttttattcccgccaggacattaaaacgccagtgaaaattgccatcgttacgctgattttaacgcaattgatgaacctggcgtttattggtccgttgaaacatgctgggctgtcactttctattggtctggcggcgtgtctgaatgcttcgctgctttactggcagttgcgtaagcagaaaatctttactccgcaacccggctggatggcgtttctgttgcgtctggtggtggcggtactggtgatgtctggcgtgcttttaggtatgttacatatcatgccggagtggtcattgggtaccatgccctggcgcttactgcgtttaatggcggtcgtgctggcggggattgccgcgtacttcgctgcactggcggtactgggcttcaaagttaaagaatttgcccgccggacggtgtaa

SEQ ID NO: 481676 - DNA, 417 bp, Shigella sonnei
atgacacgtcttgcagagatcctcgaccagatgtccgctgtgcttaacgatctcaaaacggtaatggatcaagaacagcaacatctctctatggggcagatcaacggcagccagttgcaatggattacagaacaaaaaagctcactgctggcgacgctggattacctcgaacagttacgcaggaaagaacccaatacagcaaatagcgttgatattagtcaacgctggcaggaaattactgtgaaaacgcagcaactacgccaaatgaatcaacataacggctggttactggaaggacagattgagcgcaatcaacaggcgctggaaatgttgaaaccgcatcaggaaccgacgctatatggggcgaacggtcagacctcaacaacccatcgcggcggtaaaaagatttcgatctga

SEQ ID NO: 481677 - DNA, 294 bp, Shigella sonnei
atgagtattgatcgcacttcgcctctgaagcccgtaagcaccgttcaaccacgcgaaaccactgacgcgtcggtaacgaacacccgggcggcaaaaacaacagcctccaccagcaccagtgtgacgttaagcgacgcgcaagcaaaactgatgcaacccggcagcagtgatatcaatcttgaacgtgtcgaagcgttaaaactggcgattcgtaacggtgaactaaaaatggacaccggcaaaattgccgatgcgctgatcaacgaagcgcagcaagacttgcagagtaactga

SEQ ID NO: 481678 - DNA, 660 bp, Shigella sonnei
atgctggcaataaaacgtagcgtggcgatcatctcgatactattcactccgttaagtgcggcgagtaatctcacatcgcaattgcaaaccttttttagcgcccagctcgcgggggtaagtgatgaggttcgtgtttctattcgtacagcgcccaatctactaccgccgtgcgagcagccattgctttcgatgagcaataattcccgcctgtggggcaatgtgaatgtgttggcacgctgcggtaacgacaaacgatatttacaggttaatgtacaggccacaggaaattatgtggttgccgcgatgcccattgtgcggggaggaaagctggaagctggcaatgtcaaactaaaacgcggacggcaggataccctgccaccgcgtacggtgctggatatcaatcaacttgttgatgccgttagcctgcgcgatctatcacccgatcaacctatccagttaacccagtttcgccaggcatggcgggtaaaagcgggacaacgcgtcaacgtgatcgccagcggtgacgggtttagcgccaacgcagaaggtcaggcgctgaacaatgcagccgtcacacagaatgcgcgggtgcgcatggtatcgggactggtggtcagcggcgttgttgatgcagatgggaatattcttataaaccagtaa

SEQ ID NO: 481679 - DNA, 417 bp, Shigella sonnei
atgctcgataagctcgacgccgccttacgttttcaacaagaggcgctcaatctgcgcgcccagcgtcaggaagtgctggcagcaaacatcgccaatgccgatacccctggttatcaggcgcgcgatatcgattttgccagtgaacttaaaaaagtcatgcaacgtggacgggatgcaaccagtgtggttgcactgacgatgacctcaacgcaacacattccggcgcaggcgctgacgcctcctaccgcagaactgcaataccgtattccggaccagccttcgcttgacggtaataccgtcgatatggatcgcgaacgcacccagtttgccgataacagcctgcaataccagatgagccttagcgcgttgagcgggcaaatcaaaggcatgatgaacgttttacagagcggaaattaa

SEQ ID NO: 481680 - DNA, 405 bp, Shigella sonnei
atggcactgctgaatatttttgatatcgccgggtcggcgttaactgcccagtcccagcgcttgaacgtggcggccagtaatctggcgaatgctgatagcgtgaccggtcccgatggacagccatatcgggcaaaacaggtggtattccaggttaacgctgcaccaggtgctgcgacaggcggcgtaaaggttgccgatgttatagaaagtcaggccccggacaaactggtttatgaaccgggtaatccgctggcggatgcaaagggctacgtaaaaatgccgaacgttgatgtcgtcggggagatggttaacaccatgtcggcgtcacgcagctatcaggccaatgttgaagtgctcaacacggtgaaaagcatgatgctgaaaacccttacgctcggtcaataa

SEQ ID NO: 481681 - DNA, 696 bp, Shigella sonnei
atgtccattgcggtaaccaccaccgatccgacaaataccggcgtcagtaccaccagcagtagttcgctcacgggcagcaacgccgcagacttacaaagcagttttctgactttgttggtggcgcagctgaaaaaccaggacccgaccaatccaatggaaaacaacgagctgacgtcgcaattggcacaaatcagcacggtcagcgggattgaaaaactcaataccacgctcggatctatttccggacagattgataacagccagtcgttacaggccagtaacctgatcggtcacggcgtgatgatccccggcaccactgttcttgcgggaaccggcagtgaagaaggggctgtgaccacgaccacgccgtttggtgttgagctgcaacaggcggcagacaaagttacggccaccatcaccgataaaaatggcgcggttgtgcgcaccattgatattggtgaactgaccgccggagtccacagtttcacctgggacggtacgttgactgatggcagcactgcgccgaacggttcttacaatgtagcgattagcgccagtaacggtggtacacaactggttgcccagccgctgcagtttgctctggtgcagggtgtgctccgcggcaacagcggtaatacgctggatctcggcacttacggcaccaccaccctcgacgaagtacggcagataatttaa

SEQ ID NO: 481682 - DNA, 1206 bp, Shigella sonnei
atggccttttctcaagcggttagcggattaaacgctgccgccaccaacctcgatgttattggcaacaatatcgccaactccgccacctacggctttaaatcaggcacggcctcttttgccgatatgtttgccggttcgaaagtgggactgggggtaaaagttgccggtatcactcaggactttaccgatggcacgaccaccaacaccgggcgaggtctggacgttgctatcagccagaacggttttttccgtctggtagacagcaacggttcggtgttctacagccgtaacggacaatttaagctggatgaaaaccgtaacctggtgaatatgcaaggtttacagctgacgggttacccggcaaccggtacgccgccgactattcagcaaggggcgaatccgaccaatatttcgatcccgaataccctgatggcagcgaaaactaccaccacggcgtcgatgcagatcaacctgaattccagtgatccgcttcctactgttacgccattcagcgccagcaatgcggatagctataacaaaaaaggttcggtgactgttttcgacagtcagggtaatgctcatgacatgagcgtctactttgtgaagaccggggataataactggcaggtctacacccaggatagcagtgatccaacaggtacagccgagcctgcaatgaagctggtgtttaatgccaatggcgttctgacctcaaatccaacagagaatattaccactggcgcaattaacggcgcagatcccgccacgtttagcctgagcttcctcaactccatgcagcaaaataccggcgctaacaatattgtggcaaccacccagaatggctacaaaccgggcgatctggtgagttatcaaatcaatgatgacggtacggttgtcggcaactattccaacgaacaaacacaactgctggggcagattgtactggcgaactttgccaacaacgaaggtctggcatccgaaggcgacaacgtctggtctgcgacgcaatcttctggcgtggcgctgttggggacagccgggacgggcaactttggcaccctgaccaacggtgcgttggaagcgtccaatgtcgatctcagtaaagaactggtcaatatgatcgttgcccagcgtaactatcagtctaacgcccagaccatcaaaactcaggaccagatcctcaacacgctggttaacttacgctaa

SEQ ID NO: 481683 - DNA, 756 bp, Shigella sonnei
atggatcacgcaatttataccgcgatgggagcagccagccagacactgaatcaacaggcggtaaccgccagtaatctggccaatgcctcaacgcccggttttcgcgcgcagttgaatgctttacgcgcggtgccagtggaagggctttctctgcccacgcgcacgttggtcacggcgtcaacgccgggcgcagatatgacgcccggcaaaatggattacacctcgcgcccgctggacgtcgcgttgcagcaggatggctggctggccgtgcagaccgctgacggcagcgaagggtatacgcgtaatggcagcattcaggttgatcccaccgggcaactgacaattcaggggcatcaggtgataggcgaggcggggccaattgctgtgccggaaggagcggaaatcactattgctgccgatggcacaatctcggcgctcaatccgggcgatccggcaaatacagttgcgccagtagggcgtctgaaactggtgaaagccacgggcagcgaagtgcagcgcggtgacgacggcatttttcgtttaagcgcagaaacccaggccacgcgagggccggtactgcaggcagatccaaccttgcgtgtgatgtcgggggttctggaaggcagtaacgtcaatgccgttgcggcaatgagcgacatgattgccagcgcgcggcgttttgaaatgcagatgaaggtgatcagcagcgtcgatgataacgcaggccgtgccaaccaactgctgtcgatgagttaa

SEQ ID NO: 481684 - DNA, 432 bp, Shigella sonnei
atgatcagttcattatggatcgccaaaacgggccttgacgcccagcaaaccaatatggacgtcattgccaacaacctggcaaacgtcagtactaacggttttaagcgtcagcgcgcggtgtttgaagatctgctttatcaaaccattcgccagccgggggcacagtcttccgaacaaaccaccttaccctccggattacaaatcggcacgggggtacgcccggtcgccactgaacgcttacacagccagggaaacctgtcgcagaccaacaacagcaaagatgtcgcgattaaagggcagggctttttccaggtgatgttgccagatggttcatcagcctatacccgtgacggctctttccaggtggatcagaacgggcagctggtggttttcaggtgcagccagcgatcaccattccggcgaatgcgttaa

SEQ ID NO: 481685 - DNA, 378 bp, Shigella sonnei
gtgcagccagcgatcaccattccggcgaatgcgttaagtatcaccatcggtcgtgatggcgtggtcagcgtaacccaacaaggccaggcagctccggttcaggttgggcagctcaatctcaccacctttatgaatgacaccgggctggagagcattggcgaaaacctctacaccgaaacgcaatcctctggtgtaccgaacgaaagcacgccgggcctgaacggcgcgggactgctgtatcaagggtatgttgaaacgtctaacgtcaacgtggcggaagaactggtcaatatgattcaggtgcaacgcgcttacgaaatcaacagtaaagcggtgtccaccaccgatcagatgctgcaaaaactgacgcaactctaa

SEQ ID NO: 481686 - DNA, 699 bp, Shigella sonnei
atgcaaaaaaacgctgcgcatacttatgccatttccagcttgttggtgctttcactaaccggctgcgcctggataccctccacgccgctggtgcagggggcgaccagtgcacaaccggttcccggtccgacgcccgtcgccaacggttctattttccagtctgctcagccgattaactatggctatcaaccgctgtttgaagatcgtcgaccacgcaatattggcgatacgctgaccatcgtgttgcaggagaacgtcagcgccagcaaaagctcctctgcgaatgccagccgtgacggtaaaactaattttggctttgatactgtgccgcgctatttgcaggggctgtttggtaacgctcgtgccgatgtcgaagcctccggtggtaacacgttcaacggaaagggcggggccaatgccagcaatacctttagcggcacgttgacggtgacggttgaccaggtactggtcaacggcaacctgcatgtggtgggtgaaaaacagattgccattaatcagggtaccgaatttattcgcttctctggcgtggttaatccacgcactatcagcggcagcaataccgtaccgtctactcaggtggcggatgcgcgcattgaatacgtaggcaatggctacattaacgaagcgcaaaatatgggctggttgcagcgtttcttccttaacctgtcgccaatgtaa

SEQ ID NO: 481687 - DNA, 1098 bp, Shigella sonnei
gtgattaaatttctctctgcattaattcttctactggttacgacggcggctcaggctgagcgtattcgcgatctcaccagtgttcagggggtaaggcaaaactcactgattggctatggtctggtggtggggctggatggcaccggtgaccagacaacccagacgccgtttaccacacaaacgcttaataacatgctctcacagctgggaattaccgttccgacgggcaccaatatgcagctaaaaaacgtcgctgcggtaatggtgacagagtcacttcctccgtttggacgtcaggggcaaaccatcgatgtggtggtttcttccatgggaaatgccaaaagcttgcgtggaggtacgttgttgatgacgccgcttaagggcgttgacagtcaggtgtatgcgctggcgcagggcaatattctggttggcggcgcaggagcctccgctggcggtagcagtgttcaggtgaaccaactgaacggtggacggatcaccaatggtgcggttattgaacgtgaattgcccagccagtttggcgtcgggaatacccttaatttgcaacttaacgacgaagatttcagcatggcgcagcaaatcgctgacaccatcaaccgcgtgcgtggatatggcagcgccaccgcgttagatgcgcggactattcaggtgcgcgtaccaagtggcaacagttcccaggtccgtttccttgcagatatccagaatatgcaggttaatgtcaccccgcaggacgctaaagtagtgattaactcgcgcaccggttcggtggtgatgaatcgcgaagtgaccctcgacagctgcgcggtagcgcagggaaatctctcagtaacagtcaatcgtcaggccaatgtcagccagccagatacaccgtttggtggtggacagactgtggttactccacaaacgcagatcgatttacgccagagcggcggttcgctgcaaagcgtacgttccagcgccagcctcaataacgtggtgcgcgcgctcaatgcgctgggcgctacgccgatggatctgatgtccatactgcaatcaatgcaaagtgcgggatgtctgcgggcaaaactggaaatcatctga

SEQ ID NO: 481688 - DNA, 942 bp, Shigella sonnei
atgatcagcgacagcaaactactggcaagtgcggcctgggatgcgcaatcactcaacgaactaaaggcgaaagcgggcgaagatccggcggcaaatatccgtccggtggcccgtcaggtggaagggatgttcgtgcagatgatgttgaaaagcatgcgcgacgctttaccaaaagatggcctgttcagcagcgagcacactcgcctgtataccagtatgtatgaccagcagattgcccaacagatgacggcgggcaaaggtctggggcttgcagagatgatggttaaacagatgacgccagaacaaccattgccagaggagtccacgccagcagcaccgatgaaattcccgctcgaaactgtggtgcgttatcaaaatcaggcgctttcgcagctggtgcaaaaggccgtgccacgtaactacgatgattcgctgccgggtgacagtaaagcattcctcgcgcaactctcgctgcccgcccaactggcaagccagcaaagcggtgtgccacatcatttgatcctcgctcaggcggcgctggagtctggttgggggcaacggcaaatccgccgcgaaaacggcgagccgagctataacctgtttggcgtcaaagcctctggcaactggaaaggtccagttactgaaatcaccacgactgaatatgaaaatggcgaagcgaagaaagtaaaagcgaaatttcgggtctacagctcgtatctggaagcattgtcggattacgttgggctgttaacacgtaacccgcgctacgccgccgtgacgacagccgcgagtgcggagcagggggcgcaggccctacaggacgcggggtatgctaccgatcctcactatgcccgtaaactcaccaacatgatccagcagatgaaatcgataagcgacaaggtgagcaaaacctacagcatgaacattgataatctgttctga

SEQ ID NO: 481689 - DNA, 1644 bp, Shigella sonnei
atgtccagcttgatcaataacgccatgagcggactgaacgcggcccaggcggcgttaaatacggcaagtaataatatctccagctataacgttgccggatatacccgccaaaccactattatggcgcaggccaatagcacgttgggcgctggcggctgggttggcaatggcgtctacgtttctggtgtgcagcgtgagtatgatgcgtttattaccaaccagttacgtgctgcgcagacgcaaagtagcggcctgaccgcccgctatgagcagatgtcgaaaatcgacaatatgctctccaccagtacctcttcgctggcaacacagatgcaggatttcttcaccagcctgcaaacgctggtgagtaacgcggaagacccggcagcgcgccaggcgctgattgggaaatcagaagggttggtgaatcagtttaaaaccaccgatcaatatctgcgcgaccaggacaaacaggtcaatatcgcgataggtgccagcgttgatcagatcaacaattacgctaaacaaattgccagcctgaacgatcaaatctcgcgcctgacaggcgtgggggcaggggcgtcacctaacaatctgctggatcaacgcgatcaactggtgagcgaattaaaccagattgttggtgtagaagtcagcgttcaggatggcggcacttataacatcacggtggccaatggttactcactggttcagggaagtacggcgcggcaactggcggcagttccttccagcgctgacccttctcgtacgactgtcgcttatgttgatgggacggcaggcaatattgagatcccggagaaattactgaataccgggtcgctgggcggcattctgacattccgttctcaggagctggaccagacgcgtaatacgcttggacaactggcgctggcatttgccgaggctttcaacacccaacacaaagccggatttgatgctaacggcgatgctggtgaagatttctttactatcggtaagcccgcggttctgcaaaacacgaaaaacaaaggtgacgttgcgatcggtgccacggtaactgatgcctccgtggtactggcgacagattacaaaatctcgttcgataataatcagtggcaggtcacccgccttgccagcaataccacttttacggtgacgccggatgccaacggtaaagtggcatttgatggtctggagttgacgtttacaggaacgcctgccgttaacgacagcttcacgctgaaaccagtaagtgacgccatcgtcaacatggatgtattaatcaccgacgaagcgaaaatagcgatggcgagcgaaaaagatgcgggtgatagcgataaccgcaacggtcaggccctgctggatctgcaaagcaatagtaaaacggtgggcggtgcgaaatcctttaacgacgcttatgcctcgttagtgagtgatatcggtaataaaaccgcgacgttgaaaaccagtagcaccacgcaaggtaatgtggtgacgcagctttccaatcagcagcagtcgatttccggtgtcaatctcgatgaggagtacggaaatctgcaacgttttcagcagtattacctggcgaatgcgcaggttctgcagacggcaaacgcgatttttgatgcgctgattaacattcgctaa

SEQ ID NO: 481690 - DNA, 954 bp, Shigella sonnei
atgcgtttcagtacccagatgatgtaccagcaaaacatgcgtggtatcaccaattctcaggcagaatggatgaagtacggcgaacagatgtcgacgggtaagcgagtcgttaacccttcagatgatcccattgctgcatcacaagcggttgttctctcccaggcacaggcgcaaaacagccagtacacgctggcgcgtactttcgccactcaaaaagtgtcactggaagagagtgtacttagccaggtcaccactgctatccagaatgctcaggaaaaaattgtctacgccagcaatggcaccttgagtgacgatgaccgggcctcgctggctacggatattcaggggcttcgtgaccagttgctgaatctggcgaacaccactgacggtaatgggcgctacatttttgccggttataaaacagagactgcgccgtttagtgaggctaacggtgattatgtcggcggaacagaaagtattaagcaacaggtcgatgcttcgcgttcgatggtgataggacatacgggcgacaaaattttcgacagtattaccagtaacgcggtagcggaaccagacggtagcgcttctgaaaccaatctttttgccatgctggatagcgccatcgcagccctgaaaacgccggtcgcggatagcgaagcggataaagaaaccgccgctgcggcgttagataaaaccaaccgcggactgaaaaactcgctgaacaatgtgctgaccgttcgcgcggaattaggcacgcagctgaacgaactggagtcgctggattcattaggtagcgatcgcgctttagggcaaacgcagcagatgagcgatctggttgatgtggactggaatgcaactatttcatcttacatcatgcagcaaacggcattgcaggcatcgtataaagcatttaccgatatgcagggattgtcgctcttccagctcaacaaataa

SEQ ID NO: 481691 - DNA, 3186 bp, Shigella sonnei
atgaaaagaatgttaatcaacgcaactcagcaggaagagttgcgcgttgcccttgtagatgggcagcgtctttatgacctggatatcgaaagtccagggcacgagcagaaaaaggcaaacatctacaaaggtaaaatcacccgcattgaaccgagtctggaagctgcttttgttgattacggcgctgaacgtcacggtttcctcccactaaaagaaattgcccgcgaatatttccctgctaactacagtgctcatggtcgtcccaacattaaagatgtgttgcgtgaaggtcaggaagtcattgttcagatcgataaagaagagcgcggcaacaaaggcgcggcattaaccacctttatcagtctggcgggtagctatctggttctgatgccaaataacccgcgcgcaggtggcatttctcgccgtatcgaaggcgatgaccgtaccgaattaaaagaagcactggcaagccttgaactgccggaaggcatggggcttatcgtgcgcaccgctggcgtaggcaaatctgctgaggcgctgcaatgggatttaagcttccgcctgaaacactgggaagccatcaaaaaagccgctgaaagccgcccggctccgttcctgattcatcaggagagcaacgtaatcgttcgcgcattccgcgattacttacgtcaggacatcggcgaaatccttatcgataacccgaaagtgctcgaactggcacgtcagcatatcgctgcattaggtcgcccggatttcagcagcaaaatcaaactgtataccggcgagatcccgctgttcagccactaccagattgagtcgcagatcgagtccgccttccagcgtgaagtccgtctgccgtccggtggttcgattgttatcgacagcaccgaagcgttaacggccatcgacatcaactccgcacgcgcgacccgcggcggcgatatcgaagaaaccgcgtttaacaccaacctcgaagctgccgatgagattgctcgtcagctgcgcctgcgtgacctcggcggcctgattgttatcgacttcatcgacatgacgcctgtacgccaccagcgtgcggtagaaaaccgtctgcgtgaagcggtgcgtcaggaccgtgcgcgtattcaaatcagccatatttctcgctttggcctgctggaaatgtcccgccagcgcctgagcccatcactgggtgaatccagccatcacgtctgcccgcgctgctccggtaccggtaccgtgcgtgacaacgaatcgctgtcgctctctattctgcgtttgatcgaagaagaagcgctgaaagagaacacccaggaagttcacgccattgttcctgtgccaatcgcttcttatctgctgaatgaaaaacgttctgcggtgaatgcgattgaaacgcgtcaggacggtgttcgctgcgtgattgtgccaaacgatcagatggaaaccccgcactaccacgtgttgcgcgtgcgcaaaggggaagaaacgccgaccttaagctacatgctgccgaagctgcatgaagaagcgatggcgctgccgtctgaagaagagttcgctgaacgtaagcgtcctgaacaacctgcactggcaacctttgccatgccggatgtgccgccagcgccaaccccagctgaacctgccgcgactgtcgtagccccagcaccgaaagctgcaacggcaacaccagcagctcctgcacaacctgggctgttaagccgcttcttcggcgcactgaaagcgctgttcagcggtggtgaagaagccaaaccgaccgagcaaccaacaccgaaagcagaagcgaaaccggaacgtcaacaggatcgtcgcaaacctcgtcagagcaaccgccgtgaccgtaatgagcgccgcgacacccgtagtgaacgtactgaaggcagcgataatcgcgaagaaaaccgtcgtaatcgtcgccaggcacagcagcagactgccgagacgcgtgagagccgtcagcaggctgaggtaacggaaaaagcacgtaccaccgacgagcagcaagcgccgcgtcgtgaacgtagccgccgccgtaacgatgataaacgtcaggcgcaacaagaagcgaaggcgctgaatgttgaagagcaatctgttcaggaaaccgaacaggaagaacgtgtacgtccggttcagccgcgtcgtaaacagcgtcagctcaatcagaaagtgcgttacgagcaaagcgtagccgaagaagcggtagtcgcaccggtggttgaagaaactgccgctgccgaaccaattgttcaggaagctccagctccacgcacagaactggtgaaagtcccgctgccagtcgtagcgcaaactgcaccagaacagcaagaagagaacaatgctgataaccgtgacaacggtggcatgccgcgtcgttctcgccgctcgcctcgtcacctgcgcgtgagtggtcagcgtcgtcgtcgctatcgtgacgagcgttatccaacccagtcgccaatgccgttgaccgtagcgtgcgcgtctccggaactggcctctggcaaagtctggatccgctatccaattgtacgtccgcaagatgtacaagttgaagagcagcgcgaacaggaagaagtacaagtgcagccgatggtgactggggtccctgtcgccgccgctgtcgaacctgttgttagcgcaccggttgttgaagaagtggctgaagttgtagaagcccccgttcagattgccgaaccgcaaccggaagtggttgaaacgacgcatcctgaagtgattgccgccgcagtaactgaacagccgcaggtgattaccgagtctgatgttgccgtagcccaggaagttgcagaacacgcagaaccggtggttgaaccgcaggaagagacggcagatattgaagaagttgccgaaactgctgaggttgtggttgctgaacctgaagttgttgctcaacctgccgcgccagtcgtcgctgaagtcgcagcagaagttgaaacggtagctgcggttgaacctgaggtcaccgttgagcataaccacgctacggtgccgatgacgcgcgctccggcaccggaatatgttccggatgcaccgcgtcacagtgactggcagcgccctacttttgccttcgaaggtaaaggtgccgcaggtggtcatacggcaacacatcatgcctctgccgctcctgcgcgtccgcaacctgttgagtaa

SEQ ID NO: 481692 - DNA, 960 bp, Shigella sonnei
atgaaaacagagactccatccgtaaaaattgttgctatcaccgctgacgaagcggggcaacgtatcgataactttttgcgtacccaattgaaaggcgtaccaaaaagtatgatttaccgtattttgcgtaaaggcgaagtgcgggtgaacaaaaaacgtattaagcctgaatataaactcgaagcgggtgatgaggtgcgtatcccaccggttcgcgttgctgagcgggaagaagaggcggtttcgccacatctgcaaaaggtggcggcgctggcggacgtcatcttatatgaagatgatcatatcctggtgctgaataaaccttccggtacggcggtacatggcggcagtggtttaagcttcggcgttatcgaaggtttgcgggcgttgcgcccggaagcgcggttccttgaactggttcatcgtctcgaccgggacacttcaggtgtgttgctgatagcgaaaaaacgctcggcgttgcgttctctgcatgagcaattacgtgaaaaaggaatgcaaaaagattacctggcgctggtgcgcggtcagtggcagtcgcatgtgaagagcgttcaagcgccgttattgaaaaatattctgcaaagcggcgaacgtatcgtgcgtgtcagtcaggaaggcaaaccgtcggaaacacgctttaaagtggaagaacgctatgcatttgccaccctggtgcgttgtagcccggtaaccggacgtactcatcagatccgtgtgcatacacagtatgcgggtcatccgattgcctttgacgatcgctacggtgaccgtgaatttgacagacagctcactgaagcaggcacgggattaaatcgtctgttcctgcacgccgcagcgttgaagtttacccatccggggaccggtgaggtgatgcgtatcgaagcgccgatggatgaaggtttgaagcgttgtttgcaaaagctgcgtaacgcgcgctaa

SEQ ID NO: 481693 - DNA, 624 bp, Shigella sonnei
atggctatcatcaatacgctatatctgatggaaaaaaatatgcctaaacttattttagcctccacctcgccatggcgtcgcgctcttctggaaaaactgcaaatctcttttgaatgtgcagcaccagaggtcgacgaaaccccacgcagcgacgaatcaccgcgacagttggtgcttcgactggcacaagaaaaagcgcaatctctggcgtcacgttatccggatcatttaattattggttcagaccaggtatgtgttcttgatggcgaaatcaccggtaaaccgttaacggaagaaaatgcccgtctgcaattacgcaaagccagcggcaatatcgtcaccttctatactggactggcgttgtttaattcggcgaatgggcatctacaaacagaagtggagccttttgacgtccatttccgtcacctgagcgaggcggagattgataattacgtgcgtaaggagcatcccctgcactgcgcgggtagctttaagagtgaaggatttggcattacgctgtttgagcgtttagagggacgtgaccctaacacgctggttggtttaccgctaatcgcgctgtgtcagatgttacgtcgggaagggaaaaacccgctgatgggatag

SEQ ID NO: 481694 - DNA, 522 bp, Shigella sonnei; identical to SEQ ID NO: 470234

SEQ ID NO: 481695 - DNA, 174 bp, Shigella sonnei; identical to SEQ ID NO: 3543

SEQ ID NO: 481696 - DNA, 1041 bp, Shigella sonnei
atgggaggggattttggcccttccgtgacagtgcctgcagcattgcaggcactgaattctaattcgcaactcactcttcttttagtcggcaatcccgacgccatcacgccattacttgctaaagctgactttgaacaacgttcgcgtctgcagattattcctgcgcagtcagttatcgccagtgatgcccggccttcgcaagctatccgcgccagtcgtgggagttcaatgcgcgtggccctggagctggtgaaagaaggtcgagcgcaagcctgtgtcagtgccggtaataccggggcactgatggggctggcaaaattattactcaagcccctggaggggattgagcgtccggcgctggtgacggtattaccacatcagcaaaagggcaaaacggtggtccttgacttaggggccaacgtcgattgtgacagtacaatgttggtgcaatttgccattatgggctcagttctggctgaagaggtggtggaaattcccaatcctcgcgtggcgttgctcaatattggtgaagaagaagtaaagggtctcgacagtattcgggatgcctcagcggtgcttaaaacaatcccttctatcaattatatcggctatcttgaagccaatgagttgttaactggcaagacagatgtgctggtttgtgacggctttacaggaaatgtcacattaaagacgatggaaggtgttgtcaggatgttcctttctctgctgaaatctcagggtgaagggaaaaaacggtcgtggtggctactgttattaaagcgttggctacaaaagagcctgacgaggcgattcagtcacctcaaccccgaccagtataacggcgcctgtctgttaggattgcgcggcacggtgataaaaagtcatggtgcagccaatcagcgagcttttgcggtcgcgattgaacaggcagtgcaggcggtgcagcgacaagttcctcagcgaattgccgctcgcctggaatctgtatacccagctggttttgagctgctggacggtggcaaaagcggaactctgcggtag

SEQ ID NO: 481697 - DNA, 954 bp, Shigella sonnei
atgtatacgaagattattggtactggcagctatctgcccgaacaagtgcggacaaacgccgatttggaaaaaatggtggacacctctgacgagtggattgtcactcgtaccggtatccgcgaacgccacattgccgcgccaaacgaaaccgtttcaaccatgggctttgaagcggcgacacgcgcaattgagatggcgggcattgagaaagaccagattggcctgatcgttgtggcaacgacttctgctacgcacgctttcccgagcgcagcttgtcagattcaaagcatgctgggcattaaaggttgcccggcatttgacgttgcagcagcctgcgcaggtttcacctatgcattaagcgtagccgatcaatacgtgaaatctggggcggtgaagtatgctctggtcgtcggttccgatgtactggcgcgcacctgcgatccaaccgatcgtgggactattattatttttggcgatggcgcgggcgctgcggtgctggctgcctctgaagagccgggaatcatctccacccatctgcatgccgacggtagctatggtgagttgctgacgctgcctaatgctgaccgtgtgaatccagagaattcaattcatctgacgatggcgggcaacgaagtcttcaaggttgcggtaacggaactggcgcacatcgttgatgagacgctggcggcaaataatcttgaccgttctcaactggactggctggttccgcatcaggctaacctgcgtattatcagtgcaacggcgaaaaaactcggtatgtctatggacaatgtcgtggtgacgctggatcgccacggtaatacctctgcggcctctgtcccgtgcgcgctggatgaagctgtacgcgacgggcgcattaagccggggcagttggttctgcttgaagcctttggcggtggattcacctggggctccgcgctggttcgtttctag

SEQ ID NO: 481698 - DNA, 930 bp, Shigella sonnei
atgacgcaatttgcatttgtgttccctggacagggttctcaaaccgttggaatgctggctgatatggcggcgagctatccaattgtcgaagaaacgtttgctgaagcttctgcggcgctgggctacgacctgtgggcgctgacccagcaggggccagctgaagaactgaataaaacctggcaaacccagccagcgctgttgactgcctctgttgcgctgtaccgcgtatggcagcagcagggcggtaaagcaccggcaatgatggccggtcacagcctgggggaatattccgcgctggtttgcgctggtgtgattgatttcgctgatgcggtgcgtctggttgagatgcgcggcaagctcatgcaagaagccgtaccggaaggtacgggcgctatggcggcaatcatcggtctggatgatgcgtctattgcgaaagcgtgtgaagaagctgcagcaggtcaggtcgtttctccggtaaactttaactctccgggacaggtggttattgccggtcataaagaagcggttgagcgtgctggcgctgcctgtaaagctgcgggcgcaaaacgtgctctgccgttaccagtgagcgtaccgtctcactgtgcgctgatgaaaccagcagccgacaaactggcagtagaattagcgaaaatcacctttaacgcaccaacagtttctgttgtgaataacgttgatgtgaaatgcgaaaccaatggtgatgccatccgtgacgcactggtacgtcagttgtataacccggttcagtggacgaagtctgttgagtacatggcagcgcaaggcgtagaacatctctatgaagtcggcccgggcaaggtgcttactggcctgacgaaacgcattgtcgacaccctgaccgcctcggcgctgaacgaaccttcagcgatggcagcggcgcttgagctttaa

SEQ ID NO: 481699 - DNA, 735 bp, Shigella sonnei
atgaattttgaaggaaaaatcgcactggtaaccggtgcaagccgcggaattggccgcgcaattgctgaaacgctcgcagcccgtggcgcgaaagttattggcactgcgaccagtgaaaatggcgctcaggcgatcagcgattatttaggtgccaacggcaaaggtctgatgttgaatgtgaccgacccggcatctatcgaatctgttctggaaaaaattcgcgcagaatttggtgaagtggatatcctggtcaataatgccggtatcactcgtgataacctgttaatgcgaatgaaagatgaagagtggaacgatattatcgaaaccaacctttcatctgttttccgtctgtcaaaagcggtaatgcgcgctatgatgaaaaagcgtcatggtcgtattatcactatcggttctgtggttggtaccatgggaaatggcggtcaggccaactacgctgcggcgaaagcgggcttgatcggcttcagtaaatcactggcgcgcgaagttgcgtcacgcggtattactgtaaacgttgttgctccgggctttattgaaacggacatgacacgtgcgctgagcgatgaccagcgtgcgggtatcctggcgcaggttcctgcgggtcgcctcggcggcgcacaggaaatcgccaacgcggttgcattcctggcatccgacgaagcagcttacatcacgggtgaaactttgcatgtgaacggcgggatgtacatggtctga

SEQ ID NO: 481700 - DNA, 237 bp, Shigella sonnei; identical to SEQ ID NO: 3538

SEQ ID NO: 481701 - DNA, 1242 bp, Shigella sonnei
gtgtctaagcgtcgtgtagttgtgaccggactgggcatgttgtctcctgtcggcaataccgtagagtctacctggaaagctctgcttgccggtcagagtggcatcagcctaatcgaccatttcgatactagcgcctatgcaacgaaatttgctggcttagtaaaggattttaactgtgaggacattatctcgcgcaaagaacagcgcaagatggatgccttcattcaatatggaattgtcgctggcgttcaggccatgcaggattctggccttgatataacggaagagaacgcaacccgcattggtgccgcaattggctccgggattggcggcctcggactgatcgaagaaaaccacacatctctgatgaacggtggtccacgtaagatcagcccattcttcgttccgtcaacgattgtgaacatggtggcaggtcatctgactatcatgtatggcctgcgtggcccaagcatctctatcgcgaccgcctgtacttccggcgtgcacaacattggccatgctgcgcgtattatcgcgtatggcgatgctgacgtgatggttgcaggtggcgcagagaaagccagtacgccgctgggtgttggtggttttggcgcggcacgtgcattatctacccgcaatgataacccgcaagcggcgagccgcccgtgggataaagagcgtgatggcttcgtactgggcgatggtgccggtatgctggtacttgaagagtacgaacacgcgaaaaaacgcggtgcgaaaatttacgctgaactcgtcggctttggtatgagcagcgatgcttatcatatgacgtcaccgccagaaaatggcgcaggcgcagctctggcgatggcaaatgctctgcgtgatgcaggcattgaagcgagtcagattggctacgttaacgcgcacggtacttctacgccggctggcgataaagctgaagcgcaggcggtgaaaaccatcttcggtgaagctgcaagccgtgtgttggtaagctccacgaaatctatgaccggtcacctgttaggtgcggcgggtgcagtagaatctatctactccatcctggcgctgcgcgatcaggctgttccgccaaccatcaacctggataacccggatgaaggttgcgatctggatttcgtaccgcatgaagcacgtcaggtcagcggaatggaatacacgctgtgtaactccttcggcttcggtggcactaatggttctttgatctttaaaaagatctaa

SEQ ID NO: 481702 - DNA, 810 bp, Shigella sonnei
atgttcttaattaacggtcataagcaggaatcgctggcagtaagcgatcgggcaacgcagtttggtgatggttgttttaccaccgccagagttatcgacggtaaagtcagtttgttatcggcgcatatccagcgactacaggatgcttgtcagcggttgatgattttctgtgacttctggcctcagcttgaacaagagatgaaaacgctggcagcagaacagcaaaatggtgtgctgaaagtcgtgatcagtcgcggtagtggcgggcgagggtacagcacattgaacagtggaccggcaacgcggattctctccgttacggtttatcctgcacattacgaccgtttgcgtaacgaagggatgacgttggcgctaagcccggtgcggctggggcgcaatcctcatcttgcaggtattaaacatcttaatcggcttgagcaagtattgatccgctctcatcttgagcagacaaacgctgatgaggcgctggtccttgacagcgaagggtgggttacggaatgctgtgcggctaatttgttctggcggaagggcaatgtagtttatacgccgcgtctggatcaggcaggtgttaacggcattatgcgacaattctgtatccgtttgctggcacaatcctcttatcagcttgtcgaagtgcaagcctctctggaagaggcgttgcaggcagatgagatggttatttgtaatgcgttaatgccagtgatgcccgtacgtgcctgtggcgatgtctccttttcgtcagcaacgttatatgaatatttagccccactttgtgagcgcccgaattag

SEQ ID NO: 481703 - DNA, 1023 bp, Shigella sonnei
atgaaaaaagtgttattgattatcttgttattgctggtggtactgggtatcgccgctggtgtgggcgtctggaaggttcgccatcttgccgacagcaaattgcttatcaaagaagagacgatatttaccctgaagccagggaccggacgtctggcgcttggtgaacagctttatgccgataagatcatcaatcgcccacgggtttttcaatggttgctgcgtatcgaaccggatctttctcactttaaagccgggacttaccgctttacaccgcagatgaccgtgcgcgagatgctgaaattgctggaaagcggtaaagaagcacagttcccgctgcgactggtagaagggatgcgtctgagcgactacctcaagcaattgcgtgaggctccgtatatcaagcacacgctgagtgacgataagtacgccaccgtagcgcaggcacttgaactggaaaacccggagtggattgaaggttggttctggccagacacctggatgtataccgccaataccaccgatgtcgcgttactcaagcgagcgcacaagaaaatggtgaaagcggtcgatagcgcctgggaagggcgtgcggacggtctgccttataaagataaaaatcagctggtgacgatggcatcaattatcgaaaaagaaaccgccgttgccagtgaacgcgatcaggttgcctcggtatttatcaaccgtttacgcattggtatgcgcctgcagaccgacccaaccgtgatttacgggatgggagagcgttataatggcaaactttctcgtgcagacctggaaacgccgacagcgtataacacctataccattaccggtttgccgccgggtgcgatagctacgccgggggcggattcgctgaaggctgctgcgcatccggcaaaaacgccgtatctctattttgtggccgatggtaaaggtggtcacacgtttaataccaatcttgccagccataacaagtctgtgcaggattatctgaaagtgcttaaggaaaaaaatgcgcagtaa

SEQ ID NO: 481704 - DNA, 642 bp, Shigella sonnei; identical to SEQ ID NO: 458047

SEQ ID NO: 481705 - DNA, 1005 bp, Shigella sonnei
atgagatggtatccatggttacgacctgatttcgaaaaactggtagccagctatcaggccggaagaggtcaccatgcgctactcattcaggcgttaccgggcatgggcgatgatgctttaatctacgccctgagccgttatttactctgccaacaaccgcagggccacaaaagttgcggtcactgtcgtggatgtcagttgatgcaggctggcacgcatcccgattactacaccctggctcccgaaaaagggaaaaatacgctgggcattgatgcagtacgtgaggtcaccgaaaagctgaatgagcacgcacgcctaggtggtgcgaaagttgtctgggtaaccgatgctgccttactgaccgacgccgcggctaacgcattgctgaaaacgcttgaagagccaccagcagaaacctggtttttcctggctacccgcgagcctgaacgtttactggcaacattacgtagtcgttgtcggttacattaccttgcgccgccgccggaacagtacgccgtgacctggctttcacgcgaagtgacaatgtcacaggatgcattacttgccgcattgcgcttaagcgccggttcgcctggcgcggcactggcgttgtttcagggagataactggcaggctcgtgaaacattgtgtcaggcattggcatatagcgtgccatcgggcgactggtattcgctgctggcggcccttaatcatgaacaagctccggcgcgtttacactggctggcaacgttgctgatggatgcgctaaaacgccatcatggtgctgcgcaggtgaccaatgttgatgtgccgggccttgtcgtcgaactggcaaaccatctttctccctcgcgcctgcaggctatactgggggatgtttgccacattcgtgaacagttaatgtctgtcacaggcatcaaccgcgagcttctcatcaccgatcttttactgcgtattgagcattacctgcaaccgggcgttgtgctaccggttcctcatctttaa

SEQ ID NO: 481706 - DNA, 798 bp, Shigella sonnei
atgtttttagtcgactcacactgccatctcgatggtctggattatgaatctttgcataaggacgtggatgacgttctggcgaaagccgccgcacgcgatgtgaaattttgtctggcagtcgccacaacattaccgggttatttacatatgcgggatctggtaggcgaacgtgacaacgtcgtattttcttgtggcgtgcatccactcaaccagaatgatccctacgatgtagaagatttacgccgtctggcggcagaagagggtgttgtagcgctgggtgaaaccgggctggattattattacacaccggaaactaaagttcgtcagcaagagtccttcatccatcatatccagattggtcgtgaactgaacaagccggttatcgtccatacccgtgacgcccgcgccgatacgctggcaattctgcgcgaagaaaaagtgacggattgcggtggcgtactacactgttttacagaggacagagaaacggcgggtaaattactggatctcggattttacatctccttttccggcattgtgaccttccgtaatgcggagcaacttcgagatgctgcgcgttatgtccccctggatcggttactggtggaaactgactcaccttaccttgcgccggtaccgcatcgaggaaaagagaatcaacctgcgatggttcgtgacgttgcagaatacatggctgtgttgaaaggtgttgccgttgaagaactggcgcaggtaaccaccgataacttcgcccgtctgtttcacatcgacgcttcccgccttcaatccatccgttga

SEQ ID NO: 481707 - DNA, 1434 bp, Shigella sonnei
atgtttaagaatgcatttgctaacctgcaaaaggtcggtaaatcgctgatgctgccggtatccgtactgcctatcgcaggtattctgctgggcgtcggttccgcgaatttcagctggctgcccgccgttgtatcgcatgttatggcagaagcaggcggttccgtctttgcaaacatgccactgatttttgcgatcggtgtcgccctcggctttaccaataacgatggcgtatccgcgctggccgcagttgttgcctatggcatcatggttaaaaccatggccgtggttgcgccactggtactgcatttacctgctgaagaaatcgcctctaaacacctggcggatactggcgtactcggagggattatctccggtgcgatcgcagcgtacatgtttaaccgtttctaccgtattaagctgcctgagtatcttggcttctttgccggtaaacgctttgtgccgatcatttctggcctggctgccatctttactggcgttgtgctgtccttcatttggccgccgattggttctgcaatccagaccttctctcagtgggctgcttaccagaacccggtagttgcgtttggcatttacggtttcatcgaacgttgcctggtgccgtttggtctgcaccacatctggaacgtacctttccagatgcagattggtgaatacaccaacgcagcaggtcaggttttccacggcgacattccgcgttatatggcgggtgacccgactgcgggtaaactgtctggtggcttcctgttcaaaatgtacggtctgccagctgccgcaattgctatctggcactctgctaaaccagaaaaccgcgcgaaagtgggcggtattatgatctccgcggcgctgacctcgttcctgaccggtatcaccgagccgatcgagttctccttcatgttcgttgcgccgatcctgtacatcatccacgcgattctggcaggcctggcattcccaatctgtattcttctggggatgcgtgacggtacgtcgttctcgcacggtctgatcgactttatcgttctgtctggtaacagcagcaaactgtggctgttcccgatcgtcggtatcggttatgcgattgtttactacaccatcttccgcgtgctgattaaagcactggatctgaaaacgccgggtcgtgaagacgcgactgaagatgcaaaagcaacaggtaccagcgaaatggcaccggctctggttgctgcatttggtggtaaagaaaacattactaacctcgacgcatgtattacccgtctgcgcgtcagcgttgctgatgtgtctaaagtggatcaggctggcctgaagaaactgggcgcagcgggcgtagtggttgctggttctggtgttcaggcgattttcggtactaaatccgataacctgaaaaccgagatggatgagtacatccgtaaccactaa

SEQ ID NO: 481708 - DNA, 2190 bp, Shigella sonnei
atgctttcaacacaatttaacagggataatcaatatcaagccatcaccaaaccgtcactacttgccggttgcatagcactggcactattaccttctgccgcttttgctgcaccagccactgaagaaacggtgattgttgagggttcagccacagctccagatgatggcgaaaatgattacagcgtaacgtctacctctgcgggtaccaaaatgcagatgactcaacttgatattcctcagtcggtcactattgttagccagcagcggatggaagatcagcagttacaaacgctgggcgaagtgatggaaaacacgctggggatcagcaaaagtcaggcggattccgatcgtgctctttattattcccgtggattccagatcgataactatatggttgatggtatccccacctattttgaatcgcgctggaatctgggcgacgcactttctgatatggcactctttgaacgcgtagaagtagtgcgtggcgcgacaggactcatgaccgggacgggtaatccatctgcggcaattaatatggttcgaaaacacgcgaccagtcgtgaatttaaaggcgatgtctcggcggaatacggtagctggaacaaagaacggtatgtggcggatttacaaagcccactcaccgaagacggtaaaatccgcgcgcgaattgtcggcggctaccagaataacgactcatggctggaccgctacaacagtgaaaagaccttcttctcgggcattgtcgatgctgatttaggcgatcttacgacgctttcagccggttacgaatatcagcgcattgatgttaatagcccaacctggggcggtttaccgcgctggaatactgatggcagcagcaacagttacgatcgtgcacgcagtaccgcacctgactgggcgtacaacgataaagagatcaacaaggtctttatgaccctgaagcagcggtttgctgatacctggcaagcgacactgaatgccacccactctgaagtcgaatttgacagcaaaatgatgtatgtcgatgcctatgtaaacaaagcggatggtatgctggttgggccatacagtaattatggacctggctttgattatgtcggcggcaccggttggaacagtggcaaacgtaaagttgatgcgctggatttgttcgctgacggtagttatgaattgtttggtcgtcagcacaatctaatgtttggtggcagttacagcaaacaaaacaatcgttacttcagttcatgggccaacatcttcccggatgaaattggcagtttctacaactttaatggcaatttcccacaaaccgactggtcaccacagagcctggcacaggacgataccacacatatgaaatcgttatatgctgctactcgagtcacccttgccgatccgctgcatctgatcctcggcgcacgttataccaactggcgggttgatacgctgacttacagcatggagaaaaaccacaccacgccttacgctggtctggtgtttgacatcaatgacaactggtcgacctacgccagctatacctctattttccagccgcaaaatgatcgtgacagttcaggcaaatatctggctccaatcaccggtaacaactacgagctgggtctgaaatcggactggatgaatagccgtctgaccaccacgttagccatcttccgtattgagcaggataatgtcgctcagtccaccggtacacctatccccggcagcaacggcgaaaccgcctataaagcggtggatgggacagtcagtaaaggggtggaatttgaactcaacggcgcaattaccgacaactggcagctgacatttggcgcaacgcgctatattgcagaggataacgaaggaaacgccgttaatcctaatctgccacgcaccacggttaaaatgttcaccagctatcggttgcctgtcatgccagagttgacagtcggcggtggtgttaactggcaaaatcgcgtgtataccgacaccgtgacaccgtatggcaccttccgcgccgagcaaggtagctacgcgctggtggatctcttcacccgctaccaggtgacgaaaaacttctcgttacaggggaacgtcaataacctgttcgacaaaacctacgataccaacatggaaggttctatcgtctacggcgcaccgcgtaatttcagcattaccggcacgtatcaattctga

SEQ ID NO: 481709 - DNA, 360 bp, Shigella sonnei
gtggcagaagaaactatattcagcaaaattattcgtcgtgagatcccctccgatatcgtctaccaggatgatctggtaacggcgtttcgcgatatttcgccgcaagcgccaacgcatattctgatcattccgaatatcctcattccgactgtgaacgacgtgtcagctgagcatgagcaggcgctgggacgcatgatcaccgtagcggcaaaaattgctgagcaagaaggtattgccgaagatggctatcgtctgatcatgaataccaaccgccatggcggacaagaggtttaccacatccatatgcacttgttgggtggccgtccgctgggaccaatgctggcgcataaaggtctgtaa

SEQ ID NO: 481710 - DNA, 378 bp, Shigella sonnei
atgagaaaaggatgctttgggctggtgtctctggcgttgttactgctggtgggctgtcgttcacatccggaaattccggtgaatgatgagcaatcgctggtgatggagtcatctttattggctgcgggcatcagtgcagaaaagcccgtcctttcgacgtctgatattcaaccttcagcatcctcaacgctttataacgaaaggcaagaacccgttaccgttcattatcgtttttactggtatgacgccagagggctggagatgcatcctctggaaaggccacgcagcgttagcattcccgcacattcggcggtaacgctgtacggcagcgccaattttctgggggcgcacaaagtcagactttatctatatttgtaa

SEQ ID NO: 481711 - DNA, 642 bp, Shigella sonnei
atgacaaaaatgagtcgctacgccttgattaccgcgctggcgatgtttctcgccgggtgtgtggggcaacgtgaacctgcaccggtagaagaagtgaaaccagcgccggaacaaccagccgagccacaacagcctgtccccacagtgccctcggtgccgacgatcccgcagcagccaggcccaattgagcacgaagatcaaacggcaccgcctgcgccgcatattcgccattatgactggaatggcgcaatgcagccgatggtcagtaagatgcttggggctgacggggtgactgcgggtagcgtcctgctggttgatagcgttaacaaccgtactaacggttcgctgaatgccgcagaagcgaccgaaacgctgcgaaatgcgctggctaataacgggaaatttaccctggtttccgcccagcagctgtcgatggctaagcaacagttaggtttgtcgccgcaggacagtttaggtacccgtagtaaagccataggcattgcccgcaatgtcggcgctcattacgtgctgtactccagcgcctctggcaacgttaacgctccgaccctacaaatgcagctgatgctggtgcagacgggcgaaattatctggtcaggtaaaggtgccgtttcgcagcaataa

SEQ ID NO: 481712 - DNA, 825 bp, Shigella sonnei
gtgccgtttcgcagcaataatcccatcacgcgcgacgaattgctgtcgcgctttttcccgcagtttcatcccgtcacgacgtttaatagtgggcttagtggcggtagttttctcattgaacatcagggccagcgttttgttgtgcgtcagccgcacgatcctgatgcgccgcagtccgcgttcttgcgccagtatcgggctttatcacaactacccgcaagcattgcaccgaagccgcatttatatctccgtgactggatggtagtcgactatctgcccggcgcggtaaaaacgtatttgccggataccaacgaactggcaggcttgctgtattatcttcatcaacaaccacgttttggctggcgaataacgctgttgcccttactggaactgtactggcagcaaagcgatccggcgcggcggactgtgggttggctgcgaatgttaaaacgtctgcgcaaagcgcgggaaccacggcctttacgcttaagtccattgcatatggatgtccacgccggaaatttagtgcatagcgcgtcagggttaaaactcatcgactgggagtatgccggagatggtgatatcgcgctggaactggcggcggtgtgggtggaaaatactgaacagcaccggcaattggtcaatgactatgccactcgcgcgaagatttatccggcgcaattatggcgtcaggtcaggcgatggtttccctggctgctgatgctcaaagcagggtggtttgagtaccgctggcgacaaatcggcgatcaacaatttatcaggctggccgatgacacctggcggcagctattaataaaacaataa

SEQ ID NO: 481713 - DNA, 1026 bp, Shigella sonnei
gtgggtccagtaatgttggatgtcgaaggttacgaactggacgcggaagagcgtgaaatactggcgcatccgctggtgggagggctgattctctttacgcgtaactatcatgatcctgcccagttacgtgaactggtgcgccagatccgcgcagcatcgcgcaatcatctggtggtggcggtagatcaggaaggtggacgcgtgcagcgttttcgcgaaggttttacccgcttaccggcagcacaatcctttgctgcgctgttgggaatggaagagggcggcaaactggcgcaagaggcgggttggctgatggccagcgaaatgatcgctatggatattgatatcagctttgcgccagtgctggatgtcgggcatatcagcgcggcgattggcgagcgttcttatcatgccgatccacaaaaagccctggcaattgccagccggtttattgatggtatgcatgaagccggaatgaaaacgaccgggaaacacttcccaggacacggtgcagtaacggcagactcacacaaagaaacaccgtgcgatccacgtccacaagcggagattcgcgctaaagatatgtcggtcttcagttccttaatccgcgaaaataaactcgacgccattatgcctgcgcatgtgatctacagtgatgttgatccgcgtccggcgagcggttcttcctactggctgaaaaccgttttgcgtcaggaactgtgttttgacggtgtaattttctctgacgatttatcgatggaaggtgccgcgattatgggcagttatgccgaacgcgggcaggcatcactggacgcaggttgcgatatgatcctggtctgcaataatcgtaaaggggccgtcagcgtgttagataatctgtcaccgatcaaggcagaacgtgttacacgtttgtatcataaaggttcattttcgcgacaggaactgatggactcggctcgctggaaggcgatcagcacccgtctgaatcagttacatgaacgctggcaggaagagaaagcaggtcactaa

SEQ ID NO: 481714 - DNA, 543 bp, Shigella sonnei
atgattatctatttacacggttttgactctaacagtccgggtaaccacgagaaagtcttacaattgcagtttattgacccggatgtacgcttgataagctacagtacgcggcatccgaaacatgatatgcagcatctgctcaaagaagtggacaaaatgttgcaactgaacgtcgacgagcgtccgctgatttgcggcgttggtctgggcggatactgggcggaacggattggttttctttgcgatatccgccaggtgatcttcaaccctaatttgttcccttatgagaacatggaaggcaagattgatcgcccggaagagtatgccgatattgccactaagtgtgtgaccaacttccgcgagaagaatcgcgatcgttgcctggtgattttgtcgcgtaatgatgaagcgcttaacagccagcggacatctgaagagttgcatcattattacgagattgtctgggacgaagagcagacgcacaaattcaagaatatctccccgcatttgcagcgcattaaggcgttcaaaaccctcgggtaa

SEQ ID NO: 481715 - DNA, 1305 bp, Shigella sonnei
ttgactacgccattgaaaaaaattgtgattgtcggcggcggtgctggtgggctggaaatggcaacacagctggggcataagctgggacgcaagaaaaaagccaaaattacgctggtcgatcgtaaccacagccatctgtggaaaccgctgctgcacgaagtggcgactggctcgcttgatgaaggcgtcgatgcgttgagctatctggcccatgcgcgcaatcatggtttccagttccagctgggttccgtcattgatattgatcgtgaagcgaaaacaatcactattgcagaactgcgcgatgagaaaggtgaactgctggttccggaacgtaaaatcgcctatgacaccctggtaatggcgctgggtagcacctctaacgatttcaatacgccaggtgtcaaagagaactgcattttcctcgataacccgcaccaggcgcgtcgcttccaccaggagatgctgaatctgttcctgaaatactccgccaacctgggcgcgaatggtaaagtgaacattgcgattgtcggcggcggcgcgacgggtgtagaactctccgctgaattgcacaatgcggtcaagcaactgcacagctacggttacaaaggcctgaccaacgaagccctgaacgtaacgctggtagaagcgggagaacgtattttgcctgcattaccgccacgtatctctgctgcggcccacaacgagctaacgaaacttggcgttcgcgtgctgacgcaaaccatggtcaccagtgctgatgaaggcggcctgcacactaaagatggtgaatatattgaggctgatctgatggtgtgggcagccgggatcaaagcgccagacttcctgaaagatatcggtggtcttgaaaccaaccgtatcaaccagctggtggtggaaccgacgctgcaaaccacccgcgatccagacatttacgctattggcgactgcgcgtcatgcccgcgtccggaagggggctttgttccgccgcgtgctcaggctgcacaccagatggcgacctgcgcaatgaaaaatattctggcgcagatgaacggtaaaccgctgaaaaattatcagtataaagatcatggttcgctggtatcgctgtcgaacttctccactgtcggtagcctgatgggtaacctgacgcgcggctcaatgatgattgaaggacgaattgcgcgctttgtatatatctcgctataccgaatgcatcagattgcgctgcatggttactttaaaaccggattaatgatgctggtggggagtattaaccgcgttatccgtccgcgtttgaagttgcattaa

SEQ ID NO: 481716 - DNA, 540 bp, Shigella sonnei
gtgaataaatcaatgttggcgggtatcgggattggtgtcgcagctgcgctgggcgtagcggcagtggccagtctgaacgtgtttgaacggggcccgcaatacgctcaggttgtttctgcaaccccaatcaaggaaacggttaaaacaccgcgtcaggagtgtcgcaacgtcacagtgacccatcgtcgaccggtgcaggatgaaaatcgcattaccgggtcggtgctcggcgctgttgctggcggcgtgatagggcatcagtttggtggtggtcgtggtaaagatgtcgccactgttgtgggggcgctgggtggtggatatgccggtaaccagatccagggctctctccaggaaagcgatacttacacgactacgcaacagcgttgtaaaacggtgtatgacaagtcagaaaaaatgctcggttatgatgtgacctataagattggcgatcagcagggcaaaatccgcatggaccgcgatccgggtacgcagatcccgctagatagtaacgggcaactgattttgaataacaaagtataa

SEQ ID NO: 481717 - DNA, 696 bp, Shigella sonnei
gtgaacggaggtgattatttttataataacctttcattcacagtcaccaggttcaacggcatcatggcaactgactcaacacaatgtgtaaaaaaaagccgtggccgcccaaaagtgttcgacagggatgccgcgcttgataaggccatgaaattgttctggcaacacggttatgaagcgacttctcttgcggacctcgtcgaagcgaccggagccaaagcgcccacgctatacgcggaatttaccaacaaagaggggttatttcgtgccgttctcgaccgctatatcgatcgttttgccgctaagcatgaagcacagctgttttgtgaagagaaaagcgtggagtctgcgctggctgactattttgctgccatcgccaactgctttaccagcaaagacaccccggcaggctgcttcatgatcaacaactgcaccaccctctccccagattcaggagatatcgccaatacgttgaaatcacgccatgcgatgcaagagcgcactttgcagcagtttttatgtcaacgacaagcgcgcggggaaatcccgacccactgtgacgtgacacatctggcagaattccttaattgtattattcaggggatgtcgatcagcgcacgcgaaggtgcatcgctggaaaaactgatgcagattgccggaacgactttgcgtttatggcccgaactggtgaaataa

SEQ ID NO: 481718 - DNA, 258 bp, Shigella sonnei
atgaaaaacgtaaaaaccctcatcgctgcggcgattttaagctccatgtcatttgccaactttgcggctgtcgaagttcagtcaacgccagaaggccaacaaaaagtcggtactatcagtgctaacgcggggacaaatctgggatcgctggaagagcagctggcgcaaaaagcggatgagatgggcgcaaaatctttccgtattacttctgtaaccggtccgaataccctccatggaacagcagtaatttataaataa

SEQ ID NO: 481719 - DNA, 822 bp, Shigella sonnei
gtggtggaaaatgacggtggttctctggaagccatcgccaaaaaatataacgtcggctttctcgctctgttacaggctaaccccggcgttgatccttacgtaccgcgcgcgggcagcgtgttaacgatcccgttgcaaaccctacttccagacgcgccgcgcgaaggcattgtgatcaacattgcggagctgcgtctctattactacccgccgggtaaaaattcggtaaccgtgtatccaataggtattggtcagttaggtggtgacacgctgacaccgacaatggtgaccaccgtttcagacaaacgtgcaaacccaacctggacgccaacggcaaacatccgcgcccgttataaagcacagggaattgagttgcctacggtagtgccggctggaccggataacccaatgggccatcatgcgattcgtctggcggcctatggcggcgtttatttgcttcacggtacgaacgccgatttcggcattggcatgcgggtaagttctggctgtattcgtctgcgggatgacgatatcaaaacactctttagccaggtcaccccaggcaccaaagtgaatatcatcaacactccgataaaagtctctgccgaaccaaacggtgcgcgtctggttgaagtacatcagccgctgtcagagaagattgatgacgatccgcagctgctgccaattacgctgaatagcgcaatgcaatcatttaaagatgcagcacaaactgacgctgaagtgatgcaacatgtgatggatgtccgttccgggatgccggtggatgtccgccgtcatcaagtgagcccacaaactctgtaa

SEQ ID NO: 481720 - DNA, 3495 bp, Shigella sonnei
atgcccccatatgttgaggcatatcctaacgagaatctgacaaccgttatgcctgaacaatatcgttatacactgcccgtcaaagcgggtgagcagcgtctgctgggcgagttaaccggcgcagcctgtgcaacgctggtagcggaaattgccgaacgtcacgccggtccggtggtactcattgcaccagatatgcaaaatgctctgcgtttgcatgatgaaatcagccagttcaccgatcagatggtgatgaatctggcggactgggaaactcttccctacgacagtttttcgcctcatcaggacattatctcctcgcgcctttccaccctttaccagctaccgacgatgcagcgtggcgtactgattgttccggtgaatacgcttatgcagcgcgtttgcccacacagttttctccacggtcatgcgctggtgatgaaaaaaggtcagcgcctgtcacgagatgcattacgaacccaactggacagcgccggttatcgccatgttgaccaggtgatggagcacggcgaatacgccacgcgcggcgcgttgctggatctcttcccgatggggagtgagctgccttatcgtcttgatttctttgatgatgaaatcgacagcctgcgggtgtttgacgtcgacagccagcgcacgctggaggaagtagaagcgatcaatctgctgcccgcgcacgaatttccgaccgataaagcggcaattgaactgttccgcagccagtggcgcgataccttcgaagtgaagcgcgatccggaacatatttaccagcaagtgagtaaaggcacattacctgccgggatcgagtactggcagccattgttcttcagcgaaccactgccgccgctgttcagttatttccctgccaataccttgctcgtgaatactggcgatctggaaaccagtgccgaacgtttccaggctgacacgctggcgcgttttgagaatcgcggcgtcgatccgatgcgcccgctgttgccaccacaatcgctctggctgcgggtggacgagctcttctcagagctgaaaaactggccccgggtgcagctaaaaactgaacatttaccgacaaaagccgcgaatgccaatttaggtttccagaaactgccagacctggccgttcaggcacaacaaaaagcgccgctggatgcgctgcgtaagttcctcgagactttcgacggtccggtggtgttctcggtagaaagtgaaggtcgccgtgaagcgctgggtgaactgctcgcacgaattaaaattgctccgcaacgcattatgcgtcttgatgaagccagcgaccgtgggcgttatctgatgattggcgctgccgaacatggttttgtcgataaggtgcgtaatctggcgctgatctgcgaaagcgatctgctcggtgaacgtgttgcccgccgtcgtcaggattctcgccgcaccatcaaccccgatacactgatccgtaaccttgcggagctgcatattggtcagccggtggtccatctggagcacggtgtcgggcgctatgccggaatgaccacgctcgaagcgggcggcattactggcgagtatttgatgctcacctatgccaacgacgccaaactgtatgttccggtgtcgtcactgcatctgattagccgttacgcaggtggcgcggaagaaaacgccccgctgcataaacttggcggcgatgcgtggtcacgcgcgcggcagaaagcggcggaaaaagtgcgtgatgtggcggcggaattgctggatatctacgcgcaacgcgccgccaaagagggcttcgcgtttaaacacgatcgtgagcagtatcagttgttctgcgacagcttcccgtttgaaaccacgccggatcaggcgcaggccattaatgcggtacttagcgacatgtgtcagccgctggcaatggatcgtctggtgtgcggcgatgttggctttggtaaaacagaagtggcgatgcgcgccgctttcctggcagtagataaccacaagcaggtggcggtgttggtgcctaccacccttctcgcgcagcagcattacgacaacttccgcgaccgtttcgccaactggccggtacgtatcgaaatgatctcccgtttccgcagcgccaaagagcagacgcaaatccttgcggaagtggcggaagggaaaatcgatattctgatcggtacgcacaaactgctgcaaagtgacgtcaagtttaaagatttaggcctgctgattgtcgatgaagaacaccgcttcggggtgcgtcataaagagcgcattaaagcgatgcgcgcgaacgtggatattctgacgcttactgcaacgccgatcccacgcacgctgaatatggcaatgagcggaatgcgtgacctgtcgattatcgccacgccgcccgcccgtcgtctggcagttaaaacctttgtccgtgagtatgacagcctggtggtccgggaggcgatcctgcgtgaaattttgcgcggggggcaggtttattatctctacaatgatgtggaaaacatccagaaagctgccgaacggctggcagaactggtgccagaagcgcggatcgccatcggtcacgggcagatgcgcgagcgcgaactggaacgggtgatgaatgatttccatcatcaacgtttcaacgtgctggtttgtacaaccattatcgaaaccgggatcgacatcccgacagccaacaccattatcattgaacgcgcggatcacttcggtctggcgcagctgcaccagttacgcggtcgcgtcggacgttcgcatcatcaggcatatgcatggttgctgacaccgcatccaaaagcgatgactaccgatgcacaaaaacgtcttgaagcgattgcctcgctggaagatctcggggcaggttttgcgctggcaacgcacgatctggagattcgcggcgcgggtgaactgcttggcgaagaacaaagcggctcaatggaaaccatcggtttctcgctgtatatggagttgctggaaaacgccgtcgatgcactgaaagccggacgcgagccgtcgctggaagatctcaccagccagcaaacagaagtcgagctgcggatgccgtcgctattgccagatgatttcattcctgacgtgaatacgcgtttgtcgttctataaacgtattgccagcgccaaaacggaaaacgaactggaagagatcaaagtcgagcttatcgatcgcttcggcctgctgccagatccggcgcgtaccctgctggatattgcccgtctgcgccagcaagcgcagaaactggggatcaggaagctggaaggtaatgagaaaggcggggtgatcgaatttgccgagaagaatcacgttaatccggcctggttgattggtttgctgcaaaaacagccgcagcattaccgccttgatggtccgacgcgcctgaaatttattcaggatttgagtgagcggaaaacgcgtatcgaatgggtacgccagtttatgcgtgaactggaagagaacgcgatcgcttaa

SEQ ID NO: 481721 - DNA, 1074 bp, Shigella sonnei
atgaaacaaaaagagctatggattaaccagatcaaagggttatgtatttgtctggtggtgatttatcactcggtcattaccttttatccgcatatgaccacttttcagcatccgttatcggaagtcctgagtaaatgctggatctatttcaatctttaccttgcaccctttcgtatgccggtttttttctttatatccggctatttgattcgccgctatatcgacagcgtaccgtggggaaattgtctcgataaacggatctggaacatcttctgggtgctggcgctttggggcgtggtgcagtggctggcgttaagtgcgctgaaccagtggctggcacctgagcgcgatttaagcaatgcctccaatgccgcttatgccgattccaccggtgagttcctgcacgggatgatcaccgccagcaccagcttgtggtatctgtatgcgttaattgtctatttcgtggtatgtaaaatttttagccgtctggcgctgccactattcgccttgtttgtactgctgagtgtggcggttaatttcgttcccacgccgtggtggggaatgaacagtgtgatccgcaatttgccttattacagccttggcgcatggtttggcgcaacaataatgacctgtgttaaagaggtgccgttgcgccgccatctgctgatggcttctttgcttaccgttctggcggtcggtgcctggttgtttactatctcgctgctgttgtcgctggtatcgattgtggtgatcatgaagctgttttatcagtacgagcaacgattcggtatgcgctccaccagcctgctgaatgtgattggctccaacaccattgctatctacaccacccatcgcattctggttgaaatattcagcttaactctgcttgcgcaaatgaacgcagcacgctggtcgccgcaagtcgaactgacactcctgctggtttatccctttgtcagtttgttcatctgtactgttgcgggcttgctggtaagaaaactttcacagcgtgcattcagcgatctgttgttctccccgccttcactgcccgctgccgtcagttactctcgttaa

SEQ ID NO: 481722 - DNA, 1200 bp, Shigella sonnei
atgtaccaacctgtcgctctatttattggcctgcgttacatgcgtgggcgtgcagcggatcgcttcggtcgtttcgtctcctggctttctaccatcggcattaccctcggggtgatggcgctggtcacagtattgtcagtgatgaacggctttgagcgcgagctgcaaaacaacatccttggcctgatgccacaggcaattctctcttctgagcatggctctcttaacccgcagcaactcccggaaacggcagtcaaactggacggcgttaatcgcgtcgcacctattactaccggtgatgtggtactgcaaagcgcgcgcagcgtggcggtcggggtgatgctcggtatcgacccggcgcaaaaagatccacttacgccgtatctggtcaatgtgaaacaaactgacctcgagccggggaaatataatgtcatcctcggcgaacaacttgcctcacagctaggcgttaatcgcggtgatcaaatccgcgtgatggtaccatctgccagccagttcacgccgatggggcgtattccaagccagcgcctgttcaatgtgattggcaatttcgccgccaacagtgaagtcgatggctatgaaatgctggtgaatattgaggatgcctcgcgtctgatgcgttatccggcaggcaatattaccggctggcgtttgtggctggatgagccgctgaaagttgactctttaagtcagcaaaaactgcctgaaggcagcaaatggcaggactggcgtgaccgtaaaggcgagctgttccaggccgtacgcatggaaaaaaatatgatgggcttgctgctgagcctgattgtcgccgttgcggcgtttaacattattacctcactagggctgatggtaatggagaagcagggcgaagtcgcgatcctgcaaacgcaaggcttaactccgcgacaaatcatgatggtctttatggtgcaaggggccagcgccgggattatcggtgcgatcctcggagcggcgcttggcgcactgcttgccagccagttaaataatctgatgccgataatcggcgtcctgcttgatggcgcggcgctgccggtcgctatcgaacctttacaggtcattgttattgcgctggtggcgatggctatcgcgctgctgtctacgctttacccttcatggcgcgctgccgccactcaacccgctgaggctttacgttatgaataa

SEQ ID NO: 481723 - DNA, 702 bp, Shigella sonnei
atgaataagatcctgttgcaatgcgacaacctgtgcaaacgctatcaggaaggcagtgtgcaaaccgatgtactgcacaatgtcagtttcagcgtcggcgaaggtgaaatgatggcgatcgtcggtagctctggttccggtaaaagtaccttgctgcacctgctgggcgggctggatacaccaacctccggcgatgtgatctttaacggtcaaccgatgagcaaactgtcttcggcggcgaaagcagaactgcgcaaccagaagctgggctttatttatcagtttcaccacctgctgccggattttactgccctggaaaacgtggctatgccactgctgattggcaagaaaaagcccgctgaaatcaacagccgtgcgctggagatgttaaaagcggtggggctggagcatcgtgcgaatcaccgcccatctgaactttctggcggcgaacgccagcgtgtggcgattgcccgtgcgctggtcaataatccgcgtctggtacttgcggatgagcctaccggtaacctcgatgcgcgtaacgccgacagcatcttccagttgcttggggaattgaatcgcttgcagggcaccgccttcctggtggttactcacgacctgcaactggcgaaacgtatgagccgccaactggaaatgcgtgatggacgtctgacggcggaactgagcctgatgggggcggagtaa

SEQ ID NO: 481724 - DNA, 1239 bp, Shigella sonnei
atgcctttatcgttattgattggcctgcgttttagtcgcggacggcgacgcggcggcatggtgtcgctaatctctgtcatttctaccattggcattgccctcggcgtggcggtattgatcgtcggcttaagcgcgatgaacggctttgaacgcgaactgaataaccgcattcttgctgtggtaccgcacggtgaaattgaggcggtaaatcagccatggactaactggcaggaagcactggataacgtgcaaaaagtgccgggtattgccgccgctgcgccgtatatcaatttcaccggactggtagaaagtggtaccaatctgcgcgcaattcaggtgaagggcgttaacccgcaacaggaacagcgtctgagcgcattaccctcgtttgttcagggggatgcctggcgcaattttaaagcgggcgaacagcaaattatcatcggcaaaggcgtggcggatgcgctgaaagtgaagcagggcgattgggtgtcgatcatgattcccaactcgaatcccgagcataaactgatgcagccaaaacgtgtgcgtttgcacattgccggtattttgcagttgagtggtcaactcgatcacagttttgccatgatcccgctggcggatgcccaacaatatcttgatatgggttccagcgtgtcaggtattgcccttaaaatgacggatgttttcaacgccaataagctggtacgcgatgcgggtgaagtgaccaacagctatgtttatattaaaagttggattggtacttacggctatatgtatcgcgatatccagatgatccgcgccattatgtatctggcgatggtactggtgattggcgtggcctgtttcaacatcgtctccaccttagtgatggcggtgaaagacaagagtggcgatatcgcagtattaagaacgctgggggcgaaagatggtttaattcgcgccatctttgtctggtatggattgctggcagggctgttcggtagcctgtgtggtgtgattatcggcgtagttgtttcactgcaacttaccccgattattgagcggattgaaaagctgatcggtcatcagttcctctccagcgatatctattttattgacttcctgccatcggaattgcactggctggacgtcttctacgtactggtcacagcattgttgctgagtcttttggcaagttggtatccggcgcggcgcgccagtaatattgaccctgcgcgagtccttagcggccagtaa

SEQ ID NO: 481725 - DNA, 912 bp, Shigella sonnei
atgtattacgggtttgatattggtggaacaaaaattgcgcttggcgtgtttgatagcggtcggcagttgcagtgggaaaagcgggtgccgacaccgcgtgacagctatgacgcatttttagatgcagtatgcgagctggtagccgaagctgaccaacgttttggctgtaaaggttctgttggcatcggtattccgggaatgccggaaacagaagatggtacgctgtatgccgccaatgtccccgctgccagcggtaaaccgctgcgtgccgacctgagcgcacgtcttgatcgcgatgtacgccttgataacgatgccaactgttttgccctttcagaagcctgggatgatgaatttacgcaatatccactggtgatggggttaattctcggcaccggcgttggcggcgggctgattttcaacggtaaaccgattaccggtaaaagctacattaccggcgagtttggccatatgcgtctgccggttgatgcgttaaccatgatggggctggatttcccgttacgccgctgcggctgtggtcaaattggttgtatcgaaaattatctatcaggtcggggctttgcgtggctctggcaacactattatcatcaaccgttgcaggctcccgaaattattgcgctttatgatcaaggcgatgagcaggcaagggcgcacgttgagcgttatctggatttattagcggtttgtctgggaaatatcctgaccatcgttgactctgacctggtcgtcattggtggtggcttatcgaatttcccggcaatcacaacgcaactggcggacaggctgcctcgtcatctcttacctgtagctcgtgttccgcgcattgaacgcgcgcgccacggtgatgcgggaggaatgcgtggtgcggccttcctacatctaaccgattaa

SEQ ID NO: 481726 - DNA, 822 bp, Shigella sonnei
atgctgtcgcgtcggggtcatcggttaagtcgttttcgtaaaaataaacgccgcctgcgcgagcgtttgcgtcagcgtatttttttcagagataaagtggtgccggaagcaatggaaaaaccaagagtactcgtactgacaggggcaggaatttctgcggaatcaggtattcgtacctttcgcgccgcagatggcctgtgggaagaacatcgggttgaagatgtggcaacgccggaaggtttcgatcgcgatcctgaactggtgcaagcgttttataacgcccgtcgtcgacagctgcagcagccagaaattcagcctaacgccgcgcatcttgcgctggctaaactgcaagacgccctcggcgatcgctttttgctggtaacgcagaatatagacaacctgcatgaacgcgcaggtaataccaatgtcattcatatgcatggggaattgctgaaagttcgttgttcgcaaagtggtcaggttctcgactggaccggagacgttacgccagaagataaatgccattgttgccagttcccggcacccttgcgcccgcacgtcgtttggtttggcgaaatgccactcggcatggatgaaatttatatggcgttgtcgatggctgatattttcattgccattggtacttccgggcatgtttatccggcggctgggtttgttcacgaagcgaaactgcatggcgcgcacaccgtggaactgaatctcgaaccaagtcaggtcggtaatgaatttgccgagaaatattacggcccggcaagccaggtggtgcctgagtttgttgaaaagttgctgaagggattataa

SEQ ID NO: 481727 - DNA, 1047 bp, Shigella sonnei
atgaaaaaatggtcacgccacctgctcgcggcgggtgctctggcactgggcatgagcgccgctcacgccgatgacaacaacacgctgtatttctacaactggaccgagtacgtgccgccaggactgcttgaacagttcaccaaagaaaccggtattaaggctatctattcgacttacgagtcgaacgaaaccatgtacgccaagctgaaaacgtacaaagacggtgcctatgacctggtggttccttcaacctattacgtcgataaaatgcgtaaagaagggatgatccagaagatcgacaagtcgaagttaacgaacttcagcaatctcgatccagacatgctcaacaagccgtttgacccgaataacgactactccattccgtatatctggggtgcgacggcgattggcgttaacggtgatgcggtggatcctaaatctgtcaccagttgggcagatctgtggaagccagagtacaaaggtagcctgctgctgaccgacgatgcccgtgaagtgttccagatggcgctgcgcaaactgggctactccggtaacaccaccgatccgaaagagattgaagctgcatataacgagctgaaaaaactgatgccaaacgtcgcagcgtttaactccgataacccggctaacccgtacatggaaggcgaagttaacctcggcatgatctggaacggctctgctttcgttgcacgccaggcgggtacgccaattgacgtggtgtggccgaaagaaggcggcattttctggatggacagcctggcgatcccggcaaatgccaaaaacaaagaaggcgcgctgaaattgatcaacttcctgctgcgcccggatgtggcaaaacaggttgccgaaactatcggttatccaacgccaaaccttgcggcgcgtaagctgttaagcccggaagtggcgaacgataaaacgctctacccggatgctgaaaccattaaaaatggtgaatggcagaatgacgttggcgcagccagcagcatttatgaagagtattatcagaagctgaaagcaggacgttaa

SEQ ID NO: 481728 - DNA, 795 bp, Shigella sonnei
atgatcggtcgactgcttcgcggcggttttatgaccgctatctacgcgtacctgtatatcccaatcattattttgattgtgaactcctttaacagctcgcgctttggcatcaactggcagggttttaccaccaaatggtatagcctgctgatgaacaacgacagcctgttacaggcagcgcagcattcactaacaatggcggtgttttcggcgacatttgctacgcttatcggttcactgacggcagttgcgctgtaccgttatcgctttcgtggtaagccgttcgttagcggaatgctgtttgtggtgatgatgtcaccagatatcgtgatggcgatttctctgctggtgctgtttatgctgctgggtattcagcttggcttctggtcgctgctgttctcgcatatcaccttctgcctgccgtttgtggtggtgacggtgtattcgcgcctgaaaggttttgacgtgcggatgctggaagcggcgaaagatctcggtgccagtgaatttaccattctgcgaaaaatcattctgccactggcaatgccagcggtggcggcgggctgggtgttaagctttaccctgtcgatggacgatgtggtagtttcttcgttcgtcaccggaccaagttatgaaattctgccgttaaaaatttattcgatggtcaaagtcggcgtatcgccggaagttaacgcgctggcaaccatattactggtgctgtcgctggtgatggttattgccagccagcttattgctcgtgataaaacgaaaggtaacacaggggacgttaaatga

SEQ ID NO: 481729 - DNA, 858 bp, Shigella sonnei
atgaagaacacaagtaagttccagaatgtagtgattgtcactattgtcggttggcttgtgttgtttgtctttctgcccaacctgatgatcattggcaccagctttttgacccgcgacgacgccagtttcgtcaaaatggtctttacgctggataactacacgcgtctgctcgatccgctctattttgaagtgctattgcactcgctgaatatggcgctgatcgccaccctcgcctgcctggtgctgggctacccgtttgcctggtttctggcgaagctgccacacaaggtgcgtccgctgctgctgtttctgctgattgttcccttctggaccaactcactgattcgcatctacgggctgaaaattttcctcagcaccaaaggctatctcaacgagtttttgctctggctgggcgttatcgacacaccaattcgtatcatgttcacgcccagtgcggtgattatcggtctggtttacattctgctaccgtttatggtgatgccgctgtactccagtatcgaaaaactggataagccgttgcttgaggcggcgcgcgatctcggtgccagcaagttacagacttttatccgtatcattattccactgacgatgccgggaattattgccggatgtctgctggtgatgctgccagcgatgggcctgttctatgtatccgacctgatgggcggtgcgaaaaacctgctgatcggtaacgtcatcaaggtccagttcctcaatattcgtgactggccgtttggtgcagccaccagcattacgctgactatcgtaatgggcctgatgttgctggtttactggcgcgcttctcgtctgctgaataaaaaggtggaactcgaatga

SEQ ID NO: 481730 - DNA, 1137 bp, Shigella sonnei
atgggacagagtaaaaaattgaataaacaaccgagttcgctttcaccgctggtgcaattggcgggaattcgcaaatgctttgatggtaaagaggtcattccccagctggatctgactatcaacaatggcgagttcctcacgctgcttggcccttctggctgcggtaaaacaaccgttcttcgcctgattgcaggtctggaaactgttgattccggacgcatcatgctggataacgaggacatcacccacgttccggcggaaaaccgctatgtgaacactgttttccaaagctacgcacttttcccccacatgaccgtgttcgaaaatgtggcctttgggttgcgcatgcaaaaaacccccgctgctgaaattacgccccgcgtgatggaagccctgcggatggtgcaactggaaaccttcgctcaacgtaaaccgcatcagctctctggtggtcaacagcaacgcgtcgccattgctcgcgcggtggttaacaagcctcgtctgttgttgctggatgagtcgctctcagcgctggattacaaactgcgtaagcaaatgcagaacgagctgaaagcgttacagcgtaagcttggtattaccttcgtctttgtcactcacgatcaggaagaagcgctcaccatgtcagacaggattgtggtgatgcgcgagggtcgtattgagcaagatggtacaccgcgcgaaatttacgaagagccgaaaaacctgtttgttgccggcttcattggcgaaatcaatatgtttaacgccactgtcatcgaacgtctcgacgagcagcgcgtacgcgccaacgttgaaggccgcgaatgtaatatctacgttaacttcgccgttgaaccggggcaaaaactgcatgttctgctgcgcccggaagacttacgtgttgaagagattaacgacgacaaccacgctgaagggctgattggttacgttcgtgagcgtaactacaaaggcatgacgctggagtcggttgttgaactggaaaatggcaagatggtgatggtcagcgaattcttcaatgaagacgaccctgactttgaccactctctcgaccaaaaaatggccattaattgggtagaaagctgggaggtcgtactggctgatgaagaacacaagtaa

SEQ ID NO: 481731 - DNA, 1227 bp, Shigella sonnei
atggataaactacttgagcgatttttgaactacgtatctctggatacccaatcaaaagcaggggtgagacaggttcccagcacggaaggccaatggaagttattgcatctgctgaaagagcagctcgaagaaatggggcttatcaatgtgaccttaagtgagaagggcactttgatggcgacgttaccggctaacgtccctggcgatatcccggcgattggctttatttctcatgtggatacctcaccggattgcagcggcaaaaatgttaatccgcaaattgttgaaaactatcgcggtggcgatattgcgctgggtatcggcgatgaagttttatcaccggttatgttcccggtgctgcatcagctactgggtcagacgttgattaccaccgatggtaaaaccttgttaggtgccgatgacaaagcaggtattgcagaaatcatgaccgcgctggcggtattgcaacagaaaaacattccgcatggtgatattcgcgtcgcctttaccccggatgaagaagtgggcaaaggggcgaaacattttgatgttgatgccttcgatgcccgctgggcttacactgttgacggtggtggcgtaggcgaactggagtttgaaaacttcaacgccgcatcggtcaatatcaaaattgtcggtaacaatgttcatccgggcacggcgaaaggagtgatggtaaatgcgctgtcgctggcggcacgtattcatgcggaagttccggcggatgaaagcccggaaatgacagaaggctatgaaggtttctatcacctggcgagcatgaaaggcaccgttgaacgggccgatatgcactacatcatccgtgatttcgaccgtaaacagtttgaagcgcgtaaacgtaaaatgatggagatcgccaaaaaagtgggcaaagggttacatcctgattgctacattgaactggtgattgaagacagttactacaatatgcgagagaaagtggttgagcatccgcatattctcgatatcgcccagcaggcgatgcgtgactgcgatattgaaccggaactgaaaccgatccgcggtggtaccgacggcgcgcagttgtcgtttatgggattaccgtgcccgaacttgttcactggcggttacaactatcatggtaagcatgagtttgtgactctggaaggtatggaaaaagcggtgcaggtgatcgtccgtattgccgagttaacggcgcaacggaagtaa

SEQ ID NO: 481732 - DNA, 1122 bp, Shigella sonnei
atggaataccaactcactcttaactggcccgattttcttgaacgtcactggcagaaacgcccggtggtgttaaaacgcggctttaataattttattgacccgatctctccagacgagttggcgggtctggcgatggaaagcgaagttgacagtcgactggtcagtcaccaggatggcaaatggcaggtcagccacggcccgttcgaaagctacgatcatctcggtgaaaccaactggtcattactggtacaggcagtgaaccactggcatgagccgaccgccgcgctgatgcgaccgttccgtgaactaccggactggcgtattgatgatctgatgatttctttttctgtacctggcggcggcgtcggcccgcatctcgatcagtacgacgtgtttatcattcagggtaccggacgtcgtcgctggcgagtgggcgaaaagctgcaaatgaaacagcactgcccacatccggatctgttacaggtcgatccgttcgaagccatcatcgatgaagagctggagcctggtgatattctttatattccgccaggattcccgcatgaaggctacgcgctggaaaatgcgatgaactattccgtgggctttcgcgcgccaaatacgcgggaactgattagtggatttgccgattatgtgctgcaacgtgaactgggcggcaactactacagcgatcctgatgttccacctcgcgctcatcctgcggatgttctgcctcaagagatggataaactgcgtgagatgatgctcgaattgatcaaccagccggaacactttaagcaatggtttggcgagtttatatcccagtcacgtcatgaactggatatcgcgccgccagaaccgccttatcagccagatgaaatctacgatgcgctgaaacaaggtgatgtgctggtgcgcctgggtggtctgcgcgtattgcgcattggcgacgacgtgtatgccaatggtgagaagatcgattccccgcaccgtccggcactggatgcactcgccagcaacattgcgctgactgcggagaattttggcgatgcgctggaagatccgtcattcctcgcgatgctcgcggcgctggtcaatagcgggtattggttcttcgaagggtaa

SEQ ID NO: 481733 - DNA, 1461 bp, Shigella sonnei; identical to SEQ ID NO: 460063

SEQ ID NO: 481734 - DNA, 672 bp, Shigella sonnei
atgcgcgtactggttgttgaagacaatgcgttgttacgtcaccaccttaaagttcagattcaggatgctggtcatcaggtcgatgatgcagaagatgccaaagaagccgattattatctcaatgaacatttaccggatattgcgattgtcgatctcggattgccagacgaggacggtctgtcactgattcgccgctggcgtagcaatgatgtttcactgccgattctggtattaaccgcccgtgaaagctggcaggacaaagtcgaagtattaagtgctggtgctgatgattacgtgactaaaccatttcatattgaagaggtgatggcgcgaatgcaggcattaatgcggcgtaatagcggtctggcttcacaggtcatttcgctaccaccgtttcaggttgatctctctcgccgtgaattatctattaatgacgaagtgatcaaactgaccgcgttcgaatacaccattatggaaacgttgatacgcaataatggcaaagtggtgagcaaagattcgttaatgctccaactctatccggatgcggagctgcgggaaagccataccattgatgtactgatgggacgtctgcgcaaaaaaattcaggcacaatatccgcaagaagtgattactaccgttcgcggccagggctatttgttcgaattgcgctga

SEQ ID NO: 481735 - DNA, 1371 bp, Shigella sonnei
atggaattatcctcactgaccgccgtttcccctgtcgatggacgctacggcgataaagtcagcgcgctgcgcgggattttcagcgaatatggtttgctgaaattccgtgtacaagttgaagtacgttggctgcaaaaactggccgcgcacgcagcgatcaaggaagttcctgcttttgctgccgacgcaatcggttaccttgatgcaattgtcgccaatttcagcgaagaagatgccgcacgcatcaaaaccatcgagcgtaccactaaccacgacgttaaagcggttgagtatttcctgaaagaaaaagtggcggagatcccggaactgcacgcggtttctgaattcatccactttgcctgtacttcggaagatatcaataacctctcccacgcattaatgctgaaaaccgcgcgtgatgaagtgatcctgccgtactggcgtcaactgattgatggcattaaagatctcgccgttcagtaccgcgatatcccgctgctgtctcgtacccacggtcagccagccacgccgtcaaccatcggtaaagagatggcaaacgtcgcctaccgtatggagcgccagtaccgccagcttaaccaggtggagatcctcggcaaaatcaacggcgcggtcggtaactataacgcccacatcgccgcttacccggaagttgactggcatcagttcagcgaagagttcgtcacctcgctgggtattcaatggaacccgtacactacccagattgaaccgcacgactacatcgccgagctgtttgattgcgttgcacgcttcaacaccattctgatcgactttgatcgtgacgtctggggttatatcgcccttaaccacttcaaacagaaaaccattgctggtgagattggttcttccaccatgccgcataaagttaacccgatcgacttcgagaactccgaagggaatctgggcctttccaacgcggtattacagcatctggcaagcaaactgccggtttcccgctggcagcgtgacctgaccgactccaccgtgctgcgtaacctcggcgtgggtatcggttatgcgctgattgcgtatcaatccaccctgaaaggcgtgagcaaactggaagtgaaccgtgaccatctgctggatgagctggatcacaactgggaagtgctggctgagccaatccagacagttatgcgtcgctatggcatcgaaaaaccgtacgagaagctgaaagagctgactcgtggtaagcgcgttgacgccgaaggcatgaagcagtttatcgacggtctggcgttgccagaagaagagaaagcccgcctgaaagcgatgacgccggcaaactacattggtcgcgccatcaccatggttgatgagctgaaataa

SEQ ID NO: 481736 - DNA, 642 bp, Shigella sonnei
gtggcaaagaattactatgacatcaccctcgccctggccggtatttgtcagtcggcacgcctggtgcaacaactcgctcaccaggggcattgtgatgccgatgcgctacacgtctcactcaacagtattattgatatgaaccccagctcgacgctggcggtttttggcggtagcgaagccaacctgcgcgtcgggctggaaaccctgctcggcgtgctcaatgccagcagtcgccagggcttaaacgccgaattaacccgctacacactcagcttgatggtgcttgagcgcaaactctcctcagcgaaaggcgcgctcgacactctgggcaaccggatcaacggcctgcaacgccagctcgaacacttcgatttacagtccgaaacgctgatgagcgcgatggctgctatctatgttgatgtgatcagcccgcttggcccacgcattcaggtcaccggttcccctgctgtactgcaaagcccacaagtgcaggcgaaagttcgcgcaaccctgctggcaggcattcgcgccgccgtgctctggcaccaggtcggcggcggacgtctgcaactgatgttttctcgtaatcgcctgaccactcaggcaaaacaaattcttgctcatttaaccccggagttgtga

SEQ ID NO: 481737 - DNA, 1107 bp, Shigella sonnei
atgtctgaaaccgcaaaaaaagtaatcgtcggcatgtccggcggtgtcgattcctccgtttctgcctggctgttgcaacaacagggatatcaggttgaaggcctgtttatgaagaactgggaagaagacgacggtgaggaatattgcacagcggcagcggatctggctgatgcccaggctgtctgcgacaagctcggcattgaactgcacaccgttaactttgctgccgagtactgggacaatgtcttcgaactgttccttgccgaatataaagccggtcgcacgccgaatccggatattctgtgcaacaaagagatcaaatttaaagctttcctcgaatttgccgccgaagatttaggtgccgattatatcgctaccggtcattacgtacgtcgggccgatgtcgatggcaagagccgcctgctgcgtggtctggacagcaataaagaccagagctacttcctttatacgctcagccatgagcagattgcgcaaagcctgttcccggtcggcgaactggaaaaaccgcaggtgcgtaagattgctgaagatcttggtctggtcaccgcgaagaaaaaagactctaccggcatttgcttcattggcgaacgtaaattccgcgagttcctgggccgttatctcccggggcaaccgggcaaaatcattaccgtcgatggcgatgaaattggtgagcaccaggggctgatgtatcacactctcggtcagcgtaaaggtctgggtatcggtggcaccaaagaaggcaccgaagaaccttggtatgtggtggacaaagacgtcgaaaacaacattctggttgtcgctcagggccatgaacacccgcggctgatgtctgtcgggttgattgcccagcagttgcactgggtcgatcgcgaaccattcaccggcactatgcgttgcacggtaaaaacccgctatcgccagaccgatatcccttgcaccgtcaaggcgctggacgatgatcgcattgaagtgattttcgatgaaccggttgccgccgtgacgccgggccagtctgccgtcttctataacggtgaagtgtgcctcggtggcggtattattgagcagcgtctgccgctgccggtctga

SEQ ID NO: 481738 - DNA, 462 bp, Shigella sonnei
atgtttaaaccgcacgttaccgttgcttgcgtagtgcacgcagagggtaaatttttagtcgttgaagagacgattaatggtaaagcgttatggaaccaacctgccgggcatctggaagccgatgaaaccttagtggaagctgccgcccgtgagctatgggaagaaaccggcatcagcgcgcaaccgcaacactttattcgtatgcatcagtggattgcgccagataaaacgccgtttttgcgtttcctctttgccattgagcttgagcaaatatgcccgacccagcctcatgacagcgatatcgactgctgtcgttgggtcagcgccgaagaaattttaaaggcgtcaaatcttcgttcgccgctggtggcggaaagtatccgttgttatcaaagtgggcaacgctatccgctggagatgattggcgattttaactggccttttacaaagggtgtcatctaa

SEQ ID NO: 481739 - DNA, 654 bp, Shigella sonnei
atgcggcaattcataatctctgaaaataccatgcaaaaaacttcttttagaaatcaccaggttaagcgattcagctcgcaacgttctactaggcgtaaacctgaaaaccagcccacgcgtgtgatcctgttcaataaaccctacgatgttcttccgcagttcaccgatgaagccggacgcaaaacattaaaagaattcatcccggttcagggcgtttatgcagcaggtcgtcttgaccgcgataccgaagggttactggtgctgaccaataacggcgcgttgcaggcgcgtttaacccagccgggcaaacgcaccgggaaaatctattatgtgcaggtggaaggtattcccacacaagacgcacttgaagccttgcgcaatggcgtaaccttaaatgatggccctaccctgcccgcccgcgcggagctggttgacgaaccagcgtggttatggccgcggaatccaccaattcgtgaacgcaaaagtattcccaccagctggctgaagatcaccttatatgaaggacgtaatcgccaggtgcgccgcatgaccgcccatgttggtttccccacgctgcgactgattcgttatgcgatgggtgattacactttggataaccttgccaatggcgaatggcgagaagcaacagaataa

SEQ ID NO: 481740 - DNA, 1251 bp, Shigella sonnei
atggaaagtaaagtagttgttccggcacaaggcaagaagatcaccctgcaaaacggcaaactcaacgttcctgaaaatccgattatcccttacattgaaggtgatggaatcggtgtagatgtaaccccagccatgctgaaagtggtcgacgctgcagtcgagaaagcctataaaggcgagcgtaaaatctcctggatggaaatttacaccggtgaaaaatccacacaggtttatggtcaggatgtctggctgcctgctgaaacccttgatctgattcgtgaatatcgcgttgccattaaaggtccgctgaccactcctgttggtggcggtattcgctctctgaacgttgccctgcgccaggaactggatctctacatctgcctgcgtccggtacgttactatcagggcactccaagcccggttaaacaccctgaactgaccgatatggttatcttccgtgaaaactcggaagacatttatgcgggtatcgaatggaaagcagactctgccgacgccgagaaagtgattaaattcctgcgtgaagagatgggggtgaagaaaattcgcttcccggaacattgtggtatcggtattaagccgtgttcggaagaaggcaccaaacgtctggttcgtgcagcgatcgaatacgcaattgctaacgatcgtgactctgtgactctggtgcacaaaggcaacatcatgaagttcaccgaaggcgcgtttaaagactggggctaccagctggcgcgtgaagagtttggcggtgaactgatcgacggcggcccgtggctgaaagttaaaaacccgaacaccggcaaagagatcgtcattaaagacgtgattgctgatgcattcctgcaacagatcctgctgcgtccggctgaatatgatgttatcgcctgtatgaacctgaacggtgactacatttctgacgccctggcagcgcaggttggcggtatcggtatcgcccctggcgcaaacatcggtgacgaatgcgccctgtttgaagccacccacggtactgcgccgaaatatgccggtcaggacaaagtaaatccaggctctatcatcctctccgctgagatgatgctgcgccatatggggtggactgaagcggctgatttaattgttaaaggtatggaaggtgctatcaacgcgaaaaccgtaacttatgactttgaacgtctgatggaaggcgctaagctgctgaaatgttcagagtttggtgaagcgatcatcgaaaacatgtaa

SEQ ID NO: 481741 - DNA, 405 bp, Shigella sonnei; identical to SEQ ID NO: 461275

SEQ ID NO: 481742 - DNA, 732 bp, Shigella sonnei
gtggcttattacagcattggtgatgttgctgaacgttgcgggattaatcctgtcactctccgggcctggcaacgccgctacggtttgttaaaaccacagcgcagtgaaggcggacaccgactctttgatgaagaagacatacaacgcatcgaagagatcaagcgttggataagtaatggcgtccctgtaggcaaagttaaagcattactggaaaccaccagccaggatacggaagatgactggaaccgcctgcaagaagagatgatgtcaattcttcgtatggctaatcctgccaaactacgcgcgagaattatttcactgggtcgagagtacccagtagatcaattgattaatcatgtttaccttcctgttcgccagcgtctcgtgcttgatcacaacacctcccgcattatgagcagtatgtttgacggcgcattaattgaatatgcagcagcctcacttttcgaaatgcgccgtaagcccggtaaagaagccattctgatggcgtggaatgttgaagagagagcacgattgtggctggaagcatggcgtttatcattgtcaggatggcacatttctgttcttgctgatcccattgaatcgccgcacccggaactgttcccgacgcaaacattgattgtctggacaggcatggcaccaacgagaaggcaaaacgaacttttacaacattggggtgagcaaggttataaagtcatctttcatgccccctaa

SEQ ID NO: 481743 - DNA, 531 bp, Shigella sonnei
atggcacacgcacttgagctcggtgataaaatgatttcaatcaatctattacctatgaccctggttaacgaacctgacgcagtctcttttttacttgatgaaataaaggccaatgctctggtgcctgaacaaatcatcgttgaatttactgaaagtgaagttatatctcggtttgatgagtttgcagaagcgattaaatcgcttaaggctgtcggtatcagtgtagcaattgatcattttggcgcaggttttgccggtttgttactcctgtcacgcttccagcctgacagaattaaaatcagtcaggaattgattaccaatgttcataaaagcgggccacggcaggcaattattcaagcgatcataaaatgctgtacatcacttgaaattcaagtcagtgctatgggcgtggcaacaccagaagagtggatgtggcttgaatccgcaggaattgagatgtttcagggagatctgtttgctaaagctaaattgaatggtatcccttccatagcgtggccagagaaaaaataa

SEQ ID NO: 481744 - DNA, 597 bp, Shigella sonnei
atgcttaccacccttatttatcgtagccatatacgtgacgacgaacctgtcaaaaaaatcgaagaaatggtttcgatagcaaatcgcaggaacatgcagtctgacgtaacagggatcttactgtttaatggttctcattttttccagcttctggaaggtccggaagaacaggttaaaatgatatatcgggctatatgccaggatccacggcactataatattgttgagctgctgtgcgattacgcgcctgctcgccgttttggcaaagcgggaatggaattatttgatttgcgcctgcacgagcgagatgacgttttacaggccgtattcgacaaaggcacatcaaaatttcagctaacttatgatgacagagcgctacaattttttcgtacttttgtccttgcaaccgaacaatcaacctatttcgagatccctgccgaagactcctggctttttatcgctgacggatctgataaagaacttgattcctgtaccctttcaccaactataaacgaccactttgcctttcatcccttatcgcggcggataatcgcttttgaagccattgtgcaaaaaaatgaagcccatcagccatag

SEQ ID NO: 481745 - DNA, 813 bp, Shigella sonnei
gtggtcacagtaaactactatatgacaaccatagctggaatgtttcaatttgcaacagataatggttatacatcaggaaatccatttaacggtctgacaccattaaaaaagtccaagatagaaccagatcccctcacccgtgacgaatttattcgttttattgaggcttgccgtcatcaacaaacaaaaaacctgtggattatcgctgtatacacgggtattcgtcacggggagctggtatcactggcctgggaagatatagaccttaaagcgaggactataaccatccgccggaattatacaaaactaggcgaattcactccaccaaaaactgatgctggtaccggaagaacgattcatctagttcaaccagctattgatgctcttaaaagccaagcggaaatgaccatgcttggaaaacagcattctgtagaggtaaagcagagggaatatgggagaagtactgtgcataaatgcacttttgtttttagtcctcaggtaataaaacagcggcagttttccggaccgcactataaggttgactccatcagggagtcatggacaagtatcttaaaacgcgcaggtctgagacacagaaaatcgtaccaatccaggcatacttatgcatgctggtcacttgccgctggagctaatcctagttttatcgcaagccagatgggccacacaaacgcacaaatggtattcaatgtttacggagcatggatgaaagacaacaatcacgaacagatagaactccttaacaaaagactatctgaaagtgtcccatgtatgccccataagaaagtggggtaa

SEQ ID NO: 481746 - DNA, 648 bp, Shigella sonnei
ttgctgaaaccgcaacggacagacggcggtcatcgactgttcaacgatgccgatattgaccggatccgcgagatcaaacgctggatcgacaacggcgtgcaggtcagcaaagttaaaatgctgctcagtaatgaaaatgttgatgtgcagaacggctggcgcgatcagcaagaaacattactgacctacctgcaaagcggcaatctgcatagcctgcgaacgtggatcaaagagcgcggtcaggattaccccgcccagacactcaccacacatctgtttattcctctgcgccgacggcttcagtgccaacaaccgactctccaggcgctgctggcgatcctcgacggcgtactgatcaactacatcgccatttgtctggcttcggcacgtaaaaaacagggtaaagatgcgctggtggttggctggaatattcaggataccacccgtctgtggctggagggctggattgccagtcaacaaggatggcgcattgatgtcctcgcccactcgctcaatcaactacgccctgaactattcgaaggccgtacattgctggtgtggtgcggtgaaaatcgaacctccgcccaacagcagcaactcaccagttggcaagaacaaggccatgatattttcccactcggcatttaa

SEQ ID NO: 481747 - DNA, 732 bp, Shigella sonnei
atgaagatgttgcgcgatccgctgttctggctcattgctttgtttgtggcactgattttctggctgccttacagccagccgctgtttgctgccttgttcccacaactgccacgacccgtttatcagcaagaaagttttgcagctctggcactggctcatttctggctggtgggaatttcgagtttgtttgcggtgatcattggcactggtgccggaattgctgtcactcgcccgtggggcgcggaatttcgcccactggtggaaactattgccgccgttggacagacttttccgcctgtcgcagtgctggcgattgccgttccggtgatcggctttggtctgcaaccagcgattatcgccttgatcctttacggtgtgctgcccgtcctgcaggcgacacttgccgggctgggagcgattgatgccagcgtgacagaagttgcgaaaggtatgggaatgagtcgtggtcagcgactgcgtaaggtcgagctaccgctggcggctccggtgattctggcgggcgtgcgaacttcggtgattatcaacattggtacggcgacgatcgcctcaacggtaggggccagcacgctgggtacgcccatcatcatcgggcttagcggatttaataccgcgtatgtgatccagggggcgttactggtggcactggcggcgatcatcgcagaccgcctgtttgaaaggctggtgcaggcgcttagccagcacgcaaaataa

SEQ ID NO: 481748 - DNA, 927 bp, Shigella sonnei
atgattgaatttggccatgtcagcaaactgttcggcgcacaaaaagccgttaacgatctcaatctcaattttcaggaagggagtttttcggtgctgattggcacatctggctccggcaaatccaccaccctgaaaatgattaaccgcctggtggagcatgacagcggagtgatccgctttgccggagaagaaattcgctcgctgccagtactggagttgcgccgccggatgggctatgccattcaatctattggcctgttcccccactggagcgtggcgcaaaacatcgctaccgtgccgcaattacaaaaatggtcgcgggcgaggattgacgatcgtatcgacgaattaatggcgctactggggctggagtcaaatttacgtgagcgttatccgcatcagctttccggtggtcagcagcaacgtgtgggagtggcgcgcgcactggctgccgatccgcaagtcttactgatggatgaaccttttggcgcactggacccggtaacgcgcggcgcgttgcaacaagagatgacgcgcattcaccgtttgctggggcgtaccattgtgctggtcactcatgatattgatgaggcgctacggctggcagaacatctggtattgatggatcacggtgaagtggtgcagcagggcaatccgctgacgatgctgactcgtccggcaaacgattttgtccgccagttttttgggcgcagcgaactgggtgtgcgcctgctttcgttacgtagtgtggcggattacgtgcgtcgcgaagaacgggcagaaggtgaggcactggcagaagagatgacgctacgcgatgcgctctccctgtttgtcgcgcggggatgcgaggtgctgccggtggtgaacacgcagggccagccttgcggcacgctgcattttcaggatctgctggaggaggcgtaa

SEQ ID NO: 481749 - DNA, 1158 bp, Shigella sonnei
gtgacttatctacgtattaatcctgttctggcgctgctgctgttgctgacggcaatcgcagcggcgctgccgtttatcagttacgcgcctaatcgtttagtctcgggtgaagggcgtcatctctggcaactgtggccgcaaacgatctggatgctggtgggcgttggttgcgcctggctgacagcctgttttattcccgctaaaaaaggcagcatttttgcactcattctggcgcaattcgtcttcgtattgctggtgtggggagcaggaaaggcggcgacccaactggcgcaaaatggcagtgcgctggcgcgtaccagcctcggcagtggtttctggctggccgcggcgctggcattgctggcctgtagtgatgccatccgccgaatctccacgcatccgctgtggcgctggttgttgcatatgcagattgccattattccgctgtggttgctgtactccggcacgcttaacgatctctcactaatgaaagaatacgccaaccgtcaggatgtgtttgacgacgcgctggcacaacatctgacgttgctgtttggtgcggtgctgcctgcgttagtgattggtgtgccgttgggcatctggtgctacttttccactgctcggcagggggcaattttttctctgctcaatgtcattcagaccgtgccttcggtggcgctctttggcctgttgattgcgccgcttgccgcgctggttacggcctttccgtggctggggacgctcggcatagcaggaaccggaatgacacccgcactgattgcgctggtgctctatgccttgctgccgctggtgcgcggcgtggtagtcggtttgaaccagatcccgcgcgatgtgctggagagcgccagagcgatgggcatgagcggggcgcagcgattcctgcatgttcagttaccactggcgttaccggtatttctgcgcagcctgcgggtggtgatggtgcaaactgtaggtatggcggtgattgcggcgttaatcggcgcaggcggttttggtgcgctggttttccaggggctgctaagcagcgccattgatttagtgttgctgggggtgatcccggtaattgttctggcggtgcttaccgacgcgctgttcgatttgcttatcgcactgctgaaggtgaaacgtaatgattga

SEQ ID NO: 481750 - DNA, 918 bp, Shigella sonnei
atgccactctcaaaggtctgggcaggttcactggttatgttggcagccgtgagcctgccgctacaggcggcttcccccgttaaagtcggttcaaaaatcgataccgaaggcgcgctactcggcaacatcatcttgcaggtgctggaaagccacggcgtaccgacggtgaataaagtgcaactcggaacgactcctgtggtgcgcggggcgattacttccggtgaactggatatctatccggaatataccggtaatggcgctttcttctttaaagatgaaaacgatgcggcatggaaaaacgcgcagcaaggttacgagaaagtcaaaaaactcgatgcagagcaaaacaagttaatctggctgacgcccgcaccagcgaataacacctggaccatcgccgtgcgtcaggatgtggcagagaaaaacaaactcacttcgcttgccgacctgagtcgttatctgaaagagggcggcaccttcaaactggcagcctcggcagagtttatcgaacgcgccgatgcgttacccgcgtttgaaaaagcctacgactttaaactcgatcaggatcagttactgtcactggctggcggcgacacggcggtaacgattaaagccgctgcccagcaaacttctggcgttaatgccgcaatggcttacggcactgacggtccggtcgcggcgctggggctgcaaaccttaagcgatccgaaaggcgtgcaacctatctacgcgcctgcaccagtggtgcgtgagtcggtgctgaaagagtatccgcaaatggcacagtggctacagccagtcttcgccagcctcgatgcaaaaacattgcagcaactgaatgccagcattgcagtggaaggactggatgccaaaaaagtggctgccgactacctgaaacaaaaagggtggacgaagtaa

SEQ ID NO: 481751 - DNA, 2268 bp, Shigella sonnei
gtgagtctggccctgcagccagcactggcggatgatttattcggcaaccatccattaacgcccgaagcgcgggatgcgttcgtcaccgaactgcttaagaaaatgacagttgatgagaaaattggtcagctgcgcttaatcagcgtcggtccggataacccgaaagaggcgatccgcgagatgatcaaagacggtcaggttggggcgattttcaacaccgtaacccgtcaggatatccgcgccatgcaggatcaggtgatggaattaagccgcctgaaaattcctcttttctttgcttacgacgtgctgcacggtcagcgcacggtgttcccgattagcctcggtctggcctcgtcttttaacctcgatgcagtgaaaacggtcggacgtgtctctgcttatgaagcggcagatgatggcctgaatatgacctgggcaccgatggtcgatgtctcgcgcgatccgcgctggggacgtgcttccgaaggttttggcgaagatacgtatctcacctcaacaatgggtaaaaccatggtggaagcgatgcagggtaaaagcccggcagatcgctactcggtgatgaccagcgtcaaacactttgccgcatacggcgcggtagaaggcggtaaagagtacaacaccgtcgatatgagtccgcagcgcctgtttaatgattatatgccgccgtacaaagcggggctggacgcaggcagcggcgcggtgatggtggcgctgaactcgctgaacggcacgccagccacctccgattcctggctgctgaaagatgttctgcgcgaccagtggggctttaaaggcatcaccgtttccgatcacggtgcaatcaaagagctgattaaacatggcacggcggcagacccggaagatgcggtgcgcgtggcgctgaaatccggaatcaacatgagtatgagcgacgagtattactcgaagtatctgcctgggttgatcaaatccggcaaagtgacgatggaagagctggacgatgctgcccgccatgtactgaacgttaaatatgatatgggattgtttaacgacccatacagccatttggggccgaaagagtctgacccggtggataccaatgccgaaagccgcctgcaccgtaaagaagcgcgtgaagtggcgcgcgaaagcctggtgttgctgaaaaaccgtctcgaaacgttaccgctgaaaaaatcggccaccattgcggtggttgggccactggcggacagtaaacgtgacgtgatgggcagctggtccgcagccggtgttgccgatcaatccgtgaccgtactgaccgggattaaaaatgccgtcggtgaaaacggtaaagtgctgtatgccaaaggggcgaacgttaccagtgacaaaggcattatcgatttcctgaatcagtatgaagaagcggtcaaagtcgatccgcgctcgccgcaagagatgattgatgaagcggtgcagacggcgaaacaatctgatgtggtggtggctgtggtcggtgaagcacaggggatggcgcacgaggcctccagccgtaccgatatcactattccgcaaagccaacgtgacttgattacggcgctgaaagccaccggtaaaccgctggtgctggtgctgatgaacgggcgtccgctggcgctggtgaaagaagatcagcaggctgatgcgattctggaaacctggtttgcggggactgaaggcggtaatgcaattgccgatgtattgtttggcgattacaacccgtccggcaagctgccaatgtccttcccgcgttctgtcgggcagatcccggtgtactacagccatctgaataccggtcgtccgtataatgccgacaagccgaacaaatacacttcgcgttattttgatgaagctaacggggcgctttatccgttcggctatggtctgagctataccactttcaccgtctctgatgtgaaactttctgcgccgaccatgaagcgtgacggcaaagtgaccgccagcgtgcaggtgacgaacaccggtaaacgcgaaggggccacggtagtacagatgtacttgcaggatgtgacggcttccatgagccgtccagtgaagcagctgaaaggctttgagaaaatcaccctgaaaccgggcgaaactcagactgtcagcttcccgattgatatcgaggcgctgaagttctggaatcaacagatgaaatatgacgccgaacctggcaagttcaatgtctttatcggcactgattccgcacgcgttaagaaaggcgagtttgagttgctgtaa

SEQ ID NO: 481752 - DNA, 1716 bp, Shigella sonnei
atgtcttccatgacaacaactgataataaagcctttttgaatgaacttgcccgtctggtcggtcattcacacctgctcaccgatcccgcaaaaacggcccgctatcgcaagggcttccgttctggtcagggcgacgcgctggctgtcgttttccctggctcactactggaattgtggcgggtgctgaaagcctgtgtcaccgccgacaaaattattctgatgcaggctgccaatacaggcctgaccgaaggatcgacgccaaacggtaacgactatgatcgcgatatcgtgatcatcagcaccctgcgtctcgacaagctgcacgttcttggcaagggcgaacaggtgctggcctatccgggcaccacgctctattcgctggaaaaagccctcaaaccgctgggacgcgaaccgcactcagtgattggatcatcgtgtataggcgcatcggtcatcggcggtatttgtaacaactccggcggctcgctggtgcaacgtggcccggcgtataccgaaatgtcgttattcgcgcgtataaatgaagacggcaaactgacgctggtgaaccatctggggattgatctgggcgaaacgccggagcagatccttagcaagctggatgatgatcgcatcaaagatgacgatgtgcgtcacgatggtcgtcacgcccacgattatgactatgtccaccgcgttcgtgatattgaagccgacacgcccgcacgttataacgccgatcctgatcggttatttgaatcttctggttgcgccgggaagctggcggtctttgctgtacgtctagataccttcgaagcggaaaaaaatcagcaggtgttttatatcggcaccaaccagccggaagtgctgaccgaaatccgccgtcatattctggctaacttcgaaaatctgccggttgccggggaatatatacaccgggatatctacgatattgcggaaaaatacggcaaagacaccttcctgatgattgataagttaggcaccgacaagatgccgttcttctttaatctcaagggacgcaccgatgcgatgctggagaaagtgaaattcttccgtccgcattttactgaccgtgcgatgcaaaaattcggtcacctgttccccagccatttaccgccgcgcatgaaaaactggcgcgataaatacgagcatcatctgctgttaaaaatggcgggcgatggcgtgggcgaagccaaatcgtggctggtggattatttcaaacaggccgaaggcgatttctttgtctgtacgccggaggaaggcagcaaagcgtttttacaccgtttcgccgctgcgggcgcagcaattcgttatcaggcggtgcattccgatgaagtcgaagacattctggcgttggatatcgctctgcggcgtaacgacaccgagtggtatgagcatttaccgccggagatcgacagccagctggtgcacaagctctattacggccattttatgtgctatgtcttccatcaggattacatagtgaaaaaaggcgtggatgtgcatgcgttgaaagaacagatgctggaactgctacagcagcgtggcgcgcaataccctgccgagcataacgtcggtcatttgtataaagcaccggagacgttgcagaagttttatcgcgagaacgatccgaccaacagtatgaatccggggatcggtaaaaccagtaagcggaaaaactggcaggaagtggagtaa

SEQ ID NO: 481753 - DNA, 933 bp, Shigella sonnei
atgccgaaatttcgagtttctttatttagcctggccctgatgctggctgtgcctttggcaccgcaggccgttgcgaaaacggcagccgctaccaccgcttcacaacctgaaattgcctccggtagcgcgatgattgttgatctgaataccaacaaagtgatctactcgaaccacccggatctggtgcgtccgattgcgtctatcagcaaattaatgaccgcgatggttgtgctggatgcacgactgccgctggatgaaaaactaaaagtggatatcagccagacgccggagatgaaaggggtctattcgcgcgtacgactgaatagcgaaatcagccgtaaagatatgctgttgctggcgctgatgtcttcagaaaaccgcgcggcggcaagccttgcacaccattatcccggtggttacaaagcctttattaaggcaatgaatgcgaaagcgaaatcgctcggaatgaacaacacgcgctttgttgaacctaccggattgtcggtgcataacgtttcaactgcccgtgacttaaccaaactgctcattgccagcaaacaatatccgttgatcgggcagttaagtactacccgggaagatatggcaaccttctctaacccgacgtatacgctgccgttccgcaatactaaccatctggtgtatcgcgataactggaatattcagttaaccaaaaccggttttaccaatgcggcgggccattgtctggtgatgcgtacggttatcaataataaaccggtagcgctggtagtgatggatgcgtttggcaaatatacccattttgccgatgccagccgcctgcgtacctggattgaaactggtaaagtgatgcctgttccagcagcagcgttgagctataaaaaacaaaaagccgcccaaatggcggcggcggggcagacggcacagaacgattaa

SEQ ID NO: 481754 - DNA, 588 bp, Shigella sonnei
atgagccatgtctggggactgttttcccatcccgatcgtgaaatgcaggtgattaatcgcgaaaacgaaacgatttctcaccattacacccaccacgttttgctgatggcggcgattccggtgatttgcgccttcattggcactacacagattggctggaattttggcgatggcactatcctgaagttatcctggtttaccggactggcgctggctgtcctgttttatggcgttatgctggctggggttgcggtaatggggcgggtcatctggtggatggcgcgtaattatccgcagcgtccgtcacttgcgcactgcatggtcttcgcgggctacgttgcaactccgctgtttttaagcggtctggtggcgctttatccactggtctggttgtgtgcgctggtcggcacggtggcgctgttttacaccggctacctgctttaccttggtattccgagcttcctgaatatcaacaaagaggaaggccttagcttctctagttcgacgctggcgattggcgtgctggtactggaagtgctgctcgccctaaccgttatactatggggctacggttatcgtttgttctag

SEQ ID NO: 481755 - DNA, 579 bp, Shigella sonnei
atggatctcaatacactcatctcacaatatggttatgccgcgctggtgatcggtagcctggcggaaggtgaaaccgtgactttgctgggaggcgttgcggcacatcaggggctattaaagttcccgctggtggtactttctgtggcgcttggcggcatgattggcgaccaggtgctttatctgtgcgggcggcggtttggcggcaagctgttacgccgtttctcgaaacatcaggataaaattgagcgggcgcagaaacttatccaacgccatccgtatctgtttgtcattggtacgcgctttatgtatggctttcgggtgattggcccgacgctgattggtgccagccagctgccgccgaaaatctttctgccgctgaatattctcggcgcatttgcctgggcgttgatttttaccactattggttacgctggtggtcaggtgattgcgccgtggttgcacaatctcgaccagcatttgaagcactgggtctggttgattctggtcgtggttctggtggtgggcgtgcgctggtggctgaaacggcgcgggaagaaaaagccggatcatcaggcgtaa

SEQ ID NO: 481756 - DNA, 762 bp, Shigella sonnei
atggcacaggttgcgattattaccgcctccgattcggggatcggcaaagagtgcgcgttattactggcgcagcaggggtttgatattggcattacctggcactcagatgaagaaggggcaaaagataccgcgcgtgaggtagttagccacggcgtacgtgcggagatcgtgcagctggagctcggtaaactgccagaaggtgcgcaggcgctggagaaactcattcaacggctggggcgtattgatgtgctggtgaataatgcgggcgcaatgaccaaagcgccgtttcttgatatggctttcgatgagtggcgcaagatttttaccgttgatgtcgatggtgcatttttatgctcacaaattgcggcccgccagatggtgaaacaagggcagggcggtcgtatcatcaacattacgtcggtacatgaacatacgccgctgccggatgccagcgcttacacagccgctaaacatgcgctcggcgggttaaccaaaacgatggcgctggagctggtcaggcataagattttggtgaacgcagtcgcgcctggggcgatcgccacgccaatgaatggcatggatgacagcgacgtgaagcccgacgcggagccttcgattcctctgcggcgttttggcgcaacgcatgagattgccagcctggtagcgtggctgtgctcagagggcgcaaattacaccaccgggcagtcgttgatagtggatggcggctttatgttggcgaatccgcagttcaacccagaatag

SEQ ID NO: 481757 - DNA, 1437 bp, Shigella sonnei
atgaatcgtgattccttttatccagccatcgcctgttttccgctgttactgatgctggccgggtgtgcgcctatgcatgaaacccgccaggcgttaagccagcaaacgcccgctgcacaagttgacaccgcattacccacggcgctgaaaaatggttggccagacagccaatggtggctggagtatcacgataatcagctcacttcattaattaacaatgcactacagaacgcaccggatatgcaggtggctgaacagcgcattcagctagctgaagcccaggcgaaggcagttgccactcaggatggtccgcagatcgacttttcggcggatatggagcggcaaaaaatgtcggcagaaggcttaatggggccgtttgctctgaacgatccggccgcaggtacgaccggcccgtggtacaccaacggtacttttggcttaacggcgggctggcatctcgatatctggggaaagaatcgggcggaggttactgcccgcctgggtacggttaaagcacgggcggcggaacgcgagcaaacccgccaattgctggctggcagcgtagcccgcctgtactgggagtggcaaacccaggcggcgttaaacacggtcttgcagcaaatagaaaaagagcagaacaccattatcgcgaccgatcgccagctatatcagaacgggattacttcttcagttgaaggtgtggaaaccgatattaatgccagcaaaacccggcagcagctcaacgatgtcgcggggaaaatgaaaattattgaggcacggttaagcgcacttacaaataaccagacaaagtcattgaagcttaaaccggtcgcgttgccgaaagtggcaagccagcttcctgatgaactggggtactccttactggcccggcgggcagatttgcaggcggcgcactggtacgttgagtcatcgctaagcaccattgatgcggcaaaagcggcattttatcctgacatcaacctgatggccttcctgcaacaggatgcgttgcacttaagcgatctgttccgtcattccgcgcagcaaatgggcgttacggcaggcctgacgctacccattttcgatagtggtcgtcttaacgccaatctcaatatcgcaaaagccgaaagcaacttgtctatcgccagctacaacaaagcggtggttgaagcggtgaatgacgtggcgcgggcagccagtcaggttcagacacttgcggagaaaaaccagcatcaggcgcaaattgagcgcgatgccttgcgtgtggtaggtcttgcgcaggcgcgctttaacgcgggcatcattgttggttcccgcgtcagcgaagccagaatccccgcgctgcgtgagcgggccaatggcctgttattgcaagggcagtggctggatgcttctattcaactcactggtgcgttgggcgggggttacaaacgctga

SEQ ID NO: 481758 - DNA, 948 bp, Shigella sonnei
atgcgtgtgttactggctccgatggagggtgtgcttgactctctggtgcgagaattgctgaccgaagttaacgactacgatctgtgcatcaccgagtttgtccgcgtggtggatcaactgctgccggtaaaagtctttcatcgcatttgccctgagctacaaaacgccagccggacaccatccggtacgctggtgcgcgttcagttgttaggtcagttcccacaatggctggcagagaacgccgcccgtgcggtggaattaggttcctggggcgtggatctcaattgcggctgcccgtcgaaaacggttaacggcagcggcggcggggcgacgttactcaaagatcctgaactcatctaccagggtgcaaaagcgatgcgtgaagctgtaccggcgcatttgcccgtcagcgtgaaagtgcgtctgggctgggacagcggtgagaagaaatttgaaatcgccgatgcggttcaacaggctggtgctacggagctggtggtgcatggacggacaaaagagcagggttaccgcgcggagcatattgactggcaggcgattggcgagattcgccagcggctgaatattccggtgattgccaacggcgaaatctgggactggcagagcgcgcaacaatgcattgcgatcagcggctgcgacgcagtgatgattggtcgcggggcgctcaatattcccaacctgagccgggtagtaaaatataacgaaccgcgaatgccgtggccggaggtggttgctttgctgcaaaaatatacccgtctggaaaagcagggcgataccgggttatatcacgttgcgcggattaaacagtggttgagttatttgcgtaaagaatacgatgaagcaacggaattatttcagcatgttcgggtgttgaataattcccctgatattgcaagggctattcaggcaattgatatcgagaaactctaa

SEQ ID NO: 481759 - DNA, 399 bp, Shigella sonnei
atgagtaagacactgaacattatctggcaatatttacgcgctttcgtcctgatttatgcctgcctgtatgcaggcattttcattgcttccctgctaccggtaaccattccgggcagcatcatcgggatgctgatcctgtttgtcctgctggccttgcaaattcttccggcaaaatgggtcaatccggggtgctacgtactgattcgctatatggcgctattgtttgtgccgattggcgtaggcgtcatgcaatattttgatttgctccgcgcacagtttggcccggtagtggtttcctgtgcagtcagtacgctggtggtttttctggtggtgagctggagttcacaactggtacacggtgaacgtaaagtcgtaggtcagaaaggatcagaagaatga

SEQ ID NO: 481760 - DNA, 696 bp, Shigella sonnei
atgatggcgaatatctggtggtcattaccgctgacgttgattgtcttttttgccgcccgcaaactggcggcacggtataagtttcccctgcttaacccgttgctggtagcaatggtggtgatcattccttttttaatgctgaccggcatctcttacgacagctactttaaaggtagcgaagtgctaaacgatctgctgcaaccggcggtcgtcgcgctggcctatcctttatatgagcagctacaccagatccgcgcgcgctggaaatcgatcatcaccatctgttttatcggcagcgtggttgcgatggtgacggggacttccgtggcattgttgatgggcgcttcaccggaaatcgccgcgtcaatcctgccgaaatcagtcaccacgcctattgcaatggcggttggcggcagtattggcggtattccggcaatcagcgcagtttgcgtgattttcgtcggcatcctcggcgcggtatttggccatacattgcttaatgcgatgcgtattcgtaccaaagctgcgcgcggtctggcaatggggacagcctcgcacgccctcggtacggcgcgctgcgccgagctggattatcaggaaggtgcatttagttcgctggcgctggtgttatgcgggataattacttcgctgatcgcaccgttccttttcccgattattctggcagtaatgggctaa

SEQ ID NO: 481761 - DNA, 885 bp, Shigella sonnei
atgcatccacgttttcaaaccgcttttgcccaacttgcggataacttgcaatctgcactggaacctattctggcagacaagtacttccccgctttgttgaccggggagcaagtctcatcgctgaagagcgcaacggggctggacgaagacgcgctggcattcgcactacttccactggcggcggcctgtgcgcgtacgccattgtcgaattttaatgttggcgcaattgcgcgcggtgtgagcggaacctggtatttcggtgccaatatggaatttattggtgcaacaatgcagcaaaccgttcatgccgaacaaagcgcgatcagccacgcctggttgagtggtgaaaaagcgcttgcagccatcaccgttaactatacgccttgtggtcactgccgtcagtttatgaatgaactgaacagcggtctggatctgcgtattcatctgccgggccgcgaggcacacgcgctgcgtgactatctgccggatgcctttgggccgaaagatctggagattaaaacgctgctgatggacgaacaggatcacggctatgcgctgacgggtgatgcgctttctcaggcagcgattgcggcggcaaaccgttcgcacatgccttacagtaagtcgccaagcggtgtcgcgctggaatgtaaagacggtcgtattttcagcggcagctacgctgaaaacgccgcattcaacccgactctgccaccgttgcagggggcgttaattctgttgaatctcaagggttatgattacccggatatccagcgcgcggttctggcagaaaaagccgatgcgccgttgattcagtgggatgccacctccgcaacgctgaaagctctcggctgtcacagtatcgaccgcgtgcttctcgcttaa

SEQ ID NO: 481762 - DNA, 720 bp, Shigella sonnei
atgttaaagcgcgtgttcctcagcctgttagtcctgatcggcttgctgctgttgactgtgctcggcctcgatcgctggatgagctggaaaaccgcgccttatatctacgacgaattgcaggatctcccctaccgccaggtcggcgtggtgctcggcacagcaaaatattatcgtactggcgtaattaatcagtattatcgctaccgcattcaaggagcgattaatgcctataacagcggtaaggtaaattatctattactgagcggcgataacgcattgcaaagttataatgagccgatgaccatgcgcaaagatttaatcgctgctggtgtcgacccatcagatattgttctcgattacgcaggctttcgtacgctggattccatcgtgcgtacacgcaaagtgttcgatactaatgatttcattattatcacccaacgtttccactgtgagcgggcattatttattgcgctgcatatggggattcaggctcagtgttatgccgtaccgtcaccgaaagatatgctgtcagtacgtattcgcgaatttgccgcccgtttcggtgcgctggctgacctttatatttttagacgtgaaccgcgttttttagggccgctggtccctattccggctatgcaccaggtgccggaagatgcgcaggggtatcccgccgtcacacccgaacagttacttgaattacaaaagaaacaaggaaagtag

SEQ ID NO: 481763 - DNA, 240 bp, Shigella sonnei
atggatgtacagcagttttttgtcgttgccgtttttttccttatcccgatattttgtttccgcgaagcatggaaaggctggcgcgcaggcgcgattgataaacgggttaaaaatgcaccggaaccggtgtatgtctggcgagcaaaaaatcccggactctttttcgcttatatggtggcatatatcggcttcggaattttatctatcggcatgattgtttatcttattttctatcgttaa

SEQ ID NO: 481764 - DNA, 486 bp, Shigella sonnei
atgccgcaacaaaattatctggatgaactcactccggcttttacgcctttactggcgattaaagaagcctctcgctgtttattatgtcatgacgctccctgtagtcaggcttgcccggcacagaccgatccggggaaatttattcgctcaatctactttcgtaattttaaaggcgctgccgagacaattcgcgaaaataatgccctcggtgccgtttgtgccagagtgtgcccgacggagaaattatgccaaagcggttgtacccgtgccggtgttgatgctcccattgatatcggccgcttacagcgttttgttactgattttgaacaacaaaccgggatggaaatttatcagcccggtactaaaacgctcggcaaagtcgcgattattggcgcaggtcctgccggattgcaggccagtgtgacactgacaaaccagggttatgacgtcacgatctatgagaaagaagcacaacccggtggctga

SEQ ID NO: 481765 - DNA, 753 bp, Shigella sonnei
ttgcgtaacggcattccgcaattccggttaccgcaatcagtactggatgcagagatcgcccgtattgaaaaaatgggcgtgaccattaagtgcaacaacgaagtcggtaacacactcacccttgagcagctgaaagcagaaaaccgcgcggtactggtcaccgtggggttatcaagcggttccgggctaccgctgtttgagcatagtgacgttgagattgccgtcgacttcttgcaacgtgcacgacaggcgcaaggcgatatcagcattccacaaagcgcattaattatcggcggcggtgatgtcgcgatggacgtagccagcacgctgaaagttctcggctgtcaggcggtaacttgcgtagcgcgtgaagagttagatgagtttccggcaagcgaaaaagagtttaccagcgcccgggagctgggcgtttcgatcatcgatggattcacgccagtagccgtggaaggcaataaagtcacgtttaagcatgtacggttatcgggcgaactgacgatggcggcagataaaattattctcgccgtcggtcagcatgccagactagatgcctttgcggagttagagccgcagcgtaacaccatcaaaacacaaaattaccagacccgcgacccgcaagtctttgctgctggcgatattgttgagggagacaaaaccgtggtctatgccgtgaaaaccgggaaagaagccgccgaggcgattcatcactatttagagggagcttgctcatgttaa

SEQ ID NO: 481766 - DNA, 1236 bp, Shigella sonnei
atgttaacgaaagatctttcgattactttttgcggcgtgaagtttcccaacccgttctgcctctcttcttcgccggtaggcaactgctatgagatgtgtgccaaagcctacgacacaggttggggcggtgtggtgtttaaaacgatcggcttttttatcgccaacgaagtctcgccgcgttttgatcatctggtgaaagaagataccggttttatcggcttcaaaaatatggagcagattgccgagcatccgctggaggagaatctggccgccctgcgtcggctgaaagaagattacccggacaaagtattgatcgcttcgatcatgggggaaaatgagcagcaatgggaggagctggcgcgcctggtgcaagaagctggcgcggatatgatcgagtgtaacttctcctgtccgcaaatgacttctcatgcgatgggtagcgatgtcgggcaaagcccggagctggtagaaaaatattgtcgggcagtgaaacggggttccacgctgccaatgctggcgaagatgacgccgaatatcggtgatatgtgcgaagtggcgctggcggcgaagcgcggcggcgcagatggcattgcggcgattaacaccgttaaatccatcaccaatatcgatcttaatcagaaaatcggtatgccgatcgttaacggaaaatcaagtatttccggatattccggtaaagcggtaaaaccgatcgccctgcgcttcattcagcaaatgcgcacccatccagaactgcgcgatttcccaatcagcggtatcggcggcattgaaacctgggaggatgcggcggagtttttattgctcggcgcagcaacgttacaggtcaccaccggcattatgcagtacggctatcgcatcgtagaagatatggcgagcgggttatcgcattatctcgccgatcagggatttgattcgttgcaggagatggtaggtctggcgaataacaatattgtcccggcggaagatttagaccgcagttatattgtctatccccgtatcaatcttgacaaatgtgttggctgtggacgctgttatatttcctgttacgacggcggtcaccaggcgatggaatggagcgagaaaacccgcacaccgcattgtaataccgagaaatgtgtgggttgtctgctttgtggtcacgtctgcccggtgggttgtattgagctcggggaagtgaagtttaagaaaggcgagaaagaacacccggtaacgttgtag

SEQ ID NO: 481767 - DNA, 1011 bp, Shigella sonnei
atgagtgcgttaaataagaaaagttttcttacttacctgaaagagggcggtatttacgtcgttcttttagttttgctggcgattattattttccaggacccaacatttttaagtctgttgaacttaagtaatattctcacccagtcatcggtgcgtattattatcgcgctcggtgtggcagggttaattgtcacccaggggaccgatctttctgctggtcgtcaggtagggctggcggcagtggtggctgcgacattattgcagtccatggataacgccaacaaagtgttcccggaaatggcgacgatgccgattgcgctggttattctgattgtctgtgccattggtgcggtgatcggtttgatcaacggtctgattatcgcttatctcaacgtgacgccgttcattaccacgctcggcacgatgatcatcgtctatggcatcaactcgctctattacgactttgtcggggcgtcgccaatttctggttttgacagtggcttctctacctttgctcagggctttgtcgcgctggggagtttccgtctctcttacatcaccttctacgcgttgattgcggtggcgttcgtctgggtgttgtggaacaaaacccgcttcggtaagaacatttttgccattggcggtaacccggaagcggcaaaagtatctggtgtcaacgtcggcctgaacctgctgatgatctacgcgttgtctggcgtgttctatgcctttggcgggatgttagaagccggacgtatcggctctgccaccaacaacctcggctttatgtatgagctggatgctatcgcggcgtgcgtggtaggcggtgtatcgttcagcggcggtgtggggacggtgattggcgtggtgaccggggtgattatttttaccgtcatcaactatggcctgacgtatatcggcgtaaacccatactggcagtacatcatcaaaggggcgattattatcttcgccgtagcgctggattcactgaaatacgcgcgtaagaaatga

SEQ ID NO: 481768 - DNA, 1521 bp, Shigella sonnei
atggtcagctcaacgactccgtcttccggggaatacttgttggaaatgagcggtatcaacaagtcctttcctggtgttaaggcacttgataacgttaatttaaaagtccggccacattctatccatgcattaatgggggaaaacggtgcaggaaaatcgacattattaaaatgcctgtttggtatttatcaaaaagactccggcaccattttattccagggtaaagagatcgatttccattccgccaaagaggcactggaaaatggtatttcgatggtacaccaggagttaaacctggtattacaacgttcggtgatggataacatgtggctggggcgatatcccaccaaaggcatgtttgtcgatcaggacaaaatgtaccgcgaaaccaaagcaatttttgatgaactggatattgatatcgatccgcgtgcgcgcgtcggcacattatccgtttcgcaaatgcagatgatcgaaatcgccaaagcgttttcctataacgcgaaaattgtgattatggatgaaccgacttcttcgttaaccgaaaaagaggtcaatcatctgttcactattattcgtaaattaaaagagcgcggctgcggtattgtttatatctcgcataaaatggaagaaatcttccagttatgtgatgaagttaccgtattgcgcgacggtcagtggatcgccaccgaaccgctggcaggactgacgatggacaagatcatcgccatgatggttgggcgttctcttaatcagcgttttcctgacaaagaaaacaagccgggcgaagtcatcctcgaggtgcgtaacctaacgtcactgcgccagccgtcgattcgcgatgtctcgtttgatctgcataaaggggagatcctcggtattgccgggctggtgggggcgaaacgtaccgatattgttgagacgttatttggtattcgcgagaaatcggctggcaccattacgttgcacggcaaacagatcaataaccataatgccaacgaagccataaaccacggatttgcactggtaactgaggagcgccgctcaacgggaatttatgcctatctggatattggttttaactcgttaatttccaatattcgcaactacaaaaataaagttggtttactggataactcgcggatgaaaagcgatacccagtgggtgattgattcgatgcgggtaaaaacgccgggtcatcggacgcaaattggttcgctctccggtggtaatcagcaaaaggtgattattggtcgctggctactaacgcaaccagaaatattaatgctcgatgaaccgacgcgcggtattgatgtcggggcgaagtttgaaatttatcagttaattgccgaactggcgaagaaaggcaaggggattattattatctcctctgaaatgcctgagttgttagggataacagaccgtattctggtcatgagcaatggtctcgtttccggaattgtcgatacaaaaacaacaacgcaaaacgaaattctgcgtcttgcgtctttgcacctttaa

SEQ ID NO: 481769 - DNA, 999 bp, Shigella sonnei
atgaataagaaggtgttaaccctgtctgctgtgatggccagcatgttattcggtgccgctgcacacgctgctgatactcgcattggtgtaacaatctataagtacgacgataactttatgtctgtagtgcgcaaggctattgagcaagatgcgaaagccgcgccagatgttcagctgctgatgaatgattctcagaatgaccagtccaagcagaacgatcagatcgacgtattgctggcgaaaggggtgaaggcactggcaatcaacctggttgacccggcagctgcgggtacggtgattgagaaagcgcgtgggcaaaacgtgccggtggttttcttcaacaaagaaccgtctcgtaaggcgctggatagctacgacaaagcctactacgttggcactgactccaaagagtccggcattattcagggcgatttgattgctaaacactgggcggcgaatcagggttgggatctgaacaaagacggtcagattcagttcgtactgctgaaaggtgaaccgggccatccggatgcagaagcacgtaccacttacgtgattaaagaattgaacgataaaggcatcaaaactgaacagttacagttagataccgcaatgtgggacaccgctcaggcgaaagataagatggacgcctggctgtctggcccgaacgccaacaaaatcgaagtggttatcgccaacaacgatgcgatggcaatgggcgcggtagaagcactgaaagcacacaacaagtccagcattccggtgtttggcgtcgatgcgctgccagaagcgctggcgctggtgaaatccggtgcactggcgggcacagtactgaacgatgctaacaaccaggcgaaagcgacctttgatctggcgaaaaacctggccgatggcaaaggtgcggctgatggcaccaactggaaaatcgacaacaaagtggtccgcgtaccttatgttggcgtagataaagacaacctggctgaattcagcaagaaataa

SEQ ID NO: 481770 - DNA, 999 bp, Shigella sonnei
gtggcaacggtttcccgggtgctcaataacagcacgctggtcagtgccgacacgcgtgaagcagtaatgaaagccgtgagtgagctggattatcggccaaacgccaatgcccaggcgctggcaactcaggttagcgacaccattggcgtggtggtgatggacgtttctgatgcgtttttcggcgcgctggtaaaagcggtggatctagtcgctcagcagcatcagaaatacgtgctaatcggcaatagctatcatgaagcggaaaaagagcgtcacgccattgaggtgttaattcgccagcgttgtaatgcgttgattgttcactcaaaagcattgagtgacgatgaactggcgcaatttatggataacattcccggtatggtgttaatcaaccgcgttgtgccggggtacgcccatcgttgcgtttgcctggataatctcagcggtgcccgaatggcgacgcgcatgttgctgaataacggtcatcaacgtattggttatctttcttccagtcacggcattgaagatgacgccatgcgtaaagcaggctggatgagtgcgttgaaagagcaggatattattccgccggaaagctggattggcactggtacgccggacatgccgggcggtgaggcggcgatggttgaactgctggggcgcaatctacaacttaccgctatatttgcttataacgacaatatggccgctggcgcactgacagcattaaaagataatggcattgcgattccgttacatctctcaatcatcggtttcgatgatattcccatcgcccgttacaccgacccgcaattaacgaccgtgcgttatcccattgcttcaatggctaaattagccaccgaactggccttgcagggggcagcaggcaatattgatcctcgtgccagccactgttttatgccgacgttagtgcgtcgccattctgtcgcaacgcgccagaatgcggcggcgatcactaactcaacaaatcaggcgatgtaa

SEQ ID NO: 481771 - DNA, 1158 bp, Shigella sonnei
atggagcgcaacgtaacgctcgattttgttcgcggcgtcgccattctggggatcctgctattaaacatcagcgcctttgggctaccaaaggcggcttatctcaatcccgcctggtacggcgctattacgccgcaggatgcatggacctgggcatttctcgatctcatcggccaggtgaaattcctcacgctttttgcgctgctgtttggtgcgggcctgcaaatgttgctgccccgtggcagacgctggatccagtcgcggttaacgctgttagtcttgctgggttttattcacggtttattgttctgggacggcgatattctgctggcttacgggctggtgggcttaatctgctggcggctggtgcgcgatgcgccatcggtaaaaagcctgtttaatacaggcgtcatgctttatctggtggggcttggcgttttgctgttattggggctgatttccgacagccagaccagccgcacctggacgccggatgcatcggctattttgtatgaaaaatactggaagcttcacggcggcgttgaagcgatcagtaatcgtgccgatggtgttggcaacagtttactggcactgggcgcacagtatggctggcaactggcagggatgatgctcattggtgcggcgctgatgcgcagcggctggctgaaagggcagttcagcttacgtcactatcgtcgtactggttttgtgctggtggcgattggggtgaccattaaccttcctgccatcgccctgcaatggcagctggactgggcgtatcgctggtgtgccttcttacttcaaatgccgcgggaactgagtgcgccgtttcaggcgattggctatgcgtcgctgttttatggcttctggccgcaattgagccgctttaagctggtgcttgcgatcgcctgcgtcggacggatggcgctgaccaactatctattgcaaacgctgatttgtaccatgcttttttaccacctcggtttgtttatgcattttgaccgcctggagctgctggcgtttgttattccggtatggctggcgaatatcctcttctctgttatctggctgcgttacttccgccaggggccggtggaatggctctggcgtcagttaactttgcgtgctgccggaacggcaatatctaaaacatcaagataa

SEQ ID NO: 481772 - DNA, 669 bp, Shigella sonnei; identical to SEQ ID NO: 459616

SEQ ID NO: 481773 - DNA, 837 bp, Shigella sonnei
atggaaatgctcgaagagcaccgctgttttgaaggctggcagcaacgctggcgacacgactccagtaccttaaactgcccgatgacgttcagtatctttctcccaccccctcgtgatcacaccccgccaccagtgctgtactggctttccggattaacctgcaatgacgagaacttcaccaccaaggcgggtgcccagcgcgtggcggcagaactggggattgtactggtgatgccagacaccagcccgcgcggcgaaaaggttgccaacgacgatggctacgatttaggccagggcgcaggcttttatcttaatgccacgcaaccgccgtgggcgacgcattaccggatgtatgattatctgcgcgatgaattaccggcgctggttcagtcgcaatttaatgtcagcgaccgctgcgccattagcggtcactcaatgggtggtcacggtgcgctgattatggcgctgaaaaatccgggtaaatacaccagcgtttcggcctttgcgccaattgtgaatccgtgcagcgtcccgtggggaatcaaagcgtttagcacctatttaggtgaggacaaaaatgcatggctggaatgggatagttgcgcgctgatgtatgccagtaacgcgcaggatgcgatcccgacgcttatcgatcagggcgataatgatcagtttcttgccgaccagttgcaacctgcggtattggcagaagccgcgcgccagaaagcgtggccgatgacgctgcgtattcagccgggatatgatcacagttactacttcatcgcctcttttatagaggatcacctgcgcttccatgcgcagtatttactgaagtga

SEQ ID NO: 481774 - DNA, 1992 bp, Shigella sonnei
atgtttaggttgaaccctttcgtacgggtcgggctgtgtttgtccgctatttcttgtgtatggcctgtgttagcggtcgatgacgatggcgaaacgatggttgtcactgcatcttccgttgaacaaaaccttaaagatgcacccgccagtatcagcgtcattacccaggaagatctgcagcgaaaaccggtacagaatctgaaggatgtcctcaaagaagtgcctggcgtacaactgacgaacgaaggggataaccgtaagggcgttagtattcgtggtctggacagcagctataccctgattctcgtcgacggtaaacgcgtgaactcccgcaatgccgtcttccgccacaatgatttcgatctgaactggatcccggtcgattccatcgaacgtattgaagtggtccgtggcccgatgtcgtcgctgtacggttccgatgcgctcggcggtgtagtgaatatcatcaccaaaaaaatcggtcagaaatggtcgggtaccgttaccgtcgataccaccattcaggaacatcgcgatcgcggtgatacctataacggtcagttctttaccagtggaccattaattgatggtgtgctgggaatgaaagcttacggcagcctggcaaaacgtgaaaaggatgacccgcaaaactcaacgaccaccgataccggagaaacgccgcgtattgaaggattctccagccgcgacggcaatgtcgaatttgcctggacaccgaatcaaaatcacgattttactgccggatacggtttcgaccgtcaggatcgtgattccgactcgctggacaaaaaccgcctggaacgccagaactactccgtcagccataatgggcgttgggattacggcaccagcgaactgaaatactacggtgagaaagtcgagaacaaaaaccctggcaacagcagcccgataacttccgaaagcaatacggtcgacggcaaatacacgttgccgctgacggcgattaatcagtttctcacggttggcggtgaatggcgtcacgacaaacttagcgatgcggtgaacctgaccgggggaaccagctccaaaacgtctgccagccagtacgcgctgtttgtggaagatgaatggcggatcttcgagccgctggcgctgacgaccggcgtgcgtatggacgatcacgaaacctacggtgaacactggagtccgcgtgcctacctggtttataacgccaccgacaccgtaacggtgaaagggggctgggcgacggcatttaaagcaccttctctgttgcaacttagccctgactggacgagcaattcctgccgtggcgcatgtaagattgtgggtagcccggatctgaaaccagaaaccagcgaaagttgggagctggggctttactacatgggtgaagaaggctggctggaaggggttgaatccagcgttaccgttttccgtaacgatgtgaaagatcgtatcagcatcagccgtacgtctgacgtcaacgctgcaccgggctaccaaaactttgttggttttgagacgggcgctaacggacggcgcataccggtatttagctactacaacgttaacaaagctcgtattcagggcgtggaaaccgaactgaaaattccgttcaacgatgaatggaaactgtcgatcaactacacctacaacgatggtcgtgatgtcagcaacggcgaaaacaaaccgctatccgatctgccgttccatactgctaacggtacgctggactggaaaccgctggcgctggaagactggtcattctatgtttctggtcactataccgggcagaaacgcgccgacagcgcgacggctaaaacaccgggcggttataccatctggaataccggcgcggcctggcaggtgactaaagacgtcaaactgcgcgcaggcgtgctgaaccttggcgacaaggatctcagtcgtgacgactacagctataacgaagacggacgtcgttactttatggcagtggattatcgcttctga

SEQ ID NO: 481775 - DNA, 1470 bp, Shigella sonnei
atgggttccgaaactaaaactacagaagcgccgggcttacgccgtgaattaaaggcgcgtcacctgacgatgattgccattggcggttccatcggtacaggtctttttgttgcctctggcgcaacgatttctcaggcaggtccgggcggggcattgctctcgtatatgctgattggcctgatggtttacttcctgatgaccagtctcggtgaattggctgcatatatgccggtttccggttcgtttgccacttacggtcagaactatgttgaagaaggctttggcttcgcgctgggctggaactactggtacaactgggcggtgactattgccgttgacttggttgcagcacagctggtcatgagctggtggttcccggatacaccgggctggatctggagtgcgttgttcctcggcgttatcttcctgctgaactacatctcagttcgtggctttggtgaagcggaatactggttttcactgatcaaagtcacgacagttattgtctttatcatcgttggcgtgctgatgattatcggtatcttcaaaggcgcgcagcctgcgggctggagcaactggacaatcggcgaagcgccgtttgctggtggttttgcggcgatgatcggcgtagctatgattgtcggcttctctttccagggaaccgagctgatcggtattgctgcaggcgagtccgaagatccggcgaaaaacattccacgcgcggtacgtcaggtattctggcgaatcctgttgttctatgtgttcgcgatcctgattatcagcctgattattccgtataccgatccgagcctgctgcgtaacgatgttaaagacatcagcgtcagtccgttcaccttggtgttccagcacgcgggtctgctctctgcggcggcggtgatgaacgcagttattctgacggcggtgctgtcagcaggtaactccggtatgtatgcgtctactcgtatgctgtacaccctggcgtgtgacggtaaagcgccgcgcattttcgctaaattgtcgcgtggtggcgtgccgcgtaatgcgctgtatgcgacgacggtgattgccggtttgtgcttcctgacctccatgtttggcaaccagacggtatacctgtggctgctgaacacctccgggatgacgggttttatcgcctggctggggattgccattagccactatcgcttccgtcgcggttacgtattgcagggacacgacattaacgatctgccgtaccgttcaggtttcttcccactggggccgatcttcgcattcattctgtgtctgattatcactttgggccagaactacgaagcgttcctgaaagataccattgactggggcggcgtagcggcaacgtatattggtatcccgctgttcctgattatttggttcggctacaagctgattaaaggaactcacttcgtacgctacagcgaaatgaagttcccgcagaacgataagaaataa

SEQ ID NO: 481776 - DNA, 882 bp, Shigella sonnei
atgcacatcaccctccggcagttggaagtttttgcagaagtattgaaaagtggatcaaccacccaggcgtcggtgatgctggcgttgtcgcaatcagcagtgagcgcagccttgaccgacctggaagggcagcttggcgtgcaactgtttgatcgcgtggggaaaagactggttgttaatgaacacgggcggctgctctatccgcgtgcgttggcattgcttgaacaggcggttgaaatcgaacaactgtttcgcgaagacaacggcgcgattcgtatctatgccagtagtaccatcggtaactacattctgcctgcagttatcgcccgttatcgccatgattatccgcagttgccgattgaacttagcgttgggaacagccaggacgtgatgcaagcggtgctggatttccgcgttgatattggctttattgaaggaccgtgccacagcactgaaatcatttctgaaccgtggctggaagacgagctggtggttttcgccgcgccgacttcgccgttggctcgtggtccggtcaccttagaacagctggccgctgcgccgtggatcctgcgtgaacgcggttccggcacgcgggagattgtcgattatctgttgctgtcacatttaccgaagtttgagatggcgatggaattaggtaactccgaggcaatcaaacatgcggtgcgtcatgggttgggaattagttgcctgtcgcgacgtgtgattgaagatcaattgcaggcaggcacattaagtgaagttgcggtccctctcccgcgcctgatgcgtacgttgtggcgtatacatcatcggcaaaaacacctttccaacgcgctacggcgctttctggactattgcgatcccgcgaatgtaccgcgttaa

SEQ ID NO: 481777 - DNA, 1050 bp, Shigella sonnei
atgacgaatatcaccttacagaaacaacatcgtacactgtggcattttattccggggttagccctgagtgcagttatcaccggggtcgccctgtggggtggttccattcccgcggttgcgggtgccgggtttagtgccctcaccctcgcaatcttgttggggatggttttaggcaacaccatctatccgcacatctggaaaagctgtgacggtggtgtgctgtttgccaagcaatatttattacgtctgggtatcattctttatggcttccgtctgacgttctcgcaaattgccgatgtcggtatcagtgggatcatcattgacgtgttgacgctgtccagtaccttcctgctggcttgcttcctggggcagaaagtgtttggtctggataagcacaccagctggttgatcggtgccggtagcagtatctgtggtgctgccgcggtactggcgactgagtcggtagtgaaagcggaagccagtaaagtaaccgtggctgttgcaaccgttgttatcttcgggaccgtcgcgattttcctctacccggcgatatatccgctgatgtctcaatggtttagtccggaaactttcggtatctacattggttctactgtgcacgaagtggcgcaggtggtggcggcaggtcatgccatcagcccggatgcggaaaacgcagcagttatttccaaaatgctgcgcgtgatgatgctggctccgttcctcatcctgctggcggcgcgtgttaaacagctgtctggggcgaacagcggcgagaaaagcaaaatcactattccgtggtttgccatcttgttcatcgtcgttgccatctttaactcgttccacctgttaccgcagagcgtggtgaacatgctggtaacgctggataccttcctgctggcaatggcgatggcggcgctgggtctgaccactcacgtcagcgcgctgaaaaaagctggggcgaaacctctgctgatggcactggtactgtttgcctggctgattgttggtggtggtgcgattaactatgtgattcaaagcgtcatcgcataa

SEQ ID NO: 481778 - DNA, 858 bp, Shigella sonnei
atgaaatacattggagcgcacgttagtgctgctggcggtctggcaaatgccgcaattcgcgccgtcgaaatcgacgcaaccgcgtttgccttgttcaccaaaaaccaacgtcagtggcgtgccgcaccgctcacgacgcaaaccatcgatgaattcaaagccgcctgtgaaaaatatcactacacatcggcgcaaattcttccccacgacagttatctgattaacctcggacatccggtcactgaagctctggaaaaatcgcgcgatgcctttatagatgaaatgcagcgttgcgaacaactggggctttctttgctcaacttccaccctggcagccatctgatgcagatttcagaagaggattgccttgcgcgtattgccgaatccatcaacattgcgctggataaaactcaaggtgtaacagcggtgattgaaaacaccgccggtcagggcagtaacttagggtttaaattcgaacatctcgcggcgattatcgacggcgtggaagataaatcccgcgtcggcgtctgcattgatacctgccatgctttcgctgccgggtatgatttgcgtactccagccgaatgcgaaaaaacgttcgctgattttgcccgtattgtcggctttaagtatctgcgcgggatgcaccttaacgatgcgaaaagtacctttggcagccgcgttgaccgccatcatagcctcggtgaaggcaatatcggtcatgatgcgttccgctggatcatgcaagacgaccgtttcgacggcattccgctgatccttgaaaccatcaacccggatatctgggcagaagagatcgcctggctgaaagcgcaacaaactgaaaaagcggtggcctga

SEQ ID NO: 481779 - DNA, 1089 bp, Shigella sonnei
atgaacgacagggaaaagcagattcttaaaattttacggcgtaacccgctgattcaacagaatgaaatcgccgatattctgcaaatcagccgctcacgtgttgccgctcatattatggatttgatgcgcaagggtttgattaaaggcaaaggatatatccttaccgagcaggattactgtgtggttgtgggtgcaatcaatatggatattcgcggaatggcggatatccgttacccgcaagcagcctctcatccaggttctgttcactgttccgcaggcggcgtcggacgtaatatcgcgcataacctggctctgcttggtcgggatgtgcatttaatatcagctattggcaacgatttttacggcgagacattactggaagaaacgcgccgcgcgggcgtgaacgtttcaaactgcattcgtctgcatggacacagcactgcaacttatctcgctatcgctaataagcaggaagaaactatcctggcaatcaatgacacacatattctgcaacagctaacgcctcaactgctcaatacttcacgggacttgattcgccatgctggtgtggtgctggctgattgtaatctcacacctgaagccctggagtgggtctttaccattgctgatgaaattccgatgtttgtcgataccgtttccgaatttaaagcgaacaaagtaaaaaactggtacagccggatccacactctgaaaccaacacaaaatgaactggaaattttgtgggggcaaccgattaaagacgacaacgatcgcatcagagctgtaaattcgctgcatcaacaaggtgttaaacgcatttttgtttatctgaaagatgaatctgtattttgcagcgataaggatggagaacaatttttgctgaccgcgccagcgcatacgacagtagacagttttggtgctgacgatggttttatggcgggcctggtatatagctttcttgaaggatacagtttccgcgacagcgcccgttttgcggtagcctgcgcggcaatttcgcgcgccagcggcagcttaaacaaccctaccctgtctgccgataacgcgctttcattagtgccaatggtgtaa

SEQ ID NO: 481780 - DNA, 1251 bp, Shigella sonnei
atggatgtcatgagaagtgttctgggaatggtggtactgctggcaattgcgtttttactgtcagtaaacaagaagaagatcagcctgcgtaccgttggcgcggcgttagtgttacaggtcgtgattggcgggattatgctttggttaccgccagggcgttgggtcgcagaaaaagtcgcttttggcgtccacaaagtgatggcgtacagcgacgcaggtagcgcatttatcttcggttctctggtcggaccgaaaatggataccttatttgatggcgcaggatttatctttggtttcagggtattaccggcaattatcttcgtcactgcactggtgagtattctctactacatcggtgtgatggggatcttaattcgcattctcggcggtatcttccagaaagctttaaatatcagcaagatcgagtcattcgtcgcggtcaccaccattttcctcgggcaaaacgaaattccggcgatcgtcaaaccctttatcgatcgtctgaatcgcaatgaattatttacagcgatttgtagtggcatggcctcgattgctggttcgacaatgattggttacgccgcactgggcgtacctgtggaatatttgctggcggcatcgttaatggcgatccctggcgggatcttgtttgcccgcctgttaagcccggctacggaatcttcgcaggtttcttttaataacctctctttcaccgaaacaccgccaaaaagcattattgaagccgctgcgacaggggcaatgaccgggctgaaaatcgccgccggtgtagcgacagttgttatggcatttgttgcaataattgcgttgattaacggtattatcggcggtgttggcggctggtttggttttgaacatgcttcgctggagtcgattttaggttacctgttggcctcattggcgtgggtgatgggggttgactggagtgatgcaaatcttgccgggagtttgattgggcagaagctggcgatcaatgaatttgtcgcttatctcaatttctcgccatatctgcaaacgggtggcactctggatgctaaaaccgtggcgattatttctttcgcgttgtgcggtttcgctaactttggttctatcggggtggtggtgggggcgttttctgcggttgcgccacaccgtgcgccggaaatcgcccaacttggtttacgcgcgctggcggcggcgacactttctaacctgatgagtgctactattgcaggattctttattggtttagcgtag

SEQ ID NO: 481781 - DNA, 942 bp, Shigella sonnei
atggaaaagagaaaaattattctggattgtgatccgggtcatgatgatgctattgctataatgatggcggcgaaacatccggcgattgatttattaggtatcaccattgttgcgggtaatcagacgcttgataaaacattaattaatggcctgaatgtttgccagaaactggagattaatgttccggtttatgcggggatgccgcaacccattatgcgtcaacaaatcgttgccgataatattcacggtgaaaccggactggatggcccggtattcgagccgctgacccgccaggcagaaagtacccacgcggtgaaatacatcattgatacccttatggcaagcgatggcgatatcactctggtgccggttggtccgctttcaaatatcgcggtggcaatgcgtatgcaacccgcaatcctgcccaaaatccgtgaaattgtgctaatgggcggcgcttacggtacaggcaacttcaccccatctgccgagttcaatatctttgccgacccggaagccgcacgcgtggtgttcacctccggcgttccattagtgatgatgggcctcgatcttaccaaccagaccgtttgcaccccggacgtaattgcacgaatggaaagggcaggcggccctgccggagagatgttcagcgacatcatgaacttcactctcaaaacgcagttcgaaaactacggcctggctggcggcccggtgcacgacgccacctgcatcggttatctgattaaccctgatggcattaaaacccaggagatgtacgtcgaagtggacgtcaacagtggcccttgctatgggcgtaccgtctgcgacgagctgggcgttcttggcaagcccgccaatactaaagtcggcatcactattgataccgactggttctggggattagtcgaagagtgcgtacgcggctacataaaaacccattaa

SEQ ID NO: 481782 - DNA, 699 bp, Shigella sonnei
gtgaaagaaatccacaataatgatcttaagcagcaattgatgagtgaatccgcgtttaaggattgctttttaacggatgtttcagccgatacgcggctgtttcattttttagcgcgtgactacattgtgcaggaagggcaacagccgtcctggctgttttacctgacgcgaggccgcgccaggctttacgccacgctagctaatggtcgcgtgtcgctgatcgatttctttgccgccccctgttttattggcgagattgagttaatcgacaaagaccatgaaccgcgtgcggtgcaggctattgaagagtgttggtgccttgcgctccctatgaaacattaccgcccgctgttattaaacgacacgctatttttacgaaaactctgcgtcaccttaagtcataaaaattatcgtaatattgtttctttaactcagaatcaatcatttccgttagtgaatcgcctggcagcatttatattactctcgcaggaaggtgatctttatcacgaaaagcatacgcaagcggcagagtatttaggcgtttcttatcgacatcttttatatgttctcgcgcaattcattcacgacggtttattaattaaaagcaagaaagggtatctaattaaaaacagaaagcagttgtcaggactggcgctggagatggacccggagaataaattctccgggatgatgcagtaa

SEQ ID NO: 481783 - DNA, 1251 bp, Shigella sonnei
atggatataatgagaagtgttgcggggatggtggtattgctggcaattgcctttgtgttgtcggtaaataaaaagagcatcagcttgcgcacggttggcgctgcgctgctgctgcaaattgccattggtggcatcatgctctattttcccccgggaaaatgggcagtagagcaggcggcattaggcgtccataaagtgatgtcctacagtgacgcaggaagtgcctttatttttggttcgctggtcggtcccaaaatggatgttctgtttgacggtgcgggctttatcttcgcctttcgcgtactcccggcgattattttcgttaccgcgcttatcagcttgctgtactacattggcgtaatggggctgctgattcgtattcttggcagtatttttcagaaagccctcaacatcagcaaaatcgaatcttttgtcgcagtcaccactattttcctcgggcaaaatgagatcccggcgatcgttaaaccttttattgatcgcatgaatcgcaacgagctatttacggctatttgtagcggcatggcgtctattgcgggttcgatgatgattggctatgccggaatgggggtgccgattgactatttgttagccgcttcgctgatggctattcctggcggtatcctgtttgcacgtattcttagtccggcgacggaaccttcgcaagttacgtttgaaaatctgtcgtttagcgaaacaccgccaaaaagcattattgaagctgcggcgaacggtgcaatgaccgggctgaaaatcgccgccggtgtggcgacggtggtaatggcatttgtagcgatcattgcgctgatcaacggcattattggtggagttggcggctggtttggttttgccaatgtctctctggaaagcattttcggctatgtgctggccccgttggcatggattatgggggtggactggagtgatgcaaatcttgccggaagtttgattgggcagaaactggcgattaatgagtttgttgcttatctcaatttctcgccctatctgcaaacgagcggcacgctggatgtcaagaccattgccattatctcgttcgccctctgtgggtttgcaaactttggttctatcggtgttgtcgttggagcgttttcggctatttcgccaaaacgcgcgccggaaatcgcccagcttggtttacgggcgctggcggcggcgacgctttccaacctgatgagcgcgaccattgccgggttctttattggtttagcttga

SEQ ID NO: 481784 - DNA, 939 bp, Shigella sonnei
atgtctgaattaactctgtcccctgaattattacaaatatccgctgaagtacaggatgctttaaaaaataaaaaaccggttgttgcgctggaatcgaccataatttctcacggaatgccattcccacaaaatgcccaaaccgcaattgaagtagaagaaacaattcgtaaacagggcgcagtaccagccactatcgccattattggcggtgtgatgaaagtgggcttaagtaaagaagaaatcgaattgctgggccgtgaaggacataacgtgacgaaagttagtcgtcgtgatttaccttttgtcgttgctgcagggaaaaatggcgcgactaccgttgcatcaaccatgattattgcagcactggctgggattaaagtttttgcaaccggaggtattggtggtgtgcatcgcggagcggaacataccttcgatatttctgccgatttacaggaactggcaaataccaatgtcactgttgtttgtgcgggggcaaaatctattctcgatttaggattaacaacagaatatttagaaaccttcggtgtaccgttaattggttatcagacaaaagcgctgcctgcgtttttctgccgaaccagcccatttgaagtcagcattcgtcttgacagtgcccgcgaaattgctcgcgcgatggcagtgaagtggcaaaccggtttgaacggcggcctggtggtagcgaacccgatcccggaacagtttgcgatgccagaagaaaccatcaatgcagcaattgatcaagccgttgctgaagccgaagaacagggtgttattgggaaagagagtacaccgttcctgctggcgcgtgttgcggagctaaccggcggtgatagcctgaaatccaatattcaactggtctttaataacgccattctggcgagcgaaattgccaaagaatatcagcgtctcgtgggttaa

SEQ ID NO: 481785 - DNA, 942 bp, Shigella sonnei
atgcgcgaaaaggactacatagtaattattggttcggcgaatattgatgtggctgggtattcacatcatccattgaattatgcggattcgaatcccggaaaaattaaatttaccccaggtggcgtgggaaggaatatcgctcataatctggcgttactggggaaaaatgcctggcttttaagtgcagtaggtggtgatttttatgggcaatcattactggcgcaaactaatcaatccggtgtttatgtcgataaatgcttaattgttccgggtgagaatacatccagctatttatcactgctcgataatacaggagaaatgcttgtcgcgataaatgatatgagtattagtgactgtatttctgcagaatttcttgcccagcatcaggagtttattcgcggtgcaaaggttattgtcgcggattgcaaccttagtgaagaggtgctggtctgggttctggaaaatagcggggaaacgcctgtatttattgatccggtatcggcatggaaatgcgtcaaaatccgcgatcatctgagcaaaatccatacgttaaaacctaaccgtcttgaagccgaaacgttgagcggaattgcactttccggacgtgaagatgtcgcaaaggtcgccgcctggtttcatcaacacggcctgaaccgcttggtgctgagcatgggaggggatggcgtttactacagtgatatcaacggtgaaagtgggtggtcggcccctattaaaacgaatgtcatcaatgttactggggcaggcgacgccatgatggcggggctggcctcctgttgggtagacggtatgccgtttatcgattctgttcgatttgcgcagggatgttcgtcaatggcacttgcctgtgaatataccaacaaccctgaattatcaattgccaatgttagatcgttagtggagaacacagaatgtctgaattaa

SEQ ID NO: 481786 - DNA, 1692 bp, Shigella sonnei
atgaaaacgctgctgattattgacgctaatctcggtcaggcacgcgcctatatggcgaagaccctgctgggcgcggcggcgcgaaaagcaaaactggaaatcatcgacaatccgaacgacgcagaaatggcgattgttctcggtgattccatcccgaatgacagcgcgctgaacggtaaaaatgtctggctgggtgatatttcccgggcagttgcgcaccctgagctgttcctgagtgaagccaaaggccatgcgaaaccttacactgcgccggtcgctgcgacagcaccggttgctgccagcggtccgaaacgcgtagttgcggtgactgcttgcccgactggcgtagcacacacctttatggcggctgaagccattgaaaccgaagcgaaaaaacgtggctggtgggtgaaagttgaaacccgtggttctgttggcgcgggcaatgcaatcacccctgaagaagtcgcagcagcggatctggtgattgtggcggcagatatcgaagtggatctggcgaaatttgctggtaaaccgatgtatcgcacctctaccggtctggcgctgaagaaaactgcgcaggaactggataaagcggttgctgaagcaacgccgtatgaaccagcgggcaaagctcaaacagcgaccactgaaggtaagaaagagagtgcaggcgcttaccgtcacttgctgacgggcgtctcttacatgctgccgatggttgttgcaggtggtctgtgtatcgcgctttcttttgcttttggtatcgaagcgtttaaagagccgggtacgttggcagcggcgctgatgcagattggtggtggttcagcctttgcgctgatggtgccggtactggcaggttatattgccttctccattgccgatcgtccgggcctcacaccgggtctgattggcggtatgctggcggtcagcaccggttctggctttattggcggtataattgctggcttcctggctggttacattgcgaagttaatcagtacgcaattgaaactgccacagagtatggaggcgctgaaaccgatcctgatcattccgctaatttccagtctggtggtcggtctggcgatgatctacctaatcggtaaaccggttgctggcattctcgatgggttgactcactggctgcagaccatggggactgcgaatgcggttctgctgggggcgatcctcggtggcatgatgtgtactgacatgggcggtccggtaaacaaagcagcgtacgcattcggtgtgggtctgctgagtactcaaacctatggcccgatggcggcgattatggcggcaggtatggtgccaccgctggcaatgggtctggcaacaatggtggcgcgtcgcaaattcgacaaagcgcagcaggaaggtggcaaagccgctctggtacttggtctgtgctttatttcggaaggtgcaattccgtttgctgctcgtgatccgatgcgtgtgctaccgtgctgtatcgttggtggggcgctgactggcgcaatctcaatggcgattggtgcgaaactgatggcaccacacggtggtctgtttgttctgctgatccctggcgctattacgccggtattgggttacctggtagcaattattgccggtacgctggtggcgggtttggcctatgccttcctgaaacgcccggaaacacaaatagtagaaaaaaacgcataa

SEQ ID NO: 481787 - DNA, 939 bp, Shigella sonnei
atgagcagacgtgttgctacgatcacccttaatccggcttatgaccttgttggtttctgcccggaaattgaacgcggcgaagtgaacctggtgaaaaccaccggtctgcatgcggcgggtaaaggcatcaacgtggccaaagtattaaaagacctgggaattgatgtcaccgttggcggcttcctgggtaaagacaatcaggatggttttcagcaactgttcagcgagctgggcattgccaaccgtttccaggttgtacaggggcgcacccgaattaacgttaagctgacggaaaaagacggcgaagtgaccgacttcaacttctcgggttttgaagtcaccctcgccgactgggaacgctttgtgactgattctctgagctggctcggtcagttcgatatggtctgtgtcagcggaagcttaccgtcaggcgtcagcccggaagcgttcaccgactggatgactcgcctgcgtagtcagtgtccttgcattatctttgatagtagccgtgaagcgttagtagcaggtttgaaagcggcaccgtggctggtgaaacctaaccgccgcgagttggaaatctgggcaggccgtaaactgcctgaaatgaaagatgtgattgaagctgcacatgcgctacgtgaacaaggtattgcgcatgttgttatttcactgggtgccgaaggcgcgctttgggttaatgcctccggcgaatggatcgccaaaccaccgtcagtcgatgtcgtaagcaccgttggcgcaggggattctatggttggtggcctgatttatggcttgctgatgcgtgaatccagtgaacacacactgcgtctggcgacagctgttgcagccctggcggtaagtcaaagcaatgtgggtattaccgatcgtccgcagttggccgcaatgatggcgcgcgtcgacttacaaccttttaactga

SEQ ID NO: 481788 - DNA, 1131 bp, Shigella sonnei
atgttccagttatccgtacaggacatccatccgggcgaaaaggccggagacaaagaagaggcgattcgccaggtcgctgcggcgctggtgcaggccggtaatgtagcagaaggctacgtcaatggcatgctggcgcgcgaacagcaaacctcaacgttcctcggcaatggtattgctattccacacggcactaccgacacccgcgatcaggtgctgaaaaccggcgttcaggtatttcagttcccggaaggcgtcacctggggtgacggtcaggtagcgtacgtggcaatcggtattgctgccagctcggatgaacatctgggcctgctacgccagctgacccacgtactgagcgatgattccgttgctgaacaactgaagtcagcaacaacagcagaagaacttcgcgcattactgatgggcgaaaagcagagtgagcagctgaagctcgacaacgaaatgctgacgctggatatcgtcgccagcgatctgctgactcttcaggcgctgaacgctgcgcgtctgaaagtggtgggggcagttgacgccactttcgtcaccaaagccatcaatgaacaaccgctgaatctcggacagggtatctggctgagcgatagcgccgaaggcaatctgcgtagcgcgattgcggtaagccgtgcggcaaatgcttttgatgtggacggcgaaacggcagccatgctggtgagtgtggcgatgaatgacgatcagcccatcgcggttcttaagcgtctcgctgatttattgctcgacaataaagctgaccgcttgctgaaagcggatgcggcaacgttgctggcgctgctgaccagcgatgatgcgccgaccgacgacgtgttaagcgcggagtttgtggtgcgcaatgaacacggcctgcatgctcgtccaggtaccatgctggtcaataccattaaacaatttaacagtgatattaccgtgacaaaccttgatggcaccggcaaaccggcaaacggacgtagtctgatgaaagttgtggcacttggcgttaagaaaggtcatcgcctacgctttaccgcccagggtgcagatgctgaacaggcgctgaaagccattggcgacgctatcgctgctggtcttggggagggcgcataa

SEQ ID NO: 481789 - DNA, 1182 bp, Shigella sonnei
atgcataactcccccgcagtctccagcgcgaaatcgtttgacctgacctcgacggcgtttttaatcgttgcctttctcaccggtattgcgggtgctctgcaaaccccgacactcagtattttccttaccgatgaagtacatgcccgtccggcgatggtgggattcttctttaccggcagcgctgtcattgggattctggtaagtcagtttctcgctgggcgctctgataagcgcggcgatcgcaaatcgctgattgtcttttgctgcctgttaggcgtgctggcctgcaccctttttgcctggaatcgcaactactttgttttgctattcgttggcgtctttcttagcagctttggctcgaccgctaacccgcaaatgtttgcccttgcccgtgaacatgccgacaaaaccggacgtgaggcggtgatgttcagctcttttttacgcgctcaggtttcactggcatgggtcattggcccaccgctggcttatgcgttagcgatgggtttcagctttacggtaatgtatctgagcgcagcggtagcgtttattgtttgcggcgtgatggtgtggctgtttttaccgtcgatgcaaaaagagcttccgctggcgaccggcacggttgaagcgccgcgccgtaaccgtcgcgatacgctactgctgtttgtcatttgtacattgatgtggggctcgaacagcctgtacatcatcaacatgccgctatttattatcaacgaactgcatcttcccgagaaactggccgatgtgatgatggggaccgccgccgggctggaaatcccgacgatgttgattgccggatatttcgccaaacgtctgggtaagcgtttcttaatgcgcgttgctgccgtgggtggcgtctgtttttacgcaggaatgctgatggcgcattcacctgtcattctgttgggcttgcagctgctaaatgctatttttattggcattctgggcggcatcgggatgctctattttcaggatctgatgcccggtcaggcgggttcagccaccacgctctataccaacacttcgcgcgtgggctggatcatcgcaggatcagtggcgggcatcgtcgccgaaatctggaattatcacgctgtgttctggtttgcgatggtgatgattatcgccactctgttttgcttactgcggattaaagatgtttaa

SEQ ID NO: 481790 - DNA, 255 bp, Shigella sonnei; identical to SEQ ID NO: 471006

SEQ ID NO: 481791 - DNA, 573 bp, Shigella sonnei
atgccaagagcgaacgaaattaaaaaaggtatggtactgaattacaacggcaaactgctgctggttaaggatattgatattcagtcgcccactgcccgcggtgccgctacgctgtacaaaatgcgtttttctgatgtccgtaccgggctgaaagtagaagagcgtttcaaaggtgatgatatcgttgacaccgtgacgctgacccgccgttacgttgacttctcctatgtcgatggcaacgaatatgtctttatggataaagaagactataccccgtataccttcaccaaagatcagattgaagaagagttgctgtttatgccagagggcggcatgccggacatgcaggtgctgacctgggacggtcaactgctggcgcttgagctgccgcagaccgttgatctggaaatcgttgaaaccgcaccaggcatcaaaggggcatctgccagcgcccgtaacaaaccggcgacattgagcactggtctggtgattcaggtaccagaatacttaagcccgggcgaaaaaattcgtatccatatcgaagaacgccgttatatggggcgtgctgactaa

SEQ ID NO: 481792 - DNA, 1467 bp, Shigella sonnei
atgaagacaattgcctccgttacgctcccgcatcatgtacacgctccacgctacgatcgccagcagttgcaatcacgtatcgttcattttggctttggcgcctttcaccgcgctcatcaggcgttactgaccgatcgtgtgctgaatgcccagggcggcgactgggggatctgtgaaatcagcttgttcagcggtgatcaactgatgagccagctccgcgcacagaaccatttatataccgtgctggagaaaggtgcggacggcaatcaggtgataattgtcggtgccgttcacgaatgccttaatgcaaaactggattccttagcggcaattattgagaaattttgcgagccacaggtggcaattgtttccctgacgattaccgaaaaaggctattgtattgacccggccaccggtgcactcgacaccagtaatccgcggattattcacgatctacaaacccctgaagaacctcactccgcaccgggtattctcgtcgaagcactgaaacgccgccgtgagcgcggccttacaccgtttaccgtgctctcctgcgacaatattcccgacaatggccatgtggtgaaaaacgcggtgctgggaatggcagaaaaatgttcgccagaactcgccgggtggataaaaaaacacgtcagttttccgggaaccatggtcgaccgcattgttccggctgcaaccgacgaatcactggcagaaatcagccagcatctgggggtaaatgatccctgcgcgattagctgcgaaccgtttatccagtgggtggttgaagataacttcatcgctgggcgtcctgcctgggaagtcgcaggtgtacaaatggtgaatgatgtcctgccatgggaagagatgaaactgcgtatgcttaatggcagccactcttttctcgcttatctgggttacctctcaggattcgtccatatcagtgattgcatgcaggatcgcgtatttcgccatgctgccagaacattaatgctggatgagcaagcgccgacactgcaaattaaagatgtcgatttaacacaatatgcggataagttaattgcacgttttgctaatccgtcgctgaaacataagacctggcaaatcgcgatggatggcagccagaaattaccgcaacgtatgctggcaggtattcgcatacatctggggcgtgaaacggactggtcgttgctggcattaggcgttgctggctggatgcgttacgtcagcggcgttgatgatgccggaaatgccattgatgttcgcgatccgcttagcgataaaattcgcgaacttgttgcgggcagcagcagtgaacaacgcgtaaccgccctgctttccctgcgtgaagttttcggtgatgatctgccagataacccgcattttgtgcaggccatcgaacaagcctggcaacaaatcgtacaattcggcgcacatcaggcgctattaaacaccctcaaaatttaa

SEQ ID NO: 481793 - DNA, 987 bp, Shigella sonnei
gtgaccaggaccaacctcatcaccggttttctcggcagcgggaaaaccacgtcgattcttcatctgttagcccataaagatcccaacgaaaaatgggcggtactggttaatgaatttggggaagtcggaattgatggtgctttgctcgccgatagcggcgcattgctgaaagagatccccggcggctgcatgtgctgcgttaatggtttacccatgcaggtagggttgaataccttactgcgtcagggaaaaccagaccgcttgttgatagagccgaccgggctgggccatccgaaacagatcctcgatctgttaaccgcaccagtctatgaactgtggatagatctgcgcgccaccttgtgcattctcgatccacgcctgctgctggacgaaaaaagcgccagcaatgaaaacttccgtgaccagctggctgccgcagacatcattgtcgccaataaatccgaccgtgcgacgcccgaaagtgagcaagcgctacagcgttggtggcagcaaaatggtggcgatcgacaattaattcacagtgagcatgggaaagttgacggtcatcttctggatttgccgcgtcgcaatttagccgagttgcccgccagcgccgcgcattctcatcagcatgtcgtgaaaaaagggttagcagcgttaagcctgccagagcatcaacgctggcgtcgcagtctgaacagcgggcaaggatatcaggcctgcggctggatattcgacgctgatacggtattcgacaccattggcattctggaatgggcgcgacttgcaccggtggaacgcgtcaaaggcgtgctgcgtattcccgaagggctggtacgaatcaaccgtcagggcgatgacctgcacattgaaacgcaaaacgttgcgccaccggacagccgtattgagctgatttccagcagcgaagctgactggaatgctttgcagagcgcgctgttgaagcttcgtttagcgactaccgcgtaa

SEQ ID NO: 481794 - DNA, 714 bp, Shigella sonnei
atgattaaaaatttgccgcaaatagtgttgttgaatattgtcggcctcgcgctgtttctttcctggtatattcccgttaatcatggattctggttgccgattgatgcggatattttttatttctttaatcagaaactggtcgaaagtaaggcctttttgtggctggttgcattgaccaacaatcgcgctttcgacggttgttctctgctggcgatgggaatgttgatgctgagtttctggctgaaagaaaacgcccctggcagacgacgtatcgtgattatgggtctggtcatgctattaactgcagtggtattaaaccagctgggtcaggcattaattcctgtaaaacgggccagcccaacattgacttttaccgatattaaccgcgtcagcgaactgctctctgttcccacgaaagatgcctcacgagatagctttcccggcgatcacggcatgatgctgcttattttttcggcattcatgtggcgttatttcggcaaagttgcaggccttatcgcccttattatttttgtggtttttgcatttcccagagtaatgattggcgcacactggtttactgacatcattgtcggttcgatgaccgtgatattgatcggtttgccctgggtgttgctgacgccattaagtgatcgattaatcaccttttttgacaaatcactaccgggaaaaaacaaacatttccaaaacaaataa

SEQ ID NO: 481795 - DNA, 567 bp, Shigella sonnei
atggtcaaatctcaaccgattttgagatatatcttgcgcgggatccccgcgattgcagtagcggttctgctttctgcatgtagtgcaaataacaccgcaaagaatatgcatcctgagacacgtgcagtgggtagtgaaacatcatcactgcaagcttctcaggatgaatttgaaaacctggttcgtaatgtcgacgtaaaatcgcgaattatggatcagtatgctgactggaaaggcgtacgttatcgtctgggcggcagcactaaaaaaggtatcgattgttctggttttgtacaacgtacattccgtgagcaatttggcttagaacttccgcgttcgacttacgaacagcaggaaatgggtaaatctgtttcccgcagtaatttgcgtacgggtgatttagttctgttccgtgccggttcaacgggacgccatgtcggtatttatatcggcaacaatcagtttgtccatgcttccaccagcagtggtgttattatttccagcatgaatgaaccgtactggaagaagcgttacaacgaagcacgccgggttctcagccgcagctaa

SEQ ID NO: 481796 - DNA, 1494 bp, Shigella sonnei
atgattgcgatactggttagctgccttcagtttttagtggcctggcataagcacgaagtcaaatacgacacactgattatcgacgtacaaaagtatctcgatacctattttgccgacctgaaatccactactgaccggcttcagccgctgaccttagatacctgccagcaggctaaccccgaactgaccgctcgcgcggcgtttagcatgaatgtccgtacgtttgtgctggtgaaagataaaaaaacattctgttcatctgcgactggtgagatggacattccactcaatgaattgattccggcgctcaacattaataaaaacgtcgatatggcgatcttacccggcacgccgatggtgccgaacaaacccgcaatcgtcatctggtatcgcaaccctttgctgaaaaatagcggtgtgtttgccgctctgaatctcaacctgacgccttctctcttttatagttcacggcaggaagattacgatggcgtcgccctcattattggcaatactgcgctatctaccttttcttcacgtttgatgaacgttaatgaattaaccgacatgccggtccgtgaaactaaaattgcgggcattcctctgaccgttcggctttatgcggatgactggacatggaacgatgtgtggtacgcatttttactgggcggcatgagtggaactgtcgttggcctgctctgctattacctgatgagcgtacgtatgcgccccggcagagaaatcatgaccgccatcaagcgcgaacaattttacgtggcgtatcaaccggtggtggatacacaagctttgcgagtaacgggcctggaagtactgctacgctggcggcatcctgtcgcgggagaaattcccccggatgccttcattaactttgccgaatcgcaaaagatgattgtgccgctgactcagcacctgtttgagttaattgcccgcgatgccgcagaattagaaaaagtgctgccagtaggcgtcaaatttggtattaacattgcgccggaccatctgcacagcgaaagctttaaagcagatatccagaaactgctcacttccctgcccgcacaccatttccagattgtgctggaaattaccgagcgcgatatgctgaaagagcaagaagccacacaactcttcgcctggctgcactcggtcggcgtagaaattgctattgatgacttcggcaccgggcacagcgcgcttatctatcttgagcgttttacgctcgattatctgaaaattgaccgtggatttatcaacgccatcggtacggaaacgatcacttcacccgtacttgacgcggtgctgacgctggcgaaacgcctcaatatgctgacggttgctgaaggggtcgaaacgccggaacaggcgcgatggctaagcgaacgcggcgttaatttcatgcaaggctactggattagtcgccctttaccgctggacgattttgtccgctggctgaagaaaccgtatacgccgcagtggtaa

SEQ ID NO: 481797 - DNA, 1815 bp, Shigella sonnei
atgattgtgcgcatactgctgctgtttatcgctctgttcacctttggtgtgcaggcgcaggctatcaaggaaagctatgcctttgccgtgctgggcgaaccccggtacgcgtttaatttcaaccattttgattatgtgaaccccgccgcgccaaaaggtgggcagataacgttgtcagccctcggcaccttcgataatttcaaccgctatgcactgcgcggcaacccgggcgcacgcaccgagcagctgtacgacacgctatttacgacttccgatgacgaaccaggcagttattacccgctgattgctgaaagcgcacgctatgctgacgattattcctgggtggaggtcgctattaatccgcgcgcccgttttcatgatggttcgcccattactgcccgcgatgtagagtttacttttcaaaaatttatgaccgaaggcgtgccgcaatttcgtctggtctacaaaggcaccaccgtcaaagccattgcaccgttaaccgtgcgcattgagttagctaaacccagcaaagaagatatgctgagtctgttttcgctgccgatatttccagaaaagtactggaaggatcacaaacttagcgacccgctcgccacgcctccgcttgccagtggtccgtaccgcgttacgtcctggaaaatggggcaaaatattgtctattcccgcgtgaaagattactgggcagcaaacttaccggtaaaccgtggacgctggaatttcgacaccattcgctacgattattacctcgatgataatgtcgcctttgaagcgtttaaagcaggtgcctttgatttgcgtatggaaaacgacgctaaaaactgggccacgcgttataccggtaaaaatttcgataaaaaatacatcatcaaagatgagcaaaagaacgaatcagcccaggatacgcgctggctggcgtttaatatccaacgtccggtattcagcgatcgccgggtccgggaagcaatcactctcgcctttgactttgaatggatgaacaaggcgttgttttacaacgcctggagtcgcacgaacagttattttcagaataccgaatacgcggccagaaattaccccgacgccgcggagctggtgcttctggcaccaatgaaaaaagatctaccgccagaagtcttcacacaaatctaccagccgccggtatctaaaggcgatggctacgatcgtgacaacctgttaaaagccgacaaacttctcaacgaaacgggctgggtgctgaagggtcagcaacgcgttaatgccacaacgggtcagccgctcagctttgaattattgcttcccgcaagcagcaatagtcagtgggtattgccgttccagcacagcctgcaacggctgggtatcaatatggacattcgcaaggtggataactcgcaaatcactaaccgcatgcgcagtcgcgactatgacatgatgccgcgcctatggcgggcgatgccgtggcccagttccgatttacagatttcctggtcatcggaatatatcaattccacttataatgcccccggcgtgcaaagcccggttatcgactcgctgatcaaccaaattattgccgcgcagggaaataaagaaaaattactgccgttggggcgagcactggatcgcgtattaacgtggaattattacatgctgccaatgtggtacatggcggaagaccgtctcgcctggtgggataaattctcccaacccgctgtacgccctgtttacagcctgggtatcgatacctggtggtatgacgttaataaagcggccaaactgccgtcagccagacaacagggagagtag

SEQ ID NO: 481798 - DNA, 1095 bp, Shigella sonnei
atgggcgcttacctgattcgccgtctgttgctggtgatcccaacgttatgggctattatcactatcaactttttcatcgtgcaaattgcgcctggcggtccggtcgatcaggccatcgccgccattgagtttggtaatgccggagtattacccggcgcaggcggtgaaggtgttcgtgccagccatgcgcaaacgggtgtcggcaatatcagcgacagtaattaccgtggcggacgcggattagacccagaagtgatcgctgagatcactcatcgctacggtttcgataagccgatccacgaacgttacttcaaaatgctctgggactacatccgctttgattttggtgatagcctgtttcgcagcgcctcggtgctgacgctgattaaagacagtctgccggtttccatcaccctcggattgtggagcacgctgattatctatctggtgtcgattccgttaggcattcgcaaagctgtttataatgggagtcgctttgacgtctggagtagcgcatttatcatcatcggctacgccattccggcctttttgtttgccatcctgctgattgtcttcttcgcgggcggcagctatttcgacctgttccctctacgcggcctggtttccgctaactttgattcgctgccgtggtatcagaaaatcaccgattatctgtggcatatcacgctaccggtgctggcgacagtgattggtggctttgcggcgctgaccatgctgaccaaaaactcattccttgatgaagtgcgcaagcaatacgtggtgaccgcgcgtgcgaaaggggtaagtgagaaaaacattctctggaaacatgtgttccgcaacgccatgctgctggtgattgccggttttccggcgacgtttatcagcatgttttttaccggctcgctgctgattgaggtgatgttttcactcaatggtcttggcttactgggctacgaagcgaccgtctcgcgcgattatcctgtaatgtttggtaccttgtatattttcaccctgattggcctgctgctgaatattgtcagtgatatcagctatacgctggttgatccgcgtatagattttgagggacgttaa

SEQ ID NO: 481799 - DNA, 1026 bp, Shigella sonnei
atgtcgcgactcagccccgtcaatcaggcccgttgggcgcgttttcgtcataaccgtcgcggctactggtcgttatggattttcctcgttttgtttggtttgagtttgtgttctgaacttatcgctaacgataaaccgttgctggtgcgttatgacggcagttggtatttcccgttgttgaaaaactacagcgaaagcgattttggcggcccgctggcaagtcaggctgattatcaggacccgtggctgaaacaacggctggaaaataacggctgggtactgtgggcaccgattcgctttggtgctaccagtatcaactttgctaccgataagcccttcccttctccaccctcccggcaaaactggctgggaacggatgccaacggcggcgatgtgctggcacgcattctctatggcacgcggatctcggttctgtttggcctgatgctgactctctgttccagcgtgatgggcgtgctggcgggggcgctacaaggctattacggcggtaaagtcgatctctggggacaacgctttattgaagtatggtcggggatgccgacgctgtttttgattattttactttccagcgtcgtacagcctaacttctggtggctgctggcaattactgtcttgtttggctggatgagtctggtcggcgtggtgcgggcggagtttttacgtactcgtaatttcgactacattcgtgcggcacaggcgcttggcgtcagcgatcgcagtatcatcctgcgtcatatgttgcctaatgccatggtcgcgaccctcacctttttaccgtttattttatgtagttcgataaccaccctgacctcgctcgatttcctcggcttcggtctaccgctcggttcaccgtcactcggtgaactgctgttacaagggaaaaataaccttcaggccccgtggcttgggatcaccgccttcttgtcggtggcgatattattgtctttgctgatctttattggtgaagccgtccgcgacgcatttgatcctaataaggcggtgtag

SEQ ID NO: 481800 - DNA, 1590 bp, Shigella sonnei
atgacgcaaactctgttagcgattgaaaatttgtcggtgggttttcgccatcagcaaaccgtacgtacagtagtcaatgatgtttcactacagattgaggctggcgaaacgctggcgctggtgggtgagtcaggttcaggcaaaagcgttaccgcgctgtcaattttacgcctgctcccttccccgccggttgaatatctctccggcgatattcgttttcatggcgaatcgctgcttcatgccagcgatcaaacgttgcgcggtgtacgcggtaataagatcgccatgatttttcaggaaccgatggtgtcgttaaatccattgcataccctggaaaaacagctttatgaagtgctttcactccaccgcgggatgcgtcgggaagcggctcgtggcgaaattcttaactgccttgatcgcgtcggtatccgccaggcggcaaaacggctgacagattatccgcatcagctctccggcggcgaacgccagcgggtgatgattgcgatggcgctgttaacgcgaccggaattattaattgccgatgaaccgaccaccgcactggacgtctctgtccaggcgcagattttacagctgttgcgcgaactgcaaggcgagctgaatatgggcatgctgtttattactcataacctcagcattgtcagaaaactggcccaccgcgtggcggtaatgcaaaacggtcgctgtgtcgagcaaaataacgccgctacgctatttgcctcacccactcatccttacacacaaaagctactcaacagtgaaccgtcaggcgatccggtaccgttgccagaacctgcctcaacgttgctggatgttgaacagcttcaggttgccttccccattcgcaaagggattttgaagcgcattgtggatcataatgtggtggtgaaaaacatcagttttacgctacgggcgggtgaaacactgggtttagtgggcgagtctggttccgggaaaagcacgacgggactggcgctgctgcgactgattacctctcagggcagcatcgtctttgacggtcagccactgcaagatttaaatcgccgccagctgttacctactcgtcatcgtattcaggtggtatttcaggatccaaactcctcgctcaacccacgactcaacgttttgcagattattgaggaaggcttacgggttcaccagccgacgctttctgccgcacaacgcgaacaacaagtgatagccgtgatgcatgaagtgggattagatcctgaaacacgccaccgttatccggcggagttctctggtggtcagcgacaacgtattgcgattgccagggcattaattcttaagccctcactgatcatacttgatgaaccgacatcatcactcgacaaaacggtacaggcgcaaatattgacgctattgaaatcattgcaacaaaagcatcaactggcctatttgtttatcagccacgatttgcacgttgtccgcgcgttatgtcatcaggttatcgtactgcgacaaggggaagtagtggaacaaggaccgtgcgcgcgcgtgtttgccgcaccgcagcaggagtatacgcgtcagctactggcgttgagctga

SEQ ID NO: 481801 - DNA, 345 bp, Shigella sonnei
gtgacttcattacaactctcaatcgtccatcgtctaccgcagaactttcgctggtctgctggtttcgcaggttcgaaggttgaaccgattccgcaaaatggaccgtgcggtgacaacagcctggtggcgcttaaattgcttagcccggatggtgataatgcatggtcggtgatgtataaactaagccaggcgttaagcgacatcgaagttccatgttcggtgctggagtgtgaaggtgagccgtgcctgtttgtaaatcgccaggacgagtttgctgcaacatgccgattgaaaaattttggtgtggcaattgccgaacccttttcaaactacaatcctttttaa

SEQ ID NO: 481802 - DNA, 537 bp, Shigella sonnei
atgctggccagcggtttcagctttgccggaatgttctcgttcctgagcgccggaccgtttgtctacattgaaatcaaccacgttgcaccggaaaactttggttattactttgcgctaaacattgtttttctgttcgtgatgaccatctttaacagccgcttcgtccgccgcattggcgcgttaaatatgttccgctcggggttgtggatacaatttattatggcagcgtggatggtcatcagtgcgctgctggggctgggattctggtcgctggtggttggcgttgcggcgtttgtgggctgcgtgtctatggtgtcatccaatgcgatggcggtcattcttgatgagtttccccatatggcgggaacggcatcttcgctggcaggaaccttccgttttggcataggggcaattgttggcgcattgctttctcttgcgacctttaactctgcatggccgatgatttggtcaattgcattctgcgcaaccagctccattctcttctgtctgtacgccagtcgaccgaaaaaacggtga

SEQ ID NO: 481803 - DNA, 579 bp, Shigella sonnei
gtgaccacccgacagcattcgtcgtttgctattgtttttatccttggcctgctggccatgttgatgccgctgtcgattgatatgtatctgcccgcgctaccggtaatttcagcgcagtttggcgtaccggcgggcagtacgcagatgaccctgagtacttatattctgggctttgcgttggggcagttaatctacgggccgatggcagacagcttcgggcgtaagccggtggttcttggcggtacgctggtgtttgccgccgccgcggtggcgtgtgcgttggcacaaaccatcgatcagctgattgtgatgcgtttcttccacgggctggctgcggctgcggccagcgtggttatcaacgctttgatgcgtaatatttacccgaaagaagagttctcgcggatgatgtcgtttgtcatgctggtgacgaccattgcaccgctgatggcaccgatagttggcggctgggtgctggtgtggctgagctggcattacatcttctggatcctcgccagccttttcacattcgtaccactattggtaactttgcggcgctgttccgtcataagcgtgtcctga

SEQ ID NO: 481804 - DNA, 696 bp, Shigella sonnei
atgcgacttgataaatttatcgcacagcaactcggcgttagccgtgctattgccgggcgtgaaatccgcggcaatcgtgtcaccgtcgatggcgaaatcgtccgtaatgcagcgttcaaactgcttcctgaacatgatgtcgcttacgatggcaacccgctggcgcagcaacacggtccacgttacttcatgctcaataagcctcagggttatgtttgctccacggacgaccctgatcacccaacggtgctctattttctagatgaaccggtagcgtggaaactgcacgccgcagggcggctggatatcgataccaccggtctggtactaatgacagatgatggtcagtggtcgcaccgcattacttctccgcgccatcattgcgagaagacctatctggtgacgctggtatcacccgtagctgacgatacggcagaacaatttgctaaaggcgtgcagctgcataacgaaaaagatctcactaagccggcggtgctggaagtgattaccccaacgcaggttcgtctgaccatcagcgaagggcgttatcatcaggtgaaacgcatgttcgccgccgtgggtaaccatgtggttgagctgcatcgtgaacgtattggcggcattacgctggatgctgatttagcccccggtgaatatcgtccgttaactgaagaagaaattgccagcgtcgtctaa

SEQ ID NO: 481805 - DNA, 1761 bp, Shigella sonnei
atgatttttacacttcgcccatatcagcaagaagccgtggatgccacgctcaaccattttcgtcgtcataaaacccctgccgttatcgtgctgcccaccggtgcaggtaaaagcctggtgatagcggaactggcacggctggctcgtggtcgcgtactggtgctggcacacgttaaagaactggtggcgcaaaaccatgcaaagtatcaggcgctggggctggaagccgatatttttgccgccgggctgaagcgtaaagagagccacggtaaagtggtatttggcagtgtgcagtcggtcgcccgtaatattgatgcctttcagggtgaattttcgctgttgattgtcgatgaatgtcaccgtattggtgacgatgaagagagccagtatcagcaaatcctcactcacctgacaaaagtgaatccccacttacgcctgctggggctgactgccacgccttttcgattgggcaaaggttggatctaccagttccattatcacggcatggtacgcagcgatgagaaagcccttttccgtgactgcatttatgagctgcccctgcgttatatgattaaacacagctatctgacgccgccagaacgactggatatgccagtagtgcaatatgatttcagccgcttgcaggcacagagcaacgggctgttcagcgaagccgatctcaaccgtgagctgaaaaaacagcaacgtattaccccgcacatcatcagccagattatggagttcgccgaaaagcgtaaaggagtgatgattttcgccgcgacggtcgaacacgcaaaagagattgtgggattactgcctgccgaagatgcagcactgattactggcgacacccccggcgctgagcgcgatgtgttaattgaaaattttaaagcccagcgttttcgctatctggtcaacgtcgcggtactgaccaccggatttgacgccccgcacgtcgatcttatcgccattctgcgccctaccgaatcagtgagtctttaccaacaaattgtcgggcgcggtctgcgtctcgctccgggcaagactgattgtttaattcttgattatgcgggtaatcctcacgatctctacgcgccggaagttggtacaccgaaaggcaaaagtgacaacgttccggtacaggttttctgccctgcctgcggttttgccaacaccttttgggggaaaacgaccgccgacgggacattgattgaacactttggtcgccgctgtcagggatggtttgaagatgacgacggtcatcgcgaacagtgtgacttccgtttccgttttaaaaattgcccgcaatgtaacgcagaaaatgatattgccgctcgccgctgccgcgaatgtgacacggtactggttgatccggatgatatgttaaaagcggcgctacgactgaaagatgcgctggtattacgctgtagcggcatgtctttgcagcatgggcacgacgagaaaggcgaatggttgaaaatcacctattacgatgaagacggtgcggatgtgagtgagcgtttccgtctgcaaacacctgcccagcgtaccgccttcgagcagctttttatccgcccgcatacgcgcacaccgggcatcccgctgcgctggatcaccgccgccgatatcctcgcccagcaagccttattgcgacccccggattttgtcgtcgcccgcatgaaaggccagtactggcaggtgcgtgaaaaagtgttcgattacgaaggtcgttttcgtcgggcgcacgaattacgcggttaa

SEQ ID NO: 481806 - DNA, 285 bp, Shigella sonnei
atgtttactatcaacgcagaagtacgtaaagagcagggtaagggtgcgagccgccgcctgcgtgccgctaacaagttcccggcaatcatctacggtggcaaagaagcgccgctggctatcgagctggatcacgacaaagtcatgaacatgcaagctaaagctgaattctacagcgaagttctgaccatcgttgttgacggtaaagaaatcaaagttaaagctcaggacgtacagcgtcacccgtacaaaccgaagctgcagcacatcgacttcgttcgcgcttaa

SEQ ID NO: 481807 - DNA, 1008 bp, Shigella sonnei
atgagtctggatatcaaccagattgctctgcaccagcttatcaagcgtgatgagcagaaccttgagctggtgttgcgcgattcattgctggaaccgacagaaaccgtcgttgagatggtggcagaactgcatcgggtctatagcgccaaaaataaagcttacggcttgtttagcgaagagagtgaactggcgcagacgctgcgcttacagcgtcagggcgaagaggactttctggcatttagccgcgcggcaactggtcgcctgcgtgacgaattagcgaaatatccttttgctgacggtggattcgtgctgttttgccactaccgttatctggcggtggagtatctgctggtggcagttctgagcaacctgagcagtatgcgtgttaacgaaaatctcgacatcaacccaacccattatcttgatatcaatcatgcggatattgttgcgcgtatcgatttaaccgaatgggaaaccaatccagagtccacccgctatctcactttcctgaaagggcgagtagggcgcaaagtggcggatttctttatggatttcctcggggccagcgaaggattgaacacgaaagcacaaaaccgtgggctgttgcaagcggttgatgatttcactgccgaagcacaactggataaagcagagcgacagaacgtgcgccagcaggtttatagctactgtaatgagcagctgcaggcaggcgaagagatcgaactggaatcgctgtcgaaagagctggcaggcgtaagcgaagtgagcttcacggagtttgcggctgaaaaaggctacgaactggaagagagcttcccggcagaccggagcacactgcgtcagttgacgaagtttgccggtagcggcggtggcttgactattaactttgatgcgatgctgttaggtgaacgcatcttctgggagccggcgaccgataccctgaccattaaaggcacgccgccgaatttgcgcgaccaattgcagcgccggacgtctggcggcaattaa

SEQ ID NO: 481808 - DNA, 228 bp, Shigella sonnei; identical to SEQ ID NO: 27937

SEQ ID NO: 481809 - DNA, 1761 bp, Shigella sonnei
atggtaactcatcgtcagcgctaccgtgaaaaagtctcccagatggtcagttgggggcactggtttgcactgttcaatattctgctttcgctcgtcattggcagccgttacctgtttatcgccgactggccgacaacgcttgctggtcgcatttattcctacgtaagcattatcggccatttcagcttcctggtgttcgccacctacttgctgatcctcttcccgctgacctttatcgtcggctcccagaggctgatgaggtttttgtccgtcattctggcaacggcgggaatgacgctattactgatcgatagcgaagtctttactcgtttccatctccatcttaatcccatcgtctggcagttggttatcaacccagacgaaaatgagatggcgcgcgactggcagctgatgttcatcagcgtgccggttattttattgcttgaactggtgtttgcgacgtggagctggcaaaagctgcgcagcctgacgcgtcgtcgacgcttcgcgcgcccgctggccgcattcttatttatcgcctttatcgcctcgcatgtggtgtatatctgggccgatgccaacttctatcgcccgatcaccatgcagcgcgctaacctgccgctttcgtacccgatgacggcgcgacgttttcttgagaagcatggtctgcttgatgcgcaggagtatcaacgccgtcttattgagcaaggtaatccagacgccgtttccgttcagtatccgttaagcgaactgcgctatcgcgatatgggcaccgggcagaatgtgctgttgattactgtcgatggcctgaactactcacgcttcgagaagcagatgcctgcgctggcaggttttgctgagcaaaatatttcgttcacgcgccatatgagctccggcaacactacagacaacggcatctttggcctgttctatggtatctcgccgagctatatggacggcattctgtcgacccgtacgcctgcggcattaattactgcgcttaatcagcaaggctatcagctggggttattctcatcagatggctttaccagcccgctgtatcgccaggcattgttgtcagatttctcgatgccgagcgtacgcacccaatccgacgagcagaccgccacgcagtggatcaactggctgggccactacgcacaagaagataaccgctggttctcgtgggtttctttcaatggcactaacattgacgacagcaatcagcaggcatttgcacggaaatatagccgggcggcaggcaatgtcgatgaccagatcaaccgcgtgctcaatgcactgcgtgattctggcaaactggacaatacggttgtgattatcactgccggtcggggtattccgctgagcgaagacgaagaaacctttgactggtcccacggtcatctgcaggtgccattagtgattcactggccaggcacgccggcgcagcgtattaatgcgctgactgatcataccgatctgatgacgacgctgatgcaacgcctgctacatgtcagcacacctgccagcgaatattcgcaaggtcaggatttgttcaaccctcaacgccgtcattactgggttactgcagcggataacgatacgctggcaattaccaccccgaaaaagacgctggtgctgaacaataacggtaaataccgcacttacaacttacgtggtgaaagagtgaaagatgaaaaaccacagttaagtttgttattgcaagtgctgacagacgagaagcgttttatcgctaactga

SEQ ID NO: 481810 - DNA, 1092 bp, Shigella sonnei
gtgacggacacgggggccagcccggcagcaggagatagccttacactggtaacgacgggcggcggtgatgctgcattcacgttgggcaatgccggaggcgttgttgatatcggtacgtatgaatataccttgctggataatggcaaccatagctggagcctcgcagagaatcgcgcgcaaattaccccttcaaccactgatgtgctgaacatggcagcagcacaaccgctggtatttgatgcagaactggacaccgtgcgtgagcgtcttggtagcgtaaaaggcgttaattacgatacggcgatgtggagttcggcaattaacacccgcaacaacgtgaccactgatgcgggagctggctttgagcaaacattgacgggcctgacgctcggtatcgatagccgtttctcccgtgaagaaagcagcacaattcgcggcttgttctttgattactctcattctgatattggttttgatcgcggcggcaaaggcaatattgatagctacaccctgggggcttatgccggttgggagcatcagaacggtgcctatgttgatggggtggtgaaagttgaccgttttgccaacaccatccatggcaagatgagtaatggggcaacagcgtttggcgattacaatagtaacggcgcgggtgctcatgttgagagcgggttccgttgggttgacggattgtggagtgttagaccctatctcgcctttaccggctttaccacagatggtcaggactacacgttatcaaacggcatgcgcgcggatgtgggaaatacccggatattacgcgctgaagcgggaacggcggtaagctatcacatggacctgcaaaacggtacgacgttggaaccctggctgaaagccgccgtgcgtcaggaatacgccgattctaaccatgtgaaagttaatgacgatggcaaatttaataatgatgtggctggaacccgtggcgtttatcaggctgggataaggtcatcgtttaccccgacgttaagcggtcatttgtcagtcagctatggcaatggcgcaggggtagaatcgccgtggaatactcaggcgggagtggtctggacgttctga

SEQ ID NO: 481811 - DNA, 1164 bp, Shigella sonnei
gtgtctggaaatataggggcaaatccaggcgcggcgaatgatcccacgattaaaggcgggcgcttaattgttgaaaaagatgggattgccgtctttgccgctatcgaaaagggaggattactggaggttaaagacgggggattagcatttgcggtagatcagaaagcaggcggtgctattaaaacaaccacgcgggtcatggaggtattcggaacaaaccgtctcggtcagttcgaaatcaagaatggtattgctaacaatatgctgttggaaaacggcggaagtttgcgagttgaagaaaatgacttcgcttataataccactgtggatagtggcggcttactggaggttatggatggcgggactgcaactggcgttgataaaaaagcaggcgggaaattaattgtctcaacgaatgcgctggaagtgagtggtacaaacagtaaaggccaatttagtataaaggatggtgtgtcaaaaaattatgaactggatgatggctccgggctcattgttatggaggacactcaggccattgacactatccttgatgagcatgccactatgcaatcgctgggaaaggatactggtacgaaagtgcaggcaaatgctgtatatgatctcggtcgatcagatcagaatggaagtatcacgtattcctctaaagccatctctgaaaatatggttatcaacaatggccgcgctaatgtctgggctggcacaatggttaacgtgtcagtcagagggaatgatggcattcttgaggtcatgaagccgaaaataaattatgcacccgctatgttggtgggtaaggtagtggtttctgagggcgcttcttttagaacgcatggtgccgtggataccagccaagcggacgtttcgctcgaaaatagcgcatggaccatcattgccgatatcactacgacgaaccaaaacactcgcctcaacttagccaaccttgcgatgtccggcgcaaatgtgattatgatggctgagccagtgactcgttcatctgtgacggcaagtgcggaaaatttcattacgttgaccaccaataccctgtcgggaaacggcaattttatatgcgtaccgatatggctaatcatcagagcgatcagctcaacgtcatcggtcaggcaacaggtgatttcaaaatattcgtga

SEQ ID NO: 481812 - DNA, 381 bp, Shigella sonnei
atgctgggagcggtggaacgccgcttcggcaacgagcttccggcgtctccagtagagtggctgacggataatggttcatgctaccgggctaatgaaacacggcagtttgcccggatgttggggcttgaaccgaagagcacggcggtgcggagtccggagagtaacggcatagcagagagcttcgtgaaaacgataaagcgtgactacattagtgtcatgcccaaaccagacgggttaacggcagcaaagaaccttgcagaggcgttcgagcattataacgaatggcatccgcatagtgcactgggttatcgctcgccacgggaatatctacggcagcaagccagtaatgggttaagtgataacaggtgtctggaaatatag

SEQ ID NO: 481813 - DNA, 705 bp, Shigella sonnei
atgagaaacaaactctctttcgacttgcagttgagcgccagaaaagcggcaatcgctgaacggattactgcccataaaattgcccgcagcaaagtgtcggtctttttaatggcgatgtccgctggcgtgtttatggcgattggatttactttttacctttccgttatcgccgatgccccgtcttcacaggcattaacccatctggtgggcggcctttgctttacactcggctttattttgctggcggtttgtggcaccagcctgttcacctcgtcggtaatgacggtgatggcaaaaagtcggggcgttattagttggcgaacttggctgattaacgcacttctggtggcctgcggtaatctggcaggtattgcctgtttcagtttgttaatctggttttccgggctggtgatgagtgaaaacgcgatgtggggagtcgcggttttacactgcgccgagggcaaaatgcatcatacatttactgaatctgtcagcctcggcattatgtgcaatctgatggtttgtctggcgctgtggatgagttattgcgggcgttcattatgcgacaaaatcgtcgccatgattttgcccatcaccctgtttgtcgccagtgggtttgagcactgtatcgccaatttgtttgtgattccgttcgccattgccattcgccatttcgccccgttactttattcgtaccccttataa

SEQ ID NO: 481814 - DNA, 2013 bp, Shigella sonnei
atggctatgtcagacgaggcgatgtttgccccgccgcaaggaataacaattgaagcggtaaacggaatgctcgcggagcggttagcgcagaaacacggtaaggcgtctttattacgcgccttcatcccgctgccgccgccgttcagcccggtacaacttattgaactgcatgttctcaaaagcaacttctattaccgctaccatgatgatggcagcgatgtgacggcaacaacagagtatcagggcgagatggtcgattattcgcgtcacgccgtccttctcggcagtagtggaatggcggagctacgctttattcgcacccacggctgccgttttactccccaggattgcacactgtttaactggctggcgcggataatcaccccggttctgcaatcatggctcaatgatgaagaacagcaggtggcgctgcgtttgctggagaaagatcgcgatcatcatcgggtactggttgatattactaatgcagtgctgtcacatcttgatctcgacgatctgatcgctgacgtcgctcgtgagatccatcattttttcggtctggcttcagtcagtatggtactgggcgatcatcgaaagaacgagaagtttagcctgtggtgcagcgatctttctgcctcacattgtgcgtgtctgccacgcaatatgcctggcgacagtgtattgctgacacaaacgctacaaacccgacaaccgaccttgacgcaccgtgcagacgatctgtttctctggcaacgcgacccgttattactcttacttgcatctaacggctgcgaatctgcgctccttataccgcttacctttggcaaccatacaccgggtgcattgttgctggcgcatacctcttccactctctttagtgaggaaaactgtcagctactacaacacatagccgatcgcatcgctattgccgttggcaatgccgatgcctggcgtagcatgaccgatttgcaggaaagtttgcagcaagaaaaccaccagcttagcgagcagctcctttcgaatctgggcgtcggtgacattatctatcaaagccaggcaatggaagacctgctccagcaggtagatattgtggcgaagagcgacagtacagtgttgatttgtggtgaaaccggaaccggcaaagaggtgatcgccagagcgatccatcaacttagcccgcgacgcgacaagccgctggtcaaaatcaactgcgctgccatccccgccagtcttctggaaagtgagttattcggtcatgacaaaggggcgtttactggtgcgattaatacccatcgtggtcgttttgaaattgccgatggcggcacgttgtttcttgatgaaattggcgatctgccgttagaacttcagcctaaactgctgcgcgtattgcaggagcgggagattgagcgtctcggcgggagtagaacgatcccggtgaatgtcagagtcattgccgccaccaaccgtgatttgtggcaaatggttgaagatcgccagtttcgcagcgatctcttttatcgcctgaatgtcttcccactggaattgccgccgctacgcgaccgtccggaagatatccctcttttagcaaagcatttcacgcaaaaaatggcgcgccatatgaatcgttcaattgacgccatcccgaccgaggcgctacgccagttgatgtcgtgggactggccgggcaacgtgcgcgagctggaaaacgtgattgagcgagcggtactgctgactcgcggtaacagtctgaatttacatcttaatgtccgacaaagccatttactgccgacgctaaatgaagattcagcgcttcgcagttcaatggcgcagttgctgcacccgacgacgccagagaatgacgaagaagaacgtcagcgcattgttcaggtattgcgagaaaccaatggcattgttgccgggccccgtggcgcggcgacacgattagggatgaagcgcaccacgctgctgtcacgaatgcagcgtctggggctctcggttcgcgaggtgttgtaa

SEQ ID NO: 481815 - DNA, 414 bp, Shigella sonnei
atgactgaagagtgcggggaaattgttttctggacgctgcgaaaaaagtttgtcgccagtagcgacgagatgccggaacacagctctcaggtaatgtattactcgctggctatcggtcatcacgttggcgtgattgattgtctgaatgtcgccttcccctgcccactgacggaatacgaagattggcttgcactggtcgaagaggagcaagcccgacgtaagatgctgggggtgatgacttttggtgagattgttattgacgccagccacaccgccctgttgacccgggcattcgcgccactggcggatgacgcgacgtctgtgtggcaggcgcgtagcattcaattcattcatctgttggatgaaattgtgcaggaaccggccatctatctgatggccagaaaaattgcgtga

SEQ ID NO: 481816 - DNA, 759 bp, Shigella sonnei
atgagtccagtgcttacacaacatgtcagccagcccatcacgctggacgagcaaacgcaaaagatgaagcagcatttgctacaggatatccgtcgctcggcttacgtttatcgcgtcgattgcggcggctgcaacgcctgtgaaatcgaaatttttgccgccatcacaccagtattcgacgcagaacgttttggcattaaggttatttcatcaccgcgtcacgccgatattttgttatttacaggcgcagtcacccgggcgatgcgtatgcctgcacttcgggcgtatgagtctgcccccgatcataaaatttgtgtttcctacggcgcgtgcggtgtcggcggcggtattttccacgatctctacagcgtctggggcggcagcgacaccattgtccccattgatgtttggatccccggctgcccgccaacaccggccgccaccattcacggtttcgccgtggcgctcggtttgctgcaacagaagattcacgcggtggattatcgcgatcccaccggggtgactatgcaaccgttgtggccgcagatcccgccatcacagcgtatcgccattgagcgagaagcgcggcggctggcgggctatcgtcaggggcgagaaatttgcgatcggctcctgcgccatttaagcgacgatcctacaggaaatcgggttaacacctggttgcgcgatgccgacgatccacgtctcaatagtatcgttcagcaactctttcgcgtactccgggggttacatgactga

SEQ ID NO: 481817 - DNA, 540 bp, Shigella sonnei
atgctgaagttactgaaaactattatgcgcgccggaaccgcgacggtgaaatatcccttcgcgccactggaggtcagcccaggctttcgcgggaaaccggacctgatgcccagccaatgtattgcctgcggcgcctgtgcttgtccggcaaatgcgctgactatccagaccgacgaccagcaaaattcgcgcacctggcagctctatctgaggcgttgtatttactgcggacgttgtgaagaagtgtgcccgaccagagccatccagcttaccaataactttgaactgaccgtcaccaataaagccgatctctatacccgcgcgacgttccatctacaacgttgcagccgttgcgaacgcccgtttgccccgcaaaaaaccgtcgcactggctgctgaattgttggcacagcaacaaaatgcgccacaaaaccgcgaaatgttatgggcgcaagcgagcgtctgcccggagtgcaaacaacgcgcgacgctgctcaacgacgatacagatgtaccgctggtggctaaggagcagctatga

SEQ ID NO: 481818 - DNA, 1716 bp, Shigella sonnei
gtgaacgttaattcatcgtcaaatcgtggcgaagcgattctcgccgccctgaaaacgcagttccccggcgcggtgctggatgaagagcgacaaacgcctgaacaggtcaccattacggtgaaaatcaatctgctgcctgacgttgtacattatctttattatcaacatgatggctggcttccagtcctgtttggcaacgacgagcggacacttaacggtcattacgcggtttattatgccctttcaatggaaggggccgaaaaatgctggatcgtggtgaaggcactggtcgatgccgacagtcgggagtttccgtcagtcacaccgcgcgtccctgccgcggtctggggcgagcgagaaattcgcgatatgtacgggctgattccggttggcctgccggatcagcgtcgcctggtgttgcccgataactggccggaagatatgcatccgctgcgcaaagatgcgatggattatcgactgcgccctgaaccgacgactgataccgaaacgtatccgtttatcaatgagggcaatagcgatgcgcgggtgatccctattggcccgctgcatatcacctccgatgaaccgggtcacttccgcttgtttgtggatggcgagcaaattgtcgatgctgattaccgcctgttttatgtccatcgcggcatggagaaactggcagaaacgcggatgggctacaacgaagtgaccttcttatcggatcgcgtgtgtgggatttgcggttttgcccacagtgtggcctataccaactcggttgaaaatgcactggggattgaggtgccgcaacgagcgcatactattcgctcgattctgctggaagtcgaacgtctgcacagtcatttgctcaaccttggcctctcctgccattttgttggatttgataccggctttatgcaatttttccgcgtgcgggaaaagtcgatgacaatggcggaattgctgaccgggtcgcgtaaaacctacggtctgaatctgattggtggtgttcgccgcgatattctcaaagagcaacgtctgcaaacgctgaaactggtgcgcgagatgcgcgccgacgtgtcggagctggtagagatgctgcttgccacgccgaatatggaacaacgcactcagggcattggcattctcgaccgacaaatcgcccgtgattatagccctgtagggccgctgatccgcggcagtggttttgcccgtgatttgcgctttgatcacccctacgccgactacggcaatattccaaaaacactgtttacctttaccggcggcgatgttttctcccgcgtgatggtccgtgtcaaagagacgtttgattcgctggcaatgctggaatttgccctcgacaacatgccggataccccactgctgaccgaaggctttagctataaacctcacgcattcgcgctgggctttgttgaagcgccacgcggtgaagacgtgcactggagcatgctcggtgataaccaaaaattgttccgctggcgctgccgtgccgccacctacgccaactggccggtgttgcgttacatgctgcgcggcaataccgtttctgacgcaccgctgattatcggtagccttgatccctgctactcctgtaccgaccgtgtgacgctggtagatgtgcgcaagcgccagtcaaaaaccgtgccgtataaagagatcgaacgctacggcattgatcgtaaccgttcgccgctgaagtaa

SEQ ID NO: 481819 - DNA, 1566 bp, Shigella sonnei
atgttcgctttactcctgctcacgccgctgcttttttcgctgctctgttttgcctgccggaaacgggggctctctgcgacttgtacggtgactgtattacatagcttagggatcacactgctgctgattctggcactctgggtggtccaaactgccgctgatgcaggagaaatattcgctgcgggactgtggcttcatattgatggtctgggcggtttgttcctcgccattcttggtgtgattggctttctcaccggtgtttactcgattggctacatgcgtcatgaagtggcacacggcgagctttcacccgttacgctgtgcgattactacggtttcttccatctgtttttgttcaccatgctgctggttgttaccagcaataacctgattgtgatgtgggcggcgatcgaagccaccaccttaagctcggcgtttctggtaggcatttacggtcagcgttcatcgctggaatcagcatggaagtacatcattatttgtactgttggtgtcgcttttggtctgttcggtaccgtgctggtatacgccaacgccgccagcgttatgccgcaggcagaaatggcgatattctggagcgaggttcttaagcaatcgtccttgcttgacccaacattaatgctgttggcctttgtgtttgtgctaattggctttggtaccaaaaccgggctatttcccatgcacgcctggctgccggatgctcacagtgaagcgccgagtccggtcagcgccctgctctccgccgtattgctgaactgcgcgctgttggtgctgattcgctattacatcattatttgccaagccatcggcagcgatttccccaaccggttgttgctcatcttcggcatgttgtcggttgccgtggcggcatttttcattctggtacagcgggacattaagcgtctgctggcgtactccagcgtggagaacatggggctggtcgcggtggcgctaggcattggcgggccgctgggaatttttgccgcgctgctgcacatcttaaaccacagtctggcaaaaacgctgctgttctgcggttccggcaatgtactgctcaagtacggcacgcgcgatctcaacgtcgtctgtgggatgctcaaaatcatgccatttaccgccgtgctgtttggcggcggtgcgctggcgctggcagggatgccgcccttcaacatttttcttagcgaatttatgaccattaccgccggactggcacgtaatcacctgctgattatcgtcctgctgttattgctgttaacgctggtgctggcgggcctggtacggatggcagcgcgggtgttaatggcgaaaccgccgcaggccgttaaccggggtgatctcggctggttgaccacctcgccaatggtgattctgctggtcatgatgctggcgatgggaacgcatattccacaacctgtcatcaggatcctggcgggcgcttccactatagtcctctcagggacgcacgacctgcctgcacaacgtagcacctggcatgattttttgccttcaggcaccgcatctgtttcggagaaacacagtgaacgttaa

SEQ ID NO: 481820 - DNA, 651 bp, Shigella sonnei
atgaccggttctatgatcgtaaataatctggcgggactgatgatgctgacatcgctgtttgtgattagcgtcaaaagctatcgcctgtcatgcggattttacgcctgccagtcgctggtgctggtgtctattttcgccactctctcgtgcctgttcgccgcagagcaactgctgatctggtccgccagcgcctttatcaccaaagtgctgctggtaccgttaatcatgacttacgctgcacgaaatattccccagaacatcccggaaaaagcgttattcggtccggcaatgatggcactgctcgcggcgttaattgtcctgctttgcgcatttgtcgttcagcccgtgaagctaccgatggctaccgggctgaaaccggcgctggcggtagcgttaggtcattttctgcttggcctgctgtgcattgtcagccagcgcaatatcctgcggcaaatttttggttactgcctgatggaaaacggctcccatctggtgctggcgcttcttgcctggcgagcaccggaactggtggaaataggtatcgctaccgacgccatcttcgccgtcattgtgatggtgttactggcaagaaaaatatggcgtacccacggcacgctggacgtgaacaacttgaccgcgctgaagggataa

SEQ ID NO: 481821 - DNA, 1353 bp, Shigella sonnei
atgggggttttgttcgccgcactgaccacgctgtgcatgttgtcgctgatctccgcgttttatcaggccgataaagttgccgtcacgttgacgttggtcaacgtgggggatgtggcattgtttggcttggtcattgatcgcatgagtacgctgattctgtttgtggtggtgtttctcggtttgctggtcacgatctactccacgggttatctgacggataaaaatcgcgaacacccgcataacggcacgaatcgttattacgcatttttgctggtgtttatcggcgcgatggcgggactggtactctcctcgacgctgctcggtcagttgttgttttttgaaattacgggcggctgctcctgggcgttgatcagttattaccagagcgataaagcacagctttcagcactaaaagcgttacttatcactcatatcggctcgttggggttgtatcttgccgccgccacgctgtttttgcagaccggaacgtttgcgcttagcgcgatgagcgagttacacggcgacgcacgttatctggtttatggcggcatcctgtttgccgcgtgggggaaatcggcccagctaccgatgcaagcgtggctaccggatgcaatggaagcgccaacaccgatcagtgcctatctccacgccgcatcgatggtgaaagtgggcgtttacatttttgcccgcgccattatcgacggcggcaatatcccgcatgtgattggcggcgttggcatggtcatggcgctggtcaccattctttatggctttctgatgtatttgccacagcaggatatgaagcggttgctggcctggtcgaccatcactcaacttggctggatgttcttcggcttgtcgctctccatcttcggctcgcggctggcgctggagggtagcatcgcctacatcgtcaaccacgcgttcgctaaaagcctgtttttccttgtagcaggtgcgctgagttacagctgcggcacgcgcttgttgccgcgtctgcgtggcgtattgcacaccctgccgttgccaagcgtgggtttctgcgtggcagcgctggcgattaccggtgtgccgccgttcaacggcttcttcagtaaattcccgctgtttgccgtcggttttgcgttgtcagtggagtactggatcctgctgcccgccatgattctgctgatgattgaatcggtcgccagtttcgcctggtttattcgctggtttggtcgcgtcgtgccgggcaaaccgagcgaggccgtcgccgatgccgcaccgctgccagggtcaatgcgcctggtgttgattgtactgattgtgatgtcgctgatttccagcgtaatcgccgcgacctggttgcagtaa

SEQ ID NO: 481822 - DNA, 948 bp, Shigella sonnei
atgagacaaactctttgcgacggatatctggtcatttttgcgttagcacaggccgtgattctgctgatgctaaccccactttttacgggtatttcccggcagatacgcgcgcgtatgcactcccgccgcgggccggggatctggcaggattatcgcgatatccacaaactgtttaaacgccaggaagatgcgccgacatcttcaggtctgatgttccgcctgatgccgtgggtattaatcagcagcatgctggtgctggcgatggccctaccactatttattaccgtttccccttttgcgggcggcggcgatctgatcacccttatctatcttcttgccctgtttcgttttttctttgctctttcagggctggataccggaagcccgtttgcgggagtcggtgccagtcgcgagttgacgctcggcattctggtcgaacccatgctcattctctcactgctggtattggcgctgatagcaggttccacgcatatcgagatgatcagcaatacgctggcaacgggctggaactcgccgctaaccaccgtactggcgttactggcctgtggttttgcctgcttcattgagatgggaaaaattccctttgatgttgctgaagcagaacaggaattacaggaaggcccgctgaccgaatattccggtgccgggctggcgctagcgaaatgggggctggggctgaaacaggtcgtgatggcagcactgtttgtggccctgtttctgccctttgggcgcgcgcaagaactttctctcgcctgcctgctgacttcacttgtcgttacgctgctcaaggttttgctgatttttgtactggcctcaatcgcagaaaacacgctggcacgcgggcgttttttactcattcaccatgtgacctggcttggcttcagccttgctgcgcttgcatgggtcttctggttaaccggtctgtaa

SEQ ID NO: 481823 - DNA, 2019 bp, Shigella sonnei
atggatgccctgcaattattaacctggtcgctgatcctctatctgtttgccagtctggcttcgctgtttttactcggtctggacagactggctattaagctttccggcatcacatcgctggtgggcggcgtgattggcatcatcagcggaattacgcaattacatgcaggcgtaactttagtcgcccgttttgccacgccttttgaatttgccgatttaaccctgcgaatggatagcctctcggcatttatggtgctggttatctccttgctggtggtggtttgttctctctattcattgacttatatgcgcgaatacgagggcaaaggcgcggcggcgatgggcttctttatgaatattttcatcgcatcgatggttgccctgctggtgatggacaacgctttttggttcatcgtgctgtttgaaatgatgtcgctgtcttcctggtttctggtcattgccaggcaggataaaacgtcgatcaacgctggcatgctctacttttttatcgcccacgccggatcggtgctgataatgatcgccttcttgctgatggggcgcgaaagcggcagcctcgattttgccagtttccgcacgctttcactttctccggggctggcgtcggcggtgttcctgctggcctttttcggttttggcgcgaaagccgggatgatgccgttgcacagctggttgccgcgcgctcaccctgccgcaccatcgcacgcttcagcgttgatgtctggcgtaatggtcaaaatcggtattttcggcatcctgaaagtggcgatggatctgctggcgcaaacgggtttgccgctgtggtggggcattctggtgatggcgatcggcgcaatctccgcgctcctgggcgtgctgtatgcactggcggaacaggatatcaaacggctgctggcctggagtaccgtcgaaaacgtcggcattattttgctggcggtcggtgtggcgatggtcggtctgtcactgcacgacccgctgctcaccgtggttggactgctcggcgcactgtttcatctgctcaaccatgcgcttttcaaagggctgctatttctcggcgcgggtgcgattatttcgcgtttgcatacccacgacatggaaaaaatgggggcactggcgaaacggatgccgtggacagccgcagcatgcctgattggttgcctggcgatatcagccattcctccgctgaatggttttatcagcgaatggtacacctggcagtcgctattctcactaagtcgtgtggaagccgtagcgctacaacttgcgggtcctattgctatggtaatgctggcagtcactggtgggctggcagtaatgtgcttcgtcaaaatgtacggtattactttctgtggtgcgccgcgcagcacacacgctgaagaggcacaggaagtgccaaatacgatgatcgtcgccatgctactgctcgcggcactctgcgtattaattgcgcttagtgccagttggctggcaccgaagataatgcacattgcccatgcgtttaccaatacccctcccgtcactgtcgccagcggaatagcacttgtacccggcacgtttcatacacgggtcactccttcattactgttgctgttactactggcgatgcctttgctgcctggcctttactggctgtggtgtcgttcgcgccgcgcagcgtttcgtcgcacaggagatgcctgggcatgcggctacggctgggaaaatgcgatggccccgtcaggcaatggcgtgatgcagccgctgcgtgtggtcttttctgcgctatttcgtctacgacaacagctcgaccctacgctgaggctaaataaaggtcttgcgcacgtcaccgccagggctcagagcacagaacccttctgggatgagcgggtgatccgccccatcgtgagcgccacccaacggctggccaaagaaatacagcatctgcaaagcggcgactttcgtctctattgcctgtatgtggtcgccgcactggttgtgctgctaatcgctattgccgtctaa

SEQ ID NO: 481824 - DNA, 618 bp, Shigella sonnei
atgaaccgctttgtggtggccgaaccactgtggtgtacaggatgtaatacctgtctcgctgcctgttcggacgtgcataaaacgcaaggtttacagcaacacccgcgcctggccctggcgaagacgtcaacactcactgcccctgtcgtgtgtcatcactgtgaggaagccccttgcctgcaggtctgcccggtcaatgccatctctcagagggatgatgcgatccaactcaacgaaagcctctgtattggctgcaagctttgcgccgtggtctgcccatttggcgcaatcagcgcttcaggaagccgtccggtgaatgcccctgcgcaatatgtttttcaggctgagggctcactcaaagacggcgaagaaaacgtgccgccccaacatgcgttgctgcgctgggaaccgggtgtccagaccgtcgcggtgaaatgcgacctgtgtgatttcttgccagaaggtccggcctgcgttcgcgcttgcccgaatcaggcgttacggctgatcaccgacgatagcctgcaacgccagatgaaagaaaaacagcgccttgccgcaagctggtttgccaatggcggggaggatcccctttccctcactcaggagcaacgctaa

SEQ ID NO: 481825 - DNA, 471 bp, Shigella sonnei
atgaatccactgaaagccggtgatatcgcaccgaaatttagcttgccggatcaagacggagaacaagttaatttgaccgacttccagggacagcgtgttctggtttatttctacccgaaagccatgacccccggctgtaccgtacaggcctgcggcttacgcgataacatggatgagttgaaaaaagcgggcgttgatgtgctgggtatcagcaccgataaacccgaaaaactctcccgttttgcggaaaaagagctgcttaactttacgctcctgtctgatgaggaccaccaggtgtgcgaacaattcggcgtctggggtgaaaagtccttcatgggcaaaacctacgatggcattcatcgcatcagcttcctgattgacgctgatggcaaaatcgaacatgtctttgacgatttcaaaaccagcaatcaccacgacgttgtgctgaactggctgaaagaacacgcctga

SEQ ID NO: 481826 - DNA, 573 bp, Shigella sonnei
ttgacactgtcatcgcaacattatctggtgatcactgcattgggtgccgatcgccctggaattgtgaacaccatcacccgtcatgtcagtagttgcggctgtaatattgaagacagtcgcctggcgatgctgggagaagagttcacgtttatcatgctgctttccggttcatggaatgccattactctgattgaatcaacgttaccgttgaaaggtgccgagctggatcttttaatcgtgatgaagcgcacgacggcgcgtccgcgtccgccaatgccagcatctgtctgggttcaggtcgatgtggcagactccccgcatttaattgaacgcttcacagcacttttcgacgcgcatcatatgaacattgcggagctggtgtcgcgcacgcaacctgctgaaaatgaacgggctgcgcagttgcatattcagataaccgcccacagccccgcatctgcggacgcagcaaatattgagcaagcgttcaaagccctatgtacagaactcaatgcacaaggcagtattaacgtcgtcaattattcccaacatgatgaacaggatggagttaagtaa

SEQ ID NO: 481827 - DNA, 879 bp, Shigella sonnei
atgttcacgggaagtattgtcgcgattgttactccgatggatgaaaaaggtaatgtctgtcgggctagcttgaaaaaactgattgattatcatgtcgccagcggtacttcggcgatcgtttctgttggcaccactggcgagtccgctaccttaaatcatgacgaacatgctgatgtggtgatgatgacgctggagctggctgatgggcgcattccggtaattgccgggaccggcgctaacgctactgcggaagccattagcctgacgcagcgcttcaatgacagtggtatcgtcggctgcctgacggtaaccccttactacaatcgtccgtcgcaagaaggtttgtatcagcatttcaaagccatcgctgagcatactgacctgccgcaaattctgtataatgtgccgtcccgtactggctgcgatctgctcccggaaacggtgggccgtctggcgaaagtaaaaaatattatcggaatcaaagaggcaacagggaacttaacgcgtgtaaaccagatcaaagagctggtttcagatgattttgttctgctgagcggcgatgatgcgagcgcgctggacttcatgcaattaggcggtcatggggttatttccgttacggctaacgtcgcagcgcgtgatatggcccagatgtgcaaactggcagcagaagggcattttgccgaggcacgcgttattaatcagcgtctgatgccattacacaacaaactatttgtcgaacccaatccaatcccggtgaaatgggcatgtaaggaactgggtcttgtggcgaccgatacgctgcgcctgccaatgacaccaatcaccgacagtggtcgtgagacggtcagagcggcgcttaagcatgccggtttgctgtaa

SEQ ID NO: 481828 - DNA, 1035 bp, Shigella sonnei
atggcttactctgttcaaaagtcgcgcctggcaaaggttgcgggtgtttcgcttgttttattactcgctgcctgtagttctgactcacgctataagcgtcaggtcagtggtgatgaagcctacctggaagcggcaccgcttgcggagcttcatgccccggctggaatgattttgccggtgacctccggtgattatgcaatcccggtgaccaacggtagtggtgctgtcggtaaggcgctggacattcgtccaccagcccagccgctggcactggtttctggcgcgcgtacccagttcacgggcgataccgcttcattgctggtggaaaatggtcgtggcaatactctgtggccgcaggtggttagcgtgctgcaggcgaaaaactacaccatcacccaacgtgatgatgctggtcagacactgaccaccgattgggtacaatggaaccgtctggacgaagacgagcagtatcgtggtcgttatcaaatctctgttaagccgcagggttatcagcaggcggttacggttaaactgttgaacctggaacaggcgggcaaaccggttgcagacgcggcttccatgcagcgttacagcacggagatgatgaacgttatttccgccggtctggataaatctgccactgacgccgcgaacgctgcgcaaaatcgtgcctccaccactatggacgtacaaagtgcagctgatgacaccggtttaccaatgctggtcgtacgcgggccgttcaatgtggtttggcaacgtctgccagcggcgctggaaaaagtgggcatgaaagtgaccgacagcacccgttcgcagggcaacatggccgtaacttataagccgctgtctgacagcgactggcaggaactgggcgcgagcgatccaggcctggcatccggtgactataaactgcaggttggcgatttagataaccgcagcagcctacagttcatcgatccgaaaggtcatactctgactcagagtcagaacgacgcgctggtagctgtcttccaggctgcgtttagcaagtaa

SEQ ID NO: 481829 - DNA, 231 bp, Shigella sonnei; identical to SEQ ID NO: 470928

SEQ ID NO: 481830 - DNA, 714 bp, Shigella sonnei
atgcaaaagcaagctgagttgtatcgtggtaaagcgaaaaccgtatacagcacggaaaacccggacctgttggtgctcgaattccgcaatgatacgtcagcaggggatggcgcgcgcattgagcagtttgatcgcaaaggtatgttgaacaacaagttcaactacttcattatgagcaaactggctgaagcgggtatcccgactcaaatggagcgtctgctctccgataccgaatgtctggtgaaaaagctggatatggtgccggttgagtgtgtcgtgcgtaaccgtgctgcgggctctctggtgaaacgtcttggaatcgaagaaggtattgagctgaacccgccgctgttcgatctgttcctgaaaaacgatgccatgcacgatccgatggtcaacgaatcttactgcgaaacctttggctgggtgagcaaagagaacctggcgcgtatgaaagagctgacctacaaagcgaacgacgtgctgaaaaaactgttcgatgatgctggtctgattctggtcgacttcaagctggagtttggtctgtacaaaggtgaagtggtactgggcgatgagttctccccggacggcagccgcctgtgggacaaagaaacactggagaaaatggacaaagaccgtttccgccagagcctcggtggcctgatcgaagcctatgaagccgtcgcccgccgcctgggtgtacagctggactga

SEQ ID NO: 481831 - DNA, 849 bp, Shigella sonnei
atgcgttggcaagggcgacgtgaaagtgacaatgtcgaagacaggcgtaacagctccggcggtccgtcaatgggcggtcccggttttcgcctgccaagcggtaaaggcgggctgattttactgatagtcgtgctggttgcaggctactatggtgttgatttaaccgggttgatgaccggacagccggtttcccaacagcaatcaacacggtcaattagcccaaatgaagacgaagccgcaaaattcacctcggtgattctggcaaccacggaagacacctggggacagcaattcgagaagatgggtaaaacctatcagcaaccgaagctggtcatgtatcgtggaatgacgcgtaccggctgcggggcgggccagtccattatgggaccgttctattgcccggcggatggcacggtttatatcgatctctccttctatgatgacatgaaagacaaactcggcgcggatggcgattttgcccaggggtacgttatcgcccatgaagtcggtcatcatgtgcagaaattgttaggcatcgagccgaaagttcgtcaactgcaacaaaacgcgacgcaggcggaagtaaaccgcttatctgtgcgtatggaactccaggccgactgttttgccggtgtctgggggcataacatgcagcagcaaggcgatctggaagaggcgctgaacgcggcgcaggccatcggcgatgaccgtttacaacagcaaagtcaggggcgagtagtaccagacagtttcactcatggtacttctcagcaacgctacagctggtttaaacgtggtttcgacagcggcgatccggcacaatgcaatacttttggtaaaagcatttaa

SEQ ID NO: 481832 - DNA, 2016 bp, Shigella sonnei
atggctgaactgactgcgcttcacacattaacagcgcaaatgaaacgtgaagggatccgccgcttgctggtgttgagcggggaagagggttggtgttttgatcatgcgcttaagttgcgtgatgccttacctggcgactggctgtggatttcgccgcagccagatgctgaaaaccactgttctccctcggcgctacaaactttacttgggcgcgagttccggcatgcggtattcgacgcccgccacggctttgatgccgctgcctttgcggcacttagcggaacgttgaaagcgggaagctggctggttttgttactccctgtatgggaagagtgggaaaaccaacctgatgccgactcgctgcgctggagtgattgccctgaccctattgcgacgccgcattttgtccagcatctcaaacgcgtacttacggcggataacgacgctattctctggcggcaaaaccagccgttctcgttggcgcattttaccccccgtactgactggcaccccgcgaccggcgcaccacaaccagaacaacagcaactcttacagcagctactgaccatgccgccgggcgtggcagcggtaacggctgcgcgtgggcgcggtaagtccgcgctggcagggcaactcatttctcgtattgcgggcagtgcgattgtcaccgcgcccgcaaaagcggcaacggatgtactggcacaatttgcgggcgagaagtttcgctttattgcgccggatgccttgttagccagcgatgagcaagccgactggctggtggtcgatgaagccgcagccatacctgcgccgttgttgcatcaactggtatcgcgttttcctcgaacgttgttaaccactacggtgcagggctacgaaggtaccggacgtggttttttgctgaaattttgcgctcgctttccgcatttacaccgttttgaactgcaacagccgatccgctgggcacagggatgcccgctggaaaaaatggttagtgaggcactggtttttaacgatgaaaacttcacccatacaccacaaggcaatatcgtcatttccgcatttgaacaaacgttatggcgaagcgatccagaaacgccgttaaaggtttatcagttattgtctggtgcgcactaccggacctcgccgctggatttacgccggatgatggatgcaccagggcaacattttttacaggcggctggcgaaaacgagattgccggggcgttgtggctggtggatgagggcggattatctcaagaactcagtcaggcggtatgggcaggttttcgtcgcccgcggggtaatctggtggcccagtcgctggcggcgcacggcagcaatccactggcggcgacattgcgcggacggcgggtcagccggattgcagtccatccggcgcgtcagcgcgaaggcgttgggcaacagctcattgccagcgctttgcaatataggcctggcctcgactatctttcggtgagttttggttacaccggggagttatggcgtttctggcaacgctgcggttttgtgctggtgcgaatgggtaatcatcgtgaagccagcagcggttgctatacggcgatggcactgttaccgatgagtgatgcgggtaaacagctggctgaacgtgagcattaccgtttacgtcgcgatgcgcaagctctcgcgcagtggaatggcgaaacgcttcctgttgatccactaaacaatgccgtcctttctgacgacgactggcttgaactggccggttttgctttcgctcatcgtccgctattaacgtcgttaggttgcttattgcgtctgctacaaaccagtgaactggcattaccggcgctgcgtgggcgtttacagaaaaacaccagtgacgcgcagttatgtaccacacttaaactttcaggccgcaagatgttactggttcgccagcgggaagaggccgcgcaggcgctgttcgcacttaatgaggttcgcactgagcgtctgcgcgatcgcataacgcaatggcaattttttcactga

SEQ ID NO: 481833 - DNA, 699 bp, Shigella sonnei
atgaaacatgaccattttgttgttcaaagcccggataaacctgcgcaacagttgttactgcttttccacggtgtcggggataacccggtggcaatgggggaaataggcagctggtttgcgccgctatttcctgatgcgctggtggtgagtgtcggaggcgcggagccgagcggtaatccggcggggcgtcagtggttttcggtgcagggtattacggaagataatcgccaggcgcgtgtggatgccatcatgccgacgtttattgagatggtgcgctactggcagaaacagagcggagtaggggctaacgccacagcgctaatcggtttctctcaaggcgcgattatggcgctggagagcattaaagccgaaccgggccttgcttcacgcgtcattgcttttaacggacgctatgcgagcctgccggaaactgcgtctacagccacgacaattcacctgattcatggcggtgaagatccggttatcgatctggcgcatgcggttgcggcgcaggaagcgttaatcagtgccggtggtgacgtgacgctggatatcgtggaggatttaggccatgcgatcgacaatcgcagtatgcaatttgccctggatcacttgcgttataccattccgaaacattatttcgacgaagcgctaagtggcggtaagcctggcgatgatgatgtgattgaaatgatgtaa

SEQ ID NO: 481834 - DNA, 201 bp, Shigella sonnei; identical to SEQ ID NO: 458966

SEQ ID NO: 481835 - DNA, 1128 bp, Shigella sonnei
atgtcgtgcccggttattgagctgacacaacagcttattcgccgcccttccctgagtcctgatgacgcaggatgccaggctttgttgattgatcgtttgcaggcgatcggttttaccgttgaacgcatggactttgccgatacgcagaatttttgggcatggcgtgggcaaggtgaaacattggcctttgccgggcataccgacgtggtgccgcctggcgacgccgatcgttggatcaatccgccgtttgaacccaccattcgtgatggcatgttattcgggcgcggtgcggcagatatgaaaggctcgctggcggcgatggtggtagcagcagaacgttttgtcgcacaacatcccaaccatacgggacgactggcatttctgatcacctctgatgaagaagccagtgcccacaacggtacggtaaaagtcgtcgaagcgttaatggcgcgtaatgagcgtctcgattactgtctggtcggcgaaccgtcgagtatcgaagtggttggtgatgtggtgaaaaatggtcgtcgcggatcgttaacctgcaaccttaccattcatggcgtgcaggggcatgtggcctacccacatctggctgacaatccagtacatcgcgcagcacctttccttaatgaattagtggctattgagtgggatcagggcaatgaattcttcccggcgaccagtatgcagattgccaatattcaggcgggaacgggcagtaacaacgttattccgggtgaactgtttgtgcagtttaacttccgcttcagcaccgaactgactgatgagatgatcaaagcgcaggtgcttgccctgcttgaaaaacatcaactgcgctatacggtggattggtggctttccgggcagccatttttgaccgcgcgcggtaaactggtggatgcggtcgttaacgcggttgagcactataatgaaattaaaccgcagctactgaccacaggcggaacgtccgacgggcgctttattgctcgcatgggggcgcaggtggtggaactcgggccggtcaatgccactattcataaaattaatgaatgtgtgaacgctgccgacctgcagctacttgcccgtatgtatcaacgtatcatggaacagctcgtcgcctga

SEQ ID NO: 481836 - DNA, 357 bp, Shigella sonnei
atggttacactttacggtatcaaaaattgtgacaccattaaaaaggctcgccgttggctggaagccaataacatcgactatcgttttcatgattaccgcgtcgatgggctggacagcgaattattgaacggttttatcaacgaattaggttgggaggcgttactcaacacccgtggtacaacctggcgtaaactggacgaaaccacccgcaataaaatcaccgatgcggcctcagcggcggcattaatgactgaaatgcctgcaattatcaaacgtccattgctctgcgcgcccggtaagcctatgctgctgggtttcagtgattccagttatcagcaatttttccatgaggtgtag

SEQ ID NO: 481837 - DNA, 591 bp, Shigella sonnei
atggaatcgttagtgaagcagctgccaaacggctttggtctggagtggacggcgatgtcgtatcaggagcgactttccggcgcgcaggctccggcgctgtacgccatttccttgctggtggtattcctgtgtctggctgcgttgtatgaaagctggtcggtgccgttctcggtaatgctggtcgtgccgctgggggtaatcggcgcgctgctggcaacctggatgcgcgggctggaaaacgacgtttacttccaggtgggcctgttaacggtcattggtttatcggcgaaaaacgccatcctgatcgtcgagtttgctaacgagatgaaccaaaaaggccacgacctgtttgaagcgacgctccacgcctgccgtcagcgtttacgcccgattctgatgacctcgctggcatttatcttcggcgtattgccaatggcaaccagcacgggtgccggttccggtggtcagcatgcggtgggtactggcgtaatgggcgggatgatttcagccactattctggctatttacttcgtgccgctgttctttgtgctggtgcgccgccgcttcccgctaaagccgcgcccggaataa

SEQ ID NO: 481838 - DNA, 2433 bp, Shigella sonnei
atggcgaatttctttattgatcgccccatttttgcctgggtgctggcaatcctgttgtgtctgacagggaccctggcgattttttcattgcccgttgaacaataccccgatctcgcgccaccgaatgtgcgagtgaccgctaactatcccggcgcatcggcccagacgctggaaaacaccgtgacccaggttatcgagcaaaatatgaccggcctcgataatctcatgtatatgtcatctcagagcagtggcatcggtcaggcatctgtcactttaagttttaaagcaggcaccgatccggacgaagccgtgcagcaagtacaaaaccagctgcaatcagccatgcgaaagttaccgcaggcggtgcaaaatcagggcgtgacggtgcgtaaaaccggcgataccaatattctgaccattgctttcgtctctaccgatggttcgatggataaacaggatattgccgattatgttgccagtaatattcaggacccgttaagccgcgtgaatggcgtcggggatatcgatgcctatggttcgcaatattccatgcgtatctggctggacccggcgaaactcaacagtttccagatgacggctaaagatgtcactgatgccattgagtcacagaacgcgcagattgcggttgggcaacttggtggtacaccttccgtcgataagcaggcgctcaacgccaccattaacgcccagtcactgctgcaaacaccagaacagttccgcgatatcaccttgcgggtgaatcaagacggctcagaggtaaggctgggcgatgtcgccaccgtcgaaatgggggcggagaaatacgattatcttagccgcttcaatggtaagccagcctccgggctgggggtaaaactggcctccggcgcaaacgaaatggcgacagcggagctggtgctcaatcgtctcgacgagctggcgcagtacttcccgcacggactggaatacaaggtggcgtatgaaaccacctcgtttgttaaagcctccattgaagacgtggtgaaaacgctgctggaagctatcgccctggttttcctcgttatgtatctgttcctgcaaaacttccgcgccacgctgatacccactatcgccgtgccggtggtgttgatgggaaccttctccgtactttacgccttcggttacagcgtcaacaccttaaccatgttcgcgatggtactggcgatcggtctgctggtggatgacgcaatcgtggtggtggaaaacgtcgaacgtattatgagtgaggaaggactcactcctcgcgaagccacacgtaaatcgatggggcagatccagggggcactggtcgggattgcgatggtgctttcggcggtatttgtaccaatggccttcttcggcggcaccaccggtgccatctatcgccagttctctattaccattgttgcggcgatggtgctgtcagtactggtagcgatgatcctcactccggctctgtgtgccacactacttaagccactgaaaaaaggtgagcatcacgggcaaaaaggcttttttgcctggtttaaccagatgtttaaccgcaacgccgaacgctacgaaaaaggggtggcgaaaattctccaccgcagcctgcgctggattgtgatttatgtcctgctgcttggcggcatggtgttcctgttcctgcgtttgccgacgtcgttcttaccgctggaagaccgtggcatgtttactacctcggtacaattgcccagcggttcaacccaacaacagaccctgaaagtcgttgagcaaatcgagaaatattacttcacccatgaaaaagacaacatcatgtcggtgtttgccaccgttggttctggccctgggggtaacgggcaaaacgtggcgcgaatgtttatccgcctgaaagactggagcgaacgcgacagtaagaccggcacctcgtttgccattatcgagcgtgcaacaaaggcgtttaacaagattaaagaagctcgcgttatcgccagcagcccgccagcaattagcggtcttggtagttctgcgggttttgatatggagttgcaggaccacgctggagcaggtcacgatgcgctgatggcagcacgtaaccagttgctggcgctggcggcggaaaacccggagctaacccgtgtgcgccataacggcctcgacgacagtccgcagttgcagattgatatcgaccagcgtaaagctcaggcgctgggcgttgctatcgacgatattaacgacacactgcaaaccgcctggggttcgagctatgtgaatgactttatggatcgcggtcgcgtgaagaaagtctatgtgcaggcagctgcgccgtatcgcatgctgccagatgacatcaatctctggtatgtccgaaataaagatggcggcatggtgcccttctctgctttcgcgacctcacgctgggaaacaggctag

SEQ ID NO: 481839 - DNA, 1701 bp, Shigella sonnei
gtgattgttaaacgacccgtctcggccagtctggcccgggcctttttttacattgtgctgctgtcgattctttccacgggtatcgctctgctaactctggcgagcagtttgcgcgacgctgaggctatcaatattgccggatcgctgcgtatgcagagttaccgcctgggctacgacttgcaaagtggcagtccacaactcaatgcacatcgccagttgtttcagcaggcactgcattcatcggtattaaccaatctcaacgtctggtatgtgccagaagcagtaaaaactcgctatgcgcatctgaatgccaactggctggagatgaataatcggctcagcaagggcgatttgccgtggtatcaggccaatattaataattatgttaatcagatagacctgttcgtgctggctttacagcactacgctgaacgcaaaatgctgctggtggtggcgatttccctggctggcggtatcggtattttcacgctggtcttttttactttgcgccgtatacgccatcaggtggttgccccgctgaatcagctggttaccgccagtcaacgtattgaacacgggcagttcgactcgccgccgctggataccagtctgccgaatgagcttggtctgcttgcaaaaacctttaaccagatgtcgagcgagctgcataaattgtacctttcgctggaggcgtcagtagaagaaaagacccgcgatctccacgaggccaagcgtcgtctggaggtgttgtatcaatgttcgcaggcgctgaacacaagccagattgatgtgcattgtttccgccatattttgcagattgttcgcgacaatgaagcggctgaatatctggagttaaatgtcggtgaaaactggcggattagcgaagggcaaccaaacccggaattgccgatgcagattttaccggtgacaatgcaagagacggtttacggcgaactgcactggcaaaatagtcacgtttcatcatcagaaccgctgcttaacagcgtttcgtcgatgctgggacgcggtttgtactttaatcaggcgcaaaagcattttcagcagttattgttgatggaagaacgtgcaaccatcgcccgcgaattgcacgactcgctggctcaggtactttcttacttacgtatccagttgacgttactgaagcgttcgataccggaagataacgccaccgcacaaagtatcatggccgatttttcccaggcgttgaatgatgcttatcggcagttacgcgagctgttgactactttccgcctgacgctgcagcaggcggatctcccctccgcgttgagggaaatgctggatacgttacaaaatcaaaccagcgccaaactgaccctcgactgccgtctgccaaccctggcgctggatgcgcaaatgcaggtgcatttgttgcaaattattcgcgaagcggtgctgaatgcgatgaagcacgccaacgccagcgaaatcgccgtcagttgcgtcaccgcgccggacggcaatcacacggtttatatccgtgataacgggattggtatcggtgaaccgaaagaacccgaaggtcattatggtctgaatatcatgcgcgaacgcgcggaacggctgggtgggacgctgactttttcacaaccttccggcggcggcacgttagtgagtattagctttcgctctgcggagggtgaggaaagtcagttgatgtaa

SEQ ID NO: 481840 - DNA, 1980 bp, Shigella sonnei
atgaatcgttttattatggccaacagtcagcaatgtctgggttgtcatgcttgtgaaatcgcctgtgtcatggctcacaatgatgagcaacatgtcctgagccaacaccattttcatccccgaattacggttatcaaacatcagcagcaacgtagtgcagtgacctgtcaccattgtgaagatgcgccctgcgcccgtagctgccctaatggcgcaatcagccacgttgatgacagcattcaggtcaatcagcaaaagtgtattggctgtaaatcctgcgtggtggcctgtccgtttggtacgatgcaaatcgtcctgacacccgtcgcggcaggaaaagtaaaagccacggcgcataaatgcgacctttgtgcagggcgcgaaaacggtcctgcctgtgtcgagaattgcccggcggacgcgctgcaactggtcactgacgtcgcactctccggcatggcgaaatcccgccgcttgcgcaccgcacgtcaggagcatcaaccgtggcatgccagtaccgctgcacaagaaatgccggtaatgagtaaagtcgaacaaatgcaggcaacgcccgcgcgtggcgagccggataaactggcgattgaagcgcgcaaaaccggttttgatgaaatttatctgccattccgtgccgatcaggcacaacgggaagcctcgcgctgccttaaatgcggcgagcacagcgtttgtgaatggacctgcccgctgcataaccatattccgcagtggattgaactggtgaaagccggaaacatcgacgccgccgtcgagctttctcacctgaccaacaccctgccggaaattaccggacgcgtttgtccgcaggaccgtttgtgtgaaggtgcctgtactattcgcgatgagcacggcgcggtaactatcggcaacattgaacgctacatttcagatcaggcgttggcgaaaggttggcgtcctgacttaagccatgtcaccaaagtggacaagcgggtggcgattatcggtgcgggtccggcagggctggcctgtgcggatgttctgacccgcaatggcgtggcggtgacggtgtacgatcgccatccagaaattggtggcttgctcactttcggcattccttctttcaaactggataaatccctgctggcacgccgtcgggaaatcttcagcgcgatggggattcacttcgaactcaattgtgaagtgggtaaagatgtctctttggattcgcttttggaacaatacgacgcggtcttcgttggcgtaggcacttaccgttccatgaaagcgggtttacccaatgaagatgcgccgggcgtttatgacgcgctgccgttcctcatcgccaacactaaacaggtgatgggactcgaagagctaccggaagagccgtttatcaataccgccggactcaacgtcgtggtactgggcggcggcgacaccgcgatggactgtgtgcgtaccgcgctgcgccacggcgcgagtaacgtcacctgcgcttatcgtcgtgatgaagctaacatgccaggctcgaagaaagaggtgaagaacgcccgcgaagagggggccaacttcgaatttaacgtccagccggtggcgcttgagctgaatgagcaaggtcacgtttgcggaattcgtttcctgcgcacgcgtcttggcgagccggatgcccaggggcgccggcgacttgtaccgattgagggcagtgaatttgtcatgccagccgatgcggtgattatggtgtttggcttcaatccacacgggatgccgtggctggagtcgcacggtgtaacggtagacaaatggggccgcatcatcgcggatgtggaaagccagtaccgttaccagaccaccaatccgaaaatcttcgccggtggcgacgccgtgcgtggtgcggatctggtggttaccgcaatggcagaaggacgtcatgcggcacaggggattattgactggctgggggtaaaatcagtcaaatctcactga

SEQ ID NO: 481841 - DNA, 576 bp, Shigella sonnei
atgacgcaacaaatcaccctcattaaagacaaaattctctccgataactatttcaccctgcacaacattacttacgatctcacgcgcaaagatggcgaagttatccgccataaacgtgaagtttacgatcgcggtaatggtgcgacgatcctcctgtacaacgcgaagaaaaagaccgtggttctgattcgtcagttccgtgtcgctacctgggttaatggcaatgaaagcgggcagctgattgaaacctgcgccgggctgctggataacgacgaaccggaagtgtgcattcgtaaagaagcgattgaagagacgggctatgaagtgggcgaagtgcgcaaattatttgaactgtatatgtcgcctggcggtgtgactgagctaatccacttttttatcgccgaatacagtgacaatcagcgcgctaacgccggtggcggtgttgaagatgaagatattgaagtgcttgagctgccgttcagccaggcgctggagatgatcaaaaccggcgagatacgtgacggtaagacggtgttattgcttaactatttgcaaacgtcacatttaatggactga

SEQ ID NO: 481842 - DNA, 1044 bp, Shigella sonnei
atgcgctatcgcattttccttctcttttttttcgctttgttgccgacgtctttggtgtgggcggcactagcgcaacgggcgttttccgactggcaggtcacctgtaataaccaaaacttctgcgtggcgcgcaatacgggcgatcataatggactggtgatgaccctgagccgcagcgccggggcgcataccgatgccgttttacgtattgagcgcggcgggttgaagtcgccggatgcgtctgaaggagagatagcgccacggctgctgttagatggtgagccgttggcgttaagtggtgacaagtggcggatttcaccatggttattagtaaccgatgatacggcaaccatcaccgcgtttttgcagatgattcaggaagggaaggcgatcaccttacgcgacggcaatcagaccatttctctgagtggcttaaaagcggcgttgttgtttattgatgctcagcaaaagcgcgttggcagtgaaaccgcgtggatcaagaaaggggacgaaccgccgctcagcgtaccgcccgcgcctgcgctgaaagaggtcgcggtggttaacccaacgccgacgccactctcactcgaagaacgcaacgatttgctggattatggaaactggcggatgaatggtctgcgctgctcgcttgatccgttacgtcgtgaggtgaatgtcactgcgctgactgatgataaagcgctgatgatgatcagctgtgaggcaggggcctataacaccattgatttggcatggattgtgtcgcgtaaaaagccgctagcctcgcgcccggttcggttgcgtttgccgttcaacaacgggcaggagacgaatgaactggaactgatgaacgcaacatttgatgagaaatcgcgtgaactggtgaccttagcgaaagggcgcggattaagcgattgtggcattcaggcgcgctggcgctttgacggtcagcgttttcgcctggtgcgttacgccgcagaacccacctgcgataactggcatgggccagacgcctggcccacgttgtggatcacccgttaa

SEQ ID NO: 481843 - DNA, 2004 bp, Shigella sonnei
atgtcccgaaaagaccttgccaatgcgattcgcgcactcagtatggatgcggtacaaaaagccaattctggtcatcccggcgcgccgatgggcatggctgatattgccgaagtgctgtggaacgattttcttaaacataaccctaccgacccaacctggtatgatcgcgaccgctttattctttccaacggtcacgcgtcgatgctgctctacagtttgctgcatctgaccggttacgacctgccgctggaagagctgaagaactttcgtcaactgcattcgaaaaccccaggccacccggagattggttatacgccaggcgttgaaaccaccaccggtccacttggacaaggtttggcgaacgccgtcgggctggcgatagcagagcgtacactggcggcgcagtttaaccagccagaccatgagatcgtcgatcacttcacctatgtgtttatgggcgacggctgcctgatggaaggtatttcccacgaagtctgttcgctggcaggcacgctgggactgggcaagctgattggtttttacgatcacaacggtatttccatcgacggtgaaacagaaggctggtttaccgacgatacggcaaaacgttttgaagcctatcactggcatgtgatccatgaaatcgacggtcacgatccgcaggcggtgaaggaagcgatccttgaagcgcaaagcgtgaaagataagccgtcgctgattatctgtcgtacggtgattggctttggatcgccgaataaagcaggtaaggaagaggcgcacggcgcaccgctgggggaagaagaagtggcgctggcacggcaaaaactgggctggcaccatccgccatttgagatccctaaagatatttatcacgcctgggatgcccgcgaaaaaggcgaaaaagcgcagcagaggtggaatgagaagtttgccgcctataaaaaggctcatccgcaactggcagaagagtttacccgtcggatgagcggtggtttaccgaaggactgggagaaaacgactcagaagtatatcaatgagttgcaggcgaatccggcgaaaatcgccacccgtaaggcttcgcaaaatacgcttaacgcttatggccccttgctaccggagctgctcggcggttcggcggatctggctcccagcaacctgaccatctggaaaggttctgtttcgctgaaggaagatccggcgggcaactacattcactacggggtgcgtgaatttggcatgaccgctatcgccaacggcatcgcgcaccacggcggctttgtgccgtataccgcgacgttcctgatgtttgttgaatacgcccgtaacgccgcgcggatggcggcactgatgaaagcgcggcagattatggtttatacccacgactcaattggcctgggcgaagatggtccgacgcaccaggctgttgagcaactggccagcctgcgcttaacgccaaatttcagcacctggcgaccgtgcgatcaggtggaagcggcggtgggctggaagctggcggttgagcgccacaacggaccgacggcactgatcctctcaaggcagaatctggcccaggtggaacgtacgccggatcaggttaaagagattactcgtggcggttatgtgctgaaagacagcggcggtaagccagatattattctgattgccaccggttcagagatggaaatcaccctgcaagctgcggagaaattagcaggagaaggtcgcaatgttcgcgtggtttccctgccctcgaccgatattttcgacgcccaggatgaggaatatcgggagtcggtgttgccttctaacgttgcggctcgcgtggcggtggaagcaggtattgccgattactggtacaagtatgttggtctgaaaggggcaattgtcgggatgacgggttatggggaatctgctccggcggataagctgttcccgttctttggctttaccgccgagaatattgtggcaaaagcgcataaggtgctgggagtgaaaggtgcctga

SEQ ID NO: 481844 - DNA, 951 bp, Shigella sonnei
atgaacgagttagacggcatcaaacagttcaccactgtcgtggcagacagcggcgatattgagtccattcgccattatcatccccaggatgccaccaccaatccttcgctgttactcaaggctgccggattatcacaatatgagcatttaatagacgatgctatcgcctggggtaaaaaaaatggcaagacccaggaacaacaggtggtcgcagcgtgtgacaaactggcggtcaatttcggtgctgaaatcctcaaaatcgtacccggtcgcgtgtcaacagaagttgatgcacgcctctcttttgataaagaaaagagtattgagaaggcgcgccatctggtggacttgtatcagcaacaaggcgttgagaaatcacgcattctgatcaagctggcttcgacctgggaaggaattcgcgcggcagaagagctggaaaaagaaggtattaactgcaacctgacgctgctgttttcttttgcacaggcacgggcctgtgcggaagcaggcgtttttctgatttcgccgtttgtcgggcgtatttatgactggtatcaggcacgcaagccgatggacccgtatgtggtggaagaagatccgggcgttaaatcggtgcgcaatatctacgactactataagcaacaccactatgaaaccattgtgatgggcgcgagcttccgtcgcaccgaacaaatcctcgccttaaccggctgcgatcgactgactatcgcaccgaatttgctgaaggagctgcaggaaaaagtttcgccagtggtacgtaaattaatcccaccttctcagacgttcccacgcccagctcccatgagcgaagcggagttccgttgggagcacaatcagtatgcgatggcggtagaaaaactgtctgaaggcattcgtctgttcgccgttgatcaacgcaaactggaagatcttcttgccgccaaactataa

SEQ ID NO: 481845 - DNA, 2280 bp, Shigella sonnei
atggatgaccagttaaaacaaagtgcacttgatttccatgaatttccagttccagggaaaatccaggtttctccaaccaagcctctggcaacgcagcgcgatctggcgctggcctactcacccggcgttgccgcaccttgtcttgaaatcgaaaaagacccgttaaaagcctacaaatataccgcccgcggtaacctggtggcggtgatctctaacggtacggcggtgctggggttaggcaacattggcgcgctggctggcaaaccggtgatggaaggcaagggcgttctgtttaagaaattcgccgggattgatgtatttgacattgaagttgatgaactcgacccggacaaatttattgaagttgtcgctgcgctcgaaccgaccttcggcggaatcaacctcgaagacattaaagcgccagaatgtttctatattgaacagaaactgcgcgagcggatgaatattccggtattccacgacgatcagcacggcacggcaatcatcagcactgccgccatcctcaacggcttgcgcgtggtggagaaaaacatctccgacgtgcggatggtggtttccggcgcgggtgccgcagcaatcgcctgtatgaatctgctggtagcgctgggtctgcaaaaacataacatcgtggtttgcgattcaaaaggcgttatctatcaaggccgtgagccaaacatggcggaaaccaaagccgcatatgcggtggtggatgacggcaaacgtaccctcgatgatgtgattgaaggtgcggatattttcctgggctgttccggcccgaaagtgctgacccaggaaatggtgaagaaaatggctcgggcaccaatgattctggcgctggcgaatccggaaccggaaattctgccgccgctggcgaaagaagtgcgtccggatgccatcatctgcaccggtcgttctgactatccaaaccaggtcaacaacgtcctttgcttcccgttcatcttccgtggcgcgctggacgttggcgcaaccgccatcaacgaagagatgaaactggcggcggtacgcgcgattgcagaactggcccatgcggaacagagcgaagtggtggcttcagcgtatggcgatcaggatctgagctttggtccggaatacatcattccaaaaccgtttgatccgcgcttgatcgttaagatcgctcctgcggtcgcgaaagcggcgatggagtcgggcgtggcgacgcgtccgattgctgatttcgacgtctacatcgacaagctgactgagttcgtttacaaaaccaacctgtttatgaagccgattttctcccaggctcgcaaagcgccgaagcgcgtagttctgccggaaggggaagaggcgcgcgttctgcatgccactcaggaactggtaacgctgggactggcgaaaccgatccttatcggtcgtccgaacgtgatcgaaatgcgcattcagaaactgggcttgcagatcaaagcgggcgttgattttgagatcgtcaataacgaatccgatccgcgctttaaagagtactggaccgaatacttccagatcatgaagcgtcgcggcgtcactcaggaacaggcgcagcgggcgctgatcagtaacccgacagtgatcggcgtgatcatggttcagcgtggcgaagccgatgcaatgatttgcggtacggtgggtgattatcatgaacattttagcgtggtgaaaaatgtctttggttatcgcgatggcgttcacaccgcaggtgcaatgaacgcgctgctgctgccgagtggtaacacctttattgccgatacctacgtcaatgacgaaccagacgcagaagagctggcggagatcaccttgatggcggcagaaactgtccgtcgtttcggtattgaaccgcgcgttgctctgttgtcgcactccaactttggttcttctgactgcccgtcgtcgagcaaaatgcgtcaggcgctggaactggtcagggaacgtgcgccagaactgatgattgatggtgaaatgcacggcgatgcggcgctggtggaagcgattcgcaacgaccgtatgccggacagccctttgaaaggttctgccaatattctggtgatgccgaacatggaagctgcccgcattagttacaacttactgcgcgtttccagctcggaaggtgtgactgtcggtccggtgctgatgggcgtggcgaaaccggttcacgtgttaacgccgatcgcatcggtgcgtcgtatcgtcaacatggtggcgctggccgtggttgaagcgcaaacccaaccgctgtaa

SEQ ID NO: 481846 - DNA, 336 bp, Shigella sonnei
atggataaagaacgcatcattcaggaatttgtgcccggcaaacaggtcacactggcgcatctcatcgcgcatcccggtgaggaactggcgaagaaaatcggcgttccggatgcgggcgtaattggcattatgacgctaactcccggcgaaacggcgatgatcgtcggtgatttagcgctgaaagccgctgatgtgcatatcggttttctcgaccgcttcagcggtgcattggtgatttatggctcggtgggcgcagtagaagaagcgttatcacaaaccgtcagcggtttaggtcgcttattaaattatacgctttgtgaaatgaccaaaagttaa

SEQ ID NO: 481847 - DNA, 480 bp, Shigella sonnei; identical to SEQ ID NO: 459600

SEQ ID NO: 481848 - DNA, 702 bp, Shigella sonnei
gtgaaaaaactcatcacagcgaatgatattcgtgaagcacacgcgcgcggcgaacaggcaatgtccgtggttctgcgcgccagcattattaccccggaagcccgtaaagtggcggatctactgggttttaccatcaccgaatgtgatgaatcgatcccggtaacggcgtccgtgcccgccagcgtgccagccgacaaaaccgaaagccagcgcatccgcgaaaccatcattgcccagctgccggaaggccagtttaccgaaagcctggtcgcacagctgatggaaaaagtgatgaaggaaaaacagtcgctggagcagggcgcaatgcagccgagcttcaaatcggtgaccggcaaaggcggcatcaaagtgattgatggcagcagcgtcaagtttggtcgttttgatggcgcacaaccgcattgcgtgggcttgactgatcttgtgaccggagacgacggcagcagcatggccgccggttttatgcagtgggagaacgcattcttcccgtggaccctgaactacgacgaaatcgacatggtgctggaaggggagctccatgttcgccacgaaggcgaaaccatgatcgccaaagcaggcgacgtgatgtttatcccgaaaggctccagcatcgaatttggtacgacatccagcgtgaaattcctgtatgtcgcctggccggctaactggcaatccctatga

SEQ ID NO: 481849 - DNA, 804 bp, Shigella sonnei
atgaaagatttcatcaccgaagcatggctaagagcgaaccatacgctcagcgaaggcgcagagatccatctccctgcggacagtcgcctgacgccctctgcccgggagttgctggaaagccgccatctgcgcatcaagtttattgacgagcagggccgcctgtttgttgacgatgaacagcagcagccgcagcccgttcatgggctgaccagtagcgatgaacatccgcaggcgtgctgcgaactgtgccgccagccggtggcaaaaaagccggatacgctgactcacctgtcggcggaaaaaatggtcgccaaaagcgatccgcgtctgggttttcgcgcggttctcgacagcaccattgcgctggcagtgtggctgcaaattgaactggcggaaccgtggcagccgtggctggcggatatccgttcgcgtcttggcaacattatgcgcgccgatgcgctgggggaaccgctgggctgccaggcgattgtcgggctttctgacgaagatctgcatcgactttctcaccagccgctgcgctatctcgaccacgatcatctggtgccggaagccagccacgggcgcgatgcggcgttgctcaatctgctacgtaccaaagtgcgggaaaccgaaaccgtagcggcgcaggtgtttatcacccgcagctttgaagtattacgcccggacatcttgcaggcgctgaaccgcctttcgagcacggtctacgtaatgatgatcctgagcgtaacgaagccgccgctaacggtgaagcagatccaacaacgactgggggaaacgcaatga

SEQ ID NO: 481850 - DNA, 1017 bp, Shigella sonnei
atgattattgaacgttgtcgtgaactggcgttgcgagcgcccgccagagtggtttttccggatgcgttagatcaacgtgtgctgaaagctgcgcaatatttacatcaacaaggtctggcaacgcccattctggtcgctaatccgtttgaacttcgtcagtttgcgctcagtcacggcgtggcgatggacgggctacaggtgattgatccgcatggcaacctcgcaatgcgggaagaatttgctcatcgctggctggcccgcgcgggcgaaaaaacgccgccggatgcgctggaaaaacttaccgatccgctgatgttcgccgcagcaatggtcagcgccggtaaagcggatgtctgtatcgcgggcaacctctcttccacggcgaatgtgctgcgtgccggattacgtattatcggcttgcagccaggctgtaaaacgctctcatccattttcctgatgctgccacagtacagcggtccggcgttgggctttgccgattgcagcgtggtgccacagccgacggcggcgcaactggcggatatcgcgcttgccagtgccgaaacctggcgcgccctcaccggagaagagccgcgcgtggcgatgctgtcgttttccagtaacggtagcgcccgtcacccctgcgttgccaacgtccagcaggcgacagaaatcgtccgtgagcgcgcaccaaagctggtggttgatggcgagttgcagtttgacgccgccttcgtgccggaagtggcggcgcaaaaagcgcctgccagcccgctacagggcaaagccaatgtgatggtttttccgtcgctggaagccggaaatattggctacaaaatcgcacaacgactcggcggatatcgtgccgtcgggccattgatacaaggacttgccgcgccgatgcacgatctctctcgtggttgtagcgtgcaggaaattatcgagctggcgctggtggcagctgtgccgcgtcagacagaagtgaaccgcgaaagcagtttacaaacactggttgaatga

SEQ ID NO: 481851 - DNA, 294 bp, Shigella sonnei
atggaagcattaggaatgatcgaaacccggggcctggttgcactgattgaggcttctgacgcgatggttaaagctgcgcgcgtcaagctggttggtgttaagcagattggcggcggcctgtgtactgccatggttcgtggtgatgttgcagcctgtaaagccgcgaccgatgcaggtgccgcagcggcacagcgtatcggcgagctggtatctgtacacgttatcccgcgtccgcacggcgacctggaagaagtcttcccgatcggcctgaaaggcgatagcagcaacctgtaa

SEQ ID NO: 481852 - DNA, 288 bp, Shigella sonnei
atgaaactggcagtcgtcactggacaaattgtttgtaccgtacgccatcacggactggcgcatgacaaattgctgatggtggaaatgattgatccacaaggtaatcctgacgggcaatgcgccgtcgccatcgacaatattggcgcgggaaccggggagtgggtgttactggtgagtggcagttccgcccgccaggcgcataaaagcgaaacgtcaccggtcgatctgtgcgtgattggcattgtcgatgaggtggtgtctggcggtcaggtaattttccacaaataa

SEQ ID NO: 481853 - DNA, 1404 bp, Shigella sonnei
atgaatcaacaggatattgaacaggtggtgaaagcggtactgctgaaaatgcaaagcagtgacacgccgcccgccgccgttcatgagatgggcgttttcgcgtccctggatgacgccgttgcggcagccaaagtcgcccagcaagggttaaaaagcgtggcaatgcgccagttagccattgctgccattcgtgaggcaggcgaaaaacacgccagagatttagcggaacttgccgtcagtgaaaccggcatgggccgcgttgaagataaatttgccaaaaacgtcgctcaggcgcgcggcacgccaggcgttgagtgtctctctccgcaggtgctgaccggcgacaacggcctgactttaattgaaaacgcgccctggggcgtggtggcttcggtaactccgtccactaacccggcggcaaccgtaattaataacgccatcagcctgattgccgcgggcaacagcgtcatttttgccccgcatccggcggcgaaaaaagtctcccagcgggcgatcacgctgctcaaccaggcgattgttgccgcaggcgggccggaaaacttactggttactgtggcaaatccggatatcgaaaccgcgcagcgtttgttcaagtttccgggcatcggccttctggtggtgaccggcggcgaagcggtagtagaagcggcgcgtaaacacaccaataaacgtctgattgccgcaggcgctggcaacccgccggtagtggtggatgaaaccgccgacctcgcccgtgccgctcagtccatcgtcaaaggcgcttctttcgataacaacatcatttgtgccgacgaaaaggtactgattgttgttgatagcgtagccgatgaactgatgcgtctgatggaaggccagcacgcggtgaaactgaccgcagaacaggcgcagcagctgcaaccggtgttgctgaaaaatatcgacgagcgcggaaaaggcaccgtcagccgtgactgggttggtcgcgatgcggcgaaaatcgcggcggcaatcggcctgaacgtgccgcaagaaacgcgtttgctgtttgtggaaaccactgcagaacatccgtttgccgtgaccgaactgatgatgccggtgctgcccgtcgtgcgcgtcgccaacgtggcggatgccattgcgctggcggtgaaactggaaggcggttgccaccacacggcggcaatgcactcgcgcaacatcgaaaacatgaaccagatggcgaatgctattgataccagcattttcgttaagaacggaccgcgcattgccgggctggggctgggcggggaaggctggaccaccatgaccatcaccacgccaaccggtgaaggggtaactagcgtgcgtacgtttgtccgtctgcgtcgctgtgtattagtcgatgcgtttcgcattgtttaa

SEQ ID NO: 481854 - DNA, 837 bp, Shigella sonnei
atggcgcacgacgaacaatggctcaccccacgtctgcaaacggcggcaacgctgtgtaaccagacgcccgccgcgacggaatctccgctgtggctgggggtggatctgggcacctgcgatgtggtgtcgatggttgtcgaccgcgacggtcagtcggtggcggtatgcctcgactgggccgatgtggtccgcgacggcatcgtctgggatttcttcggcgctgtcaccattgttcgtcgccatctcgacacgctcgagcagcaattcggtcgccgttttagccatgcggcgacttcatttcctccaggtacggacccgcgtatttccatcaacgtgctggagtctgctggactggaagtgagccatgtgctggatgagccaaccgcagttgcggatctgctgcaactggacaacgccggtgtagtggatatcggcggcggcactaccggcattgccatcgtgaaaaagggcaaggtgacgtactcggcggatgaagcaaccggcggacatcacatctctctgactctcgccggaaatcgccgtatttcgctggaagaggcggagcagtacaagcgcggtcacggtgaagagatttggcctacggtgaaaccggtgtacgaaaaaatggcggacattgtcgcccggcatattgaagggcagggcattactgatttatggctggcgggcggctcttgtatgcaaccgggcgtggcggaactgtttcgcaaacaattcccggcgttacaggtgcatttaccgcagcacagtttgtttatgaccccgctggcgatcgccagtagtgggcgagagaaagcggaggggctatatgcaaaatga

SEQ ID NO: 481855 - DNA, 1188 bp, Shigella sonnei
atgcaaaatgaattgcagaccgcgctctttcaggcgttcgataccctgaatctgcaacgggtaaaaacatttagcgttccaccggtgacgctttgcggtccgggctcggtgagcagttgcggacagcaagcgcaaacgcgtgggctgaaacatctgttcgtgatggcagacagctttttgcatcaggcagggatgaccgccgggctgacgcgcagcctggctgttaaaggcatcgccatgacgctctggccatgtccggtgggcgaaccgtgcatcaccgacgtgtgtgcagccgtggcgcagttgcgtgagtcaggctgtgatggggtgatcgcatttggcggcggctcggtgctggatgcggcgaaagccgtggcgttgctggtgacgaacccggatagcacgctggcagagatgtcagaaaccagcgttctgcaaccgcgcttgccgctgattgccattccaacgaccgccggaaccggctctgaaaccaccaatgtaacggtgattatcgacgcggtgagcgggcgcaagcaggtgttagcccatgcctcgctgatgccggatgtggcgattctcgacgccgcgttgaccgaaggtgtgccgtcgcatgtcacggcgatgaccggcattgatgcgttaacccatgccattgaagcatacagcgccctgaacgctacaccgtttaccgacagtctggcgattggtgccattgcgatgattggcaaatcgctgccgaaagcggtgggctacggtcacgaccttgccgcgcgcgagagcatgttgctggcttcatgtatggcgggaatggcgttttccagtgcgggtcttgggttgtgccacgcgatggcgcatcagccgggcgcggcgctgcatattccacacggtctggcgaacgccatgttgctgccaacggtgatggaatttaaccggatggtttgtcgtgaacgctttagtcagattggtcgggcactgcgaactaaaaaatccgacgatcgtgacgctattaacgcggtaagtgagctgattgcggaagttgggattggtaaacgactgggcgatgttggtgcgacatctgcgcattacggcgcatgggcgcaggccgcgctggaagatatttgtctgcgcagtaacccgcgtaccgccagcctggaacagattgtcggactgtacgcggcggcgcaataa

SEQ ID NO: 481856 - DNA, 489 bp, Shigella sonnei
atgggaattaacgaaatcatcatgtacatcatgatgttctttatgctgatagctgccgtagacaggatcctgtcgcagttcggcggttctgctcgtttcctcggtaagttcggtaaaagtatcgaaggatcaggcggtcagttcgaagaaggctttatggcaatgggcgctctgggtctggcgatggtcggtatgaccgcgctggcaccggtactggctcacgtactcgggccggtaattatcccggtttacgaaatgctcggcgcaaacccgtcaatgttcgccggaacgctgctggcgtgcgatatgggcggcttcttcctcgccaaagagctggcgggcggcgatgtagcagcgtggctatactctgggttaattcttgggtcgatgatggggccaacgattgtgttttccattccggtgcgctcggcattatcgaaccttctgaccgtcgttatctggcgctcggcgtgctggcgggcattgtga

SEQ ID NO: 481857 - DNA, 741 bp, Shigella sonnei
gtgaccattccgattggctgtattgctggtggtctggttgctatgtactccggtgtgcagatcaacggtcagccggtggaattcactttcgccctgatcctgatgaacatgatcccggtgatcattgttgcgattctggtggcgctggggctgaaattcatcccggaaaaaatgatcaacggcttccagatcttcgccaaattcctcgttgcattgatcaccctcggtcttgctgccgcggtagttaagtttctgcttggctgggaactgatccccggtctggaccctatctttatggcccctggcgataaacccggtgaagtgatgcgcgccattgaagttatcggttctatctcctgcgttctgttaggggcgtatccaatggtgctgctgctgacccgctggtttgaaaaaccgctgatgagcgtcggtaaagtgctgaatatgaacaacatcgcggcagccggcatggtggcaacgcttgccaacaacatcccgatgttcggcatgatgaagcagatggatacccgcggcaaagtcatcaactgcgccttcgccgtttccgctgctttcgccctgggcgaccacttaggcttcgccgctgccaacatgaacgccatgatcttcccgatgattgtcggcaagttgatcggcggcgtaacggcgattggcgtggcgatgatgctggtgccaaaagaagacgcgaccacggctaaaaccgaagcggaggcacaatcgtga

SEQ ID NO: 481858 - DNA, 1404 bp, Shigella sonnei
gtgaacactcgccagctattgagcgtcggtatcgatatcggcaccaccaccacccaggtgattttctcccacctggagctggttaaccgtgcggcggtgtcgcaggtgccgcgctacgaattcattaaacgcgaaattagctggcaaagcccggtgttctttacccctgtcgataaacagggtggtttaaaagaagcggaactgaaaaccttaatcctcgagcaatatcaggctgcgggcattgcgccggaaagcgttgattctggtgccatcatcatcaccggtgaaagcgcgaaaacccgcaatgctcgtccggcggtgatggtgctctcccagtcgctgggcgattttgtcgttgccagcgccgggccgcacctcgaatccgtcattgccggtcacggtgccggggcacaaaccctttctgaacaacggctgtgtcgggtactgaatattgacatcggcggtggcactgcgaactacgccctgttcgatgccggaaaaatcagcggcactgcctgcctcaacgtcggtggtcgcctgctggaaaccgacagccaggggcgcgtggtttacgctcataaaccggggcagatgattgtggatgagtgcttcggcgcaggcaccgacgcccgttcgctgaccggcgcgcagctggtgcaggttacccggcggatggcagaactgattgtcgaagtgattgacggaacgctctcgccgctcgcgcaggcattgatgcaaaccggtttgctgcccgcaggtgttacgcccgaaatcattacgctttctggcggcgtgggcgaatgttatcgccaccagcccgccgacccgttctgttttgccgatattggcccgctgctggcaacggcgctgcatgaccatccgcgcctgcgtgagatgaacgtacagtttccggcgcaaaccgtgcgcgccacggtgattggcgcgggcgcgcataccctttcgctctctggcagcacaatctggcttgagggcgtacaactgccgctgcgcaatttgccggtggcgatcccgattgatgaaacggatctggtgagtgcctggcaacaggcgctgcttcagctggatcttgatcccaaaactgacgcgtacgtgctggcgcttcccgcctcgctgcctgtgcgttacgccgcggtactgacggtcatcaacgcgctggtcgatttcgtcgcgcgttttccaaatccgcatcccctgctggtggtggccgggcaggactttggtaaagctctgggcatgttgttgcgcccacagctacaacaactcccgttggcagtcattgacgaagtgattgtccgcgcgggggactatatcgacattggtacgcctctttttggcggatcggttgtgccggtgacggtgaaatcactcgcatttccttcctga

SEQ ID NO: 481859 - DNA, 912 bp, Shigella sonnei
atgaaactaaagaccacattgttcggcaatgtatatcagtttaaggatgtaaaagaggtgctggctaaagccaacgaactgcgttcgggggatgtgctggcgggcgttgcagcggcaagctcacaggagcgcgtggcggcaaagcaggtgttgtcggaaatgaccgtagcggacatccgcaataatccggtgattgcctatgaagatgactgcgtgacgcggctgattcaggacgatgttaacgaaacggcctacaaccagattaaaaacaggagcatcagcgaactgcgtgagtatgtgctgagcgatgaaaccagcgtggacgacattgcctttacccgcaaagggctgacctcggaagtggtcgcggcggtagcgaagatttgctccaacgcggacctgatctacggcgcgaagaaaatgccggtaatcaaaaaggccaataccaccatcggtattccgggcaccttcagcgcccgtttgcagccaaatgacacccgtgacgacgtgcaaagtatcgctgcacaaatctacgaagggctttccttcggggtgggcgatgcggtgatcggcgttaacccggtaactgacgacgtggaaaacttaagccgcgtgttggacaccatttacggcgtgatcgacaaattcaacatcccaactcagggctgcgtactggcgcacgtcaccacccagatcgaagcgattcgtcgcggcgcgcctggcggactgattttccagagtatctgtggcagcgaaaaagggctgaaagagtttggcgtggaactggcgatgctcgacgaagcgcgcgcagtgggtgctgagttcaaccgtatcgccggggaaaactgcctctacttcgaaaccgggcaaggttcggcgctgtctgctggcgctaacttcggcgcagactag

SEQ ID NO: 481860 - DNA, 444 bp, Shigella sonnei
atggaagcacgtaactatgggctggcgcgtcattacgatccgtttatcgtcaacaccgtggtcggctttattgggccggagtatctctacaacgaccgccagattatccgtgctggcttagaagatcactttatgggcaagctgagcggcatctctatgggctgtgactgctgttacaccaaccacgctgatgctgaccagaacctcaacgaaaacctgatgatcctgctcgccaccgcaggctgcaactacatcatggggatgccgctgggcgatgacatcatgctcaactatcagaccaccgcattccacgacactgccactgtgcgtcagttactcaacctgcgcccgtcaccggagtttgaacgctggctggaaagcatgggcattatggcaaacggtcgcctgaccaaacgggcgggcgatccgtcactgttcttctga

SEQ ID NO: 481861 - DNA, 888 bp, Shigella sonnei
atggatcaaaaacagattgaagaaattgtacgcagcgtgatggcgtcaatgggacaagcggcccccgcgccgtcagaagcaaagtgcgccaccactaactgtgcggcaccggtgacctcggaaagctgcgcgctggatttaggttctgcggaagcaaaagcgtggattggtgttgaaaacccgcatcgcgcagacgtattaacagaactgcgccgcagcaccgtggcccgcgtttgtaccggtcgtaccggtccgcgtccacgtacgcaggcgctgctgcgtttcctggccgatcactctcgttcgaaagataccgtactgaaagaagtgccggaagagtgggtgaaagcgcagggcttgctggaagtacgctccgaaattagcgacaaaaatctctacctgactcgcccggatatgggccgccgcctgtgtgcagaagctgttgaagcgctgaaagcacagtgtgttgctaatccggacgtacaggtcgttatttctgatggcctgtcaactgatgccatcaccgtgaactacgaagagatcctgccgccgctgatggcgggcctgaaacaggccgggctgaaagtcggcacgccattctttgttcgttatggtcgcgtgaagattgaagatcagatcggtgagatcctcggcgcgaaagtggtgatcctgctggtgggggaacgtccggggttgggtcagtcagaaagcctctcctgttacgccgtttactcgccgcgtatggcgaccaccgttgaggccgatcgcacctgcatctctaacattcaccagggcggcacgccgccggttgaagccgcagccgtcattgtggatttggcgaaacgtatgctggagcagaaagcatccggcatcaacatgacccgataa

SEQ ID NO: 481862 - DNA, 660 bp, Shigella sonnei
atgccagctttagatttgattcgaccgtcggtaaccgctatgcgggtgattgcctccgttaacgctgaatttgcgcgtgaactaaaattgccgccgcatattcgtagcctcgggctgatttctgctgattccgatgacgtcacctacattgcggctgacgaagcgaccaagcaggcgatggtcgaagtggtatatggccgctcgctgtatgcgggagcagcacacggaccgtcaccgactgccggtgaagtgctgattatgcttggtgggccaaacccggcggaagtgcgtgctggtctggatgcgatggttgcgcatattgaaaatggcgctgctttccagtgggctaatgacgcagaaaacaccgcattcctggcacatgtagtttcgcgtaccggttcttatctttcatcaaccgccgggatcacgcttggcgatccgatggcgtatctggtggcaccgccgctggaagcgacctacggcattgatgcagcgttgaaatctgccgacgtacagctggtgacctatgtcccgccaccgtctgaaaccaactactcggcagcatttttaaccggtagccaggccgcgtgtaaagcagcctgtaacgcctttaccgatgcagtgctggaaatcgcgcgtaatccaatccagcgtgcgtaa

SEQ ID NO: 481863 - DNA, 501 bp, Shigella sonnei
atgatcaatgcactgggattgctggaagtggacggcatggtcgccgcgatagatgcagcggatgccatgctcaaagcagctaacgttcgtctgctcagtcacgaagtgcttgaccctggtcgcttaacgctggtggtggaaggcgatctggcggcgtgtcgtgcggcgctggacgcaggttgtgctgccgcgatgcgtaccgggcgtgtcatcagccgcaaggagatcggtcggccagacgatgacacccagtggctggttactggctttaaccgccagccgaagcaacccgtaaaggaacccgacgcgccagttatcgtcgcggaatctgctgacgagttgttggcgctgttaacatcagtacgtcagggaatgacggcaggagaagtggctgcccactttggctggccgctggaaaaagccagaaatgcgctcgaacagctcttttctgccgggacgttacgtaaacgcagtagtcgttatcgtctcaagccccattaa

SEQ ID NO: 481864 - DNA, 1053 bp, Shigella sonnei
atgaaaaagacccgtacagccaatttgcaccatctttatcatgaacccttacccgaaaacctgaagctcacgccgaaggtcgaagtggataatgttcatcaacgacagacaacggatgtctatgaacatgctttgacgattaccgcctggcagcagatttacgatcagctgcatccgggcaagtttcatggtgaatttacggaaattctgctcgatgatattcaggtttttcgtgaatacaccggtctggcgctgcgtcagtcgtgcctggtctggccgaactcgttctggtttggcattccggcgacgcgcggtgagcagggatttatcggttcgcaatgtctgggaagcgcagaaatagcgacgcgccccggtggaaccgagtttgaattaagtacgccggacgattatacgatcctgggcgtagtgctgtctgaagatgtcatcacccgtcaggctaactttttgcacaatccggatcgggtattacatatgctgcgtagccagtcggcgctggaagtgaaagagcagcataaagccgcgctgtggggctttgtccaacaggcgctggcgacgttttgcgagaacccggaaaatctccatcagcctgcagtgcgaaaagtgctgggggataatttgctaatggcgatgggggcgatgctggaagacgcgcaaccaatggtgacggcggaaagcatcagtcatcagagttaccgtagattactttcccgcgcccgtgaatatgtgctggaaaatatgtctgagctggtgacggtgctggacttgtgtaatcaactgcatgtcagtcgccgcacgctacaaaacgcgtttcacgctattttaggcattggcccaaacgcgtggctgaaacgcattcgcctgaacgccgtacgccgcgaactgataagcccgtggtcgcaaagcacaacggtaaaagacgccgccatgcagtggggattctggcatctggggcaatttgccacggattaccagcagctgtttgccgagaagccgtcgttgacgttgcatcagcggatgcgggaatgggggtga

SEQ ID NO: 481865 - DNA, 900 bp, Shigella sonnei; identical to SEQ ID NO: 459264

SEQ ID NO: 481866 - DNA, 870 bp, Shigella sonnei; identical to SEQ ID NO: 459265

SEQ ID NO: 481867 - DNA, 426 bp, Shigella sonnei
atggagatacgcgtatttcgccaggaagatttcgaagaggtcatcaccctttgggagcgttgcgacttgctgcgtccgtggaacgatccggaaatggacatcgagcgtaagatgaaccatgacgtcagtttgtttttggtcgctgaggtaaacggtgaagtggtcggaacggtgatgggcggttatgacgggcatcgcgggtctgcttattatcttggcgtgcatccagagtttcgtgggcgtgggattgccaatgcgttgcttaatcggctggagaaaaagctgattgctcgtggctgcccgaaaattcagatcaatgtgccggaagataacgacatggtgctcggaatgtatgaacgcctgggatatgaacacgccgacgtgctgagtctgggtaagcgtttgattgaagatgaagagtactga

SEQ ID NO: 481868 - DNA, 450 bp, Shigella sonnei
atgaagagtactgagttccatcctgtccattatgatgcgcacggacgcctgcgtttacccttgctcttctggcttgtgctattgcttcaggcgcgaacctgggtgctgtttgtcattgccggtgcgtcgcgcgagcagggtactgcgctgctaaatctgttttatcccgatcacgataatttctggctggggctgattccaggcattccggcggtgctggcgtttttgttgagcggtcggcgggctacatttcctcgcacttggcatgtgctctattttctgttgctgttggcgcaggtggttttactttgctggcaaccgtggctgtggctgaacggtgaatccgttagcggtatcggtctggcgctggtagtggcggatattgtggcgttaatctggctgctgaccaatcgacgtttacgcgcttgttttaatgaagaaaaagaataa

SEQ ID NO: 481869 - DNA, 576 bp, Shigella sonnei
atgaaatcgctgcgtttaatgttatgcgctatgccgttgatgctgaccggctgttccacgatgtcgtcagttaactggtcggccgctaacccgtggaactggtttggatcgtccaccaaagtgagcgagcagggcgtgggtgaattaacggcgtccacaccactgcaagaacaagccattgctgatgcgcttgatggcgattatcgcctgcgcagcggaatgaaaaccgcgaacggcaacgtggtgcgcttttttgaagtgatgaaaggcgacaacgtggcgatggtgattaacggcgatcaaggcacgatcagtcgcattgacgtgctggatagcgatattcctgctgacaccggtgttaaaatcggtacaccgtttagcgacctttacagcaaagcatttggcaattgccaaaaagctgatggtgatgataatcgtgccgtcgaatgtaaagccgaaggcagtcaacatattagctaccagttcagcggggaatggcgtggtcctgaagggttaatgccttcggacgataccctgaaaaactggaaagtcagtaaaattatctggcggcgttaa

SEQ ID NO: 481870 - DNA, 900 bp, Shigella sonnei
atgtctcaggttcagagtggcattttgccagaacattgccgcgcggcgatttggatcgaagccaacgtgaaaggggaagttgacgccctgcgtgcggccagtaaaacatttgccgacaaactggcaacttttgaagcgaaattcccggacgcgcatcttggtgcggtggttgcctttggtaacaacacctggcgcgctctgagcggcggcgttggggcagaagagctgaaagattttccgggctacggtaaaggccttgcgccgaccacccagttcgatgtgttgatccacattctttctctgcgtcacgacgtaaacttctctgtcgcccaggcggcgatggaagcctttggtgactgcattgaagtgaaagaagagatccacggcttccgttgggtggaagagcgtgacctgagcggctttgttgacggtacagaaaacccggcgggtgaagagacgcgtcgcgaagtggcggttatcaaagacggcgtggatgccggcggcagctatgtgtttgtgcagcgttgggagcacaacctgaagcagctcaaccggatgagcgttcacgatcaggagatgatgatcgggcgcaccaaagaggccaacgaagagattgacggcgacgaacgtccggaaacctctcacctcacccgcgttgatctgaaagaagatggcaaagggctgaagattgttcgccagagcctgccgtacggcaccgccagtggcactcacggtctgtacttctgcgcctactgcgcgcgtctgcataacattgagcagcaactgctgagcatgtttggcgataccgatggtaagcgtgatgcgatgttgcgtttcaccaaaccggtaaccggcggctattacttcgcgccgtcgctggacaagttaatggcgttgtaa

SEQ ID NO: 481871 - DNA, 1305 bp, Shigella sonnei
atgaaacggacaatgctctatctttctctgctggctgttagttgtagcgtcagcgccgcaaaataccctgttctgacagaaagctcgccagagaaagcagggtttaacgtcgaacggcttaaccagatggatcgctggattagccagcaaattgatgtcggttatcccggcgtaaacctgctgatcattaaagataatcagattgtgtatcgcaaagcctggggagcggcgaaaaagtacgatggcagcgtgttgatggaacagcctgtcaaagccaccaccgggacgctgtatgacctggcctcaaacaccaaaatgtacgccacgaacttcgccctgcaaaagctgatgagcgaaggcaaactgcatcctgacgatcggattgcgaaatatattccggggtttgccgatagtccaaatgacaccattaaaggcaaaaacaccctgcggatttctgacctgctgcatcacagcggcggtttcccggcagatccgcaatacccgaataaagcggtcgcgggcgcgttatattcccaggataaaggccagacgctggagatgatcaagcgcacgccgctggaatatcagcccggcagcaaacatatctacagcgatgtcgattatatgctgcttggatttatcgtcgagtcggttaccggtcagccgcttgaccgctatgttgaagagtcgatttatcgcccgctcggcctgacacatacggtatttaacccgctgctgaaaggctttaaaccgcaacaaattgccgccacggaattgaacggcaatacccgcgatggcgtgatccatttcccgaatatccgcacctccactctctggggtcaggtgcacgatgaaaaagccttttattcgatgggcggcgtttccgggcacgcaggtttgttttccaataccggcgatattgcggtgttaatgcaaacgatgctgaacggcgggggctatggcgatgtgcagctgttcagtgcggaaacggtgaagatgttcaccaccagctctaaggaagatgccacttttggcctcggctggcgcgtgaatggtaatgccaccatgacgccgacgtttggcacgctggcaagcccgcaaacctacggtcacactggctggaccgggacagtaaccgttatcgatccggtcaatcatatggcgattgtgatgttaagcaacaagccccattcgccagttgccgatccacaaaaaaatcccaatatgttcgaaagcggtcagttaccgattgcaacttatggttgggtagttgatcaggtgtatgcggcgttgaagcaaaagtaa

SEQ ID NO: 481872 - DNA, 219 bp, Shigella sonnei
atggcaggcgcgggccaggtgggcgcggcgctggcactctactggcgggcgcaaccgcacagtgcgctacgcagtcaggtacgcggggcgattattcccggcctgctgggcgttggtgaaccgctgatttacggtgtcaccctgccccgcatgaagccgtttgttaccgcctgtttaggcggcgcggcgggcggtttgtttatcggcctgatagcctga

SEQ ID NO: 481873 - DNA, 990 bp, Shigella sonnei
atggccaaagagatcagcagtgaacttctgaacaccattcttacccgtgtcggcggactgggaaatatcgccagttgtggtaactgtatgacgcgcctgcgtctgggtgtacatgacagttcactggttgatcccaatatcaaaacgctggaaggcgtgaagggcgtcattttgaccagcgaccaggtgcaggtcgtttttgggcctggtaaagcgcatcgtgccgcaaaagcgatgagcgagctgctgggcgaggcaccggtacaggatgccgcagaaatcgccgcccagaacaaacgtcagttaaaagccaaacaaacctccggcgtgcaacaatttctcgccaaattcgccaccatcttcacgccgctgatccccggttttattgccgccggtctgctgctggggatagcgacgttaattgccacggtgatgcacgttccggcagatgctcagggcacgctacccgacgcgctgaattttatgaaggtgttcagcaaaggtttgttcactttcctggtgattctggtgggctataacgccgcccaggcatttggcggcacgggcgtcaatggcgcaattattgccgcactctttttgctcggttataaccccgctgcaaccaccggtgactacgccggttttcacgatttctttggtctgcccatcgatccgcgcggcaatattatcggcgtgctgattgccgcgtgggcctgcgcccgcattgaaggcatggtgcgccgctttatgtcggacgatctcgacatgctgctgacctcgttaatcaccctgctgatcaccgctacgcttgcgtacctgatcattatgccgctgggtggctggttattcgaaggtatgtcatggctgtttatgcacctgaacagtaatccgttcggttgtgcggttttagccgggctgttcctgatcgccgtggtatttggcgtgcatcagggctttattcctgtttacctcgcgttaatggacagctag

SEQ ID NO: 481874 - DNA, 897 bp, Shigella sonnei
atgcaacttgaaaagatgattactgaaggctcgaacaccgcctcggctgaaattgaccgcgtatcgacgctggaaatgtgccggattatcaacgatgaagataaaaccgtaccgcttgccgttgagcgcgtcctgccggatatcgccgcggcgatcgatgttatccacgcccaggtaagcggcggcggtcgtctgatttatctcggtgcgggaacatccggtcgtctggggattctggatgccagcgaatgtccgcccacctacggcgtgaaaccgggtctggtggttggtttgattgctggcggcgaatatgccattcagcacgcggtggaaggcacggaagatagccgagaaggcggcattaacgatctgaaaaatataaatttaacggcacaggatgtggtggtcggtattgccgccagcggtcgtacgccgtatgtgattgccggactggaatacgcccgccagctcggttgccgcacagtgggaatttcctgtaatccggggagtgccgtttccaccaccgccgagtttgccattacaccgattgtaggtgccgaagtggtcactggttcttcgcgaatgaaagcaggcacagcgcagaaactggtgctcaatatgctttccaccgggctgatgattaaatccggcaaagtgttcggcaacctgatggtcgatgtggtcgccaccaacgaaaaactgcatgtgcgccaggtcaatatcgttaaaaacgccaccggatgtaatgccgaacaagcggaagcggcgttaattgcctgcgagcgcaactgtaaaacggccattgtgatggtgctgaaaaatctcgatgccgcagaagctaaaaaacgcctggatcaacacggcggctttattcgtcaggttttagacaaggaataa

SEQ ID NO: 481875 - DNA, 858 bp, Shigella sonnei
atgttgtacctgacgaaaatacgcaatgcggaaagtgaatttaccgagaacgagcaaaaaattgctgactttctgcgggccaacgtgagtgagctgaaatccgtctcttcgcgcaagatggcgaaacagctcggcatcagtcagtcgagcattgtgaaatttgcccagaagctcggcgcgcaaggatttactgaattgcgtatggcgttaattggcgaatacagtgccagccgggagaaaacgaatgccacggcgctgcacctgcacagttcgattaccagtgatgattcgctggaagtgattgcccgcaaactgaatcgcgaaaaagagctggcgctggagcaaacctgtgcgttgttcgactacgctcggctgcaaaaaatcattgaggtcatcagtaaagcaccgtttatccagataacgggcctgggcgggtcggcgctggtggggcgcgatctgtcgttcaaactgatgaaaattggctatcgcgtggcctatgaagccgacacacacgtacaagccaccgtttcccaggcgttgaaaaaaggcgatgtacaaatcgctatctcttacagcggcagtaaaaaagagattgtcttgtgcgcagaagcggcacgaaagcagggggcaacggtgattgccattacttctctggctgactctccgctgcggcggctggcgcatttcacgctcgataccgtttccggtgaaaccgaatggcgtagctcgtcgatgtctacccgcacggcgcaaaattctgttaccgatttactgtttgttggtcttgtgcaactcaatgatgtggagtcattgaaaatgattcagcgcagcagtgagctaacacaacgcctgaaatga

SEQ ID NO: 481876 - DNA, 792 bp, Shigella sonnei
atgggtaaactcacgggcaagacagcactgattacgggcgcattgcagggaattggcgaaggaattgccagaacttttgcgcgtcatggcgcaaacctaatcttgctggatatctcccctgagatcgaaaagctggcggacgaactgtgtggtcgtggtcatcgctgtacggcggttgtcgccgatgtgcgtgacccggcgtcggtagccgcagctatcaaacgcgcgaaggaaaaagaagggcgcattgatatcctggtgaataacgcaggcgtttgtcgtctgggcagtttcctcgatatgagcgatgacgatcgcgatttccatattgacatcaatattaaaggcgtatggaacgtcacgaaggcggtgctgccggagatgattgcccgcaaagatggtcgcattgtgatgatgtcttcagtcactggtgatatggtggccgatcctggcgaaacggcgtacgccttaacgaaagcggcgattgttggcctgacaaaatcgctggcggtggagtacgcgcagtctggtattcgcgttaacgccatttgcccgggatacgtgcgcacaccaatggcggaaagcattgcccgccagtcgaacccggaagatccagagtcggtgctgactgaaatggcgaaagcaatcccgctgcgtcgcctcgccgatccgctggaagtcggcgaactggcggccttcctcgcatcggatgaatccagctatttaaccggtacacagaatgtgattgatggcggcagcacactgccggagacggttagcgtcggtatctga

SEQ ID NO: 481877 - DNA, 1017 bp, Shigella sonnei
atggccgttaacttactgaaaaagaactcactcgcgctggtcgcttctctgctgctggcgggccatgtacaggcaacggaactgctgaacagttcttatgacgtctcccgcgagctgtttgccgccctgaccccgccgtttgagcaacaatggaccaaagaaaacggcggcgacaaactgacaataaaacaatctcatgccgggtcatcaaaacaggcgctggcaattttgcagggcttaaaagcagacgttgtcacttataaccaggtgactgacgtacaaatcctgcatgacaaaggcaagctgatcccggcggactggcaaacgcgcctgccaaataatagctcgccattctactccaccatgggcttcctggtgcgtaagggcaacccgaagaatatccacgactggaacgacctggtgcgctccgatgtgaagctgattttcccgaacccgaaaacgtcgggtaacgcgcgttacacctatctggcggcatggggcgcagcggataaagctgacggtggcgataaagccaaaaccgaacagtttatgacccagttcctgaaaaacgttgaagtgttcgatactggcggtcgtggcgcgaccaccacttttgccgagcgcggcctgggcgatgtgctgatcagcttcgagtcggaagtgaacaacatccgtaaacagtatgaagcgcagggttttgaagtggtgattccgaaaaccaacattctggcggaattcccggtggcgtgggttgataaaaacgtgcaggccaacggtacggaaaaagccgccaaagcctaccttaactggctctacagcccgcaggcgcaaaccatcatcaccgactattactaccgcgtgaataacccggaagtcatggataaactgaaagacaaattcccgcagaccgagctgttccgcgtggaagacaaatttggctcctggccggaagtgatgaaaacccacttcaccagcggcggcgagttagacaagctgttagcggcggggcgtaattaa

SEQ ID NO: 481878 - DNA, 834 bp, Shigella sonnei
atgtttgcagtttcatcaagacgcgtgctgccgggctttaccttaagcctcggcaccagtctgctgtttgtgtgcctgattttgctgctgccgctctccgcgctggtgatgcagctggctcagatgagctgggcgcagtactgggaggtgatcaccaacccgcaggtagtagcggcctacaaagtaacgctgctgtcagcgtttgtggcatcgatttttaacggcgtttttggcctgctgatggcgtggatcttaacccgctatcgctttccgggccgcacgctgcttgatgcgctgatggatttaccctttgcgctgccaacggcagtcgccggtttaacgctagcctcgctcttttctgtaaacggtttttacggtgaatggctggcgaagtttgatatcaaagtcacctatacctggctggggattgcggtggcgatggcctttaccagcattccgtttgtggtacgtaccgtgcagccggtgctggaagagttaggcccggaatatgaagaagcggcagaaacgcttggcgcaacgcgctggcagagtttctgcaaagtggtgctgccggaactttctccggcgctggtggcgggcgtggcgctgtcgtttacccgtagtcttggtgaatttggcgcggtgatttttatcgccggaaatatcgcgtggaagacggaagtgacgtcgctgatgatttttgtgcgcttacaggagtttgattacccggcagcgagcgcgattgcttcggtgatcctcgcggcatctctgctgctgctgttctcaattaacactctgcaaagtcgctttggtcggcgtgtggtaggtcattaa

SEQ ID NO: 481879 - DNA, 876 bp, Shigella sonnei
atggcggaagttacccaattgaagcgttatgacgcgcgcccgattaactggggcaaatggtttctgattggcatcgggatgctggtatcggcgttcatcctgctggtgccgatgatttatatcttcgtacaggcgttcagcaaagggctgatgccggttttacagaatctggccgatccggacatgctgcacgccatctggctgacggtgatgatcgcgctgattgccgtaccggtaaacctggtgttcggcattctgctggcctggctggtgacgcgctttaacttccctggacgccagttactgctgacgctactggacattccgtttgccgtatcgccggtggttgccggtctggtgtatctgctgttctacggctctaacggcccgctgggcggctggctggatgaacataatctgcaaattatgttctcctggcccggaatggtgctggtcaccatctttgtgacgtgtccgtttgtggtgcgcgagctggtgccggtgatgttaagccagggcagccaggaagacgaagcggcgattttgcttggcgcgtctggctggcagatgtttcgccgcgtcacattgccgaacattcgctgggcgctgctttatggcgtggtgttgaccaacgcccgcgcaattggcgagtttggcgcggtgtcggtggtttccggctcgattcgcggcgaaaccctgtcgctgccgttacagattgaattgctggagcaggactacaacaccgtcggctcctttaccgctgcggcactgttaacgctgatggcgattatcaccctgtttttaaaaagtatgttgcagtggcgcctggagaatcaggaaaaacgcgcacagcaggaggaacatcatgagcattga

SEQ ID NO: 481880 - DNA, 1098 bp, Shigella sonnei
atgagcattgagattgccaatattaagaagtcgtttggtcgcacccaggtgctgaacgatatctcactggatattccttcaggtcagatggtcgcgttgctggggccgtccggttccgggaaaaccacgctgctgcgcattatcgccgggctggagcatcaaaccagcgggcatattcgcttccacggcaccgacgtcagccgcctgcacgcgcgcgatcgcaaggtcggtttcgtgttccagcattacgcgctgttccgccatatgacggtattcgacaatatcgcttttggcctgacggtgctgccgcgtcgcgatcgcccgaatgccgcagccatcaaagcgaaagtgacaaaattgctggagatggtgcagcttgctcatctggcggatcgttatccggcacagctttccggcggccagaaacagcgcgtggcgctggcgcgcgcgctggctgtagaaccgcaaattctgctgcttgatgaaccgtttggcgcgctggatgcgcaggtgcgtaaagagctgcgtcgctggctgcgtcaactgcatgaagagctgaaattcaccagcgtgttcgtgacccacgaccaggaagaagcgacggaagtagctgatcgtgtagtggtgatgagccagggcaatattgaacaggctgatgcgccggagcaggtatggcgcgaaccagcgacccgttttgtgctcgaatttatgggcgaagtgaaccgcctgcagggaaccattcgcggcgggcagttccatgttggcgcacatcgctggccgctgggctacacacctgcttatcaggggccggtggatctcttcctgcgcccgtgggaagtggatatcagccgccgtaccagtctcgattcgccgctgccggtacaggtactggaagccagcccgaaaggtcactacacccaattagtggtgcagccgctggggtggtacaacgaaccgctgacggtcgtgatgcatggcgacgatgccccgcagcgtggcgagcgtttattcgttggtctgcaacatgcgcggctgtataacggcgacgagcgtatcgaaacccgcgatgaggaacttgctctcgcacaaagcgcctga

SEQ ID NO: 481881 - DNA, 912 bp, Shigella sonnei
gtgagtacattagaacaaacaataggcaatacgcctctggtgaagttgcagcgaatggggccggataacggcagtgaagtgtggttaaaactggaaggcaataacccggcaggttcggtgaaagatcgtgcggcactttcgatgatcgtcgaggcggaaaagcgcggggaaattaaaccgggtgatgtcttaatcgaagccaccagtggtaacaccggcattgcgctggcaatgattgccgcgctgaaaggctatcgcatgaaattgctgatgcccgacaacatgagccaggaacgccgtgcggcgatgcgtgcttatggtgcggaactgattcttgtcaccaaagagcagggcatggaaggtgcgcgcgatctggcgctggagatggcgaatcgtggcgaaggaaagctgctcgatcagttcaataatcccgataacccttacgcccattacaccactaccgggccggaaatctggcagcaaaccggcgggcgcattacccattttgtctccagcatgggaacaaccggcactatcaccggcgtttcacgctttatgcgcgaacaatccaaaccagtaacgattgttggcctgcagccggaagaaggcagcagtattcccggcattcgccgctggcctgcggaatatctgccggggattttcaacgcttctctggtggatgaggtgctggatattcatcagcgcgatgcagaaaacaccatgcgcgaactggcagtgcgggaaggaatattctgtggcgtcagctccggcggcgcggttgccggagcactgcgggtggcaaaagctaaccctggtgcggtggtggtagcgatcatctgcgatcgtggcgatcgctacctttccaccggggtgtttggggaagagcattttagtcagggggcggggatttaa

SEQ ID NO: 481882 - DNA, 369 bp, Shigella sonnei
atgaagaaaatcatttgtctggtcattacactactaatgacactccccgcttacgcgaagttaactgttcatgaagaagcccgcatcaacgccatgctggagggattagcacagaaaaaggatttgatatttgtgcgcaacggtgatgaacatacctgcgatgaagcggtttctcatctgcgtctgaagctcggcaatacccgtaaccgcattgacactgccgagcagtttattgataaggttgcttcgtcgtcatcgattaccgggaagccgtatattgtgaagatccccggtaagagcgatgagaacgcacagccttttttacatgccttaattgcgcagacggataaaacggtgcctgcgcaataa

SEQ ID NO: 481883 - DNA, 852 bp, Shigella sonnei
atgagtagtttgttgttgtttaacgataagagtagggcgctgcaggcggatatcgtcgccgtgcagtcgcaggtagtgtacggcagcgtaggcaacagcattgcggtgcctgctataaaacagaacggcttgaatgtctttgccgtgccgacggtattgctgagcaatacgccgcattatgacactttctacggtggtgcgattccggacgaatggtttagcggctatttgcgtgcgcttcaggagcgtgatgcgctgcgccaacttcgtgctgtaaccacgggctatatgggaacggcatcgcaaatcaaaatccttgccgagtggctgactgcgctacgcaaagaccatcctgacctattgatcatggtcgatccggtgattggcgatattgatagcggaatttatgtcaaacctgaccttcccgaggcgtatcgacaatatttactgccgctggcgcaaggaattacccccaatatctttgagctggaaatcctgaccggtaaaaattgccgcgatctcgacagtgccattgctgccgcaaaaagtctgctttcagacacattaaaatgggtggtgattaccagcgcctccggtaatgaagaaaatcaggagatgcaggtggtggtggtcagtgccgacagcgtgaatgtcatttcccattcacgggtaaaaaccgacctgaaagggactggcgacctgttttgtgctcagcttatcagtggtttgctgaaagggaaggcgttaaacgatgcggtgcaccgtgcggggttgcgcgtactggaagtgatgcgctatacccagcagcatgagagcgatgaattgattttgccgccgctggcggaagcataa

SEQ ID NO: 481884 - DNA, 423 bp, Shigella sonnei
atggcggatctgtacagtcatcgctgggaaatcgaactgggatacagggagataaaacagacgatgcaactgagcaggctgacgctgagaagtaaaaagccggagcttgtggagcaagagctgtggggtgtcttactggcttataatctggtgagatatcagatgattaaaatggcggaacatctgaaaggttactggccgaatcaactgagtttctcagaatcatgcggaatggtgatgagaatgctgatgacattgcagggcgcttcaccgggacgtataccggagctgatgcgcgatcttgcaagtatgggacaacttgtgaaattaccgacgagaagggaaagggccttcccgagagtggtaaaggagaggccctggaaataccccacagccccgaaaaagagccagtcagttgcttaa

SEQ ID NO: 481885 - DNA, 1299 bp, Shigella sonnei
atgtccaaaatcgtaaaaatcatcggtcgtgaaatcatcgactcccgtggtaacccgactgttgaagccgaagtacatctggagggtggtttcgtcggtatggcagctgctccgtcaggtgcttctactggttcccgtgaagctctggaactgcgcgatggcgacaaatcccgtttcctgggtaaaggcgtaaccaaagctgttgctgcggtaaacggcccgatcgctcaggcactgattggcaaagacgctaaagatcaggctggcattgacaagatcatgatcgacctggacggcaccgaaaacaaatccaaattcggcgcgaacgcaatcctggctgtatctctggctaacgccaaagctgctgctgccgataaagggatgccgctgtacgagcacatcgctgaactgaacggcactccgggcaaatactccatgccggttccgatgatgaacatcatcaacggtggtgagcacgctgacaacaacgttgatatccaggaattcatgattcagccggttggcgcgaaaactgtgaaagaagccatccgcatgggttctgaagttttccatcacctggcaaaagttctgaaagcgaaaggcatgaacactgcagttggtgacgaaggtggctatgcgccgaacctgggttccaacgctgaagctctggctgttatcgctgaagctgttaaagctgctggttatgaactgggcaaagacatcactctggcgatggactgcgcagcttctgaattctacaaagacggtaaatacgttctggctggcgaaggcaacaaagctttcacctctgaagaattcactcacttcctggaagaactgaccaaacagtatccgatcgtatctatcgaagacggtctggacgaatctgactgggacggtttcgcataccagaccaaagttctgggcgacaaaatccagctggttggtgacgacctgttcgtaaccaacaccaagatcctgaaagaaggtatcgaaaaaggtatcgctaactccatcctgatcaaattcaaccagatcggttctctgaccgaaactctggctgcaatcaagatggcgaaagatgctggctacactgcagttatctctcaccgttctggcgaaactgaagacgctaccatcgctgacctggctgttggtactgctgcaggccagatcaaaactggttctatgagccgttctgaccgtgttgctaaatacaaccagctgattcgtatcgaagaagctctgggcgaaaaagcaccgtacaacggtcgtaaagagatcaaaggccaagcataa

SEQ ID NO: 481886 - DNA, 1638 bp, Shigella sonnei
atgacaacgaactatatttttgtgaccggcggggtcgtatcctctctgggtaaaggcattgccgcagcctccctcgcagccattcttgaagcccgtggcctcaatgtgaccatcatgaaactggatccgtacatcaacgtcgatccaggtactatgagcccaatccaacacggggaagtgttcgttactgaagacggcgctgaaaccgacctggacctggggcactacgagcgtttcattcgtaccaaaatgagccgccgcaacaacttcaccacgggtcgtatctactctgacgttctgcgtaaagaacgccgcggtgactacctcggcgcaaccgtgcaggttattccgcacatcactaacgcaatcaaagagcgcgtgctggaaggtggcgaaggtcatgacgtagtactggtagaaatcggcggtacagtaggtgatatcgaatccttgccgttcctcgaagcgattcgccagatggctgttgaaattggccgtgagcacactctgtttatgcacctgacgctggtgccgtacatggcagcgtctggtgaagtcaaaaccaaaccgactcagcactctgtaaaagagctgctctccatcggtatccagcctgacatcctgatttgtcgttcagatcgcgctgttccggcgaacgaacgtgcgaagattgcattgttctgtaatgttccggaaaaagcggttatttctctgaaagacgtcgattccatctataaaattccgggcctgttgaaatctcaggggctggacgattatatttgtaaacgattcagcttaaactgcccggaagcaaatctgtccgaatgggaacaggttatcttcgaagaagcgaatccggtaagtgaagtcaccatcggtatggtcggcaagtacattgaactgccggatgcttataaatcagtgatcgaagcactgaaacacggtgggctgaagaatcgtgtcagcgtcaacatcaaactgatcgattcacaagatgttgaaacgcgcggcgttgaaatccttaaaggtctggacgcaatcctcgtacctggcggtttcggctatcgtggcgtagaaggcatgattacgaccgcgcgttttgcgcgtgagaacaatattccttatctgggcatttgcctgggtatgcaggtggcgttaattgattacgctcgccatgttgccaacatggagaacgccaactctacggaatttgtgccagactgtaagtacccggttgtggcgctgattaccgagtggcgcgatgaaaacggcaacgttgaagttcgtagcgagaagagcgatctcggcggtaccatgcgtctcggcgcacagcagtgccagttggttgacgatagcctggttcgccagctgtacaatgcgccgacaattgttgagcgtcatcgtcaccgttacgaagtcaacaacatgctgttgaaacagattgaagatgcaggtctgcgcgttgcgggccgttccggggatgatcagttggtcgagatcatcgaagttccgaatcacccgtggttcgtggcttgccagttccatccggagtttacttctactccacgtgatggtcacccgctgtttgcaggctttgtgaaagctgccagcgagttccagaaacgtcaggcgaagtaa

SEQ ID NO: 481887 - DNA, 792 bp, Shigella sonnei
atgaatcaaatcgaccgtttgctcactattatgcagcgcctgcgcgatccggaaaacggctgcccgtgggataaagagcagacatttgccaccattgcgccttacacccttgaagaaacctacgaagtgctggacgccatcgcccgtgaagattttgacgatcttcgcggtgaactgggcgatctgctattccaggtggtgttttacgcgcaaatggctcaggaagaagggcgctttgactttaatgatatttgcgctgctattagcgataaattagagcgtcgccatccgcatgtttttgctgatagttctgccgaaaacagtagtgaagtgcttgcccgttgggagcaaatcaaaaccgaagagcgcgcgcagaaagcgcagcattcggcgctggacgatattcctcgtagtttaccggctttaatgcgggcgcaaaaaatccagaaacgttgcgccaacgttggcttcgactggacgacgcttggcccggtggttgataaagtctacgaagagatcgacgaggtgatgtacgaggcgcggcaggctgttgtcgaccaggctaaactggaggaggaaatgggggacctgctgtttgccacggttaatctggctcgccatttagggacgaaagcagaaatcgcattgcaaaaagcgaacgaaaaattcgagcgtcgttttcgcgaagtggagcgtattgttgccgcgcgtggactggaaatgacaggtgttgacctcgaaacaatggaagaagtctggcaacaggtaaaacggcaggaaattgatctctaa

SEQ ID NO: 481888 - DNA, 336 bp, Shigella sonnei
atggtaagccgatacgtacccgatatgggcgatctgatttgggttgattttgacccgacaaaaggtagcgagcaagctggacatcgtccagctgttgtcctgagtcctttcatgtacaacaacaaaacaggtatgtgtctgtgtgttccttgtacaacgcaatcaaaaggatatccgttcgaagttgttttatccggtcaggaacgtgatggcgtagcgttagctgatcaggtaaaaagtatcgcctggcgggcaagaggagcaacgaagaaaggaacagttgccccagaggaattacaactcattaaagccaaaattaacgtactgattgggtag

SEQ ID NO: 481889 - DNA, 249 bp, Shigella sonnei; identical to SEQ ID NO: 261413

SEQ ID NO: 481890 - DNA, 2235 bp, Shigella sonnei
atggttgcggtaagaagtgcacatatcaataaggctggtgaatttgatccggaaaaatggatcgcaagtctgggtattaccagccagaagtcgtgtgagtgcttagccgaaacttgggcgtattgtctgcaacagacgcaggggcatccggatgccagtctgttattgtggcgtggtgttgagatggtggagatcctctcgacattaagtatggacattgacacgctgcgggcggcgctgctgttccctctggctgatgccaacgtagtcagcgaagatgtgctgcgtgagagcgtcggtaagtcggttgttaaccttattcacggcgtgcgtgatatggcggcgatccgccagctgaaagcgacgcacactgattctgtttcctccgaacaggtcgataacgttcgccggatgttattggcgatggtcgatgattttcgctgcgtagtcatcaaactggcggagcgtattgctcatctgcgcgaagtaaaagatgcgccggaagatgaacgtgtactggcggcaaaagagtgtaccaacatctacgcaccgctggctaaccgtctcggaatcggacaactgaaatgggaactggaagattactgcttccgttacctccatccaaccgaatacaaacgaattgccaaactgctgcatgaacggcgtctcgaccgcgaacactacatcgaagagttcgttggtcatctgcgcgctgagatgaaagctgaaggcgttaaagcggaagtgtatggtcgtccgaaacacatctacagcatctggcgtaaaatgcagaaaaagaacctcgcctttgatgagctgtttgatgtgcgtgcggtacgtattgtcgccgagcgtttacaggattgctatgccgcactggggatagtgcacactcactatcgccacctgccggatgagtttgacgattatgtcgctaacccgaaaccaaacggttatcagtctattcataccgtggttctggggccaggtggcaaaaccgttgagatccaaatccgcaccaaacagatgcatgaagatgcagagttgggtgttgctgcgcactggaaatataaagagggcgcggcagctggcggcgcacgttcgggacatgaagaccggattgcctggctgcgtaaactgattgcgtggcaggaagagatggctgattccggcgaaatgctcgacgaagtacgcagccaggtctttgacgaccgggtgtatgtctttacgccgaaaggtgatgtcgttgatttgcctgcgggatcaacgccgctggacttcgcttaccacatccacagtgatgtcggacaccgctgcatcggggcaaaaattggcgggcgcattgtgccgttcacctaccagctgcagatgggcgaccagattgaaattatcacccagaaacagccgaaccccagccgtgactggttaaacccaaacctcggttacgtcacaaccagccgtgggcgttcgaaaattcacgcttggttccgtaaacaggaccgtgacaaaaacattctggctgggcggcaaatccttgacgacgagctggaacatctggggatcagcctgaaagaagcagaaaaacatctgctgccgcgttacaactttaatgatgtcgacgagttgctggcggcgattggtggcggggatatccgtctcaatcagatggtgaacttcctgcaatcgcaatttaataagccgagtgccgaagagcaggacgccgccgcgctgaagcaacttcagcaaaaaagctacacgccgcaaaaccgcagtaaagataacggtcgcgtggtagtcgaaggtgttggcaacctgatgcaccacatcgcgcgctgctgccagccgattcctggagatgagattgtcggcttcattacccaggggcgcggtatttcagtacaccgcgccgattgcgaacaactggcggaactgcgctctcatgcgccagaacgcattgttgacgcggtatggggtgagagctactccgccggatattcgctggtggtccgcgtggtggctaatgatcgtagtgggttgttacgtgatatcacgaccattctcgccaacgagaaggtgaacgtgcttggcgttgccagccgtagcgacacaaaacagcaactggcaaccatcgacatgaccattgagatttacaacctgcaggtgctgggccgcgtgctgggtaaactcaaccaggtgccggatgttatcgacgcgcgtcggttgcacgggagttag

SEQ ID NO: 481891 - DNA, 1302 bp, Shigella sonnei
atggcgcaattctactctgcaaaacgacgcacgacgacgcgtcagatcataaccgtttcagtcaacgacctcgactcttttggtcagggcgtggcgcgacataacggcaaaacgctatttatccccggattattgccgcaggaaaacgcggaagttactgttactgaagataaaaaacagtatgcccgcgctaaagtcgtacgccggttaagcgatagcccgggacgcgaaacgccacgctgtcctcattttggcgtatgcggcggctgtcagcaacaacacgccagcgtggatttacagcagcgaagcaaaagtgcggcactcgcccgattaatgaaacacgaagtctctgaagtgatcgccgatgttccctggggctatcgccgtcgcgcgcgtttaagtctgaactacttaccgaaaacacagcaacttcagatggggtttcgcaaagcgggctccagtgacattgtcgacgttaaacaatgccccattttagtgccccaacttgaagcattgctgcccaaagtcatggcatgcttgggcagcttacaagttatgcgccatcttggtcatgttgaactggtacaggcaaccagcggcacgctgatgattttgcgccataccgcaccgctaagttcggcagatcgcgaaaaactggaacgcttttcgcattctgaaggcctggatctgtatctcgcccccgatagtgagatactcgaaaccgtctctggtgagatgccctggtatgactcaaatgggttgcgcttaacttttagcccgcgcgattttattcaggtcaatgcgggtgtgaaccaaaaaatggtagcgcgtgcgttggaatggctggatgtgcaacctgaagatcgcgtactggatttgttctgcggtatgggcaactttacactgccattggcgacacaagctgccagtgtggtgggtgtagaaggcgttccggcgctggtggaaaaaggccagcagaatgcgcgtcttaatggcttacagaatgtgacgttttatcacgaaaatcttgaagaagatgtcacaaagcagccgtgggcgaaaaacggcttcgataaagtgttgctggacccggcgcgagcaggtgccgcaggtgttatgcagcaaattataaaactggaacctattcgtatagtttatgtatcctgtaaccctgcaacgctggctcgggatagcgaagcgttattaaaagcaggatataccattgcgcgactggcgatgctggatatgttcccacacacgggacatctggaatcgatggtacttttctcgcgcgttaaatag

SEQ ID NO: 481892 - DNA, 2757 bp, Shigella sonnei
atgaccaactacagcctgcgcgcacgcatgatgattctgatcctggcaccgaccgtccttattggtttattgctgagtatctttttcgttgtgcatcgctataacgacttgcagcgtcaactggaagatgccggagccagcattattgagccgcttgcagtttctactgaatatggcatgagcctgcaaaatcgcgaatctatcggtcagttaataagcgtactgcatcgtcgccattccgatattgttcgcgcgatttcggtttatgatgaaaataaccgactctttgtcacctccaattttcatcttgatccctcatcaatgcagctcggcagcaacgtgccgtttcctcgccagctcactgtcactcgtgacggcgatattatgatcctccgcacgccgattatttctgagagttactcccccgacgaatcgcccagtagcgatgccaaaaatagtcaaaatatgttgggatatattgcgctggagctggatcttaaatcggttcgcttgcagcaatataaagagatctttatttccagcgtgatgatgctgttttgtatcggtattgcgcttatttttggctggcgcttaatgcgcgatgtaaccggtccgattcgcaacatggtgaataccgtcgaccgcatccgtcgcgggcaactcgacagccgggtggaaggatttatgctcggcgagctggatatgctgaaaaacggtatcaactcgatggcaatgtcgctggctgcttatcacgaagagatgcagcacaatatcgaccaggcgacgtccgatctgcgtgaaacgctggagcagatggaaattcagaacgttgagttagatctggcgaaaaagcgcgcccaggaagcggcgcgtattaaatccgagtttctggcaaatatgtcacacgagctgcgtacaccactgaatggtgttattggctttacccgcctgacgctgaaaacagaattaacaccaacgcagcgcgatcacctgaatacgattgaacgttcggcaaataatttgctggcaattattaatgatgttctcgacttctcgaaactggaagcaggtaagctgattctggaaagtattccattcccactacgcagcacgctggatgaagtcgttactctgctggcacattcttctcacgataaagggttggaactgacgctcaatattaaaagcgacgtgcctgataacgtgatcggcgacccactgcgattacagcaaatcatcactaacctggtggggaatgcaattaaattcaccgagaatggcaacattgatattctggtagaaaaacgtgcgctgagtaataccaaagtgcagattgaagtgcagattcgggataccggcattggtattcctgaacgcgatcaatcgcgcttattccaggccttccgacaggctgatgccagtatttcccgccgtcatggtggcaccggtctggggctggtgattacacaaaaactggttaatgaaatgggcggcgatatttcgttccatagccagccgaatcgcggttcaactttctggttccacattaatctcgatctgaacccgaacattattatcgaagggccatccacccagtgcctcgccggtaagcgcctggcctatgtcgaaccaaactccgcagcagcgcaatgcacgctggatattttaagtgaaacgccgctggaagtggtttatagcccaacgttctccgcgctgcctcccgcgcattacgacatgatgttgttaggcatcgcggtgaccttccgcgagccgctaacaatgcaacatgagcgattagcgaaagcggtatcgatgaccgatttcctgatgctggcacttccttgccatgcacaagtcaatgcagaaaaactcaagcaagatggtatcggcgcgtgtctgctgaaaccattaacacctacgcgcctgttgcctgccctgacggaattttgtcatcacaaacaaaacacgcttttgcctgtaaccgatgaaagcaagctggcaatgacagtcatggcagttgatgacaaccccgctaacctgaaacttatcggcgcattgctggaagatatggtgcaacatgtggaactttgcgatagcgggcatcaggcggttgaacgggcgaaacagatgccgttcgatttgatcttaatggatattcaaatgcctgacatggatggcattcgggcctgcgagctcatccaccagctcccccatcagcaacaaacgccggttatcgcggtaacggcgcatgcaatggccgggcaaaaagagaagctgcttggcgcagggatgagcgattatctggcgaaaccgattgaagaagagcgattgcataatttgttgttgcgctacaagcctggcagcggtatttcctctcgcgtcgtgacgcccgaagtcaacgaaattgtggtgaacccgaatgcgaccctcgactggcaactggcactacgccaggcagcaggaaaaaccgatctagcgcgcgatatgctgcaaatgttactcgatttcctgcctgaagttcgcaacaaagttgaggagcagctggttggagaaaacccggaaggcctggttgatttgattcataaactgcatggcagttgcggctatagcggtgtgccgcgtatgaagaatctctgccaactgatcgaacaacagctacgtagcggtactaaagaagaagatttggagccggagctgctggaactgttggacgagatggataatgtcgcgcgcgaagccagcaaaattctcgggtaa

SEQ ID NO: 481893 - DNA, 1341 bp, Shigella sonnei
atgagttctcaatttacgacgtctgttgttactgaaatgcaggtcatcccggtggcgggtcatgacagtatgctgatgaatctgagtggggcacacgcaccgttctttacgcgtaatattgtgattatcaaagataattccggtcacactggcgtaggggaaattcccggcggcgagaaaatccgtaaaacgctggaagatgcgattccgctggtggtaggtaaaacgctgggtgaatacaaaaacgttctgacgctggtgcgtaatacttttgccgatcgtgatgctggtgggcgcggtttgcagacatttgatttgcgtaccactattcatgtagttaccgggatagaagcggcaatgctggatctgctggggcagcatctgggggtaaacgtggcatcgctgctgggcgatggtcaacagcgtagcgaagtcgaaatgctcggttatctgttcttcgtcggtaatcgcaaagccacacctctgccgtatcaaagccagccggatgactcatgcgactggtatcgcctgcgtcatgaagaagcgatgacgccggatgcggtggtgcgcctagcggaagcggcgtatgaaaaatatggcttcaacgatttcaaactgaaaggcggtgtactggccggggaagaagaagccgagtctattgtggcactggcgcaacgcttcccgcaggcgcgtattacgctcgatcctaacggtgcctggtcgctgaacgaagcaattaaaattggtaaatacctgaaaggttcgctggcttatgcagaagatccgtatggtgcggagcaaggtttctccgggcgtgaagtgatggcagagttccgtcgcgcgactggcctgccgactgcaaccaatatgatcgccaccgactggcggcagatgggccatacgctctcgttacaatccgttgatatcccgctggcggatccgcatttctggactatgcaaggttcggtacgtgtggcgcaaatgtgccatgaatttggcctgacctggggttcacactcaaacaaccacttcgatatttccctggcgatgtttacccatgttgccgccgctgcaccgggtaaaatcaccgcgattgatacgcactggatttggcaggaaggcaatcagcgcttgaccaaagaaccgtttgagatcaaaggcggtctggttcaggtgccggaaaaaccggggctgggtgtagaaatcgatatggatcaagtgatgaaagcccatgagctgtatcagaaacacgggcttggcgcgcgtgacgatgcgatgggaatgcagtatctgattcctggctggacgttcgataacaagcgcccgtgcatggtgcgttaa

SEQ ID NO: 481894 - DNA, 1341 bp, Shigella sonnei
atgacgacacaatccagtcctgttattactgatatgaaagtcattccggtcgccgggcacgatagcatgttgcttaatattggtggggcacataacgcatatttcacccgcaatattgtggtactcaccgataacgccgggcataccggcattggtgaagcgccgggcggagaggtgatttatcaaacactggtcgatgctattccgatggttctgggccaggaagttgcgcgcctgaataaagtggttcagcaggtgcataaaggtaatcaggcagccgattttgataccttcggcaaaggtgcctggacttttgaattgcgcgttaatgccgtggcggcgctggaagccgccttgcttgacctgctaggtaaggcgctgaatgttccggtctgcgaactgttggggccaggcaagcaacgcgagactattaccgtcctcggttatctgttttatatcggtgatcggaccaaaaccgatcttccttatctggaaaatacgccgggcaaccatgagtggtatcagttgcgccatcagaaagcgatgaacagcgaagccgttgtgcgtctggcggaagcctcacaggatcgctatggctttaaagatttcaaacttaagggcggggtgttacctggcgagcaagaaatcgacactgttcgtgcattgaagaaacgcttccctgatgcgcggattaccgttgatcccaacggtgcctggctacttgatgaagccatttctctatgcaaagggctgaatgatgttcttacctatgccgaagatccatgcggcgcagaacagggtttctccggtcgtgaagttatggcggagtttcggcgggcgaccggcttgcccgtcgcgactaacatgatcgccaccaactggcgcgaaatgggtcatgcggtgatgctcaatgcggtagatattccacttgccgatccgcacttctggacgctttccggtgcagtccgtgtggcgcagctttgcgacgactgggggctgacctggggctgccattctaataaccatttcgatatctctctggcgatgtttacccatgtgggcgcggcggcaccgggtaatcctaccgctatcgatacccactggatttggcaggagggcgattgtcgcctgaccaaaaatccgctggagattaaaaacggaaaaattgccgttcctgatgcgcccggtctgggcgtggaactggactgggaacaggtacaaaaggcacatgaggcctataaacgtctgcctggcggtgcgcgtaacgacgcaggtccgatgcagtacctgatccccggctggacctttgaccgtaaacgtcccgttttcggccgtcattga

SEQ ID NO: 481895 - DNA, 1353 bp, Shigella sonnei
atgagttctttaagtcaggctgcgagcagtgtggaaaaacgcacgaatgctcgttactggatagtggtgatgttgtttatcgtcacatccttcaactacggcgaccgcgctacgctttctattgccggttcggaaatggccaaagatatcggccttgatcccgtgggaatgggctatgtgttctctgccttctcatgggcttatgttatcgggcagatccctggtggttggttgctggatcgttttggttcaaaacgcgtctacttctggtcgatctttatctggtcgatgtttaccttgctgcaaggcttcgtcgatatctttagtggattcggcattatcgttgccctgtttactctgcgcttcctggtcgggcttgctgaagcgccatctttccccggcaacagtcacattgttgcggcctggtttccggcgcaggaaaggggaacggcggtgtcgatttttaactccgctcaatacttcgcaacggtgatcttcgcgccgattatgggctggctgacgcatgaagtgggctggtcacacgtcttcttctttatgggcggtctggggattgtcatcagctttatctggttgaaagtcatccacgagccaaatcaacatccgggggtaaatcagaaagagctggagtacatcgccgcgggtggcgcgctgatcaatatggatcagcaaaacaccaaagttaaagtgccgttcagcgtgaagtgggggcagatcaaacaactgctcgggtcacggatgatgatcggcgtttatatcggtcagtactgtatcaacgccctgacttactttttcattacctggtttccggtttatctggtgcaggcgcgtgggatgtcgattctgaaagcgggctttgtggcttccgttccggcggtttgcggttttatcggcggtgtgctgggtgggattatttccgactggctgatgcgtcgcacgggatcgctgaacattgcgcgtaaaacaccgatcgtaatgggcatgttgctgtcgatggtgatggtgttctgcaactacgtcaacgttgagtggatgatcatcggctttatggcgctggccttcttcggtaagggcatcggggcgctgggttgggcagtaatggcagataccgcgccaaaagagatcagcggtctttccggtggcctgttcaacatgttcggtaacatttctggcatcgtcacgccaatcgcaattggttatatcgttggcacgactggctcctttaatggggcgctgatttatgttggtgttcatgccttaatcgcggtactgagctacctggtgctggtgggcgatatcaagcgtatcgagctgaaacctgtcgcggggcaataa

SEQ ID NO: 481896 - DNA, 450 bp, Shigella sonnei; identical to SEQ ID NO: 458572

SEQ ID NO: 481897 - DNA, 783 bp, Shigella sonnei
atgctggaaatactctatcaggatgaatggctggttgcggtaaataaaccctccggctggctggttcaccgtagctggctggatcgcgacgagaaagtagtggtcatgcaaaccgtgcgtgaccagataggacagcatgtttttactgctcatcgtctggaccgacccacttctggtgtgttgttgatgggattatccagcgaggccggacggctgctggcacaacagtttgaacagcaccaaatccagaaacgttaccatgcgattgtgcgcggctggttgatggaagaagcggtgctggattatccactggtggaagaactggacaaaatcgctgataaatttgcccgcgaagataaaggcccgcagccagcagtgacgcattatcgcggtctggcgaccgtagaaatgccggtagcgaccggacgttacccgaccacgcgctacggcctggtggaactggagccgaaaaccggacgcaaacatcagcttcgccgacatcttgcccatttgcgtcatccgattattggcgatagcaaacatggcgatttacgccagaatcgcagcggtgctgagcattttggcctccagcggttaatgctacatgccagtcagttgtcattgacgcatccttttactggcgagccgctgactattcacgcgggcctggacgacacctggatgcaggcgttatcacaatttggctggcgcggtctgcttcctgaaaatgaaagggttgagttcagtgcgccatcgggtcaggatggagagataagttcctaa

SEQ ID NO: 481898 - DNA, 330 bp, Shigella sonnei
atgaccactcatgaccgcgttcgtctccagttgcagacgcttgaagcgttactgcgtgaacatcagcactggcgaaacgatgaaccccagccgcatcaatttaatagtacccaaccgttctttatggacaccatggaaccactggagtggttgcagtgggtgctgatcccgcgaatgcacgatttgttaaataacaaccagccgttaccgggcgcttttgctgttgcaccctattatgaaatggcgctggcgacggaccatccgcaacgcgcgcttattctggctgagttggaaaaactggatgctctttttgcggatgatgcgagctaa

SEQ ID NO: 481899 - DNA, 546 bp, Shigella sonnei; identical to SEQ ID NO: 458575

SEQ ID NO: 481900 - DNA, 849 bp, Shigella sonnei
atgtcttcttatgcaaaccatcaggcacttgcgggcctgactcttggaaaatcaaccgattaccgggatacctatgacgccagcctactgcaaggcgttccacgcagcctgaatcgcgacccgctgggtctgaaagcggataacctgccttttcacggtacggatatctggacgctgtatgaactttcctggctgaatgcgaaaggtttgccgcaggtcgctgtcggtcatgttgaacttgattacaccagcgtaaatctgattgagtcgaagagttttaagctctatctcaacagttttaaccagacgcgttttaataactgggatgaggtgcgccagacgctggagcgcgacttaagcacttgcgctcagggtaagattagcgtggcgttatatcgtcttgatgaactggaaggccagccgataggtcattttaatggcacttgcattgatgaccaggatatcactatcgataactatgaattcactactgactatctggagaatgccacctgtggtgaaaaagtagtggaagagacgcttgtcagccacctgctgaaatcaaactgcctgatcacccatcaaccagattggggttcgatccaaattcagtatcgtggacgccaaattgacagagaaaaactgctgcgttacctggtctcattccgtcatcacaacgagttccacgaacagtgcgtggaacgcatctttaatgacctgttacgcttctgccagccagaaaaattgagcgtttacgcacgttatacccgtcgtggcggtctggacattaacccgtggcgcagtaatagcgattttgtcccatcgaccacaagactggttcggcaataa

SEQ ID NO: 481901 - DNA, 1365 bp, Shigella sonnei
ttgattacacatattagcccgcttggctccatggatatgttgtcgcagctggaagtggatatgcttaaacgcaccgccagcagcgacctctatcaactgtttcgcaactgttcacttgccgtactgaactccggtagtttgaccgataacagcaaagaattgctgtctcgttttgaaaatttcgatattaacgtcctgcgccgtgaacgcggcgtaaagctggaactgattaatcccccggaagaggcttttgtcgatgggcgaattattcgcgcgttgcaggccaacttgttcgcggttctgcgtgacattctcttcgtttacgggcaaatccataacaccgttcgttttcccaacctgaatctcgacaactccgtccacatcactaacctggtcttttccatcttgcgtaacgctcgcgcactgcatgtcggtgaagcgccaaatatggtggtctgctggggcggacactcaattaacgaaaacgagtatttgtatgcccgtcgcgtcgggaatcagctgggcctgcgtgagctgaatatctgcaccggctgtggtccgggagcgatggaagcgccgatgaaaggtgctgcggtcggacacgcacagcagcgttacaaagacagtcgttttattggtatgacagagccgtcgattatcgccgctgaaccgcctaacccgctggtcaacgaattgatcatcatgccagatatcgaaaaacgtctggaagcgtttgtccgtatcgctcacggcatcattatcttccctggcggtgtgggtacggcagaagagttgctgtatttgctgggaattttaatgaacccggccaacaaagatcaggttttaccattgttcctcaccggcccgaaagagagcgccgactacttccgcgtactggacgagtttgtcgtgcatacgttgggtgaaaacgcgcgccgccattaccgcatcatcattgatgacgccgctgaagtcgctcgtcagatgaaaaaatcgatgccgctggtgaaagaaaatcgccgcgacacaggcgatgcctacagctttaactggtcaatgcgcattgcgccagatttgcaaatgccgtttgagccgtctcacgagaatatggctaatctgaagctttacccggatcaacctgttgaagtgctggctgccgatctgcgccgtgcgttctccggtattgtggcgggtaacgtaaaagaagtcggtattcgcgccattgaagagtttggtccttacaaaatcaacggcgataaagagattatgcgtcgtatggacgacctgctacagggttttgttgcccagcatcgtatgaagttgccaggctcagcctacatcccttgctacgaaatctgcacgtaa

SEQ ID NO: 481902 - DNA, 1290 bp, Shigella sonnei
atggaaacgactcaaaccagcacgattgcgtcgaaagactctcgtagtgcctggcgcaagacagacaccatgtggatgctgggcctttacggcacggcaatcggcgcgggcgtgctgttcctgccaatcaacgccggtgttggcggtatgatcccgctgatcatcatggctatccttgcgttcccgatgacattttttgctcaccgcggcctgactcgcttcgtactgtctggtaaaaacccaggcgaagacatcaccgaggttgtagaagaacactttggtattggcgcaggtaaactgattaccctgctctacttcttcgctatctacccgatcctgctggtttatagcgtggcaatcaccaatacagttgaaagcttcatgtctcaccagctgggtatgacaccaccgccgcgtgcgattctgtcgctgatcctgatcgtgggtatgatgaccatcgttcgcttcggtgagcagatgatcgttaaagcaatgagtattctggtattcccgtttgttggcgtactgatgctgctggctctgtacctgatcccgcagtggaacggcgcagcactggaaacgctgtctctggacactgcatctgcaaccggaaacggtctgtggatgaccctgtggctggcaattccggttatggtgttctctttcaaccactctccgatcatctcttctttcgccgttgcgaagcgtgaagagtacggcgatatggcagaacagaaatgctcgaagatcctggcattcgcacacatcatgatggtgctgaccgtaatgttcttcgtcttcagctgtgtactgagcctgactccggcagacctggctgcggctaaagagcagaacatctcgattctgtcttacctggctaaccactttaacgcaccggttatcgcgtggatggctccgattatcgcgattatcgctatcaccaaatccttcctcggccactacctgggcgcacgtgaaggcttcaacggtatggtgattaaatctctgcgtggtaaaggtaagtctatcgaaatcaacaagctgaaccgtatcactgcgctgttcatgctggtaacgacctggattgttgccaccctgaacccgagcatcctgggtatgattgaaaccctgggcggcccaatcatcgcgatgatcctgttcctgatgccgatgtacgcaattcagaaagtaccggcaatgcgtaagtacagcggtcacatcagcaacgtattcgttgtcgtgatgggtctgattgcaatctccgcaatcttctactctctgttcagctaa

SEQ ID NO: 481903 - DNA, 1368 bp, Shigella sonnei
atgattagcgtattcgatattttcaaaatcggcattggcccttccagttctcataccgttggaccaatgaaagcgggtaaacaatttaccgacgatctgattgcccgtaatctgcttaaagacgtgacccgcgtggtggttgacgtgtacggctcgctctctctgaccggtaaaggccaccacactgatatcgccattattatgggcctggcgggtaacctgccggataccgtggatatcgattccatccctggttttattcaggatgtgaatactcatggtcgcctgatgctggcaaacggtcagcatgaagtggagttcccggttgatcagtgcatgaacttccatgcagacaacctttctctgcatgaaaacggtatgcgcattaccgcgctggcgggcgataaagtcgtttacagccagacttactactctattggcggtggctttatcgttgatgaagagcattttggccagcagaatagcgcaccggttgaagttccttatccgtacagttcagcagccgatctgcaaaaacattgtcaggaaaccgggctgtcactctctggcctgatgatgaaaaatgagctggcgctgcacagcaaagaagagctggaacagcacctggcgaacgtatgggaagtcatgcgtggcggtattgagcgcggtatttccaccgaaggcgtgttgcctggcaaactgcgcgttccacgccgtgctgcggcactacgccggatgctggtcagccaggataaaaccaccactgacccgatggcggttgttgactggatcaacatgtttgcactggcagtgaacgaagagaacgctgctggcggacgcgtggtgactgcgccgactaacggtgcgtgcgggattatcccggcagtgctggcgtactacgacaagttcatccgcgaagtgaacgctaactcactggctcgttacctgctggtagccagtgccattggttctctttataagatgaacgcgtcaatttctggtgctgaagtcggctgccagggtgaagttggtgtggcgtgctcaatggcggcggctggtctggcagaactgttaggtgcaagcccggcgcaggtgtgcatcgcggcggaaatcgccatggagcacaacctcggtctgacgtgtgacccggtcgccggacaggtccaggtgccatgcatcgagcgtaacgccattgcggcagtaaaagcggtgaacgccgcacgtatggcgctacgccgtaccagcgagccgcgcgtctgcctcgataaagttatcgaaaccatgtacgaaacaggtaaagatatgaacgccaagtaccgcgaaacctctcgcggcggcctggcaatgaagatcgttgcctgcgattaa

SEQ ID NO: 481904 - DNA, 846 bp, Shigella sonnei; identical to SEQ ID NO: 458580

SEQ ID NO: 481905 - DNA, 1149 bp, Shigella sonnei
atggctaacagaatgattctgaacgaaacggcatggtttggtcggggtgctgttggggctttaaccgatgaggtgaaacgccgtggttatcagaaggcgctgatcgtcaccgataaaacgctggtgcaatgcggcgtggtggcgaaagtgaccgataagatggatgctgcagggctggcatgggcgatttacgacggcgtagtgcccaacccaacaattactgtcgtcaaagaagggctcggtgtattccagaatagcggcgcggattacctgatcgctattggtggtggttctccacaggatacttgtaaagcgattggcattatcagcaacaatccggagtttgccgatgtgcgtagcctggaagggctttccccgaccaataaacccagtgtaccgattctggcaattcctaccacagcaggtactgcggcagaagtgaccattaactacgtgatcacagacgaagagaaacggcgcaagtttgtttgcgttgatccgcatgatatcccgcaggtggcgtttattgacgctgacatgatggatggtatgcctccagcgctgaaagctgcgacgggtgtcgatgcgctcactcatgctattgaggggtatattacccgtggcgcgtgggcgctaaccgatgcactgcacattaaagcgattgaaatcattgctggggcgctgcgaggatcggttgctggtgataaggatgccggagaagaaatggcgctcgggcagtatgttgcgggtatgggcttctcgaatgttgggttagggttggtgcatggtatggcgcatccactgggcgcgttttacaacactccacacggtgttgcgaacgccatcctgttaccgcatgtcatgcactataacgctgactttaccggtgagaagtaccgcgatatcgcgcgcgttatgggcgtgaaagtggaaggtatgagcctggaagaggcgcgtaatgccgctgttgaagcggtgtttgctctcaaccgtgatgtcggtattccgccacatttgcgtgatgttggtgtacgcaaggaagacattccggcactggcgcaggcggcactggatgatgtttgtaccggtggcaacccgcgtgaagcaacgcttgaggatattgtagagctttaccataccgcctggtaa

SEQ ID NO: 481906 - DNA, 648 bp, Shigella sonnei
atggaacgaaataaacttgctcgtcagattattgacacttgcctggaaatgacccgcctgggactgaaccaggggacagcggggaacgtcagtgtacgttatcaggatgggatgctgattacgcctacaggcattccatatgaaaaactgacggagtcgcatattgtctttattgatggcaacggtaaacatgaggaaggaaagctcccctcaagcgaatggcgtttccatatggcggcctatcaaagcagaccggatgccaacgcggttgttcacaatcatgccgttcattgcacagcagtttccattcttaaccgaccgatccccgctattcactacatgattgcggcggcaggtggtaattctattccttgcgcgccttatgcgacctttggaacacgcgaactttctgaacatgttgcgctggctctcaaaaatcgtaaggcaactttgttacaacatcatgggcttatcgcttgtgaggtgaatctggaaaaagcgttatggctggcgcatgaagttgaagtgctggcgcaactttacgtggcgaccctggcgattacggacccggtgccagtgctgagcgatgaagagattgccgtagtgctggagaaattcaaaacctatgggttacggattgaagagtaa

SEQ ID NO: 481907 - DNA, 1317 bp, Shigella sonnei
atgggaaacacatcaatacaaacgcagagttaccgtgcggtagataaagatgcagggcaaagcagaagttacattattccattcgcgctgctgtgctcactgttttttctttgggcggtagccaataaccttaacgacattttattacctcaattccagcaggcttttacgctgacaaatttccaggctggcctgatccaatcggccttttactttggttatttcattatcccaattcctgctgggatattgatgaaaaaactcagttataaagcaggaattattactgggttatttttatatgccctgggcgctgcattattctggcccgctgcagaaataatgaactacaccttatttttagttggcctatttattattgcagccggattaggttgtctggaaactgccgcaaacccttttgttacggtattagggccggaaagcagtggtcacttccgcttaaatcttgcgcaaacatttaactcgtttggcgcaattatcgcggttgtctttgggcaaagacttattttgtctaacgtgccacatcaatcgcaagacgttctcgataaaatgtctccagagcaattgagtgcgtataaacacagcctggtattatcggtacagacaccttatatgatcatcgtggctatcgtgttactggtcgccctgctgatcatgctgacgaaattcccggcattgcagagtgataatcacagtgacgccaaacaaggatcgttctccgcatcgctttctcgcctagcgcgtattcgccactggcgctgggcagtattagcgcaattctgctacgttggcgcacaaacggcctgctggagctatttgattcgctacgctgtagaagaaattccaggtatgactgcaggctttgccgctaactatttaaccggaaccatggtgtgcttctttattggtcgtttcaccggtacctggctcatcagtcgcttcgcaccacacaaagtcctggccgcctacgcattaatcgctatggcactgtgcctgatctcagccttcgctggcggtcatgtgggcttaatagccctgactttatgcagcgcctttatgtcgattcagtacccaacaatcttctcgctgggcattaagaatctcggccaggacaccaaatacggttcgtccttcatcgttatgaccattattggcggcggtattgtcactccggtcatgggttttgtcagtgacgcggcgggcaacatccccactgctgaactgatccccacactctgcttcgcggtcatctttatctttgcccgtttccgctctcaaacggcaactaactga

SEQ ID NO: 481908 - DNA, 1776 bp, Shigella sonnei
atgaaaaaaatcagcttaccgaaaattggtatccgcccggttattgacggtcgtcgcatgggtgttcgtgagtcgcttgaagaacaaacaatgaatatggcgaaagctacggccgcactgctgaccgagaaactgcgccatgcctgcggagctgccgtcgagtgtgtcatttccgatacctgtatcgcgggtatggctgaagccgctgcttgcgaagaaaaattcagcagccagaatgtaggcctcaccattacggtaacgccttgctggtgctatggcagtgaaaccatcgacatggatccaacccgcccgaaagccatttggggctttaacggcactgaacgtcccggcgctgtttacctggcagcggctctggcagctcacagccagaaaggcatcccggcattctccatttacggtcatgacgttcaggatgccgatgacacatcgattcctgccgatgttgaagaaaaactgctgcgctttgcccgcgccggtttggccgtcgccagcatgaaaggtaaaagctatctgtcgctgggcggcgtttcgatgggtatcgccggttctattgttgatcacaacttctttgaatcctggctgggaatgaaagtccaggcggtggatatgaccgaactgcgtcgccgtatcgatcagaagatttacgacgaagccgaactggaaatggcactgacctgggctgataaaaacttccgctatggcgaagatgaaaataacaaacagtatcaacgcaatgccgagcaaagccgcgcagttctgcgcgaaagtttactgatggcgatgtgtatccgcgacatgatgcaaggcaacagcaaactggccgatattggtcgcgtggaagaatcacttggctacaacgccatcgctgcgggcttccaggggcaacgtcactggaccgatcaatatcccaatggtgacaccgccgaagcgatcctcaacagttcatttgactggaatggcgtgcgcgaaccctttgtcgtggcgaccgaaaacgacagtcttaacggcgtggcaatgctaatgggtcaccagctcaccggcaccgctcaggtatttgccgatgtgcgtacctactggtcaccagaagcaattgagcgtgtaacggggcataaactcgatggactggcagaacacggcatcatccatttgatcaactcaggttctgctgcgctggacggttcctgtaaacaacgcgacagcgaaggtaacccgacgatgaagccacactgggaaatctctcagcaagaggctgacgcttgcctcgccgctaccgaatggtgcccggcgatccacgaatacttccgtggcggcggttactcttcccgcttccttaccgaaggcggcgtcccgttcaccatgactcgtgtcaacatcatcaaaggcctgggatcggtactgcaaatcgcggaaggctggagcgtggaattgccgaaggatgtgcatgacatcctcaacaaacgcaccaactcaacctggccaaccacctggtttgcaccgcgcctcaccggtaaagggccgtttacggatgtgtactcggtaatggcgaactggggcgctaaccatggggttctgaccatcggccacgttggcgcagactttatcactctcgcctccatgctgcgtatcccggtatgtatgcacaacgttgaagagaccaaagtgtatcgtccttctgcctgggctgcgcacggcatggatattgaaggccaggattaccgcgcttgccagaactacggtccgttgtacaagcgttaa

SEQ ID NO: 481909 - DNA, 1419 bp, Shigella sonnei
atgaaacaagaagttatcctggtactcgactgtggcgcgaccaatgtcagggccatcgcggttaatcggcagggaaaaattgttgcccgcgcctcaacgcctaatgccagcgatatcgcgatggaaaacaacacctggcaccagtggtctttagacgccattttgcaacgctttgctgattgctgtcggcaaatcaatagtgaactgactgaatgccacatccgcggtatcgccgtcaccacctttggtgtggatggcgctctggtagataagcaaggcaatctgctctatccgatcattagctggaaatgtccgcgaacagcagcggttatggacaatattgaacagttgatctccgcacagcggttgcaggctatttctggcgtcggagcctttagtttcaatacgttatataagttggtgtggttgaaagaaaatcatccacaactgctggaacgcgcgcacgcctggctctttatttcgtcgctgattaaccaccgtttaaccggcgaattcactactgatatcacgatggccggaaccagccagatgctggatatccagcaacgcgatttcagtccgcaaattttacaagccaccggtattccacgccgactcttccctcgtctggtggaagcgggtgaacagattggtacgctacagaacagcgccgcagcaatgctcggcttacccgttggcataccggtgatttccgcaggtcacgatacccagttcgccctttttggcgctggtgccgaccaaaatgaacccgtgctctcttccggtacatgggaaattttaatggtccgtagcgcccaggttgatacttcgctgttaagtcagtacgccgattctacctgcgaactggatagccaggcagggttgtataacccaggtatgcaatggctggcatccggcgtgctggaatgggtgagaaaactgttctggacggctgaaacaccctggcaaatgttgattgaagaagctcgtctgatcgcacctggcgcggatggtgtgaaaatgcagtgtgatttattgtcgtgtcagaacgctggctggcaaggagtgacgcttaataccacgcgggggcatttctatcgcgcggcgctggaagggttaactgcgcaattacagcgcaatctacagatgctggaaaaaatcgggcactttaaagcctctgaattattgttagtcggtggaggaagtcgcaacacattgtggaatcagattaaagccaatatgcttgatattccggtaaaagttctcgacgatgccgaaacgaccgtcgcaggagctgcgctgttcggttggtatggcgtaggggaatttaacagcccggaagaagcccgtgcacagattcattatcagtaccgttatttctacccgcaaactgaacctgaatttatagaggaagtgtga

SEQ ID NO: 481910 - DNA, 423 bp, Shigella sonnei
atgctgaaaacaatttcgccgttaatttctcccgaactattgaaagtgctggcagagatgggacatggagatgaaattattttttccgatgctcactttcccgcccattcgatgggaccgcaggtgatccgcgctgatggcctgttggtgagcgacttgctccaagcgattatcccattatttgagctggacagttatgccccgccgctggtgatgatggcagcggtagaaggtgacactctcgatcctgaagtagaacgacgttaccgtaatgcgctttcactacaagccccgtgtcctgacatcatccgcatcaatcgttttgcgttttatgaacgggcgcaaaaagcctttgcgatcgttatcacaggcgaacgagcgaagtacgggaatattcttttaaaaaaaggggtaacaccgtaa

SEQ ID NO: 481911 - DNA, 732 bp, Shigella sonnei; identical to SEQ ID NO: 470824

SEQ ID NO: 481912 - DNA, 1101 bp, Shigella sonnei
atgaataaggttgtattgctgtgccgtccgggctttgaaaaagagtgcgccgcagaaattaccgataaagccggccagcgggaaattttcggttttgcccgcgtgaaagagaatgcgggttatgtcatttatgaatgttatcaacctgatgatggcgataagttaatccgtgagctgccgttcagttcattaatttttgcccgccagtggtttgtggtgggggaactcttgcagcatttgccgccagaagatcgtattacccccattgtcgacatgttgcagggcgtagtagagaagggcggtgaactgcgtgttgaagttgccgataccaacgaaagcaaagagttgctgaaattctgccgtaaattcaccgtgccgctacgcgctgccttgcgcgatgccggggtgctggcgaactatgaaacgccgaagcgtccggttgtgcatgtattctttattgcaccaggctgctgctataccggttactcatacagcaacaataattcgccgttctatatgggcattccgcgcctgaaatttccggcagaggcgccgagtcgttccacgctcaaactggaagaggcatttcatgtgtttattcctgcggatgagtgggatgaacgcctggcgaacgggatgtgggcggtggatttaggcgcttgccctggcggctggacctaccaactggtgaagcgcaacatgtgggtttattccgtcgacaacggcccgatggcgcaaagtctgatggataccgggcaggtgacgtggctgcgggaagacggtttcaaattccgtccgacacgcagcaatatctcctggatggtatgcgatatggttgaaaaaccggctaaagttgcggcattgatggcgcagtggctggttaatggctggtgccgtgaaaccattttcaatctcaaactgccgatgaaaaaacgctacgaagaagtatcacacaatctggcgtatattcaggcacagcttgatgaacatggcataaatgctcagattcaggcgcggcagttgtatcacgatcgcgaagaagtgacggtgcacgtccgccgcatctgggctgcggtgggtggtcgtcgcgacgagcgataa

SEQ ID NO: 481913 - DNA, 396 bp, Shigella sonnei
atgaccagccgttttatgctgattttcgccgccattagcggcttcatttttgtggctctgggcgcttttggcgcgcatgtgttaagtaaaaccatgggggccgttgagatgggctggatccagaccggcctcgaataccaggcgtttcatacgctggcgatcttaggtctggcggtggcaatgcagcgtcgcatcagtatctggttttactggagtagcgttttcctcgcgttaggcacggtgttgttcagcggcagcctttattgcctggcgctgtcccatctgcgtttgtgggcatttgtcacaccggttggcggcgtgagcttcctcgcgggctgggcgttaatgttagttggtgctatccgtttaaagcgcaagggcgtaagtcatgaataa

SEQ ID NO: 481914 - DNA, 918 bp, Shigella sonnei
atgtctaaacgattaccaccgctaaatgccttacgagtttttgatgccgcagcacgccatttaagtttcactcgcgcagcagaagagcttttcgtgacccaggccgcagtaagtcatcaaatcaagtctcttgaggattttttggggctaaaactgttccgccgccgtaatcgttcactcctgctgaccgaggaagggcaaagctatttcctcgatatcaaagagatattttcgcaattaaccgaagcgacgcgtaaactccaggcccgtagcgccaagggggcgttgacggtcagtttactccccagtttcgccattcattggttggttccgcgactttccagctttaattcagcttatccgggaattgacgttcgaatccaggcggttgatcgtcaggaagataagctggcggatgatgttgatgtggcgatattttatggtcggggcaactggccggggctacgggtggaaaaactgtacgccgaatatttattgccggtgtgttcgccgctactgctgacaggcgaaaaacccttgaagaccccggaagatctggctaaacatacgttattacatgatgcgtcacgccgtgactggcagacatatacccgacagttggggttaaatcatatcaacgttcagcaagggccaatttttagtcatagcgccatggtgctgcaagcggctattcacgggcagggagtggcgctggcaaataacgtgatggcgcaatctgaaatcgaggccggacgtcttgtttgcccgtttaatgatgttctggtcagtaaaaacgctttttatctggtttgtcatgacagccaggcagaactgggtaaaatagccgcctttcgccaatggatcctggcgaaagccgctgctgaacaagaaaaattccgctttcgttatgaacaataa

SEQ ID NO: 481915 - DNA, 228 bp, Shigella sonnei; identical to SEQ ID NO: 3241

SEQ ID NO: 481916 - DNA, 1206 bp, Shigella sonnei
atgaacgtttttaatcccgcgcagtttcgcgcccagtttcccgcactacaggatgcgggcgtctatctcgatagcgccgcgaccgcgcttaaacctgaagccgtggttgaagccactcgacagttttacagcctgagcgccggaaacgtccatcgcagccagtttgccgaagcccaacgcctgaccgcgcgttatgaagctgcacgagagaaagtggcgcaattactgaatgcaccggatgataaaactatcgtctggacgcgcggcaccactgaatccatcaacatggtggcacaatgctatgcgcgtccgcgtctgcaaccgggcgatgagattattgtcagcgtggcagaacaccacgctaacctcgtcccctggctgatggtcgcccaacaaactggagccaaagtggtgaaattgccgcttaatgcgcagcgactgccggatgtcgatttgttgccagaactgattactccccgtagtcggattctggcgttgggtcagatgtcgaacgttactggcggttgcccggatctggcgcgagcgattacctttgctcattcagccgggatggtggtgatggttgatggtgctcagggggcggtgcatttccccgcagatgttcagcaactagatatcgatttctatgctttctctggtcacaaactgtatggcccgacgggtatcggcgtgctgtatggcaaatcagaactgctggaagcgatgtcgccctggctgggtggcggcaaaatgattcacgaagtgagttttgacggcttcacgactcaatctgcgccgtggaaactggaagcaggaacgccaaatgtggctggtgtcataggattaagcgcggcgctggaatggctggcagattacgatatcaaccaggcagaaagttggagtcgcagcctggcgacgctggcggaagatgcgctggcaaaacgtcctggcttccgctcattccgctgccaggattccagcctgctggcctttgattttgctggcgttcatcacagcgatatggtgacgctgctggcggagtacggtattgccctgcgggccgggcaacattgcgctcagccgctactggcagaattaggcgtaaccggcacactgcgcgcctcttttgcgccatataatacaaagagtgatgtggatgcgctggtgaatgccgttgaccgcgcgctggaattattggtggattaa

SEQ ID NO: 481917 - DNA, 444 bp, Shigella sonnei
atgacgaacccgcaattcgccggacatccgttcggcacaaccgtaaccgcagaaacgttacgcaataccttcgcaccgttgtcgcaatgggaagataaatatcgccagttgatcatgctggggaaacagcttccggctttgccagacgagttaaaagcgcaggctaaagagattgccggatgcgaaaaccgcgtctggctgggatataccgtgactgaaaacggtaaaatgcacttctttggcgatagcgaagggcgcattgtgcgcggcctgctggcggtgctgttgactgccgttgaggggaaaaccgccgccgaattgcaggcacagtcgccgctggcattgtttgatgagctgggattgcgtgcgcaacttagcgcctcacgcagccaggggttaaatgcgttaagcgaggcgattatcgctgcgacgaagcaggtttaa

SEQ ID NO: 481918 - DNA, 807 bp, Shigella sonnei
atgtctgtggtaattagtgatgcatggcgtcagcgttttggtggcacagcgcgtctgtatggtgaaaaagcgttgcaactgtttgctgacgcgcatatttgtgtggttggtatcggtggtgtcggttcctgggcggcggaagcgctggcgcgcacggggattggcgcaatcacgcttatcgatatggatgatgtgtgcgtcaccaataccaatcggcaaattcacgctctgcgcgataacgtcgggctggcaaaagcggaagtcatggcggagcgtattcgccagattaacccggagtgccgtgtaacggtggtggatgatttcgtgacgccggataacgtagcgcagtatatgagcgtgggttattcgtacgtgattgatgccattgatagtgtacggcccaaagcggcgctgattgcttattgtcggcgcaataaaatcccgctggtcacgaccggtggcgcgggtgggcagattgacccgacgcagattcaggttaccgatctggcgaaaacgattcaggatccgctggcggcgaagttgcgcgagcgcctgaaaagcgattttggcgtagtgaaaaacagtaaaggtaagctcggcgtcgattgcgtgttttctactgaagcgctggtgtacccgcagtcagacggtactgtgtgtgcgatgaaagccacggcagaagggccgaagcggatggattgtgcatctggatttggcgcggcaacgatggtgaccgccacctttgggtttgttgcggtttctcatgcgctgaagaagatgatggcgaaagcggcgcgtcagggttaa

SEQ ID NO: 481919 - DNA, 1098 bp, Shigella sonnei
atgaaaggacgttgggtaaagtaccttcttatgggcacggttgtggcaatgcttgccgcctgctcttccaaaccaaccgatcgcggacagcaatataaagacgggaaatttacccagcctttctctctggtgaaccagccagatgccgttggcgcgccgattaacgccggtgattttgccgagcaaattaaccatatccgtaattcgtcaccgcgtctgtatggcaaccagagtaatgtttataacgcggtgcaagagtggctgcgcgcaggcggtgatacccgcaatatgcgccagttcggcattgatgcctggcagatggaaggtgccgacaactatggtaacgtgcagtttacaggctattacacgccggtaattcaggcgcgccatacccgccagggcgagttccagtatcctatttaccgtatgccgccaaaacgtggtcgtctgccgtctcgtgcggagatctacgcgggggcattgagtgataaatatattctcgcttacagtaactccctgatggataacttcattatggatgtgcagggtagtgggtatatcgactttggtgatggcagtccgcttaactttttcagctatgcagggaaaaacggtcatgcctatcgcagcattggtaaggtgctgatcgaccgtggcgaagtgaaaaaagaagatatgtcgatgcaggcgattcgtcactggggcgaaacacacagtgaagccgaggttcgcgagctgctggaacagaacccgtctttcgtcttctttaaaccgcaatcttttgcaccggtgaaaggggcaagtgcggtgccgctggttggtcgcgcgtcagttgcctctgatcgttccattattccgccaggtactaccttgctggcagaagtgccgttgctggataataacggcaaatttaatggtcagtacgaactgcgtctgatggtggcgctggatgtcggtggtgcaatcaaaggccaacacttcgatatctatcaagggatcgggccggaagccggacaccgcgcaggttggtacaaccactatggacgtgtctgggtgctgaaaaccgccccgggcgcaggtaacgtctttagcggctga

SEQ ID NO: 481920 - DNA, 1254 bp, Shigella sonnei
atgtcaggatccaacactgcaatcagccgtcgtcgtttactgcaaggcgcgggcgctatgtggctattgagcgtaagtcaggtcagcctggctgcggttagccaggtcgtggcggtgcgcgtctggcctgcgtccagctacacccgcgtgacggtagaatcaaatcgtcagctgaaatataagcagttcgcgttgagtaaccctgaacgcgtggtggtggatatcgaagatgtaaacctgaactcggtactcaaggggatggcggcacaaattcgtgcagacgacccgttcatcaagtcggcgcgcgtcgggcaatttgacccgcaaaccgtacggatggtttttgaattaaagcaaaacgtaaaaccgcagctgtttgcccttgcgccggtcgccgggtttaaagagcgtctggtgatggacctctatccggccaatgcacaggatatgcaggacccgctgctggcgctgctggaggattacaacaaaggcgacctcgaaaagcaggtgccgccagcgcaaagtggtccacaaccaggtaaagcagggcgcgatcgtccgattgtcattatgcttgaccctggccacggtggcgaagactccggtgcggtggggaaatacaaaacgcgcgaaaaagatgtggtattgcaaatagctcgccgtttgcgctctctgatcgagaaagagggcaatatgaaggtgtacatgacgcgcaatgaagacatcttcattccgttgcaagtgcgcgtagcaaaagcccagaaacagcgtgctgacctgtttgtctctatccatgccgacgcctttaccagtcgccagccgagcggttcctcggtgtttgcgctctcaaccaaaggtgcaaccagtactgcggcaaaatatctggcacaaacccagaacgcctcggacttgattggtggcgtgagcaaaagcggtgaccgctatgtcgaccacaccatgttcgatatggtgcagtcgctgaccattgctgacagccttaagtttggtaaagcagtgctgaataagctcggtaaaatcaacaagctgcataaaaatcaagttgaacaggccgggtttgccgtactaaaggcaccagatattccctccattctggtcgaaacggcgtttatcagtaacgttgaggaagagcgtaaactgaaaacggcgactttccagcaggaagttgcggagtctattcttgcggggattaaagcgtattttgccgatggggcaacgctggcgagaaggggatga

SEQ ID NO: 481921 - DNA, 1332 bp, Shigella sonnei
gtggtaaaggaacgtaaaaccgagctggtcgagggattccgccattcggttccctatatcaatacccaccggggaaaaacgtttgtcatcatgctcggcggtgaagccattgagcatgagaatttctccagtatcgttaatgatatcgggttgttgcacagcctcggcatccgtctggtggtggtctatggcgcacgtccgcagatcgacgcaaatctggctgcgcatcaccacgaaccgctgtatcacaagaatatacgtgtgaccgacgccaaaacactggaactggtgaagcaggctgcgggaacattgcaactggatattactgctcgcctgtcgatgagtctcaataacacgccgctgcagggcgcgcatatcaacgtcgtcagtggcaattttattattgcccagccgctgggcgtcgatgacggcgtggattactgccatagcgggcgtatccggcggattgatgaagacgcgatccgtcgtcaactggacagcggtgcaatagtgctaatggggccggtcgctgtttcagtcactggcgagagctttaatctgacctcggaagagattgccactcaactggccatcaaactgaaagctgagaagatgattggtttttgctcttcacagggcgtcactaatgacgacggtgatattgtctcagaacttttccctaacgaagcgcaagcgcgggtagaagcccaggaagagaaaggcgattacaactccggtacggtgcgctttttgcgtggcgcagtgaaagcctgccgcagcggcgtgcgtcgctgtcatttaatcagttatcaggaagatggcgcgctgttgcaagagttgttctcacgcgacggtatcggtacgcagattgtgatggaaagcgccgagcagattcgtcgcgcaacaatcaacgatattggcggtattctggagttgattcgcccgctggagcagcaaggtattctggtgcgccgttctcgcgagcagctggagatggaaatcgacaaattcaccattattcagctcgataacacgactattgcctgcgccgcgctctatccgttcccggaagagaagattggggaaatggcctgtgtggcagttcacccggattaccgcagttcatcacggggcgaggttctgctggaacgcattgccgctcaggcgaagcagagcggcttaagcaaattgtttgtgctgaccacgcgcagtattcactggttccaggaacgtggatttaccccggtggatattgatttactgcccgagagcaaaaagcagttgtacaactaccagcgtaaatccaaagtgttgatggcggatttagggtaa

SEQ ID NO: 481922 - DNA, 1827 bp, Shigella sonnei
atgaaattgcaaaagcaattactggaagctgtggagcacaaacagctacgcccgctggatgtgcaatttgccctgaccgtggcgggagatgaacatcctgccgtcaccctcgcggcggcactgttaagtcatgatgccggagagggacacgtctgtttgccgctttcacgactggaaaataacgaggcgtcgcatccgctgttggcgacctgtgtcagtgaaatcggtgagctacaaaattgggaagaatccttgctggcttctcaagcggtcagcaggggagatgaacccacgccgatgatcctctgtggcgatcgtctttatttgaatcgcatgtggtgtaacgagcggacggtagcgcgcttcttcaatgaggtgaatcatgccattgaggttgatgaagctctactggcgcaaaccctggacaaactttttccagtaagcgatgaaattaactggcaaaaagtggcggcagcagtggcgctgacgcggcggatctcggtgatttccggcggcccaggcaccggtaaaacgaccaccgtggcgaagttgctggcagcgttaattcaaatggccgacggcgaacgctgccgtatccgtctggctgcaccaacgggtaaagctgccgcgcgcttaaccgaatctctcggcaaggctttgcgacagttaccgctgaccgatgaacaaaagaaacgcattccggaagatgccagcactttgcaccgattgctgggcgcgcagccgggtagccagcgtttacgtcatcatgccggtaacccgctgcatcttgatgtgctggtggtagatgaagcgtcaatgatcgatctgcctatgatgtcgagactgatcgacgccttgcccgatcatgcgcgagtgatctttctcggcgatcgtgatcaactggcctcggttgaggctggggctgtgctgggcgatatctgcgcttatgccaatgccggctttaccgccgagcgtgccgggcagctaagccgcctgacgggaactcacgttccggcaggaaccggcacagaagcggcatctttgcgcgacagtctctgcctgctgcaaaaaagctatcgtttcggcagcgattcaggcattggtcagttagctgcggcgatcaaccgtggtgataaaacggcagtgaaaaccgtttttcagcaggattttactgatattgaaaaacggcttttacagagcggcgaagattatattgcgatgcttgaggaagctcttgcgggttatggacgttatctggatctgctgcaagcgcgtgccgagccggatttaatcattcaggcgttcaatgagtaccaacttttgtgcgccctgcgggaagggccatttggcgtggctggactgaatgagcgaattgagcagtttatgcaacagaagcgcaaaattcatcgtcattcgcactctcgttggtacgaaggtcgaccggtgatgattgcccgtaatgacagcgcgcttgggttgtttaatggcgatatcggtattgcgctggatcgcgggcaggggacgcgcgtctggtttgcgatgccggacggcaatattaagtctgtgcaaccgagtcgcttgccagagcacgaaactacgtgggcgatgacggtacataaatcgcagggatcggagttcgaccatgcggcgttgattttaccgagccaacgcacgccgatagtaacgcgagagctggtatacaccgcggtgacccgcgcgcgtcgccgtctgtcgctgtatgccgatgagcgtatattaagtgcggcaatcgccactcgtactgagcggcgcagtggtctggcggcgttgtttagttcgcggggataa

SEQ ID NO: 481923 - DNA, 3543 bp, Shigella sonnei
atgagtgatgtcgccgagacactagatcctttgcgcttgcccttacagggcgagcgcctgattgaagcctctgccggcacaggcaaaacctttacgattgcggcgctttatttgcgcctgttacttggactaggcggttccgccgcctttccccgcccgctgaccgttgaagaactgctggtggtcacctttaccgaggctgccacggcagaattgcgcggtcgtatccgtagcaatatccacgagttgcgcatcgcctgtctgcgtgaaaccaccgacaatccattgtacgaacacctgctggaagaggtcgacgataaagcgcaagccgcgcagtggttgttgttagccgaacggcagatggatgaagcggcagtctttactattcacggcttttgccagcgcatgctcaacctgaatgcctttgaatccggcatgctgtttgagcagcagctgattgaagatgagtctctgctacgctaccaggcctgcgccgatttctggcgtcgccactgctacccgctgccgcgtgaaatagcccaggtcgtctttgaaacctggaaagggccgcaggcgttgctgcgcgatattaatcgttatctgcaaggcgaagcgccggttatcaaagcaccgccgcccgatgatgaaacgctagcttcccgtcacgcgcaaattgtggcgcgtattgatacggtaaaacagcagtggcgcgacgcagtgggtgaactggatgcgctgatcgaatcttctggtattgatcgacgcaagtttaaccgtagcaatcaggctaaatggatcgacaagatcagcgcctgggcagaagaagagacaaacagttatcagttgccggagtcgctggaaaaattctcccagcgtttcttagaagatcgcacgaaagccgggggggaaaccccgcgacatccactgtttgaggcgatcgatcaactgcttgcagaaccattgtcgatccgtgatctggtgatcacccgcgcattggctgagatccgcgaaacagtagcgcgtgaaaaacgccgccgtggcgaattgggttttgatgacatgttaagtcggctcgattccgcgctgcgtagcgaaagcggcgaggtgttggcagcggcgatccgtacgcgattcccggtggcaatgatcgatgaatttcaggataccgacccccagcagtaccgaatttttcgccgtatctggcaccatcagccagaaaccgcattgttgctgattggcgacccgaagcaggccatatatgcattccggggtgcggatatcttcacttatatgaaggcgcgtagtgaagttcacgcccactacactttagacaccaactggcgctccgcacctggaatggtgaacagtgtgaacaagcttttcagccagactgatgacgcgttcatgtttcgcgaaataccgtttattccagtgaaatcagccgggaaaaatcaggcgttacgttttgtctttaaaggtgaaacgcagcctgcgatgaaaatgtggctgatggaaggcgaaagctgcggcgttggcgactatcaaagtaccatggcgcaggtatgtgctgcgcaaatccgcgactggctacaagccggacagcggggcgaagcgttgctgatgaacggcgacgacgcgcgtccggtgcgtgcttcggacatcagcgtgctggtgcgcagccgccaggaggccgcccaggtgcgcgatgccttaacgttgctggaaatcccttccgtttacctttcgaaccgcgatagtgtttttgaaactctggaagcgcaggaaatgctttggctgttgcaggcggtgatgacgcccgaacgtgagaacaccctgcgcagtgcgctggcaacgtcaatgatggggctgaatgcgctggatattgaaacgctgaataatgacgaacatgcgtgggatgcggtagtcgaagagttcgatggttatcggcaaatctggcgcaaacgtggcgttatgccgatgctgcgggcgctgatgtcggcgcgtaacattgcagaaaacttgctggcaacggcaggcggtgagcggcgtcttaccgatatcttgcatatcagcgaactgcttcaagaagccggaacgcagctggaaagtgaacatgcgctggtacgctggttatcgcaacatatcctcgagccagacagtaatgcctccagccaacaaatgcgcctcgaaagtgataaacatctggtgcagattgtcacgatccataaatcgaaagggctggaatatccgctggtctggttgccatttattaccaatttccgcgtccaggatcaggcgttttatcacgatcgccactcgtttgaggcagttttggatcttaatgctgcgccagaaagcgtcgacctcgcggaggtcgaacgtctggcggaagatctgcgtttgctttacgtggcgctgacgcgttcggtttggcattgcagtctcggcgttgcaccgctggtgcgccgtcgtggcgataaaaaaggtgacaccgacgtccaccaaagtgcgctcgggcgtttgctgcaaaaaggggaaccgcaagatgcggcagggcttcgcacctgtattgaagcgttatgcgatgatgatattgcctggcaaacggcacaaactggtgataaccagccctggcaggttaatgatgctttaactgcagaactgaatgcgaggacactacaacgattgcccggcgataactggcgtgtcaccagctactccggcttgcagcagcgtggtcacggtatcgctcaggatctgatgccacggctggatgttgatgccgcaggcgtggtcagcgtcgttgaagaaccgacgttaacaccgcatcagttcccgcgcggtgcgtcaccggggacattcttgcacagtttgtttgaagacctcgattttacccagccggttgacccgaactgggtacaggaaaaactggaactcggcggctttgaatcgcagtgggaaccggtgttgaccgagtggatcacggctgtcctccaggcacctctcaatgaaacgggtgttagcctgagtcagctttccgaccgcgataaacaggtggagatggagttttacctgccgattagcgaaccgctcatcgccagccagcttgatgcactaattcgccagtttgacccgctatccgctggctgcccgccgctggagttcatgcaggtacgcggcatgttaaaaggctttatcgacctggtattccgccacgaagggcgttattacctgctcgactataaatccaactggctgggtgaagacagttcggcttacacccaacaggctatggcagcagcgatgcaggcacaccgctatgatctgcaatatcagctttataccctggcgctgcatcgttatctgcgccatcgcattgctgattacgactatgatcgtcactttggcggcgttatctatctgttcctgcgtggcgttgataaagaacatccgcaacaagggatttacacaacccgacccaacgccgggttgattgccctgatggatgagatgtttgccggtatgaccctggaggaggcgtaa

SEQ ID NO: 481924 - DNA, 2889 bp, Shigella sonnei
atgccccgcagcacctggttcaaagcattattgttgttagttgccctttgggcacccttaagtcaggcagaaacgggatggcagccgattcaggaaaccatccgtaaaagtgataaagataaccgccagtatcaggctatacgtctggataacggtatggtggtcttgctggtttctgatccgcaggcagttaaatcgctctcggcgctggtggtgcccgttgggtcgctggaagatcccgaggcgtaccaggggctggcacattaccttgaacatatgagtctgatggggtcgaaaaagtacccgcaggctgacagtctggccgaatatctcaaaatgcacggcggtagtcacaatgccagcactgcgccgtatcgcacggctttctatctggaagttgagaacgacgccttgcctggtgcggtagaccgcctggccgatgctattgctgaacctttgctcgacaagaaatatgccgaacgtgagcgtaatgcggtgaacgctgaattaaccatggcgcgtacgcgtgacgggatgcgcatggcacaggtcagcgcagaaaccattaacccggcacaccccggttcaaagttttctggtggtaacctcgaaactttaagcgataaacctggtaatccggtgcagcaggcgctgaaagatttccacgagaagtactattccgccaatctgatgaaggcggttatttacagcaataaaccgctgccggagttggcaaaaatggcggcggacacctttggtcgcgtgccgaacaaagagagcaaaaaaccggaaatcaccgtgccggtagtcaccgacgcgcaaaagggcattatcattcattacgtcccggcaatgccgcgtaaagttctgcgcgttgagtttcgcatcgataacaactcagcgaagttccgtagtaaaacggatgaattgattacctatctgattggtaatcgcagcccaggtacactttccgactggctgcaaaagcagggattagttgagggcattagcgccaactccgatcctatcgtcaacggcaacagcggcgtattagcgatctctgcgtctttaaccgataaaggcctggctaatcgcgatcaggttgtggcggcaatttttagctatctcaatctgttacgtgaaaaaggcattgataaacaatacttcgatgaactggcgaatgtgctggatatcgacttccgttatccgtcgatcacccgtgatatggattacgtcgaatggctggcagataccatgattcgcgttccggttgagcatacgctggatgcagtcaatattgccgatcggtacgatgctaaagcagtaaaagaacgtctggcgatgatgacgccgcagaatgcgcgtatctggtatatcagcccgaaagagccgcacaataaaacggcttattttgtcgatgcgccgtatcaggtcgataaaatcagcgaacaaactttcgctgactggcagcaaaaagctgccaatattgcgctctccttaccggagcttaacccctatattcctgacgatttctcgctgattaagtcagagaagaaatatgaccatccagagctgattgttgatgagtcgaatctgcgcgtggtgtatgcgccaagccgttatttttccagcgaacccaaagctgatgtcagcctgattttgcgtaatccgaaagccatggacagcgcccgcaatcaggtgatgtttgcgctcaatgattatctcgcagggctggcgcttgatcagttaagcaaccaggcgtcggttggtggcataagtttttccaccaacgctaacaacggccttatggttaatgctaatggttacacccagcgtctgccgcagctgttccaggcattgctcgaggggtactttagctataccgctacggaagatcagcttgagcaggcgaagtcctggtataaccagatgatggattccgcagaaaagggtaaagcgtttgagcaggcgattatgcccgcgcagatgctctcgcaagtgccgtacttctcgcgagatgaacggcgtaaaattttgccctccattacgttgaaagaggtgctggcttatcgcgacgccttaaaatcaggggctcgaccagagtttatggttatcggcaacatgaccgaggcccaggcaacaacgctggcacgcgatgtgcaaaaacagttgggcgctgatggttcagagtggtgtcgaaacaaagatgtagtggtcgataaaaaacaatccgtcatctttgaaaaagccggtaacagcaccgactccgcactggcagcggtatttgtaccgactggctacgatgaatacaccagctcagcctatagctctctgttggggcagatcgtacagccgtggttctacaatcagttgcgtaccgaagaacaattgggctatgccgtgtttgcgtttccaatgagcgtggggcgtcagtggggcatgggcttccttttgcaaagcaatgataaacagccttcattcttgtgggagcgttacaaggcgtttttcccaaccgcagaggcaaaattgcgagcgatgaagccagatgagtttgcgcaaatccagcaggcggtaattacccagatgctgcaggcaccgcaaacgctcggcgaagaagcatcgaagttaagtaaagatttcgatcgcggcaatatgcgcttcgattcgcgtgataaaatcgtggcccagattaaactgctgacgccgcaaaaactggccgatttcttccatcaggcggtagtcgagccgcaaggcatggctatcctgtcgcagatttccggcagccaaaacgggaaagccgaatatgtgcatcctgaaggctggaaagtgtgggagaacgtcagcgcgttgcagcaaacaatgcccctgatgagtgaaaagaatgagtga

SEQ ID NO: 481925 - DNA, 3369 bp, Shigella sonnei
atgttaagggtctaccattccaatcgtctggacgtgctggaagcgttgatggagtttattgtcgaacgcgaacggctggacgatcctttcgaaccagagatgattctggtgcaaagtaccggtatggcgcagtggctgcaaatgaccctgtcgcaaaagtttagtattgcggcaaacattgattttccgctgccagcgagctttatctgggatatgttcgtccgggtgttaccggaaatccccaaagagagcgcctttaacaaacagagcatgagctggaaactgatgactctgctgccgcaattgctggagcgcgaagactttaccctgttgcggcattatctgactgacgatagcgacaagcgaaaactgttccagctttcctcaaaagcggcggacctgtttgaccagtatctggtctatcgtccggactggctggcacagtgggaaacaggacatttggttgaagggctgggagaagcacaggcctggcaagccccgttgtggaaggcgctggtggaatatacccatcaactcgggcaaccgcgctggcaccgcgccaatctctatcagcgctttatcgaaacgctggagtccgcgacgacctgcccgccggggttaccttcgcgcgtctttatatgcggtatttccgcgttaccgcctgtttatctccaggcgctacaggcgctgggtaaacatattgaaatccatctcctgtttaccaacccctgccgttattactggggcgatattaaagatcctgcttatctggcgaaactgctgacccgtcagcgtcgacacagttttgaagatcgcgaattgccgctatttcgtgatagcgaaaatgccgggcagctctttaacagcgatggtgaacaggatgtcggcaacccgctgctggcttcatggggtaagcttgggcgcgactacatttatctcctttctgacctggagagcagccaggagctggacgcctttgtcgatgtcacgccagataacctgctgcataacattcagtctgacattctggaactggaaaaccgtgccgttgctggtgtgaacatcgaagagttttcccgtagcgataacaaacgcccgcttgatccactggatagcagtatcaccttccacgtttgccatagcccgcagcgtgaagttgaagttttgcacgatcgcctgctggcgatgctggaagaagacccgacacttactccgcgcgacatcatcgtgatggtggctgatatcgacagctacagtccgtttattcgggctgtgtttggtagcgcacctgcggatcgttacctgccttacgccatttccgaccgtcgggcgcggcagtcgcatccggtactggaagcgtttatcagcctgttatcgttgccagacagccgctttgtgtcggaagacgtgctggcattactggatgtgccggtgctggcggcgcggtttgacatcaccgaagaagggctgcgttatttacgccagtgggtcaacgaatccggcattcgttgggggatagatgacgacaacgttcgcgagctggaactccccgccaccggacaacacacctggcgatttggcctgacgcgtatgttgctgggctacgcgatggagagcgcgcagggcgagtggcaatcggttctaccttatgatgaatcgagcggcttaattgcagaactggtggggcatctggcttcactgctaatgcagctaaacatctggcgtcgcgggctggcacaggagcgtccgctagaagagtggttgccggtttgtcgcgatatgctcagcgccttcttcctgccggatgcggaaaccgaagcggcgatgacgctgatcgaacaacaatggcaggcgattatcgccgaaggtttaggtgcgcagtatggcgacgcggtgccgctgtcactattgcgtgatgaactggcacagcgtctggatcaagaacgtatcagccagcgttttctcgccggaccggttaacatttgtactctgatgccaatgcgttcaattccgttcaaagtggtttgcctgctgggaatgaacgacggcgtttatccacgtcagcttgcgccattgggctttgacctgatgagccagaaaccgaagcgtggcgaccgtagccgtcgcgatgacgaccgctatctgttcctggaagcgttaatttccgcgcagcaaaaactctatatcagctatatcgggcgttccattcaggataacagtgaacgtttcccgtcggtactggtgcaggaactgatcgactacatcgggcaaagtcattatctaccgggcgatgaagcgctcaactgtgatgaaagcgaggcaagggtaaaagcgcatcttacttgcctccatacccgaatgccgtttgatccacaaaactatcagccaggcgaacgacaaagctatgctcgtgaatggctacctgcggccagccaggctggtaaagcacattctgaatttgttcagccgctgccgtttaccttaccggaaaccgtgccgctggaaacgctacaacgattctgggcacatccggtgcgggcgttcttccagatgcgtttgcaggtgaacttccgtactgaagacagcgaaatccccgacaccgagccatttattctggaagggcttagccgttatcaaatcaatcagcagttattgaatgcactggttgagcaggatgatgccgaacgcttgttccgtcgcttccgggcggcaggggatttaccgtatggcgcttttggtgaaattttctgggaaactcagtgccaggagatgcagcagcttgccgacagagtcattgcctgtcgccagccggggcagagtatggaaattgatctcgcctgcaacggtgtgcagataactggctggttgccgcaggtgcagccggatggcctgttgcgctggcgtccctctttattaagtgtggcgcagggaatgcaactttggctggaacaccttgtctactgtgccagcggtggtaatggtgaaagtcgcctttttctacgcaaagacggcgagtggcgttttccgccgcttgcagccgaacaggctttgcattacctctcacaactgattgaggggtatcgtgaagggatgtccgcgccattgctggtgttacctgaaagtggcggcgcgtggctaaaaacctgttatgacgcgcaaaacgatgccatgctggatgacgattccacgttgcaaaaagcccgtacgaaattccttcaggcttacgaaggtaacatgatggtgcgtggcgaaggtgatgatatctggtatcaaaggctctggcggcaattaacaccagagacaatggaggccatcgttgaacagtcgcaacgtttcctgttaccgctgtttcgctttaatcagtcatga

SEQ ID NO: 481926 - DNA, 324 bp, Shigella sonnei
atgtcagcttccctgaagaatcaacaaggctttagcctgccggaggtaatggttgcgatggtgctgatggtgatgattgtcactgcgttatcgggtatccagcgaacattaatgaacagtctcgccagcagaaaccagtaccaacagctctggcggcatggttggcagcaaacgcaactgcgcgcgatttcgccacctgccaactggcaggtcaaccgaatgcagacatcgcaggcgggatgtgtcagcatcagcgttacgctagtttcacccgggggcagagaaggcgagatgacccgcctgcattgcccgaatcgtcagtag

SEQ ID NO: 481927 - DNA, 408 bp, Shigella sonnei
gtgaaccgcgaaaaaggtgtttcgtcactggctctggtcctgatgctgctggttttgggtagcttgctattgcaaggaatgagtcagcaggatcgcagttttgcctctcgcgtgagcatagaaagtcagtcattgcgccgccaggccatcgttcagtcggcgctggcgtgggggaaaatgcactcctggcagacgcagcccgcagttcagtgctcgcagtacgctggaaccgatgcccgggtttgtttgcgtttactggcagataatgaagccttattggttgccggttatgaaggcgtttcgttgtggcgaacaggcgaagtcattgatggaaacattgttttttcgccacgcggctggagcgatttttgtccgctgaaagagagggcgttatgtcagcttccctga

SEQ ID NO: 481928 - DNA, 564 bp, Shigella sonnei
atgcctgtaaaagagcaaggtttttctctgctggaagtgttgattgctatggcgatcagtagcgtattgttgctgggggctgcacgctttctgcctgcgttacagcgtgaaagtttaacgagcacccgtaagctggcgctggaagatgaaatctggctgcgggtatttaccgtcgcgaagcatctccagagggcgggttattgtcatggcagctgtaccggcgaagggctggaaattgtcggacagggtgactgtatcattgtgcagtgggatgcgaacagtaacggtatctgggatcgcgaaccggtaaaagagtctgaccagattggatttcgtctgaaggagcatgtgctggaaacgctacgcggtgcgacatcctgtgaaggtaagggctgggataaagtcactaatccggatgccatcattatcgacacttttcaggtcgtacgtcaggatgtcagcggcttctcgccggtgttgacggttaatatgcgtgctgccagtaagtctgaaccgcaaaccgtggtggatgccagctatagcgtgacaggattcaacctgtga

SEQ ID NO: 481929 - DNA, 471 bp, Shigella sonnei; identical to SEQ ID NO: 458143

SEQ ID NO: 481930 - DNA, 795 bp, Shigella sonnei
atgaaacagtatttagaactgatgcaaaaagtgctcgacgaaggcacacagaaaaacgaccgtaccggaaccggaacgctttccatttttggtcatcagatgcgttttaacctgcaggatggattcccgctggtgacaactaaacgttgccacctgcgttccatcatccacgaactgctgtggtttctgcagggcgacactaacattgcttatctacacgaaaacaatgtcaccatctgggacgaatgggccgatgaaaacggcgacctcggaccagtgtatggtaaacagtggcgcgcctggccaacgccagatggtcgtcatattgaccagatcactacggtactgaaccagctgaaaaacgacccggattcccgccgcattattgtttcagcgtggaacgtaggcgaactggataaaatggcgctggcaccgtgccatgcattcttccagttctatgtggcagacggcaaactctcttgccagctttatcagcgctcctgtgacgtcttcctcggcctgccgttcaacattgccagctacgcgttactggtgcatatgatggcgcagcagtgcgatctggaagtgggtgattttgtctggaccggtggcgatacgcacctgtacagcaatcatatggatcaaactcatctgcaattaagccgcgaaccgcgtccgctgccgaagttgattatcaaacgtaaacccgaatccatcttcgactaccgtttcgaagactttgagattgaaggctacgatccacatccgggcattaaagcgccggtggctatctaa

SEQ ID NO: 481931 - DNA, 876 bp, Shigella sonnei
atgaccagtagctatctgcattttccggagtttgatccggtcattttctcaataggacccgtggcgcttcactggtacggcctgatgtatctggtgggtttcatttttgcaatgtggctggcaacacgacgggcgaatcgtccgggcagcggctggaccaaaaatgaagttgaaaacttactctatgcgggcttcctcggcgtcttcctcgggggacgtattggttatgttctgttctacaatttcccgcagtttatggccgatccgctgtatctgttccgtgtctgggacggcggcatgtctttccacggcggcctgattggcgttatcgtggtgatgattatctttgcccgccgtactaaacgttccttcttccaggtttctgattttatcgcaccactcattccgtttggtcttggtgccgggcgtctgggcaactttattaacggtgaattgtggggccgcgttgacccgaacttcccgtttgccatgctgttcccaggctcccgtacagaagatattttgctgctgcaaaccaacccgcagtggcaatccattttcgacacttacggtgtgctgccgcgccacccatcacagctttacgagctgctgctggaaggtgtggtgctgtttattatcctcaacctgtatattcgtaaaccgcgcccaatgggagctgtctctggcttgttcctgattggctacggcgcgtttcgcatcattgttgagtttttccgccagcccgacgcgcagtttaccggtgcctgggtgcagtacatcagcatggggcaaattctttccatcccgatgattgtcgcgggtgtgatcatgatggtctgggcatatcgtcgcagcccacagcaacacgtttcctga

SEQ ID NO: 481932 - DNA, 2247 bp, Shigella sonnei
atgctcactcgcctgcgcgaaatagtcgaaaaggtagccagcgcaccacgcctgaatgaggcgttaaatattctggttaccgacatctgtcttgcgatggataccgaggtctgttcggtctacctggccgatcatgatcgacgttgttactacctgatggcgacccgggggctgaaaaaaccacgcggtcgcactgtaacgctcgcgtttgatgaagggatcgtcggcctggttggcaggctggcggaaccgataaaccttgcagatgcgcaaaagcaccccagcttcaaatacatcccctccgtaaaagaagaacgtttccgcgcgtttttaggcgtaccaattattcaacgtcgccagttgcttggtgtactggtggtacagcaacgagagttgcgccagtatgacgaaagtgaagaatccttcctggtgacgcttgccacccagatggcagctattctttctcagtcgcagttgactgccttgtttgggcaatatcgccagacgcgaatccgcgcattaccggcagcacctggtgtggcgattgccgaaggctggcaggatgccacgttacctttaatggaacaggtgtatcaggcatcaacgctggatccggctctggaacgcgaacgactgaccggggcgctggaagaagcggcaaacgagtttcgccgctacagcaaacgctttgccgccggagcacaaaaagaaacggcggctattttcgatctttactcgcacctactttcggacacccggctgcgtcgcgaattgtttgccgaggttgataaaggctcggtggcagagtgggcggtaaaaacggtcattgaaaaatttgccgaacagtttgccgcgctaagcgataactatctcaaagagcgggctggcgatttacgtgcgctgggtcagcgattgctgtttcatcttgatgacgctaatcaagggccgaacgcctggccggaacgtttcattctggtggcagatgaactgtcagcgacaactcttgctgagctgccccaggatcgcttagtcggtgttgtcgtgcgagatggcgcagccaactcccatgctgcgatcatggtacgtgcgctggggatccctaccgtgatgggcgcggatattcagccttcggtgctgcatcgtaggacgctgatcgttgatggctatcgcggtgaattgctggtcgatccggagccggtactgctgcaagaatatcagcggctaattagtgaagagattgagcttagccgtctggcggaagatgacgtcaatttacccgcgcagttaaaaagcggtgagcgtataaaagtcatgctcaatgctggtttaagcccggaacatgaagaaaaactgggcagccgtattgatggcatcggtctttatcgcactgaaatcccattcatgctgcaaagtggtttcccgtcggaagaagaacaggtggcgcagtatcaggggatgctgcaaatgttcaatgataaacccgtcaccttgcgtatgctggatgtcggagcagataagcagctgccttacatgccgatcagcgaagagaatccatgcctgggttggcgtgggattcgcattacgctcgatcagccggagatcttcttgatccaggtgcgggcgatgctgcgtgctaatgccgctacgggcaacctgaatattctgttgccgatggtcacaagcctcgatgaagttgatgaagcacgccgcctgattgaacgtgccggacgtgaagtcgaggagatgatcggttacgaaattcccaaaccacgtatcggcatcatgctggaagtgccgtcaatggtatttatgctgccgcatctggcaaagcgggtcgatttcatctctgttggcaccaacgatctgactcaatacattctggccgttgatcgcaacaatacccgggtggcgaacatttatgacagtcttcatcctgcaatgttacgagctctggcgatgatcgcccgggaagcggaaatacatggaatcgatctccgtttgtgcggtgaaatggcgggcgatcccatgtgcgtggcaatcctcattgggcttgggtatcgccatctgtctatgaacggacgttctgtagcgcgggtaaaatacctgctgcggcgcattgattatgccgaagcagaaaatcttgcgcagcgtagtctggaagcgcaactggcgaccgaagttcgccatcaggttgcagcctttatggagcgtcgcggcatgggcgggctgattcgcggagggttatag

SEQ ID NO: 481933 - DNA, 531 bp, Shigella sonnei; identical to SEQ ID NO: 458139

SEQ ID NO: 481934 - DNA, 147 bp, Shigella sonnei; identical to SEQ ID NO: 2256

SEQ ID NO: 481935 - DNA, 690 bp, Shigella sonnei
atgtcccaacctcgcccactcctctctcctcccgaaactgaagaacagttgttagcgcaagcacagcaactttctggttatacattgggagaactggcggcacttgccgggctggttacgccagagaatttaaaacgcgataagggctggattggcgtgttactggagatctggctaggtgccagcgcagggagtaaacctgagcaagattttgctgctctgggcgtggaacttaaaactatccctgtggatagtcttggtcgtccgctggaaacaacattcgtttgtgttgccccgttaacgggtaatagcggggtgacctgggaaaccagccatgtgcgccacaagctcaaacgcgtactgtggataccggttgaaggtgagcgcagcatcccgctggcgcagcgtcgcgtaggatcaccgttgctgtggagcccgaatgaagaggaagaccgacagctacgcgaagactgggaagaattaatggatatgattgttctcggtcaggttgagcggatcaccgctcgtcacggggagtatttacagatacgaccgaaagcagcgaatgcgaaagcgcttaccgaagccattggtgcccggggcgaacggattctgacgctgccacgcggcttttatttgaagaagaatttcaccagtgcactactggcccgtcattttctgatccagtag

SEQ ID NO: 481936 - DNA, 714 bp, Shigella sonnei
atgttatttgcatggataaccgatcctaacgcctggcttgcgctcggtacgctgacgctgctggagatcgttcttgggatcgacaatattattttcctttctctggtggtggcaaagctccccacagcacaacgtgctcatgcgcgccgtctggggttggcgggagccatggttatgcgtctggcgctgctggcatcaatcgcctgggttacgcgcctgacaaatccgctttttacaatattcagtcaggaaatttccgcccgtgatttgattctgcttctgggtggcttgttccttatctggaaagccagcaaggaaatccacgaatccattgaaggtgaagaagaagggctgaaaacacgcgtttcatcattcctcggcgctatcgtgcagattatgctgctggatattatcttcagcctcgactcggtgattaccgctgtgggtctgtcagatcacctgtttattatgatggccgccgtggtgattgccgtaggcgtgatgatgttcgccgcgcgctcgattggtgattttgtcgaacgccatccttcggtaaaaatgctggcgctctctttcctgattctggtcggctttaccctgattctggaaagtttcgacatccacgtaccgaaaggttacatctacttcgcgatgttcttctctattgcggttgaaagcctcaacctgattcgcaacaaaaagaacccgctctga

SEQ ID NO: 481937 - DNA, 219 bp, Shigella sonnei; identical to SEQ ID NO: 2259

SEQ ID NO: 481938 - DNA, 240 bp, Shigella sonnei
gtgctgcgcctgctaaaccaaccctggtttacgtcggttaaaggcaaccacgaagcgatggcgttggatgcattcgaaactggcgatggaaatatgtggcttgccagcggtggtgactggtttttcgatttaaatgattcagagcaacaagaggcaatagatctgttgctgaaattccatcaccttccacatattattgaaatcattaatgacaacataaaatatgccatcgcacggtaa

SEQ ID NO: 481939 - DNA, 2562 bp, Shigella sonnei
atgagtgcaatagaaaatttcgacgcccatacgcccatgatgcagcagtatctcaggctgaaagcccagcatcccgagatcctgctgttttaccggatgggtgatttttatgaactgttttatgacgacgcaaaacgcgcgtcgcaactgctggatatttcactgaccaaacgcggtgcttcggcgggagagccgatcccgatggcggggattccctaccatgcggtggaaaactatctcgccaaactggtgaatcagggagagtccgttgccatctgcgaacaaattggcgatccggcgaccagcaaaggtccggttgagcgcaaagttgtgcgtatcgttacgccaggcaccatcagcgatgaagccctgttacaggagcgtcaggacaacctgctggcggctatctggcaggacagcaaaggtttcggctacgcgacgctggatatcagctccgggcgttttcgcctgagcgaaccggccgaccgcgaaacgatggcggcagagctgcaacgcactaatccggcggaactgctgtatgcagaagatttcgccgagatgtcgctgattgaaggccgtcgcggcctgcgccgtcgcccgctgtgggagtttgaaatcgacaccgcgcgccagcagttgaatctgcaatttggcacccgcgatctggtcggttttggcgtcgagaacgcgccgcgcggactttgtgctgccggttgtctgttgcagtatgcgaaagatacccaacgcacgaccctgccgcatattcgttctatcaccatggaacgtgagcaggacagcatcattatggatgccgcgacacgtcgtaacctggaaattactcagaacctggcgggcggtgcggaaaatacgctggcttctgtgctcgactgcaccgtcacgccgatgggtagtcgtatgctgaaacgctggctgcatatgccagtgcgcgatacccgcgtgttgcttgagcgccagcaaactattggcgcattgcaggatttcaccgccgagttgcagccggtactgcgtcaggtcggcgacctggaacgtattctggcacgtctggctttacgaactgctcgcccacgcgatctggcccgtatgcgccacgctttccagcaactgccggagctgcgtgcgcagttagaaactgtcgatagtgcaccggtacaggcgctacgtgagaagatgggcgagtttgccgagctgcgcgatctgctggagcgagcaatcatcgacacaccgccggtgctggtacgcgacggtggtgttatcgcatcgggctataacgaagagctggatgagtggcgcgcgctggctgacggcgcgaccgattatctggagcgtctggaagtccgcgagcgtgaacgtaccggcctggacacgctgaaagttggctttaatgcggtgcacggctactacattcaaatcagccgtgggcaaagccatctggcacccatcaactacatgcgtcgccagacgctgaaaaacgccgagcgctacatcattccagagctaaaagagtacgaagataaagttctcacctcaaaaggcaaagcactggcactggaaaaacagctttatgaagagttgttcgacctgctgttgccgcatctggaagcgttgcaacagagcgcgagcgcgctggcggaactcgacgtgctggtgaacctggcggaacgggcctataccctgaactacacctgcccgaccttcattgataaaccgggcattcgcattaccgaaggtcgccatccggtagttgaacaagtactgaatgagccatttatcgctaacccgctgaatctgtcgccgcagcgccgtatgttgatcatcaccggtccgaacatgggcggtaaaagtacctatatgcgccagaccgcactgattgcgctgatggcctacatcggcagctatgtaccggcacaaaaagtcgagattggacctatcgatcgcatctttacccgcgtaggcgcggcagatgacctggcttccgggcgctcaacctttatggtggagatgactgaaaccgccaatattttacataacgccaccgaatacagtctggtgttaatggatgagatcgggcgtggaacgtccacctacgatggtctgtcgctggcgtgggcgtgcgcagaaaatctggcgaataagattaaggcattgacgctgtttgccacccactatttcgagctgacccagctaccggagaaaatggaaggcgtcgccaacgtacatctcgatgcgctggagcacggcgacactatcgcctttatgcacagcgtgcaggacggcgcggcgagcaaaagctacggtctggcggttgctgctctggcgggcgtaccgaaagaggttattaagcgcgcacggcaaaaactgcgtgagctggaaagcatttcgccgaacgccgccgcgacgcaagtggatggtacgcagatgtctttgctgtcagtgccagaagaaacttcgcctgcggtcgaagcactggaaaatctcgacccggattcactgactccgcgtcaggcgctggagtggatttatcgcttgaagagtctggtgtaa

SEQ ID NO: 481940 - DNA, 234 bp, Shigella sonnei; identical to SEQ ID NO: 457814

SEQ ID NO: 481941 - DNA, 354 bp, Shigella sonnei
atgtccggcaagcgtatctctcgtgaaaaactgacgattaaaaaaatgatcgatctttatcaagcgaaatgcccgcaggcgtcagcggagccggagcattacgaggcgttgtttgtttacgcgcaaaagcggctggataaatgtgtgttcggcgaagagaaaccagcctgtaagcagtgtccggtgcactgttaccagcctgcaaagcgtgaagagatgaaacagattatgcgttgggccgggccgagaatgctgtggcgtcatccgatcttaaccgtgcgtcatctcatcgatgacaagcgtccggtaccagaactgccggaaaaatatcgtccgaaaaaacctcgtgaatag

SEQ ID NO: 481942 - DNA, 1164 bp, Shigella sonnei
atgtctggcgacaccatgctgggcgtgctgaaactggcgcaatgcgaagagaaagtgtttaccactaccaatctgaatttgctgcgccagattgccgaacgtgtggcaatcgctgtcgataacgccctcgcctatcaggaaatccatcgtctgaaagaacggctggttgatgaaaacctcgccctgaccgagcagctcaacaatgttgatagtgaatttggcgagattattggccgcagcgaagccatgtacagcgtgcttaaacaagttgaaatggtggcgcaaagtgacagtaccgtgctgatcctcggtgaaactggcacgggtaaagagctgattgcccgcgcgatccataatctcagtgggcgtaataatcgccgcatggtcaaaatgaactgcgcggcgatgcctgccggattgctggaaagcgatctgtttggtcatgagcgtggggcttttaccggtgccagcgcccagcgcattggtcgttttgaactggcggataaaagctctctgttcctcgacgaagtgggcgatatgccactggagttacagccgaagttgctgcgtgtattgcaggaacaggagtttgaacgtctcggcagcaacaaaatcattcagacggacgtacgtttaattgccgcgactaaccgcgatctgaaaaaaatggtcgccgaccgagagttccgtagcgatctctattaccgcctgaacgtattcccgattcacctgccgccactacgcgagcgtccggaagatattccgctgctggcgaaagcctttaccttcaaaattgcccgtcgtctggggcgcaatatcgacagcattcctgccgagacgctgcgcaccttgagcaacatggagtggccgggtaacgtacgcgaactggaaaacgtcattgagcgcgcggtattgctaacacgcggtaacgtgctgcagctgtcattgccagatattgttttaccggaacctgaaacgccgcctgccgcaacggttgtcgcccaggagggcgaagatgaatatcagttgattgtgcgcgtgctgaaagaaaccaacggcgtggttgccgggcctaaaggcgctgcgcaacgtctggggctgaaacgcacgaccctgctgtcacggatgaagcggctgggaattgataaatcggcattgatttaa

SEQ ID NO: 481943 - DNA, 513 bp, Shigella sonnei
atgccactggcggcggaagggcatatttttggtggctgtgaatttattcgttatgacgatcgtccctggagcgaaaaagagttcaatcgtctgcaaacatttacgcagatcgtttctgtcgtcaccgaacaaatccagagccgcgtcgtcaacaatgtcgactatgagttgttatgccgggagcgcgataacttccgcatcctggttgccattaccaacgcggtgctttcccgcctggatatggacgaactggtcagcgaagtcgccaaagaaatccattactatttcgacattgacgatatcagtatcgtcttacgcagccaccgtaaaaacaaactcaacatctactccactcactatcttgataaacaacatcccgcccacgaacagagcgaagtcgatgaagccggaaccctcaccgaacgcgtgttcaaaagtaaagagatgctgctgatcaatctccacgagcgggacgatttagccccctatgaacgcatgttgttcgacacctag

SEQ ID NO: 481944 - DNA, 366 bp, Shigella sonnei
atgtcatatacaccgatgagtgatctcggacagcaagggttgttcgacatcactcggacactattgcagcagcccgatctggcctcgctgtgtgaggctctttcgcaactggtaaagcgttctgcgctcgccgacaacgcggctattgtgttgtggcaagcgcagactcaacgtgcgtcttattacgcatcgcgtgaaaaagacaccccattaaatatgaagacgaaactgttctggcacacggtccggtacgccgcattttgtcgcgccctgatacgctgcattgcagttacgaagaattttgtgaaacctggccgcagctggtcgcaggtgggctataccccaaatttggtcactattgcctga

SEQ ID NO: 481945 - DNA, 1011 bp, Shigella sonnei
gtgaataatatccaactcgcccacggcagcggcggccaggcgatgcagcaattaatcaacagcctgtttatggaagcctttgccaacccgtggctggcagagcaggaagaccaggcacgtcttgatctggcgcagctggtagcagaaggcgaccgtctggcgttctccaccgacagttacgtcattgacccgctgttctttcctggcggtaatatcggcaagctggcgatttgcggcacagccaatgacgttgcggtcagtggcgctattccgcgctatctctcctgtggctttatcctcgaagaaggattgccgatggagacactgaaagccgtagtgaccagcatggcagaaaccgcgcgcgcggcaggcattgccatcgttactggcgatactaaagtggtgcagcgcggcgcggcagataaactgtttatcaacaccgctggcatgggcgcaattccggcgaatattcactggggcgcacagacgctaaccgcaggcgatgtattactggttagcggcacgctcggggaccacggggcgactatccttaacctgcgtgagcagctggggctggatggcgaactggtcagcgactgcgcggtactgacgccgcttattcagacgctgcgtgacattcccggcgtgaaagcgctgcgtgatgccacccgtggtggtgtgaacgcggtagttcatgagttcgcggcagcctgcggttgtggtattgaaatttcagaagtggcactgccggttaaacctgccgtgcgcggcgtttgcgaactgctgggactggacgcccttaactttgccaacgaaggcaaactggtgatcgccgttgaacgcaacgcggcagagcaagtgctggcagcgttacattcccatccactggggaaagacgcggcgctaattggtgaagtggtggaacgtaaaggtgttcgtcttgccggtctgtatggtgtgaaacgaaccctcgatttaccacacgccgaacctcttccgcgtatatgctaa

SEQ ID NO: 481946 - DNA, 1122 bp, Shigella sonnei
atgcgttttgttgatgaatatcgcgcgccggaacaggtgatgcagttaattgagcatctgcgcgaacgtgcttcacatctctcttacaccgccgaacgccctctgcggattatggaagtgtgcggtggtcatacccacgccatttttaaattcggcctcgaccagttactgcctgaaaacgttgagtttatccacggtccgggttgcccggtgtgcgtactgccgatgggtagaatcgacacctgcgtggagattgccagccatccggaagtcatcttctgtacctttggcgacgccatgcgcgtgccggggaaacagggatcgctgttgcaggcaaaagcacgcggtgccgatgtgcgcatcgtttactcgccgatggatgcgttgaaactggcgcaggagaatccaacccgtaaagtcgtattcttcggcttaggttttgaaaccaccatgccgaccaccgccatcaccctgcaacaggcgaaagcccgcgatgtgcagaatttttacttcttctgccagcatattacgcttatcccgacgctgcgcagtttgctggaacagccggataacggtatcgacgcgttcctcgcgccgggccacgttagtatggttatcggcactgatgcctataattttatcgccagcgattttcatcgtccgctggtggtcgctggtttcgaaccccttgatctactgcaaggcgtggtcatgctggtggagcagaaaatagcggcccacagcaaggtagagaatcagtatcgtcgggtggtaccggatgccggtaacctgctggcgcaacaggcaattgctgatgtgttctgtgtcaacggcgacagcgaatggcgcggcttaggcgtgattgaatcttctggcgtgcacctgacgccggattatcaacgattcgatgccgaagcacatttccgcccagcaccgcagcaggtctgcgatgacccgcgcgcgcgttgtggtgaggtattaacgggcaaatgtaagccgcatcaatgcccgctgtttggtaacacctgtaatcctcaaaccgcatttggtgcactgatggtctcctccgaaggagcgtgcgccgcgtggtatcagtatcgtcagcaggagaatgaagcgtga

SEQ ID NO: 481947 - DNA, 273 bp, Shigella sonnei
atgtgcataggcgttcccggccagatccgcaccattgacggcaaccaggcaaaagtcgacgtctgcggcattcagcgcgatgtcgatttaacgttagtcggcagctgcgatgaaaacggtcagccgcgcgtgggccagtgggtactggtacacgttggctttgccatgagcgtaattaatgaagccgaagcacgcgacactctcgacgccttacaaaacatgtttgacgttgagccggatgtcggcgcgctgttgtatggcgaggaaaaataa

SEQ ID NO: 481948 - DNA, 873 bp, Shigella sonnei
atgtgtacaacatgcggttgcggtgaaggcaacctgtatatcgagggtgatgaacataaccctcattccgcgtttcgtagcgcgccatttgccccggcggcacgcccgaagatgaaaatcaccggcattaaagcgcctgaatttacccccagccagactgaagaaggcgacctgcattacggtcatggcgaagcgggcactcacgcgccgggcatgagccagcgtcggatgctggaagtcgaaattgacgtgctggacaaaaataaccgtctggctgaacgcaaccgcgcgcgctttgctgcccgcaagcaactggtgctcaacctggtttccagccctggttccggtaaaaccaccctgctgacggaaaccctaatgcgcctgaaagacagcgttccgtgcgcggttattgaaggtgaccagcaaaccgtgaacgatgccgcacgcattcgcgctaccggcacaccagcgattcaggtgaacaccggtaaaggctgccatcttgacgcacagatgattgccgacgccgcaccgcgtctgccactggacgataacggtattctgtttatcgaaaacgttggcaacctcgtatgcccggccagcttcgatctcggtgaaaaacacaaagtggcggtgctttccgttaccgaaggtgaagacaaaccgctgaaatatccgcatatgtttgccgccgcctcgctgatgctgctcaacaaagttgacctgttgccgtatctcaactttgacgttgagaagtgcatcgcctgcgcccgcgaagtcaatccagaaattgaaatcatccttatttccgccaccagcggcgaagggatggaccagtggctgaactggctggagacacagcgatgtgcatag

SEQ ID NO: 481949 - DNA, 351 bp, Shigella sonnei; identical to SEQ ID NO: 260605

SEQ ID NO: 481950 - DNA, 462 bp, Shigella sonnei
atgactatttgggaaataagcgagaaagccgattacatcgcacagcggcatcgtcgcctacaggaccagtggcacatctactgcaattcgctggttcaggggatcacgttatcgaaagcgcgcctgcatcacgccatgagctgcgcgccggacaaagaactctgtttcgtcctttttgaacattttcgtatttacgtcaccctggcggatggctttaacagccacaccatcgagtattacgtcgaaacaaaagatggcgaagacaaacagcggattgcgcaggcgcaactgagcattgacggcatgattgatggcaaggtcaacatccgcgatcgcgaacaggttctggaacactatctcgaaaaaatcgctggcgtttacgacagcttatacaccgctattgaaaacaatgtgccggtgaatttaagccaactggtaaagggacaaagcccggcagcatga

SEQ ID NO: 481951 - DNA, 612 bp, Shigella sonnei
gtgaatcgttttgtaattgttgactccacgctctgtatcggctgccacacttgtgaggccgcctgttcagagacgcatcgccagcacggcctgcaatcaatgccgcgcctgagagtgatgctgaatgaaaaagaatctgcgccgcagctctgtcaccactgtgaagatgcaccctgtgcggtggtttgcccggttaacgccatcacccgcattgatggggccgtgcagttgaatgaaagtctgtgcgtaagctgcaaactgtgcggcatcgcctgcccgtttggcgcaattgaattttccggcagccgtccgctggatattccggcaaacgccaataccccgaaagcgccaccggcaccgcctgctccggcgcgtatcagtacgctgcttgactgggtgccgggtattcgcgcgatcgccgtcaaatgtgacctttgcagttttgatgaacaaggtccggcctgcgtgcggatgtgcccgactaaagccctgcatctggtggataacaccgatatcgcccgcgtcagcaaacgtaagcgtgagctgacctttaacacggactttggcgatctcaccttgtttcagcaggctcaaagtggagaggctaaatga

SEQ ID NO: 481952 - DNA, 1827 bp, Shigella sonnei
atgagcgcaatttccctgatcaatagcggcgtggcatggtttgtcgccgccgctgttctggcatttctcttttcttttcaaaaagcgttaagtggctggatagctggaattggcggcgcggttggtagtctgtatacggcagccgcgggcttcactgtactgactggcgcggttggcgtgagcggtgcgctgtcgctggtaagctacgatgtgcaaatctctccgcttaacgcgatttggctgattacgctcggtctgtgcggtctgtttgtcagcctctacaacattgactggcatcgccacgcgcaggtgaagtgcaacggcttgcagatcaatatgttgatggctgccgccgtctgcgccgtcatcgccagcaacctcggcatgttcgtggtaatggccgaagtcatggccttgtgtgcggtgttcctcaccagcaacagcaaagagggcaaactgtggtttgcgctggggcgtcttggcactctgctgctggtgattgcttgctggctgctgtggcagcgttatggcacgctggatctgtgcctactggatatgcgtatgcaacagctgccgctcggttccgatatctggctgctcggtgtgattggctttggcctgctggccgggattattccgctgcacggctgggtgccgcaggcacatgctaacgcctctgcgccagctgccgcgttgttttctacggtagtcatgaaaattggcctgctgggcatgttaaccctgtcactgctgggcggtaatgcaccgctgtggtgggggatcgcgctgctggtgctcggcatgatcaccgcgttcgtcggtggtctgtatgcgttgatggaacacaacatccagcgcctgctggcttaccacaccctggaaaatatcggcattatcctgctggggctgggcgctggcgtaacgggtatcgcgctcgaacaaccggcgctgattgctcttggcctggtcggtggtctgtaccatctgcttaaccatagcctgttcaaaagcgtactgttcctcggggcggggagcgtctggttccgtaccggtcatcgcgatatcgaaaaactcggtggtattggcaagaaaatgccggttatctccatcgccatgttagtcgggttgatggcaatggctgcgctgccgccactgaacgggtttgccggggaatgggttatctatcaatccttcttcaaactgagcaatagcggcgcgtttgttgcccgtctgctggggccgctgctcgctgtgggtctggcaattaccggtgcgctggcggtgatgtgtatggcgaaagtctatggcgtcacgttcctcggcgcgccgcgtaccaaagaagccgaaaacgccacctgtgcgccgctcctgatgagcgtaagcgtagtggcactggcgatttgctgcgtaattggcggtgttgctgcgccgtggctgctgccgatgctctctgctgctgtacctctgcctctggagcctgctaacaccaccgtttctcaaccaatgatcacattgctgctgattgcctgcccgctgctgccattcatcattatggcgatttgcaaaggcgaccgcctgccgtcacgttcccgcggtgcggcctgggtgtgcggctacgaccatgaaaaatcaatggtgattaccgctcacggttttgccatgccggttaaacaggcgtttgcgccagtgctgaaactgcgcaaatggctgaatccggtgtcgctggtgccgggctggcagtgcgaaggtagtgcgttgctgttccgccggatggcgctggttgaactggcggtactggtggtgattattgtttcacgaggagcctga

SEQ ID NO: 481953 - DNA, 924 bp, Shigella sonnei
atgagtgttttatatccgttaattcaggcgctggtgttatttgccgttgcgccgctgctctccggtattacccgcgtggcgcgcgcccgtctgcataaccgtcgtgggccgggtgtgttgcaggagtatcgtgacattttcaaactgctgggccgccagagcgttggcccggatgcctccggctgggtgttccgcctgacgccgtatgtgatggtgggcgtcatgctgactatcgctactgcgctgccggtggtgaccgtcggttctccgctgccgcaactgggtgatttaatcaccttactgtatctctttgccatcgcgcgtttcttctttgccatttctggtctggataccggtagcccgtttaccgctatcggcgcgagccgtgaagcgatgcttggcgtgctggtcgaaccgatgctgctgcttggtctgtgggttgccgcacaggttgccggttccaccaacatcagcaacatcaccgacaccgtttatcactggccgctgagccagagcatcccgctggtactggcgctttgtgcctgtgcgttcgccacctttatcgaaatgggcaaactgccgttcgacctggcggaagccgagcaggagctgcaggaaggcccgctctctgaatacagcggcagcggctttggcgtcatgaaatggggtatcagcctgaaacagctggtggtgctgcagatgttcgtcggcgtatttatcccgtggggacagatggaaaccttcaccgccggtgggctgctgctggcgctggtgattgccatcgtcaaactggtcgtcggcgtcctggttatcgcgctgttcgaaaacagcatggcccgtctgcgtcttgatattactccgcgcattacctggactgggtttggctttgcatttttagcgttcgtctccttgctggcggcgtga

SEQ ID NO: 481954 - DNA, 1698 bp, Shigella sonnei
atgtctgaagaaaaattaggtcaacattatctcgccgcgctgaatgaggcatttccgggcgtcgtgctggaccacgcctggcagaccaaagatcagctgactgtcaccgtaaaggtgaactatctgccggaagtggtggagtttctctactacaagcaggggggctggctgtcggtgctttttggtaacgacgaacgcaaactgaatggtcattacgccgtttattacgtgctgtcgatggagaaggggactaagtgctgggtaacggttcgcgtcgaagttgatgccaacaaaccggagtatccgtccgtgacgccgcgcgttccggcggcggtgtggggcgagcgcgaagtgcgcgatatgtacggtttgattccggttggtctgccggatgaacgccgtctggtgctgccggatgaactttatccgctgcgtaaagacagcatggattatcgtcagcgtccggcaccgaccaccgatgctgaaacctacgagttcatcaacgaactgggcgacaagaaaaacaacgtcgtgccgattggtccgctgcacgtcacttctgacgaaccgggccacttccgtctgttcgtcgatggcgaaaacattatcgacgccgactaccgtctgttctacgttcatcgcggcatggaaaaactggcggaaacccgtatgggttacaacgaagtgaccttcctctctgaccgtgtgtgcgggatctgcggctttgcccacagcaccgcctacaccacgtcggtagaaaacgcgatgggtattcaggtgccagaacgtgcgcagatgatccgcgccattctgctggaggtggaacgcctgcactcgcatctgctcaacctcggtctcgcctgccactttaccggctttgactccggctttatgcagttcttccgcgtgcgtgaaacctccatgaaaatggcagagatcctcaccggtgcgcgtaaaacctacggcctgaacctgatcggcgggattcgtcgcgatctgttgaaagatgacatgatccagacccgccagctggcgcaacagatgcgtcgtgaagtgcaggagctggtggatgtgctgctgagtacgccgaacatggaacagcgcaccgtcggcattggtcgtctggacccggaaatggcccgcgatttcagtaacgttggcccgatggttcgcgccagcggtcacgcccgcgatactcgcgccgatcacccgtttgtcggttatggcctgctgccaatggaagtccacagcgagcagggctgcgacgttatttcccgtctgaaagtgcgtatcaacgaagtttataccgcgctgaacatgatcgactacggtctggataacctgccgggcggtccgctgatggtggaaggctttacctacattccgcaccgtttcgcgctgggctttgccgaagcgccgcgcggcgacgatatccactggagcatgaccggcgacaaccagaagctgtaccgctggcgctgccgtgccgcgacctacgcgaactggccgaccctgcgctacatgctgcgcggtaacaccgtttccgatgcgccgctgattatcggtagcttggacccttgctactcctgtaccgaccgcatgaccgtggtcgatgtgcgtaagaaaaagagcaaagtggtgccgtacaaagaactcgagcgttacagcattgagcgtaaaaactcgccgctgaaataa

SEQ ID NO: 481955 - DNA, 543 bp, Shigella sonnei
atgtttacctttatcaaaaaagtcatcaaaaccggcacggcgacctcgtcttatccgctggagccgattgcggttgataaaaacttccgtggtaagccggagcagaacccgcagcagtgcatcggctgtgcggcctgcgtcaatgcctgcccgtcaaacgccttaacggttgaaactgacctcgccaccggtgagctggcgtgggagtttaatctcgggcgctgcatcttctgtggacgctgcgaagaagtttgcccgacggcggcgatcaaactgtcgcaagagtacgaactggcagtgtggaagaaagaagacttcctgcaacagtcccgcttcgcgctgtgcaactgccgcgtctgcaatcgtcctttcgccgtccagaaagagatcgactacgccattgcgctgcttaagcacaacggcgacagccgcgcggaaaaccaccgcgaaagctttgagacttgcccggaatgtaagcgccagaaatgcctggtgccgtccgaccgtattgaactgactcgccatatgaaagaggccatctga

SEQ ID NO: 481956 - DNA, 768 bp, Shigella sonnei
atgagcaatttattaggcccccgtgacgccaacggcattccggtcccgatgacggtggatgaatccatcgccagcatgaaggcgtcgttactgaaaaaaatcaaacgttctgcctacgtttatcgcgtggactgcggcggctgcaacggctgcgaaatcgaaattttcgccacgctttcgccgctgtttgatgcagaacgcttcggcattaaagtcgttccttcaccgcgtcatgcggatattttactgtttaccggcgcggtcacccgtgcaatgcgatcccctgcgctgcgtgcgtggcagtccgcgccggacccgaaaatttgtatctcctacggtgcctgcggtaacagcggtggtattttccacgatctctactgcgtgtggggcggtacggataaaatcgtcccggtagatgtctacattcctggttgcccgccaacgcctgccgccacgctgtacggctttgcaatggcgctcggcctgctggagcagaaaattcacgcccgtggcccgggtgagcaggatgaacaacaggcggaaatcctgcatggcgatatggtgcagccgctgcgtgtgaaagtggatcgcgaagcacgccgcctggcgggttatcgttacggtcgtcagattgccgatgacttcctgacacagttagggcagggcgaagaacaggttgcacgctggctggaagcggaaaacgatccgcgtctgaacgagattgtcagccatctgaatcatgttgttgaagaggcgcgtatccgatga

SEQ ID NO: 481957 - DNA, 411 bp, Shigella sonnei
atgagtgaaaaggtggtgttcagtcaactgagccgtaaatttattgatgagaacgatgccacgcccgccgaggcgcagcaggtggtctattacagcctggcgattggtcaccaccttggggttatcgattgcctggaagcggcgctcacctgcccgtgggatgaatatctggcatggattgccactctggaggcgggcagtgaagcccgccgcaaaatggaaggcgtgccgaaatatggtgagatcgtcatcgacattaaccatgtgccgatgctggccaacgcattcgataaagcccgggcagcgcaaacttcgcagcagaaggaatggagtacaatgctgttaagtatgctgcatgatattcatcaggaaaacgccatctatttgatggtgaggagactgcgtgactga

SEQ ID NO: 481958 - DNA, 471 bp, Shigella sonnei
gtgactgacgttttactctgtgttggcaatagcatgatgggcgatgatggcgctggcccgctgctggcggaaaagtgcgccgccgcgccgaaaggtaactgggtggtgattgatggcggtagtgcaccggaaaacgacatcgtcgccatccgtgaactgcgccctacgcggttactgattgttgacgctactgatatggggctaaaccccggcgaaatccgcatcatcgacccggatgatatcgccgagatgtttatgatgactacccataacatgccgctgaactatcttatcgaccagttgaaagaagacattggcgaagtgattttcctcggcatccagccggatatcgtcggcttttactacccgatgactcagccgattaaagatgcggtagaaaccgtttatcaacgactggaaggctgggaagggaatggcggcttcgcgcagttagcggtggaagaagaataa

SEQ ID NO: 481959 - DNA, 774 bp, Shigella sonnei
atgaatatcagaacagggatgtgcgcttttttattgagcttagtgctgcctgcacaggccaccagctttaccgaatatctgccaatgagtgacagcgaatacgcgcaaaagcgggcgctgaaacctctcctgaccatgccttatgatgccgagcaaacctggcattttagaaaagtgggcgttgctggcgtgacgcttgaaaagatgccaaatgatgatagtgaatggcaattgaacggtaaagatcgcgccggtaaatcctggtctgtgcctgtgggtatgctggcaaacatagcgggcaaagggcaactctatcgcgccgatcttgatcgtaacggcattcaggatctggttatctggttaccaagtaccggtaatggtctggctccttatgcacatttaattcttatgacgttcacgcgcgaaggccgtccctgtgtctttgaacccaggggattctacaccgcaagcaaaactggcgtagatgatttgctggatttgcaaggcaatggtcacacgcaattgctggatatgcagtttgattccggttactggataaccagtctgtatcaggtaaaagacgccaaatggcagcgtgttcacggctggtttggcaagttaagctatcccgcgctcacgcgttttacttatacccccaaccgtaaactcgtcctcaaacccatcgccgggcgcgacccgcaaacggaagatctggcgcagacgcagcgttgcttgataaagggggatgttcttgatggggtgaaccagaactga

SEQ ID NO: 481960 - DNA, 312 bp, Shigella sonnei
atgcacatcatttctaaagcgccatttgaagagtctgcgcgtaaatatcctaacgacgctctggctcttcaggcattgtatcgggttattaaggaaacggatttttctacgccagaagagatgcgaacggcgtttcccaacctcgacaattttaaatatcgcaacaaatggtacgttctggatgtaggtgggaacaacctaagggtgattgcctacataaactttgttaataagcggttctttgtgaagcacataactaatcacgccgagtatgacaaactgacacgttactacagagagaacaaagaatga

SEQ ID NO: 481961 - DNA, 420 bp, Shigella sonnei
atgactgctaatgctgcacgcgctgttaaagcaacaagagaactggtcaatgcagtcccctttctgggaggtagtgactcagaagatgattatcgtgaagcactggaactggtcgaatatttgattgaagaagatgacaccaatccacttatcgactttctggcgagccgcattgcagaatatgaaaacaacaaccaagagtttgcagagttcgacaaagccgttgcggcaatgcctgttggcgtggcgttacttcgcacgctgattgatcaacataatctgacctatgcggatttgaagaacgaaatcggctctaaatccctggtcagtcagattttgtctggacaacgatccctgacgatatcccacattaaggcactttcagcccgatttggcgttaagccggaatggtttctttga

SEQ ID NO: 481962 - DNA, 1425 bp, Shigella sonnei
atgtcagtatttccagaaggttttttatggggcggcgcgcttgccgccaaccagtctgaaggtgcgttccgtgaaggtggcaaagggctgaccactgtcgatatgatcccacacggcgagcatcgaatggcggtgaaactggggctggaaaaacgttttcagttgcgcgatgacgagttttatcccagccatgaggcgacggatttttatcatcgttataaagaagatatcgccctgatggcagagatgggattcaaggttttccgtacctcaattgcctggagccgtctctttccgcagggcgatgaaatcacgcccaatcagcagggcattgctttttatcgttctgtctttgaagagtgtaaaaagtacggtatcgaaccgctggtcacgttgtgccacttcgatgtgccgatgcatctggtcaccgaatatggctcctggcgtaaccgcaagctggtggagtttttcagccgctacgcccggacctgctttgaagcatttgatggtctggtgaaatactggcttaccttcaatgaaatcaacattatgttgcatagcccgttctccggcgcgggtctggtgtttgaagaaggtgaaaatcaggatcaggtgaaatatcaggccgcgcatcaccagctggttgccagtgcgctagccaccaaaatcgcccatgaggttaacccgcaaaatcaggtgggctgtatgctggcgggcggtaacttctacccttacagttgcaagccggaagatgtctgggcggcgctggagaaagaccgggaaaacctgttttttatcgatgtgcaggcgcggggcacgtatccggcttactctgcccgcgtattccgcgaaaaaggggtaaccatcgacaaagcaccgggcgatgatgaaatcctgaaaaacaccgtcgattttgtctctttcagctattacgcctcgcgctgcgcctcggcggagatgaacgccaacaatagcagtgcggcgaacgtagtgaaatcgctgcgtaacccgtatctgcaagtgagcgactggggctggggtattgatccactcggtctgcgtatcaccatgaacatgatgtacgaccgttatcagaagccgctgtttctggtggaaaacggcctcggcgcaaaagatgaacttgctgccaatggcgagattaacgatgactatcgcatcagctatttacgcgaacatatccgcgcaatgggcgaagcgattgcagatggcattccgctgatgggctacaccacctggggctgtattgatttagtctccgcctctacgggtgaaatgagcaaacgctacggttttgtctacgtagaccgtgacgacgcaggcaacggcacgctgacgcgcacacgtaagaaatcgttctggtggtataaaaaagtgattgccagtaatggggaagatttagagtag

SEQ ID NO: 481963 - DNA, 1458 bp, Shigella sonnei
atggccaaaaattatgcggcgctggcacgctcggtgatagcggcactgggcggcgttgataacatctcggcggtcacgcactgtatgacgcgtttgcgcgttgttatcaaagatgaccagcttatcgacagcccgacgttaaaaaccatccccggcgtgctcggcgtggtacgtagtgacaaccagtgtcaggtgattatcggcaataccgtttcacaagcctttcaggaagtcgtcagcctgctgccgggagatatgcagcccgcacagcccgtgggtaaacccaaactcacgctgcgtcgcattggtgcggggatcctcgatgcgctgatcggcaccatgtcaccgctgatcccggcgattatcggcggatcgatggtcaaactgctggcgatgatcctcgagatgagcggcgtgctgacaaaaggatcgccgaccttaaccattctgaatgtgattggtgacggtgctttcttcttcctgccgctgatggtcgcggcatctgccgccatcaaatttaaaaccaatatgtcgctggcgattgccatcgcgggtgtgctggtacatccgagttttattgaactgatggcgaaagcggcccagggtgaacatgtcgaatttgccctgattccggtcaccgcggtgaaatacacctacacagtgatcccggcgctggtgatgacctggtgcctgtcatatatcgaacgctgggtggatcgcattacaccggcggtgaccaaaaacttcctcaagccaatgctgattgtgttgattgccgcaccgctggcaatcctgctgattggcccgattggtatctggatcggtagcgccatttcggcgctggtttacaccattcatggttatctgggctggctttcagtcgccattatgggcgcgctgtggcctctgctggtaatgaccgggatgcaccgcgtctttacgccaaccatcattcagaccattgccgaaaccggcaaagaagggatggtcatgccgtcagagatcggcgctaacctgtcgctgggcggttcatcactggcggtggcgtggaaaacgaaaaacccggaactgcgccagacggcgctggctgcggcggcatcagccattatggcggggatttccgaaccggcgttatacggcgtggcgatccgcctgaaacgtccgcttatcgccagtcttatcagcggttttatttgcggcgcggttgccggtatggcggggcttgccagccactcaatggcagcgccagggttatttaccagcgtgcaattcttcgatccggcgaatccaatgagcatcgtctgggtgttcgcggtcatggcgctggcggtggtgctgtcgtttatcctcacactgttgctcggctttgaggatattcctgttgaggaagcggctgccgaggcgcgaaagcatcagagcgtacaaccgaccgtcgccaaagaagtaagtcttaattga

SEQ ID NO: 481964 - DNA, 1014 bp, Shigella sonnei
atgatgacgacgatgctggaagtggcgaagcgcgccggggtttcaaaagcgaccgtttcccgcgtgctttcaggtaatggctacgtcagccaggagactaaagatcgcgtgtttcaggcggtagaagagagcggttaccgcccaaacttgctggcgcgcaatctgtcggcgaagagtactcagacgctggggttggtagtgaccaacacgctttaccacggcatttattttagtgaattactctttcatgccgcgcgaatggcggaagagaaagggcggcagttgctattggcagatggtaaacacagcgccgaagaagagcgccaggcgattcagtatctgctggatttgcgctgcgacgccattatgatttacccgcgttttttaagcgtggatgagatcgatgacatcattgacgcgcacagtcagccgataatggtgcttaatcgccgcctgcgcaaaaacagcagccatagcgtctggtgcgatcataaacagaccagctttaatgccgtggcagagttgataaacgccggacatcaggagattgctttccttaccggctcgatggattcccccaccagcattgaacgtcttgctgggtataaagacgcgctggcgcagcatggtattgcgctcaatgaaaaacttatcgctaacggtaaatggacgcccgccagcggggccgaaggggtagaaacgttgctcgaacgtggggctaaatttagcgcgttagttgccagtaacgacgatatggcgataggtgcgatgaaagcgttgcacgagcgcggcgtagcggtgccagagcaggtgtcagttatcggattcgatgatatcgcaattgccccctatatcgttccggcgctctccagcgtaaaaattccggtgactgagatgattcaggaaattattggacggctgatttttatgctcgatggcggggatttctcaccgccgaaaaccttcagcggaaaactgatccgccgcgactcactcattgctctttcgcgataa

SEQ ID NO: 481965 - DNA, 528 bp, Shigella sonnei; identical to SEQ ID NO: 457791

SEQ ID NO: 481966 - DNA, 2253 bp, Shigella sonnei
atggcaaaaaacacatcttgcggtgtccaactgcgtattcgtggcaaagtgcagggcgtcggttttcgtccgtttgtctggcagctggcacagcaattaaatcttcacggcgatgtctgtaatgacggcgatggcgtagaagtccggctgcgggaagacccggaaacgttacttgttcaattgcatcagcactgcccgccgctggcgcgtattgatagcgtcgagcgtgagccgtacatctggtcacaactgcccactgagttcaccatccgccagagcgcgggaggtgccatgaatacgcaaattgtcccggatgccgctacttgccctgcttgccttgccgaaatgaataccccaggcgaacggcgttatcgttatccgtttatcaactgtacccactgcggcccgcgtttcaccattattcgcgccatgccttacgaccgcccgtttaccgtgatggcggcgtttccgttgtgtccggcttgtgacaaagagtaccgtgacccgctcgatcgtcgcttccacgcccagccggtggcctgcccggagtgtggcccacatcttgaatgggtaagtcatggtgaacatgcagaacaagaggcggcattacaggcggctatcgcacagttaaaaatgggcaacattgtcgccatcaaagggattggcggatttcatcttgcctgcgatgcacgtaacagtaacgcggtggcgacacttcgggcgcgcaaacatcgcccggcgaaaccgctggcggtcatgttgccagtggctgacggtttaccagacgctgcgcgccagttgcttaccacgcccgccgcgccgattgtgctggtggataaaaaatacgttcctgagctttgtgatgatatcgcccctgaccttaacgaagtcggggtaatgttgcctgcgaacccgctccagcatttgctgttacaggaactgcaatgcccgctggtgatgacctccggcaacctgagcggtaaaccaccagctatcagcaacgaacaggcgctggcggatttgcagggcattgccgacggattcttgatacataaccgcgacatcgtgcagcggatggatgattcggtggtgcgcgaaagcggcgaaatgctgcgccgttcgcgggggtatgtgccggatgcgctggctttgcctccgggctttaaaaatgttccgcctgtgctgtgtctcggcgcggatctgaaaaataccttctgcctggtgcgcggtgaacaagcggtgttgagtcagcatctgggcgatttaagtgacgatggcatccagatgcagtggcgcgaagcgttacgcctgatgcaaaacatctacgattttaccccgcaatacgttgtgcatgacgcgcatccgggctatgtctccagccagtgggcgcgtgaaatgaatctgccgacgcaaacggtactgcatcatcatgcccatgcagcggcgtgtctggcagagcatcagtggccgttggatggcggtgatgtcattgctttgacgctcgacggtatcggtatgggggagaacggcgctttgtggggcggcgagtgcctgcgggtgaactatcgcgaatgtgagcacctgggcggcttgcctgcagtggcgcttccgggtggcgatttggcagcgaagcagccgtggcgaaacctgctggcgcagtgcctgcgctttgtgccggagtggcagaattaccctgaaacagcaagtgtgcaacagcaaaactggagcgtgctggcgcgggccattgagcgtggaattaacgcgccgctggcgtcatcgtgtgggcggttgttcgatgcagtggcggcggcactgggctgtgcgccagccacgttaagttatgaaggtgaagcggcttgtgctctggaggcgctcgcagcctcatgccacggagtgacgcatccggtgacgatgccgctggtggacaatcaactggatctcgccgctttctggcagcagtggctgaactggcaggcaccggttaatcaacgcgcgtgggcgtttcatgattcgctggcgcagggttttgccgcgttgatgcgtgagcaggccacgatgcgtggtatcactacgctggtatttagcggcggggttattcataaccgtttgctgcgtgcacgtctggcgcattatctcgctgatttcacattgctctttccacagagtttaccggcgggtgatggcggtttgtctctggggcagggggttattgctgcggcgcgttggttagcgggtgaagtccagaacggataa

SEQ ID NO: 481967 - DNA, 1134 bp, Shigella sonnei
atgagcaacggcattgtgatcattggttcgggcttcgccgcccgccaactggtgaaaaatattcgcaaacaggacgccagtattccattaaccctgatcgccgccgacagcatggatgagtacaacaaaccggacctcagccatgttatcagccaggggcaacgtgccgacgaccttacccgccagacggcgggtgaatttgccgggcagtttaatctgcacctgtttccgcacacctgggtgacggatatcgatgccgaagcccatgtggtgaaaagccagaataatcagtggcaatacgacaagctggtgctggcaactggtgccagtgcctttgtcccgccagtgcctgggcgtgagttaatgctgacgttaaatagtcagcaagagtatcgcgcctgtgaaacgcaactgcgggatgcccgacgcgtgttgattgtcggcggtggtttgattggtagcgaactggcgatggatttttgtcgtgcaggcaaagcggtcacgctaatcgacaacgctgccagtattctggcgtcattaatgccaccagaagtaagcagccgcttgcagcatcggttgacggagatgggcgttcatctgctgttgaaatctcagttgcaggggctggaaaaaacggattctggcattctggcaacgctggaccaccagcgtagtatcgaagtggatgcggtaattgccgccaccggactgcgcccggaaacagccctggcacgacgcgccgggctgacgattaatcgcggcgtttgcgtcgatagttatctgcaaaccagtaatgacgatatttatgcgctgggcgattgcgcggaaatcaacggtcaggtactgccattcctgcagccgattcaacttagcgcgatggtgctggcaaaaaatcttctcggcaataacacgccgctgaaactaccggcgatgctggtgaaaatcaaaacgccggaattaccgctgcatctggcaggcgaaacccagcgtcaggatttacgctggcaaattaataccgaacgccagggaatggtggctcgcggtgttgacgatgctgaccagcttcgcgcctttgtggtcagtgaggatcggatgaaagaggcatttggattgttgaaaacattgccgatgtag

SEQ ID NO: 481968 - DNA, 1440 bp, Shigella sonnei
atgtctattgtggtgaaaaataacattcattgggttggtcaacgtgactgggaagtgcgtgattttcacggtacggaatataaaacgctacgcggcagcagttacaacagctacctcatccgcgaagaaaaaaacgtgctgatcgacaccgtcgaccataaattcagccgcgaatttgtgcagaacctgcgtaatgaaatcgatctggcggatatcgattacatcgtgattaaccatgcagaagaggaccacgctggggcgctgaccgaactgatggcgcaaattcccgatacgccgatttactgtactgccaacgctatcgactcgataaatggtcatcatcatcatccggagtggaattttaatgtggtgaaaactggtgacacgctggatatcggcaacggcaaacagctcatttttgtcgaaacgccaatgctgcactggccggacagcatgatgacttacctgacaggcgacgcggtgctgttcagtaacgatgctttcggtcagcactactgcgacgagcatctgttcaacgatgaagtggatcagacggagcttttcgagcagtgccagcgttactacgccaatatcctgacgccgttcagccgcctggtaacaccgaaaattaccgagatcctgggctttaacttaccagtcgatatgatagcgacctctcacggcgtggtatggcgcgataacccgacgcaaattgtcgagctgtacctgaaatgggcggctgattatcaggaagacagaatcaccattttctacgacaccatgtcgaataacacccgcatgatggctgacgctatcgcccaggggattgcggaaaccgacccacgcgtggcggtgaaaattttcaacgtcgcccgaagcgataaaaacgaaatcctgaccaatgtcttccgctcaaaaggcgtgctggtcggcacttcgacgatgaataacgtgatgatgccgaaaatcgccggtctggtggaggagatgaccggattacgcttccgtaacaaacgcgccagtgctttcggctctcacggctggagcggcggtgcggtggatcgtctttccacgcgcctgcaggatgcgggtttcgaaatgtcgcttagcctgaaagccaaatggcgaccagaccaggacgctctggagttatgccgtgaacacggtcgcgaaatcgcccgtcagtgggcgctcgcgccgctgccgcagagcacggtgaatacggtggttaaagaagaaacctctgccaccacgaagtccgacctcggcccacggatgcagtgcagcgtctgccagtggatttacgatccggcaaaaggcgagccaatgcaggacgttgcgccaggaacgccgtggagtgaagttccggataacttcctctgcccggaatgctctctcggcaaagacgtctttgacgaactggcatcggaggcaaaatga

SEQ ID NO: 481969 - DNA, 1515 bp, Shigella sonnei
atgagtttttccgttgatgtgctggcgaatatcgccatcgaattgcagcgtgggattggtcatcaggatcgttttcagcgcctgatcaccacgctacgtcaggtgctggagtgcgatgcgtctgcgttgctacgttacgattcgcggcagtttattccgcttgccatcgacggtctggcaaaggatgtactcggtagacgctttgcgctggaagggcatccacggctggaagcgattgcccgcgccggggatgtggtgcgctttcccgcagacagcgaattgcccgatccctatgacggtttgattcctgggcaggagagtctgaaggttcacgcctgcgttggtctgccattgtttgccgggcaaaacctgatcggcgcactgacgctcgacgggatgcagcccgatcagttcgatgttttcagcgacgaagagctacggctgattgctgcgctggcggcgggagcgttaagcaatgcgttgctgattgaacaactggaaagccagaatatgatgccaggcgatgccacgccgtttgaagcggtgaaacagacgcagatgattggcttgtcccctggcatgacgcaactgaaaaaagagattgagattgtggcggcgtccgatctcaacgtcctgatcagcggtgagacgggaaccggtaaggagctggtggcgaaagcgattcatgaagcctcgccacgggcggtgaatccgctggtctatctcaactgtgctgcactgccggaaagtgtggcggaaagtgagttgttcgggcatgtgaaaggagcgtttactggcgctatcagtaaccgcagcgggaagtttgaaatggcggataacggcactctgtttctggatgagatcggcgagttgtcgttggcattgcaggccaagctgctgagggtgttgcagtatggcgatattcagcgcgttggcgatgaccgtagtttgcgggtcgatgtgcgcgtgctggcggcgactaaccgcgacttacgcgaagaggtgatggcagggcgatttcgcgctgacttgtttcatcgcctgagcgtgtttccactttcggtgccgccgctgcgtgagcggggcgatgatgtcattctgctggcggggtatttctgcgagcagtgtcgtttgcggctggggctctcccgcgtggtattaagtgccggagcgcgaaatttactgcaacactatcgttttccggggaacgtgcgcgaactggaacatgctattcatcgggcggtagtgctggcgagagccacccgcaacggcgatgaagtgattcttgaggcgcaacattttgcttttcctgaggtgacgttgccgccgccagaagcggcggcggtgcccgttgttaagcaaaacctgcgtgaagcgacagaagcgttccagcgtgaaactattcgccaggcactggcacaaaatcatcataactgggctgcctgcgcgcggatgctggaaaccgacgtcgccaacctgcatcggctggcgaaacgtctgggaatgaaggattaa

SEQ ID NO: 481970 - DNA, 966 bp, Shigella sonnei
atgagtgaagcactactgaacgcgggacgtcagacgttaatgctggagttgcaggaagcaagccgtttaccggaacgtctgggcgatgattttgttcgcgccgccaatatcatcctgcactgcgaaggcaaagtggtggtttcgggaattggcaaatcgggccacattggtaagaaaatcgccgcaacacttgccagtaccggcacatcggctttttttgtccatccggcagaagcactgcacggcgatctggggatgattgaaagccgcgatgtgatgctgtttatctcttactccggtggcgcgaaggaactggatctgattattccgcgtctggaagataaatctatcgcgctgctggcgatgaccggcaaaccgacgtcaccgctgggcctggcggcaaaagcggtgctggatatctccgtagaacgcgaagcctgcccgatgcaccttgcgccgacctccagcaccgtcaataccctgatgatgggtgacgcgctggcgatggcggtcatgcaggcgcgcggatttaatgaagaagattttgcccgctcccacccagccggggcactgggcgctcgcttgctgaataaagtgcatcatctgatgcgccgtgacgatgccatcccacaggtggcgttaaccgccagcgtgatggatgcgatgctggaactcagccgcaccggtctggggctggtggcggtatgtgacgctcaacaacaggtacaaggcgtctttaccgacggcgatttacgtcgctggctggtaggcggcggcgcactcaccacgccagttaatgaagcgatgacgacaggcggcaccacgttacaggcgcaaagtcgcgccatcgacgccaaagagatcctgatgaagcgcaaaatcactgccgcaccggtggtggatgaaaacggcaaactcaccggcgcaattaacctgcaggatttctatcaggccgggattatttaa

SEQ ID NO: 481971 - DNA, 774 bp, Shigella sonnei
atgaaacctcgtcagcgtcaggccgccattctggagtatctgcaaaagcagggtaaatgctcggttgaagaattggcgcaatactttgacaccacaggcacaaccattcgcaaagatctggtcattctggaacatgcaggaaccgtcattcgtacttatggcggagtggtgttgaataaagaggaatccgatccgcctatcgatcataaaacactcatcaacacccacaagaaagagctgatagcagaagctgccgttagttttattcatgatggcgattcgatcattcttgatgctggcagtaccgttttgcagatggttcccctgctctcgcgctttaataacatcacggtgatgaccaacagtctgcatatcgtcaatgcgctatctgaactggataacgaacaaactatcctgatgccaggcggaacgtttcgtaaaaaatcggcctcatttcacggacagctggcagagaatgccttcgaacatttcagtttcgataaattgtttatgggcaccgacggcatcgatctcaatgcgggcgtaaccacctttaacgaggtttataccgtcagtaaggcaatgtgcaatgccgcgcgcgaagtgattttgatggcggactcatcaaagtttggccgtaaaagccccaacgtagtttgcagtcttgaaagcgtcgataagctgattaccgacgcaggtatcgatccggcgtttcgtcaggcgctggaagagaaagggatcgatgtgatcataaccggagagagcaatgagtga

SEQ ID NO: 481972 - DNA, 360 bp, Shigella sonnei
atggtatccgcactcatcaccgtcgccgttatcgcctggtgtgcgcaactggccttaggcggctggcaaatttctcgttttaaccgtgccttcgacacactatgccagcaagggcgggttggcgtgggccgttccagcgggcgctttaaaccacgggtcgtggtcgccatcgccctggacgatcagcagcgcatcgtcgacaccttgtttatgaaaggactgaccgtcttcgcacgaccgcaaaaaattcccgcaattaccggtatgcatgcgggtgatttacagcccgatgtgatctttccccatgatccactatcacagaatgctctatcattggcgcttaaactgaaacgtggataa

SEQ ID NO: 481973 - DNA, 450 bp, Shigella sonnei
gtgaatctggtgggttatttcctgtgtgcccgtgaattttctcgtttgatgatccgcgacgggattcagggtcgcattattcagatcaactcgaaatccggcaaagtgggcagcaaacacaactctggctacagcgcagcgaaatttggtggcgtcgggctgactcaatcactggcgctggatctggcggagtacggcattacggtgcattcactgatgctcggtaacctgctgaaatcgcctatgttccagtcactgttaccccaatacgcgaccaagctgggtatcaaaccggatcaagtcgagcagtattacatcgacaaagtaccgctcaaacgcggctgcgattatcaggatgtgctgaatatgctgctgctctatgccagtcctaaggcgtcgtactgcaccggacagtcgatcaatgtcaccggcggtcaggtgatgttctaa

SEQ ID NO: 481974 - DNA, 354 bp, Shigella sonnei
atgaatcaggttgccgttgtcatcggtggtgggcaaaccttaggcgcgttcctgtgccacggtctggctgccgaggggtatcgcgtcgcggttgtcgatattcagagcgacaaagccgcaaatgtggcacaagaaattaacgccgaatatggtgaaggaacagcgtatagttttggtgctgacgccaccagcgagcaaagcgtcctggcgctctctcgtggggtagatgaaatctttgggcgcgtggatttgctggtctacagcgccggaatagcaaaagcagcctttatcagcgacttccagctcggcgattttgaccgtgaatctggtgggttatttcctgtgtgcccgtga

SEQ ID NO: 481975 - DNA, 372 bp, Shigella sonnei
atgaccgttatttatcagaccaccatcacccgtatcggcgcgagtgccactgacgccctcagcgaccagatgctcatcacctttcgtgaaggcgcgccagcggacctcgaagagtattgcttcattcattgccacggcgagttgaaaggtgcactccatcccggtttgcaatttacgctcgggcagcatcgctatccggtgaccgctgttggcagcgtggcggaagacaaccttcgcgaactgggtcatgtcaccctgcgcttcgatggtttaaacgaagcggaatttccgggcactgtccatgtggcaggccctgtacccgacgatatcgcgccgggatcggttttgaagtttgaatctgttaaggagtaa

SEQ ID NO: 481976 - DNA, 960 bp, Shigella sonnei
atgacgcgtattcggatcgaaaaaggaacgggtggctggggcggcccgcttgagctggaagccacgccgggcaaaaaaatcgtctatatcaccgccggtacccggcctgcgattgttgacaaactggcacaacttactggctggcaggctattgacggatttaaagaaggtgaacccgcggaggcggaaattggtgtcgcggtaatcgactgtggcggcacattacgctgcggcatctatccgaaacgacgtattcccaccattaatatccactcgacgggcaagtccagtccgctggcgcagtacattgtggaagatatttatgtctctggcgtaaaagaagaaaacatcactgtagtgggtgatgcgacaccacaaccctcttccgtgggccgtgactatgacaccagcaagaaaatcaccgaacaaagcgatggtttactggcgaaggtgggaatgggtatgggttctgccgttgccgtgttgtttcaatctggtcgtgacaccatcgacactgtattaaaaaccattctgccgtttatggcgttcgtctcggcgctcattggcatcattatggcttctggccttggtgactggattgcccacggtcttgctccgctggcgagccatccactgggtctggtcatgctggcgctcatctgctccttcccgctgctttcacctttcctcggcccaggcgcagttatcgcacaggttatcggcgtattgattggcgtgcagattggtctcggcaatattccgccgcatctggctttaccggcactgtttgccatcaacgcgcaggcggcctgcgacttcatcccggtcggtttgtcgctggcggaagcccgtcaggacacggttcgcgtcggtgtcccttctgtactggtgagccactttttaaccggcgcaccgactgtactgatcgcctggtttgtctccggttttatctatcaatag

SEQ ID NO: 481977 - DNA, 564 bp, Shigella sonnei
atgatagaaaccattactcatggtgcagagtggtttatcgggctgttccaaaagggcggagaggtgtttaccgggatggtgaccggcattcttccgctgttgattagcctgctggttatcatgaacgcactgattaattttatcggtcagcatcgtattgaacgttttgctcaacgttgcgccggtaaccctgtttcccgttacctgctgctaccgtgcattggcacgtttgtcttttgcaatccgatgaccttaagcctgggtcgctttatgccggaaaagtacaaacccagctactacgcggcagcctcttatagctgccactcaatgaatggcctctttccccatatcaaccctggcgaactgtttgtttatcttggcattgccagcggtctgacaacgctgaacctgccacttggcccactggcggtgagctatctgctggttggtctggtcaccaacttctttcgcggctgggtgaccgatctgaccaccgccatttttgagaaaaagatgggcattcaacttgaacaaaaagttcacctggcaggagcaacatcatga

SEQ ID NO: 481978 - DNA, 1191 bp, Shigella sonnei
ttgagttatgtaaagtccgtatcgggcagtgactaccgcttccttgtgcggggcgtgatgctttaccatacttgcccctggttgaatctgttaaatggacccctcatgttcaagcgtcgttatgtaacattgcttcccctttttgtgttgcttgccgcctgtagcagcaagccaaaacctactgagactgaaacgaccaccggaacgccgtctggcggcttcctgcttgagcctcagcacaatgtgatgcagatgggcggcgatttcgctaataacccgaatgcccagcagttcatcgacagaatggtgaacaaacacggtttcgatcgtcagcagttgcaggaaattctctcccaggcgaagcgtctggattcggtactgcggctgatggataaccaggcaccaaccacatcggtgaaaccgccatcaggtccgaacggcgcatggctgcgttatcgcaaaaaatttattacgccggacaacgtgcagaacggtgtggttttctggaatcagtatgaagatgcgttgaatcgcgcgtggcaggtgtatggcgtaccgccggaaattatcgtcgggattatcggcgttgaaacccgctgggggcgcgtgatggggaaaactcgcatcctcgatgcgctggcaacgctgtcatttaactacccacgccgcgcggagtatttctctggcgagctggaaaccttcctgttgatggcgcgcgacgagcaggacgatccgctcaatctgaaaggttcctttgccggggcgatgggctacggacagtttatgccgtcgtcttacaaacaatatgcggtagatttcagcggcgacgggcatatcaacctgtgggatccggttgatgcgatcggtagtgtggcgaactatttcaaagcgcacggctgggtgaaaggcgatcaggtcgcggtaatggcaaacggtcaggctccaggcttgccaaatggcttcaaaaccaggtacagcatttcgcagcttgccacggcaggtttaacgccacagcagccgctgggcaaccatcaacaagccagcctgctgcgtctggatgtcggtaccggttaccagtactggtacggtctgccgaacttctacaccattacccgttataaccacagcacccattacgcaatggcggtctggcagttaggacaagccgtggcgctggcgcgcgtgcagtaa

SEQ ID NO: 481979 - DNA, 498 bp, Shigella sonnei; identical to SEQ ID NO: 471087

SEQ ID NO: 481980 - DNA, 1062 bp, Shigella sonnei
atggctatcgacgaaaacaaacagaaagcgttggcggcagcactgggccagattgagaaacaatttggtaaaggctccatcatgcgcctgggtgaagaccgttccatggatgtggaaaccatctctaccggttcgctttcactggatatcgcgcttggggcaggtggtctgccgatgggccgtatcgtcgaaatctacggaccggaatcttccggtaaaaccacgctgacgctgcaggtgatcgccgcagcgcagcgtgaaggtaaaacctgtgcgtttatcgatgctgaacacgcgctggacccaatctacgcacgtaaactgggcgtcgatatcgataacctgctgtgctcccagccggacaccggcgagcaggcactggaaatctgtgacgccctggcgcgttctggcgcagtagacgttatcgtcgttgactccgtggcggcactgacgccgaaagcggaaatcgaaggcgaaatcggcgactctcacatgggccttgcggcacgtatgatgagccaggcgatgcgtaagctggcgggtaacctgaagcagtccaacacgctgctgatcttcatcaaccagatccgtatgaaaattggtgtgatgttcggtaacccggaaaccactaccggtggtaacgcgctgaaattctacgcctctgttcgtctcgacatccgtcgtatcggcgcggtgaaagagggcgaaaacgtggtgggtagcgaaacccgcgtgaaagtggtgaagaacaaaatcgctgcaccgtttaaacaggctgaatttcagatcctctacggcgaaggtatcaacttctacggcgaactggttgacctgggcgtaaaagagaagctgatcgagaaagcaggcgcgtggtacagctacaaaggtgagaagatcggtcagggtaaagcgaatgcaactgcctggctgaaagataacccggaaaccgcgaaagagatcgagaagaaagtacgtgagttgctgctgagcaacccgaactcaacgccggatttctctgtagatgacagcgaaggcgtagcagaaactaacgaagatttttaa

SEQ ID NO: 481981 - DNA, 501 bp, Shigella sonnei
atgacagaatcaacatcccgtcgcccggcatatgctcgcctgttggatcgtgcggtacgcattctggcggtgcgcgatcacagtgagcaagaactgcgacgtaaactcgcggcaccgattatgggcaaaaatggcccagaagagattgatgctacggcagaagattacgagcgcgttattgcctggtgccatgaacatggctatctcgatgacagccgatttgttgcgcgctttatcgccagccgtagccgcaaaggttatggacctgcacgtattcgtcaggaactgaatcagaaaggtatttcccgcgaagcgacagaaaaagcgatgcgtgaatgtgacatcgactggtgcgcactggtgcgcgatcaggcgacgcgaaaatatggtgaacctttgccaactgtcttttcagaaaaagttaagatccagcgttttctgctctatcgtggctatctgatggaagatatccaggatatttggctaaattttgccgactga

SEQ ID NO: 481982 - DNA, 2631 bp, Shigella sonnei
atgagcaagagcaccgctgagatccgtcaggcgtttctcgactttttccatagtaagggacatcaggtagttgccagcagctccctggtaccccataacgacccaactttgttgtttaccaacgccgggatgaaccagttcaaggatgtgttccttggactcgacaagcgtaattattcccgcgctaccacttcccaacgctgcgtgcgtgcgggtggtaaacacaacgacctggaaaacgtcggttacaccgcgcgtcaccataccttcttcgaaatgctgggcaacttcagcttcggcgactatttcaaacacgatgccattcagtttgcatgggaactgctgaccagcgaaaaatggtttgccctgccgaaagagcgtctgtgggttaccgtctatgaaagcgacgacgaagcctacgaaatctgggaaaaagaagtagggatcccgcgcgaacgtattattcgcatcggcgataacaaaggtgcgccatacgcatctgacaacttctggcagatgggtgacactggtccgtgcggcccgtgcaccgaaatcttctacgatcacggcgaccacatttggggtggccctccgggaagtccggaagaagacggcgaccgctacattgagatctggaacatcgtcttcatgcagttcaaccgccaggcagatggcacgatggaaccgctgccgaagccgtctgtagataccggtatgggtctggagcgtattgctgcggtgctgcaacacgttaactctaactatgacatcgacctgttccgcacgttgatccaggcggtagcgaaagtcactggcgcgaccgatctgagcaataaatcgctgcgcgtaatcgctgaccacattcgttcttgtgcgttcctgatcgcggatggcgtaatgccgtccaatgaaaaccgtggttatgtactgcgtcgtatcattcgtcgcgcagtgcgtcacggcaatatgctcggcgcgaaagaaaccttcttctacaaactggttggtccgctgatcgacgttatgggctctgcgggtgaagacctgaaacgccagcaggcgcaggttgagcaggtgctgaagactgaagaagagcagtttgcccgtactctggagcgcggtctggcgttgctggatgaagagctggcaaaactttctggtgatacgctggatggtgaaacggctttccgtctgtacgacacctatggcttcccggttgacctgacggctgatgtttgtcgtgagcgcaacatcaaagttgacgaagctggttttgaagcagcaatggaagagcagcgtcgtcgcgcgcgcgaagccagcggctttggtgccgattacaacgcaatgatccgtgttgatagtgcatctgaatttaaaggctatgaccatctggaactgaacggcaaagtgaccgcgctgtttgttgatggtaaagcggttgatgccatcaatgcaggccaggaagctgtggtcgtgctggatcaaacgccattctatgcggaatccggcggtcaggttggtgataaaggcgaactgaaaggcgctaacttctccttcgcggtggaagatacgcagaaatacggccaggcgattggtcacatcggtaaacttgctgcgggttctctgaaagtgggcgacgctgtgcaggctgatgttgatgaggctcgtcgcgcccgtattcgtctgaatcactccgcaacgcacctgatgcacgctgcgctgcgccaggttctggggactcatgtatcgcagaaaggttcactggttaacgacaaggtgctgcgcttcgacttctcacacaacgaagcgatgaaaccggaagagattcgtgcggtcgaagacctggtgaacgcacagattcgtcgcaatttgccgatcgaaaccaacatcatggatctcgaagcggcgaaagcgaaaggtgcgatggcgctgttcggcgagaagtatgatgagcgtgtacgcgtgctgagcatgggcgatttctccaccgagctgtgtggcggtactcacgccagccgcactggtgatattggtctgttccgcatcatctctgaatcgggtactgctgcaggcgttcgtcgtatcgaagcggtaaccggagaaggcgctatcaccaccgttcatgcagacagcgatcgcttaagcgaagtcgcgcatctgctgaaaggcgatagcaataatctggcggataaagtgcgctcagtactggaacgtacgcgtcagttagaaaaagaactacaacagcttaaagaacaagctgccgcacaggagagcgcaaatctttccagtaaggcaattgatgttaatggtgttaagctgttggttagcgagcttagcggtgttgagccgaaaatgttgcgtaccatggttgacgatttaaaaaatcagctggggtcgacaattatcgtgctggcaacggtagccgaaggtaaggtttctctgattgcaggcgtatctaaggacgtcacagatcgtgtgaaagcaggggaactgattggtatggtcgctcagcaggtgggcggcaagggtggtggacgtcctgacatggcgcaagccggtggtacggatgctgcggccttacctgcagcgttagccagtgtgaaaggctgggtcagcgcgaaattgcaataa

SEQ ID NO: 481983 - DNA, 186 bp, Shigella sonnei; identical to SEQ ID NO: 3124

SEQ ID NO: 481984 - DNA, 567 bp, Shigella sonnei
atgtacgagcgttatgcaggtttaatttttgatatggatggcacaatcctggatacggagcctacgcaccgtaaagcgtggcgcgaagtattagggcactacggtcttcagtacgatattcaggcgatgattgcgcttaatggatcgcccacctggcgtattgctcaggcaattattgagctgaatcaggccgatctcgacccgcatgcgttagcgcgtgaaaaaacagaagcagtaagaagtatgctgctggatagcgtcgaaccgcttcctcttgttgatgtggtgaaaagttggcatggtcgtcgcccaatggctgtaggaacggggagtgaaagcgccatcgctgaggcattgctggcgcacctgggattacgccattattttgacgccgtcgtcgctgccgatcacgtcaaacaccataaacccgcgccagacacatttttgttgtgcgcgcagcgtatgggcgtgcaaccgacgcagtgtgtggtctttgaagatgccgatttcggtattcaggcggcccgtgccgcaggtatggacgctgtggacgttcgcttgctgtga

SEQ ID NO: 481985 - DNA, 429 bp, Shigella sonnei
gtgagtgaagcgttatcgcttttctcgttgtttgccagtagttttctcagcgctacactattacccggcaactccgaagtcgtgctggtggcaatgttgctttccgggatcagtcatccctgggttttagttttaacagcaacaatgggtaatagccttggagggttaactaacgttatccttgggcgtttctttccattgcgtaaaacatcgcgctggcaagagaaagctatcggctggctgaaacgctatggtgcagtcacgctattattaagctggatgcccgtggttggcgatttactgtgtctgttagcgggatggatgcgcatctcgtggggaccggtaatcttttttttgtgccttggtaaagcgttacgctatgttgcagttgcagcagcgaccgttcagggcatgatgtggtggcactaa

SEQ ID NO: 481986 - DNA, 1557 bp, Shigella sonnei
ttgatcccggacgtatcacaggcgctggcctggctggaaaaacatcctcaggcgttaaaggggatacagcgtgggctggagcgcgaaactttgcgtgttaatgctgatggcacactggcaacaacaggtcatcctgaagcattaggttccgcactgacgcacaaatggattactaccgattttgcggaagcattgctggaattcattacaccagtggatggtgatattgaacatatgctgacctttatgcgcgatctgcatcgttatacggcgcgcaatatgggcgatgagcggatgtggccgttaagtatgccatgctacatcgcagaaggtcaggacatcgaactggcacagtacggcacttctaacaccggacgctttaaaacgctgtatcgtgaagggctgaaaaatcgctacggcgcgctgatgcaaaccatttccggcgtgcactacaatttctctttgccaatggcattctggcaagcgaagtgcggtgatatctcgggcgctgatgccaaagagaaaatttctgcgggctatttccgcgttatccgcaattactatcgtttcggttgggtcattccttatctgtttggtgcatctccggcgatttgttcttctttcctgcaaggaaaaccaacgtcgctgccgtttgagaaaaccgagtgcggtatgtattacctgccgtatgcgacctctcttcgtttgagcgatctcggctataccaataaatcgcaaagcaatcttggtattaccttcaacgatctttacgagtacgtagcgggccttaaacaggcaatcaaaacgccatcggaagagtacgcgaagattggtattgagaaagacggtaagaggctgcaaatcaatagcaacgtgctgcagattgaaaacgaactgtatgcgccgattcgtccaaaacgcgttacccgcagcggcgagtcaccttctgatgcgctgttacgtggcggcattgaatatattgaagtgcgttcgctggacatcaacccgttctcgccgattggtgtagatgaacagcaggtgcgattcctcgacctgtttatggtctggtgtgcgctggctgatgcaccggaaatgagcagtagcgaacttgcctgtacgcgcgttaactggaaccgggtgatccttgaaggtcgcaaaccgggcttgacgctgggtatcggctgcgaaaccgcgcagttcccgttactgcaggtgggtaaagatctgttccgcgatctgaaacgcgtcgcgcaaacgctggatagcattaacggcggcgacgcgtatcagaaagtgtgtgatgaactggttgcctgcttcgataatcccgatctgactttctctgcccgtatcttaaggtctatgattgatactggtattggcggaacaggcaaagcgtttgcagaagcctaccgtaatctgctgcgtgaagagccgctggaaattctgcgcgaagaggattttgtagccgagcgcgaggcatctgaacgccgtcagcaggaaatggaaaccgctgataccgaaccgtttgcggtgtggctggaaaaacacacctga

SEQ ID NO: 481987 - DNA, 516 bp, Shigella sonnei
atgccgttgttagatagcttcacagtcgatcatacccggatggaagcgcctgcagttcgggtggcgaaaacaatgaacaccccgcatggcgacgcaatcaccgtgttcgatctgcgcttctgcgtgccgaacaaagaagtgatgccagaaagagggatccataccctggagcacctgtttgctggttttatgcgtaaccatcttaacggtaatggtgtagagattatcgatatctcgccaatgggctgccgcaccggtttttatatgagtctgattggtacgccagatgagcagcgtgttgctgatgcctggaaagcggcaatggaagacgtgctgaaagtgcaggatcagaatcagatcccggaactgaacgtctaccagtgtggcacttaccagatgcactcgttgcaggaagcgcaggatattgcgcgtagcattctggaacgtgacgtacgcatcaacagcaacgaagaactggcactgccgaaagagaagttgcaggaactgcacatctag

SEQ ID NO: 481988 - DNA, 1539 bp, Shigella sonnei
atgcaacagcaaaaaccgctggaaggcgcgcaactggtcattatgacgattgcgctgtcactggcgacattcatgcaggtgctggactccaccattgctaacgtggcgatccccactatcgccgggaatctgggctcatcgctcagccagggaacgtgggtaatcacttctttcggggtggcgaatgccatctcgatcccgcttaccggctggctggcaaagcgcgtcggggaagtgaaactgttcctttggtccaccatcgcctttgctattgcgtcgtgggcgtgtggtgtctccagcagcctgaatatgctgatcttcttccgcgtgattcaggggattgtcgccgggccgttgatcccgctttcgcaaagtctattgctgaataactacccgccagccaaacgctcgatcgcgctggcgttgtggtcgatgacggtgattgtcgcgccaatttgcggcccgatcctcggcggttatatcagcgataattaccactggggctggatattcttcatcaacgtgccgattggcgtggcggtggtgttgatgacactgcaaactctgcgcggacgtgaaacccgcaccaaacggcggcggattgatgccgtggggctggcactgctggttattggtatcggcagcctgcagattatgctcgaccgcggtaaagagctggactggttttcatcacaggaaattatcatccttaccgtggtggcggtggtggctatctgcttcctgattgtctgggagctgaccgacgataacccgatagtcgatctgtcgttgtttaagtcgcgcaacttcaccatcggctgcttgtgtatcagcctcgcgtatatgctctacttcggcgctattgttctgctgccgcagttgttgcaggaggtctacggttacacggcgacctgggcaggtttggcctctgcgccggtagggattattccggtgatcctgtcgccgattatcggccgcttcgcgcataaactggatatgcggcggctggtaaccttcagctttattatgtatgccgtctgcttctactggcgtgcctatacctttgaaccaggtatggattttggcgcgtcggcctggccgcagtttatccaggggtttgcggtggcctgcttctttatgccgctgaccaccattacgctgtctggtttgccaccggaacgactggcggcggcatcgagcctctctaactttacgcgaacgctggcggggtctatcggcacgtcgataaccacgaccatgtggaccaaccgcgagtcgatgcaccatgcgcagttgactgagtcggtaaacccgttcaacccgaatgcccaggcgatgtacagtcaactggaagggcttgggatgacgcaacagcaggcatcaggctggattgcccagcagatcaccaatcaggggctgattatttccgccaatgagatcttctggatgtcagccgggatattcctcgtactgctggggctggtgtggtttgctaaaccgccatttggcgcaggtggcggtggcggcggtgcgcactaa

SEQ ID NO: 481989 - DNA, 1173 bp, Shigella sonnei
atgagcgcaaatgcggagactcaaaccccgcagcaaccggtaaagaagagcggcaaacgtaagcgtctgctcctccttctcaccttgctctttataattattgccgtagcgatagggatttattggtttttggtactgcgtcatttcgaagaaaccgatgacgcatacgtggcagggaatcagattcaaattatgtctcaggtgtctggcagcgtgacgaaagtctgggccgataacaccgattttgtaaaagaaggcgacgtgctggtcactctcgacccgacagatgctcgccaggcgtttgaaaaagccaaaactgcactggcttccagcgttcgccaaacccaccagctgatgattaacagcaaacagttgcaggcgaatattgaggtgcagaaaatcgccctcgcaaaagcacaaagcgactacaaccgccgtgtgccgctgggcaatgccaacctgattggtcgcgaagagctgcaacacgcccgcgacgccgtcaccagtgcccaggcgcaactggacgtcgctattcaacaatacaatgccaatcaggcgatgattctggggactaaactggaagatcagcctgccgtgcaacaggctgccaccgaagtacgtaacgcctggctggcgctggagcgtacccgtattgtcagtccgatgaccggttatgtctcccgccgtgcggtacagcctggggcgcaaattagcccaacgacgccgctgatggcggtcgttccagccaccaatatgtgggtggatgccaactttaaagagacgcagattgccaatatgcgtatcggtcagccggtcactatcaccacggatatttacggcgatgatgtgaaatacaccggtaaagtggttggtctggatatgggcacaggtagcgcattctcactgcttccggcgcaaaatgcgaccggtaactggatcaaagtcgttcagcgtctacctgtgcgtatcgaactggaccagaaacagctggagcaatacccgctgcgcattggtttgtccacactggtgagcgtcaataccactaaccgtgacggtcaggtactggcaaataaagtacgttcaacaccggtcgcggtaagtaccgcgcgtgaaatcagcctggcacctgtcaataaactgatcgacgatatcgtaaaagctaacgctggctaa

SEQ ID NO: 481990 - DNA, 531 bp, Shigella sonnei; identical to SEQ ID NO: 457766

SEQ ID NO: 481991 - DNA, 336 bp, Shigella sonnei
atgagctatgaggttctgctgcttgggttactggttggcgcggcgaattattgcttccgctatttgccgctgcgcctgcgtgtgggtaatgcccgcccaaccaaacgtggcgcggtaggtattttgctcgacaccattggcatcgcctcgatatgcactctgctggttgtctctaccgcaccagaagtgatgcacgatacacgccgtttcgtgcccacgctggtcggcttcgcggtactgggtgccagtttctataaaacacgcagcattatcatcccaacactgcttagtgcgctggcctatgggctcgcctggaaagtgatggcgattatataa

SEQ ID NO: 481992 - DNA, 738 bp, Shigella sonnei
atggaaagccctactccacagcctgctcctggttcggcgaccttcatggaaggatgcaaagacagtttaccgattgttattagttatattccggtggcctttgcgttcggtctgaatgcgacccgtctgggattctctcctctcgaaagcgtttttttctcctgcatcatttatgcaggcgcgagccagttcgtcattaccgcgatgctggcagccgggagtagtttgtgggttgctgcactgaccgtcatggcaatggatgttcgccatgtgttgtatggcccgtcactgcgtagccgtattattcagcgtctgcaaaaatcgaaaaccgccctgtgggcgtttggcctgacggatgaggtttttgccgccgcaacagcaaaactggtacgcaataatcgccgctggagcgagaactggatgatcggcattgccttcagttcatggtcatcgtgggtatttggtacggtaataggggcattctctggcagcggcttgctgcaaggttatcccgccgttgaagcagcattaggttttatgcttccggcactctttatgagtttcctgctcgcctctttccagcgcaaacaatctctttgcgttaccgcagcgttagttggtgcccttgcaggcgtaacgctattttctattcccgtcgccattctggcaggcattgtctgtggctgcctcactgcgttaatccaagcattctggcaaggagcgcccgatgagctatga

SEQ ID NO: 481993 - DNA, 1185 bp, Shigella sonnei
atgactaaacctaatcatgagcttagcccggcgctgatcgtgctgatgtctatcgccaccggtcaggcggtagccagtaactattacgcccagccattgctcgacaccatcgcgcgtaacttttccctttccgccagttcggcaggctttattgttaccgccgcgcagttgggctatgcagcaggtctgctgtttcttgttcccctcggtgatatgtttgaacgccgccgcctgattgtctcgatgaccttactggcggcaggcggcatgttaatcactgccagcagtcagtcgctggcgatgatgatcctcggtacggcattaaccggtttattctcagtcgtggcacaaattctggttccgctggcagcgacgctggcttcaccggataaacgcggcaaagtggttggcaccattatgagcggtctgctgttggggatcttgctggcacgaaccgttgccgggttactggcaaacctcggcggctggcgcaccgtcttttgggttgcctcggtgttaatggcactgatggcgctagcattatggcgtggtctgccacaaatgaaatcagaaacccacctcaactacccacagttgttaggttccgttttcagcatgtttatcagcgataagatcctccgcacccgcgcattgctgggctgcctgacctttgccaacttcagcattctctggacctcaatggcctttttgcttgccgctccaccttttaactacagcgatggtgtcattggtctgtttggacttgcgggagctgccggagcgttgggcgctcgtccggcgggcggttttgccgataagggtaaatcgcaccacaccacaactttcggtctgctgctgctattactttcatggctggcgatctggtttggtcacacttccgtactggcgctgattatcggcatcctggtgctggatctcaccgtacagggcgtgcatatcactaaccagacggtaatttatcgaatacaccctgatgcgcgtaatcgcctgaccgcaggttacatgaccagctactttattggcggtgccgccggttcgctaatttcagcctcagcctggcaacatggcggttgggctggcgtttgtctggctggcgcgacgattgccctagttaacttactggtctggtggcgaggttttcatcgtcaggaagccgcaaattaa

SEQ ID NO: 481994 - DNA, 993 bp, Shigella sonnei
atgcgacatagcgtactttttgcgacagcgtttgccacgcttatctctacacaaacttttgcagccgatctgccgggcaaaggcattactgttaatccagttcagagcaccatcactgaagaaaccttccagacgctgctggtcagtcgtgcactggagaaattaggttataccgtcaataaacccagcgaagtggattacaacgttggctacacctcacttgcttccggcgatgcaaccttcaccgccgtgaactggacgccgctgcatgacaacatgtacgaagctgccggtggcgataagaaattttattgtgaaggggtattcgttaacggcgcggcacagggttacctgatcgataagaaaaccgccgaccagtacaaaatcaccaacatcgcacaactgaaagatccgaagatcgccaaactgttcgataccaacggcgacggtaaagcggatttaaccggctgtaacccaggctggggctgcgaaggtgcgatcaaccaccagcttgccgcgtatgaactgaccaacaccgtgacgcataatcaggggaactacgcagcgatgatggccgacaccatcagtcgctacaaagagggcaaaccggtgttttattacacctggacgccgtactgggtgagtaatgagctgaagccagggaaagatgtggtctggttgcaggtgccgttctccgcactgccgggcgataaaaacgccgataccaaactgccgaatggtgcgaattatggcttcccggtcagcaccatgcatatcgttgccaacaaagcctgggccgagaaaaacccggcagcagcgaaactttttgccattatgcagttgccagtggcagatattaacgcccagaacgccattatgcatgacggcaaagcctcagaaggcgatattcagggccatgttgatggttggatcaaagcccaccagcagcagttcgatggctgggtgaatgaggcgctggcagcgcagaagtaa

SEQ ID NO: 481995 - DNA, 1065 bp, Shigella sonnei
atggctgatcaaaataatccgtgggataccacgccagcggcggacagtgccgcgcaatccgcagacgcctggggtacaccgacgactgcaccgactgacggcggtggtgctgactggctgaccagtacgcctgcgccaaacgtcgagcattttaatattctcgatccgttccataaaacgctgatcccgctcgacagttgggtcactgaagggatcgactgggttgttacccatttccgtcccgtcttccagggcgtgcgcgttccggttgattatatcctcaacagtttccagcaattgctgctgggtatgccagcgccagtggcgattatcgttttcgctctcatcgcctggcagatttccggggtcggaatgggcgtggcgacgctggtttcgctgattgccatcggcgcaatcggtgcctggtcgcaggcaatggtgactctggcgctggtgttaaccgccctgctgttctgtatcgtcatcggtttgccgttagggatatggctggcgagaagtccgcgagcggcgaaaattattcgtccactgcttgatgccatgcagaccacgccagcgtttgtttatctggtaccaatcgtcatgctgtttggtatcggtaacgtgccgggcgtagtggtgacgatcatctttgctctgccgccgattatccgtctgacgattctggggattaaccaggttccggcggatctgattgaagcctcgcgctcattcggtgccagcccgcgccagatgctgttcaaagttcagttaccgctggcgatgccgaccattatggcgggcgttaaccagacgctgatgctggctctttctatggtggtcatcgcctcgatgattgccgtcggcgggctgggtcagatggtacttcgcggtatcggtcgtctggatatgggccttgccaccgttggcggcgtcgggattgtgatcctcgccattatcctcgaccgcctgacgcaggccgttgggcgcgactcacgcagtcgcggcaaccgtcgctggtacaccactggccctgtcggtctgctgacccgcccattcattaagtaa

SEQ ID NO: 481996 - DNA, 1203 bp, Shigella sonnei
atggcaattaaattagaaattaaaaacctttataaaatatttggtgagcatccacagcgagcattcaaatatatcgaacaaggactttcaaaagaacaaattctggaaaaaactgggctatcgcttggcgtaaaagacgccagtctggccattgaagaaggcgagatatttgtcatcatgggattatccggctcgggtaaatccacaatggtacgccttctcaatcgcctgattgaacccacccgcgggcaagtgctgattgatggtgtggatattgccaaaatatccgatgccaaactccgtgaggtgcgcagaaaaaagattgcgatggtcttccagtcctttgccttaatgccgcatatgaccgtgctggacaatactgcgttcggtatggaattggccggaattaatgccgaagaacgccgggaaaaagcccttgatgcactgcgtcaggtcgggctggaaaattatgcccacagctacccggatgaactctctggcgggatgcgtcaacgtgtgggattagcccgcgcgttagcgattaatccggatattttattaatggacgaagccttctcggcgctcgatccattaattcgcaccgagatgcaggatgagctggtaaaattacaggcgaaacatcagcgcaccattgtctttatttcccacgatctcgatgaagccatgcgtattggcgaccgaattgccattatgcaaaatggtgaagtggtacaggtcggcacaccggatgaaattctcaataatccggcgaatgattatgtccgtaccttcttccgtggcgttgatattagtcaggtattcagtgcgaaagatattgcccgccggacaccgaatggcttaattcgtaaaacccctggcttcggcccacgttcggcactgaaattattgcaggatgaagatcgcgaatatggctacgttatcgaacgcggtaataagtttgtcggcgcagtctccatcgattcgcttaaaaccgcgttaacgcagcagcaaggtcttgatgcggcgctgattgatgcgccgttagcagtcgatgcacaaacgcctcttagcgagttgctctctcatgtcggacaggcaccctgtgcggtgcccgtggtcgacgaggaccaacagtatgtcggcatcatttcgaaaggaatgctgctgcgcgctttagatcgtgagggggtaaataatggctga

SEQ ID NO: 481997 - DNA, 960 bp, Shigella sonnei
atgaaactctcacgtatcagcgccatcaactggaacaagatatctgacgataaagatctggaggtgtggaatcgcctgaccagcaatttctggctaccagaaaaggtgccgctgtcgaacgatattcctgcctggcagacattaactgtcgtagaacaacaactgacgatgcgcgtttttactggcctgacgctgctcgacacgctgcaaaatgttatcggcgcgccttcgctgatgcccgatgcactcacgcctcatgaagaagcggtattatcgaatatcagctttatggaagcggttcatgcccgctcttacagttcgattttctcgacgctgtgccagaccaaagatgtcgatgccgcctacgcctggagtgaagaaaacgcaccgttgcagcgaaaagctcagattattcagcaacattatcgcggtgatgatccgctgaaaaagaaaatcgccagtgtgtttcttgaatcttttttgttctattccggtttctggctgccgatgtatttttccagccgcggaaagctgaccaataccgcagacctgatccgtctgattatccgtgatgaagcagtccacggttactacataggctataaatatcagaaaaacatggaaaagatatctctgggacaacgtgaagagttgaagagtttcgccttcgatttgttgctggaactctacgacaacgagctgcaatacaccgatgagctgtacgccgaaaccccgtgggctgacgatgtgaaagcgtttctctgttacaacgccaataaggctttgatgaatctgggctacgaacctttatttcccgcagaaatggcggaagtgaatccggcaatcctcgccgcgctttcgccgaatgccgatgaaaatcacgattttttttccggttcaggctcctcttatgtgatggggaaagcggttgaaacagaagatgaagactggaatttctga

SEQ ID NO: 481998 - DNA, 2145 bp, Shigella sonnei
ttggcaacgacaaccgcagaatgcctgacgcaggaaacgatggattaccacgcgctgaatgcgatgcttaacctctacgatagcgcaggtcgcattcagttcgataaagaccgccaggccgttgacgcctttatggcgacgcatgtgcgtccgaacagtgtgaccttcagtagccagcagcagcgcctgaactggctggtcaacgaaggttactatgatgaaagcgttcttaatcgctactctcgcgactttgtcattacgctgtttgcccacgcacacaccagcggttttcgtttccagacattcctcggggcatggaagttttacaccagctatacgttgaagacattcgacggtaaacgttatctggaagattttgccgatcgagtcacgatggtggcgctgacgctggcacaaggcgatgcgacgctggcgttgcaactgaccgatgaaatgctgtcaggacgctttcagccagccacgccgacattcctcaactgcggtaagcagcagcgcggcgaactggtttcctgttttctgctgcgtattgaagacaatatggagtcgattggccgggcggtaaattccgcactgcaactgtcgaaacgcggcggcggcgtggcatttttgctgtcgaatctgcgagaagcgggcgcgccaattaaacgtattgaaaatcaatcttctggcgtaattccggtgatgaaaatgctggaagacgcattttcctatgccaaccaactcggcgcgcgtcagggggcaggtgcagtctatttacatgctcatcatcccgatattctgcgttttctcgatacaaaacgggaaaatgccgacgaaaaaatccgcattaaaacactgtcgctgggcgtggtgatcccggatatcactttccatctggcaaaagagaatgcgcagatggcgctgttttcgccctatgacgttgagcgagtttatggcaagccgtttgccgatatcgccatcagcgaacactatgacgaactggttgccgatgaacgcatccgcaaaaaatacctcaacgcccgtgatttcttccagcggctggcagaaatccagtttgagtccggctatccctacatcatgtatgaagacacggtaaaccgtgctaaccctgtcgccgggcgcataaatatgagtaatctctgctcagagattttgcaggtcaactgtgcctcagagtatgacgagaatctcgactatgcccgcacaggccatgatatctcctgcaatttaggttcgttgaatattgcgcacaccatggattcccccgattttgcccgcacggtagagactgccgtgcgcggtttaacggcggtgtcagatatgagtcatatccgcagcgtgccgtccatcgaagccggaaatgccgcctcacacgccatcggactggggcagatgaatttacacggctatctggcgcgagaaggcatcgcttatggttcgccggaagcactggatttcaccaatctctatttctatgccatcacctggcacgcactgcgtacctcgatgttgctggcgcgcgaacgcggtgaaaccttcgccgggttcaaacagtcacgttatgccagtggtgaatattttagccaatatctgcaaggtaactggcagccgaaaacggcgaaagttggcgaactgtttgcccgcagcggtattacgttacctacccgtgagatgtgggcgcaactgcgcgacgacgtgatgcgctacggcatttacaaccagaatcttcaggcggtgccgccaaccggttctatctcttatatcaaccatgctacgtcgagtattcatccgattgtggcgaaagtagagatacgcaaagagggcaaaacaggacgcgtttactaccctgccccgtttatgactaacgaaaatctggcgctgtatcaggatgcttacgaaatcggcgcagaaaagatcatcgacacctacgcggaagcgactcgccatgtcgatcagggtttgtcgctgacgctgtttttccccgataccgccaccactcgcgatatcaacaaagcgcagatttacgcctggcgcaaaggtatcaaaacgctctattacattcgcctgcgtcagatggcgctggaaggcactgaaattgaaggctgcgtctcctgtgcactttaa

SEQ ID NO: 481999 - DNA, 183 bp, Shigella sonnei
atgagccagctcgtctacttctccagcagctccgaaaacacgcagcgttttatcgaacgtttaggtctgcccgcggtgcgcatcccgctcaatgagcgggaacggattcaggtagacgagccttacatcctgatcgtgccctcttacggcggcggcggtacggctggcgcggtgccacgatag

SEQ ID NO: 482000 - DNA, 246 bp, Shigella sonnei
atgcgcataactatttacactcgtaacgattgcgttcagtgccacgccaccaaacgggcgatggaaaaccggggctttgattttgaaatgattaatgtcgatcgcgttcctgaagcagcggaagcgttgcgtgctcagggctttcgtcagttgccggtagtgattgctggcgatcttagctggtctggtttccgtccggacatgattaaccgtctgcatccagcgccacacgcggccagtgcatga

SEQ ID NO: 482001 - DNA, 330 bp, Shigella sonnei
atgtttaaccgaccgaaccgcaacgacgttgatgatggcgtgcaggatatccagaatgatgtcaatcaattagctgacagcctcgaatctgtattgaagtcctggggcagcgacgccaaaggggaagctgaagccgcacgcagtaaagctcaggcattgctgaaagaaaccagggcgcgaatgcatggtcgtactcgcgtccagcaagccgcacgcgatgccgttggctgcgcggattcttttgttcgtgaaagaccctggtgtagcgtgggtacagcagctgcggtaggtatttttatcggcgcactgttaagcatgcgcaaatcgtag

SEQ ID NO: 482002 - DNA, 345 bp, Shigella sonnei
atgtatttacgaccagacgaggtggcgcgcgtacttgaaaaagtcggttttactgtcgatgtggtaacccagaaagcttatggttaccgccgtggggaaaattatgtctatgttaatcgcgaagcgcgaatgggacgtaccgcactggtaattcatccaacattaaaagaacgtagttcgacactggctgaacccgcttccgatattaaaacttgcgatcattatcaacaatttccgctctatttagcaggcgagcgacacgagcattacggtatcccgcatggcttcagttcgcgtgttgcgcttgaacgttatttgaatggtttatttggcgaagccagttaa

SEQ ID NO: 482003 - DNA, 450 bp, Shigella sonnei
atgttctcaccgcagtcacgcttgcgtcatgcagttgcagatacgttcgcgatggttgtttactgttctgtcgtgaacatgtgtattgaagttttcctctccggaatgagcttcgaacagtctttttattccagattggtagcgattccggtgaacatcttaattgcatggccatacggtatgtaccgcgatctatttatgcgcgcggcacgcaaagttagcccgtcgggctggataaaaaatctggctgatatcctggcttatgtgacgttccagtcaccggtgtatgtggcgatcttgttagtggtgggcgcagactggcatcagattatggcggcggtcagttcaaacatcgttgtttcgatgttgatgggggcggtttatggctacttcctcgattattgccgccgactgtttaaagtcagccattaccagcaggtaaaagcctga

SEQ ID NO: 482004 - DNA, 456 bp, Shigella sonnei
gtgactggttctacggtaaaaatgggtgaatatagtgcagaacaaatcagaaacggtgccacaccggttccttttgatatttcacttcaaaactgcgttcgtgtgactaatattgagacaaaattagtttcaacaaaggttggtactgaaaacgggcaactccttggtaatactctcacaggtaatgacgcagcaaaaggagtcggtgtactcatagaaggtttagcaactagtaaaaatcctctaatgacattgaaacctaatgattcaaattctgtttataaagattacgacccgagaggcaaagacgatacaacaggaggagtttacccggatcaagatacaggtataacataccctctccatttccaggccacgctacaacaggatggaactataccaatagaagctggtgagtttaaagccaccagtactttccaggtaacctacccttaa

SEQ ID NO: 482005 - DNA, 795 bp, Shigella sonnei
atgaaaccgaccaccattgcttcacttcagaaatgtaagcaggataaaaagcgtttcgcgaccatcaccgcttacgactacagcttcgcgaaactatttgctgatgaaggacttaacgtcatgctggtaggcgactcgctgggcatgacggttcagggtcacgactccaccctgccggtgaccgttgccgatatcgcctaccacactgcctccgtacgtcgtggtgcgccaaactgcctgctgttggctgacctgccgtttatggcgtatgccacgccggaacaagcctttgaaaacgccgcaacggttatgcgtgccggtgccaatatggtcaaaattgagggcggtgagtggctggtcgaaaccgtaaaaatgctgaccgaacgtgccgttcctgtatgtggtcacttaggtttaaccccacagtcagtgaatattttcggtggctacaaagttcaggggcgcggcgatgaagcgggcgatcaactgctcagcgatgcattagccttagaagccgctggggcacagctgctggtgctggaatgcgtgccgattgaactggcaaaacgtattaccgaagcactggcgatcccggttattggcattggcgcaggcaacgtcactgacgggcagatcctcgtgatgcacgacgccttcggcattaccggcggtcacattcctaaattcgctaaaaatttcctcgccgaaacgggcgacatccgcgcggctgtgcggcagtatatggctgaagtggagtccggcgtttatccgggcgaagaacacagtttccattaa

SEQ ID NO: 482006 - DNA, 852 bp, Shigella sonnei; identical to SEQ ID NO: 458371

SEQ ID NO: 482007 - DNA, 954 bp, Shigella sonnei
atggcacgccttgactggatactgccttcacgcaagacaacacggaaggcagggaagatggatgcaccgagtaccacaccgcatgatgcagtgtttaaacaatttttaatgcacgcggagacggctcgcgactttctggagatacatttgccagtggaattacgagaactttgtgacctcaacacgcttcatttagagtcggggagtttcattgaagagagcctgaaaggacacagcacggacgtgctctattccgtgcaaatgcagggcaatcccggttatctgcatgttgtgattgaacaccaaagcaagccggataagaaaatggtctttcgcatgatgcgttattctattgctgccatgcaccggcatctggaggcggatcacgataagctgccgctggtggtgccgatactgttttatcagggcgaggccacaccttatccgctctcaatgtgctggtttgatatattttactcgccggagctggcacgacgcgtctataacagtcctttcccgctggtggatatcaccatcacaccggatgacgaaatcatgcaacatcggcggattgcgattctcgaactactgcaaaaacatattcgccagcgcgacttaatgttattgctggagcaactggtcacgctgattgacgaagggtacactagcggaagtcagttagttgccatgcaaaactatatgctgcaacgcggtcatactgaacaagcggatttgttttatggtgtgctgagagacagggaaacgggaggggagtctatgatgacgctggcgcagtggtttgaagagaaagggattgagaaggggattcagcagggaagacaggaggaaaggcaagaattcgcccagcgttttctgagtaaagggatgtctcgggaagacgttgcagagatgacaaatttatctcttgctgagattgataggctgattaactaa

SEQ ID NO: 482008 - DNA, 381 bp, Shigella sonnei; identical to SEQ ID NO: 458369

SEQ ID NO: 482009 - DNA, 1230 bp, Shigella sonnei
atgtacaaacaagctgttattctcctgctgatgctgtttaccgcaagtgtcagtgccgcgttacctgcccgttatatgcaaaccatcgaaaatgctgcggtctgggcgcaaattggcgacaagatggtgaccgtggggaatattcgggccggacaaatcattgccgtggagcccactgccgcaagttattacgcatttaattttggctttggtaaagggtttatcgataaagggcatctcgagccggttcaggggcgacaaaaagttgaagacggtttgggtgacctcaacaagccgctgagtaatcagaacttagttacctggaaagatacgccggtctataacgcgccgagtgtgggcagtgcgccatttggggtattggcggacaatttgcgctacccgattttgcataaactgaaagacaggttaaatcaaacctggtatcaggtccgtattggcgatcgactggcctatatcagcgcgctggatgcccaacccgataatggccttccggtgctaacttatcaccatattctgcgcgacgaagaaaacacccgttttcgccatacttcgacgaccacctcggtacgcgctttcaataaccaaatggcctggctgcgcgacaggggatacgcgacactgagcatggcgcagctggaaggttacgtgaagaataagatcaatctccctgcgcgagcggtggtgattacctttgatgatggcctcaagtcggtgagccgctatgcgtatcctgtattgaaacaatatggcatgaaggcgacggcgtttgttgttacctcgcgcatcaaacgtcacccgcagaagtggaacccaaaatcgctgcaatttatgagcgtttctgagcttaacgaaattcgcgatgtttttgattttcagtcacatacccattttttgcatcgggtggatggctatcgccgacccatattactgagccgtagtgagcacaatattctgtttgattttgcacgttcacgccgcgctctggcgcaatttaatccgcatgtctggtatctttcgtatccgtttggcggatttaatgacaaagccgtgaaggcagcaaacgatgccggatttcacctggcggtgacaaccatgaaaggcaaagtaaaaccgggggataatccgttgttactaaaacgactttatatcttaagaacggattcgctggagacgatgtcgcggctggtgagtaaccagccgcagggataa

SEQ ID NO: 482010 - DNA, 441 bp, Shigella sonnei
atgttaggttgggtaattacctgtcacgatgaccgggcgcaagagatactggatgcgctggagaaaaaacatggggcgcttcttcagtgccgggccgtgaatttctggcgtgggttaagctctaatatgctcagccgcatgatgtgcgatgctctgcatgaagcggactctggtgagggtgtcatcttcttaaccgatatagccggagcgccaccgtaccgcgtggcttcattattaagccacaaacactcccgttgcgaagtgatttctggtgtcacgttaccgttaattgaacagatgatggcttgccgtgaaaccatgaccagttcagagtttcgcgagcgtattgtcgaactgggtgggccggaggtgagtagtctttggcaccaacaacaaaaaaatccgcctttcgtcctcaaacataatttgtatgagtattaa

SEQ ID NO: 482011 - DNA, 771 bp, Shigella sonnei
atgatgcatctttactgggtggcgctaaaaagcatctgggcgaaagagatccatcgctttatgcgtatctgggtgcagacgctggtgccgccagtcatcaccatgaccctttactttattatcttcggtaacctgattggttcgcgtattggcgatatgcatggcttcagctatatgcagttcatcgtaccggggctgatcatgatgtcggtgatcaccaatgcctacgccaacgttgcgtcatcattttttggtgccaagttccagcgtaatattgaagagctgctggtagcgccggttccgactcacgtcattattgccggatatgtcggcggtggcgtggcgcgtggtctgtttgttggcattctggtgacggcaatttcactgttttttgtgccgtttcaggtgcattcgtgggtattcgttgccttaaccctggtgctcacggcggtgttgttctcccttgcgggtttgctgaacggtgtgtttgccaaaacgttcgatgacatcagcctggtgccaacctttgtgttaacgccactcacgtatttgggtggggtcttttactcactgactttgttgccgccgttctggcaagggctgtcgcacctgaacccaatcgtttatatgatcagtggtttccgctacggcttcctcggtatcaatgatgttccgctggtcactacctttggcgtactggtggtctttattgtggcgttttatttgatctgttggtcgctgatccaacgtggacgtggtttgcgtagctaa

SEQ ID NO: 482012 - DNA, 927 bp, Shigella sonnei
atgaccattgcactggaacttcaacagcttaaaaaaacctatccaggcggcgttcaggcgcttcgtggaatagatttgcaggtcgaagcgggtgatttttatgcgcttctcgggccgaacggggccgggaaatcgaccactatcggtattatcagctctctggtaaataaaacctccgggcgggtcagcgtatttggttacgatctcgagaaagatgtcgtgaacgctaaacgtcagttgggactggtgccgcaggaatttaacttcaacccgtttgaaaccgtgcagcaaattgtggtgaatcaggcagggtactacggtgtggagcgcaaagaggcgtacatccgcagcgaaaaatatcttaaacaactcgatctatggggaaaacgcaacgaacgtgcgcgtatgttatctggcgggatgaagcgccgtttaatgattgcccgtgcgttaatgcatgaacctaaactactgattctcgacgaaccgaccgcaggcgtggatattgaacttcgccgctcaatgtggggctttttgaaggatttaaacgacaaaggcaccaccatcattctcaccacacactacctggaagaagcagaaatgctgtgccgcaatatcggcattattcaacacggtgagctggtggaaaatacctcgatgaaggcgctgctggcgaagctgaaatcggaaacctttattctcgatctcgcaccgaaaagtccgttaccgaagctcgatggctatcagtatcgactggtcgataccgcgacgctggaagttgaagtgctgcgtgagcaggggatcaacagcgtatttacgcagttaagtgagcagggcattcaggtattaagtatgcgtaacaaagctaaccgtctggaagagctgtttgtttcactggttaatgaaaaacaaggagatcgcgcatga

SEQ ID NO: 482013 - DNA, 663 bp, Shigella sonnei
atgaaagacatagatacactcatcagcaacaatgcactatggtcaaaaatgctggtggaagaggatcccgggttttttgagaaactggcacaagcgcaaaaaccgcgctttctatggattggatgttccgacagtcgcgttcctgcagaacgtttaaccggtcttgagccgggcgaactctttgttcaccgtaatgttgctaacctggtcattcacaccgacctgaactgcctttccgtggttcagtatgcagtggatgtactcgaagttgaacacattattatctgtggccactacggttgcggcggcgtacaagccgccgttgaaaacccggaactggggcttatcaacaactggctgctgcatatccgcgatatctggttcaaacatagctcattgctcggcgaaatgccgcaagagcgccgtctggataccttgtgtgaactgaacgtcatggaacaggtttataacctaggccactccaccattatgcaatcagcgtggaaacgcgggcagaaagttaccattcacggctgggcctacggcattcacgacggcttgctgcgtgatctggatgtcacagcgaccaaccgcgaaacccttgagcaacgttaccgtcacgggatttccaacctcaagctgaaacacgccaaccacaaataa

SEQ ID NO: 482014 - DNA, 537 bp, Shigella sonnei
atgaaacatactgtagaagtaatgatccccgaagcggagattaaagcgcgtatcgccgaactgggtcgtcagattactgagcgttacaaagacagcggcagcgatatggtgctggtgggtctgctgcgtggctcatttatgtttatggcggacctgtgccgtgaagttcaggtatctcatgaagtcgactttatgaccgcctccagctacggtagcggcatgtccaccacccgtgatgtgaaaatcctcaaagatctggatgaagatatccgtggcaaggacgtgctgattgttgaagatatcatcgactcggggaatacactgtcgaaagtgcgtgagatcttaagcctgcgcgaaccgaagtcgctggcgatttgtacgctgctggataaaccgtcccgtcgtgaagtgaacgtcccggtagaatttatcggtttctcgatcccggatgagtttgtggtgggttacggcattgattacgcacagcgttaccgtcatctgccgtatatcggcaaagtgattctgcgggacgagtaa

SEQ ID NO: 482015 - DNA, 2391 bp, Shigella sonnei
atggcaattaacaatacaggctcgcgacgattactcgtcacgctaacagccctttttgcagcgctttgcgggctgtatctactcattggcggaggctggctggtcgcgattggcggctcctggtactaccctatcgctggccttgtgatgctcggcgtcgcctggatgctgtggtgcagtaaacgcgccgcgctttggctatacgcagccctgctgctcggcaccatgatttggggcgtctgggaagttggtttcgacttctgggcgctgactccgcgcagcgatattctggtcttcttcggcatctggctgatcctgccgtttgtctggcgtcgcctggtcattcctgccagcggcgcagttgccgcactggtggtggcactgctgattagcggtagtatcctgacctgggccggatttaacgatccgcaggaaatcaacggcaccttaagcgccgatgccacacctgcggaagctatctcacccgttgccgatcaggactggcctgcctatggtcgcaatcaggaaggtcaacgcttttcacctctgaaacaaattaacgccgataacgtccataatctgaaagaagcctgggtgttccgtactggcgatgtgaagcagccgaacgatccgggcgaaatcaccaatgaagtgacgccgattaaagtgggcgacaccctttacctgtgtaccgctcaccagcgcctgtttgcgctcgatgccgccagcggcaaagagaaatggcattacgatcctgagctgaaaactaacgagtctttccagcacgtaacctgccgtggcgtctcttatcatgaagccaaagcagaaacggcttcgccggaagtgatggcggattgcccgcgtcgtatcattcttccggtcaatgatggtcgactgattgcgattaacgctgaaaacggcaaactgtgcgaaaccttcgccaataaaggcgtgctcaatctgcaaagcaatatgccagacaccaaaccgggtctgtatgaaccgacttcgccaccgattatcaccgataaaaccatcgtgatggccggttcagttaccgataacttctcaacccgcgaaacgtctggcgtgatccgtggttttgatgtcaacaccggggagctgctgtgggcttttgatcccggcgcgaaagatccgaacgcaatcccgtctgacgaacacacctttacctttaactcgccaaactcctgggcaccagcggcctatgacgcgaagctggatctggtctatctgccgatgggcgtgaccacgccggatatctggggcggtaaccgcacaccggaacaggaacgttatgccagctcgattctggcgctgaatgccactaccgggaaactggcgtggagctaccagaccgttcaccacgacctgtgggacatggatcttccggcacagccgacgctggcggacatcaccgttaatggtcagaaagtgccagttatttacgctccggcgaaaaccggcaacatttttgtgctcgatcgtcgcaatggcgaactggtggttccggccccggaaaaaccggtgccgcaaggtgctgcgaaaggcgattacgttactccgacccagccgttctctgaactgagcttccgtccgaagaaagatttgagcggtgcggatatgtggggagccaccatgtttgaccaactggtgtgccgcgtgatgttccaccagatgcgctatgaaggcattttcacgccgccatctgaacagggcacgctggtcttcccgggtaacctgggaatgtttgaatggggcgggatttccgttgatccaaatcgtgaagtggcaattgccaacccaatggcactgccgtttgtttcgaaactgatcccacgcggtccgggtaacccgatggagcagccgaaagatgccaaaggcacgggtacggaatccggcattcagccacagtacggtgtaccgtatggtgtcacgctcaacccgttcctctcaccgtttggtctgccgtgtaaacagccagcatggggttatatctcggcgctggatctgaaaatcaatgaagtggtgtggaagaaacgtattggtacgccgcaagacagtatgccgttcccgatgcctgtaccggtgccgttcaatatgggtatgccgatgctgggcgggccaatctccacggcgggtaacgtgctgtttatcgctgctacggcagataactacctgcgcgcttacaacatgagcaacggtgaaaaactgtggcagggccgtttaccagcgggtggtcaggcgacgccaatgacctatgaagtgaatggcaagcagtatgtggtgatctccgcaggcggtcacggttcatttggtacgaagatgggcgactatattgtggcttatgccctgccggatgatgtgaaataa

SEQ ID NO: 482016 - DNA, 1551 bp, Shigella sonnei
atgcaacgtcgtgatttcttaaaatattccgtcgcgctgggtgtggcttcagccttgccgctgtggagccgcgcagtctttgcggcggaacgcccaacgttaccgatccctgatttgctcacgaccgatgcccgtaatcgcattcagttaactattggcgcaggtcagtctacctttggcgagaaaactgcaactacctggggctataacggcaatctgctggggccggcggtgaaattacagcgcggcaaagcggtaacggttgatatctataaccaactggcggaagagacgacgttgcactggcacgggctggaagtaccgggtgacgtcgacggcggcccgcagggaattattccgccaggcggcaaacgtacggtgacgttgaacgttgatcaacctgccgctacctgctggttccatccacatcaacatggcaagaccgggcgacaggtggcgatggggttggctgggctggtggtaattgaagatgacgagatcctgaaattaatgctgccaaaacagtggggtatcgatgatgttccggtgattgttcaggataaaaaatttaacgctgatgggcagattgattatcaactggatgtgatgaccgccgccgtgggctggtttggcgatacgctgctgaccaacggtgcaatctacccacaacacgctgccccgcgtggctggctgcgcctgcgtttgctcaatggctgtaacgcccgctcgctcaatttcgccaccagcgacaatcgcccgctgtatgtgattgccagcgacggtggtctgctacctgaaccggtgaaggtgagcgagctgccggtgctgatgggcgagcgttttgaagtgctggtggaggttaacgacaacaaaccctttgatctggtgacgctaccggtcagccagattgggatggcgattgcgccgtttgacaagccgcatccggtaatgcggattcagccgattgctattagtgcctccggtgctttgcctgacacattaagtagcctgcctgcgttaccttcgctggaagggctgacggtacgcaagctgcaactttctatggacccgatgctcgatatgatggggatgcagatgctaatggagaaatatggcgatcaggcgatggccggaatggatcacagccagatgatgggccatatggggcacggcaatatgaatcatatgaaccacggcgggaagttcgatttccaccatgccaataaaatcaacggtcaggcgtttgatatgaataagccgatgtttgcggcggcgaaagggcagtacgaacgttgggttatctctggcgtgggcgacatgatgctgcatccgttccatattcacggcatgcagttccgtatcttgtcagaaaatggcaaaccgccagcggctcatcgcgcgggctggaaagataccgttaaggtagaaggcaatgtcagtgaagtgctggtgaagtttaatcacaacgcaccgaaagaacatgcttatatggcgcactgccatctgctggagcatgaagatacggggatgatgttagggtttacggtataa

SEQ ID NO: 482017 - DNA, 309 bp, Shigella sonnei
atggccgtctgcgcaaacagttacgcgctcagcgagtctgaagccgaagatatggccgatttaacggcagtttttgtctttctgaagaacgattgtggttaccagaacttacctaacgggcaaattcgtcgcgcactggtctttttcgcccagcaaaaccagtgggatctcagtaattacgacaccttcgacatgaaagccctcggtgaagacagctaccgcgatctcagcggcattggcattcccgtcgctaaaaagtgcaaagccctggcccgcgattccttaagcctgcttgcctacgtcaaataa

SEQ ID NO: 482018 - DNA, 867 bp, Shigella sonnei
atggccgaaaaaaaacagtggcatgaaacgctacacgaccagtttgggcagtactttgcggtagataacgttctgtatcatgaaaagaccgatcaccaagatctgatcatttttgagaacgctgcatttggtcgcgtaatggcgctggatggcgtagtacaaaccaccgagcgcgacgagtttatctatcatgagatgatgacccatgttccgctactggcccacggtcacgcgaaacatgtgctgattatcggcggcggcgacggtgccatgctgcgtgaagtaacccgacataaaaacgttgagtcaatcacgatggtggaaatcgatgcgggtatcgtgtcgttctgccgtcagtatctgcccaaccataacgccggtagctacgacgatccgcgctttaagctggtgatcgacgatggcgtcaatttcgttaatcaaaccagccagacctttgatgtcattatctccgactgcaccgatcctatcggtcccggcgaaagtctgttcacctcagcattttatgaaggctgcaaacgttgcctgaatcctggcggtatcttcgtcgcacaaaacggcgtctgctttttacagcaggaagaagccatcgacagctatcgcaaactcagccattacttcagcgacgttggcttttatcaggcggcgatcccgacctattacggcggtatcatgacttttgcatgggcgacagataacgacgccttacgccatctctcaaccgaaattattcaggcgcgttttctcgcttctggcctgaaatgccgttattacaatccggcaatccatacggcagcttttgccttacctcagtatctgcaagacgcactggcttcacagccgtcctaa

SEQ ID NO: 482019 - DNA, 795 bp, Shigella sonnei
ttgaaaaaactgaaactgcatggctttaataatctgaccaaaagtctgagtttttgtatttacgatatctgctacgccaaaactgccgaagagcgcgacggttatattgcttatatcgatgaactctataatgccaaccgtctgaccgaaatcctgtcagaaacctgttccattatcggggccaatattcttaacatcgcccgccaggattacgaaccacagggtgccagcgtcactattctggtgagtgaagaaccggttgacccgaaactcatcgacaaaacagaacaccccggcccactgccagaaacggtcgttgcccatctcgataaaagtcatatttgcgtacatacctacccggaaagtcatcctgaaggcggtttatgtaccttccgcgccgatattgaagtctctacctgcggcgtgatttctccgctgaaggcgctgaattacctgatccaccagcttgagtccgatatcgtaaccattgattatcgcgtgcgcggttttacccgcgacattaacggtatgaagcactttatcgaccatgagattaattcgattcagaactttatgtctgacgatatgaaggcgctgtatgacatggtggatgtgaacgtctatcaggaaaatatcttccataccaagatgttgcttaaagagttcgaccttaagcactacatgttccacaccaaaccggaagatttaaccgacagcgagcgccaggaaattaccgctgcgctgtggaaagaaatgcgcgagatttattacgggcgcaatatgccagctgtttaa

SEQ ID NO: 482020 - DNA, 363 bp, Shigella sonnei
atggattacgaatttctgcgcgatattaccggagtggtaaaggtgcgtatgtccatggggcatgaagtggtcgggcactggtttaatgaagaggtgaaagaaaacctggctttgcttgatgaagtggaacaagcagcgcacgcactgaaaggtagcgaacggtcctggcaacgggcagggcatgaatacaccctgtggatggacggtgaagaggtgatggttcgcgccaatcaactggaattcgctggcgatgaaatggaagaagggatgaactactacgacgaagaaagcctgtcgctatgcggcgttgaggattttctgcaggtcgtggcggcttaccgcaatttcgtgcagcagaagtaa

SEQ ID NO: 482021 - DNA, 2598 bp, Shigella sonnei
gtgctagaagaataccgtaagcacgtagctgagcgtgccgctgaggggattgcgcccaaacccctggatgcaaaccaaatggccgcacttgtagagctgctgaaaaacccgcccgcgggcgaagaagaattcctgttagatctattaaccaaccgtgttccccctggcgtcgatgaagccgcctatgtcaaagcaggcttcctggctgctatcgctaaaggcgaagccaaatcccctctgctgactccggaaaaagccatcgaactgctgggtaccatgcagggtggttacaacattcatccgctgatcgacgcgctggatgatgccaaactggcaccgatcgctgccaaagcactttctcacacactgctgatgttcgataacttctatgacgtagaagagaaagccaaagcaggcaacgaatatgcgaagcaggtaatgcagtcctgggcggatgccgaatggttcctgaatcgcccggcgctggctgaaaaactgaccgttaccgtcttcaaagtcactggcgaaaccaacactgatgacctttctccggcaccggatgcgtggtcgcgcccggatatcccactgcacgcgctggcgatgctgaaaaacgcccgtgaaggtattgagccagaccagccaggtgttgttggcccgatcaagcaaatcgaagctctgcaacagaaaggtttcccgctggcgtacgtcggtgacgttgtgggtacgggttcatcgcgtaaatccgccacgaactccgttctgtggtttatgggcgatgatattccacatgtgccgaacaaacgcggcggtggtttgtgcctcggcggtaaaattgcacccatcttctttaacacgatggaagacgcgggtgcactgccaatcgaagtcgacgtctctaacctgaacatgggcgacgtgattgacgtttacccgtacaaaggtgaagtgcgtaaccacgaaaccggcgaactgctggcgaccttcgaactgaaaaccgacgtgctgattgatgaagtgcgtgctggtggccgtattccgctgattatcgggcgtggcctgaccaccaaagcgcgtgaagcacttggtctgccgcacagtgatgtgttccgtcaggcgaaagatgtcgctgagagcgatcgcggcttctcgctggctcagaaaatggtaggtcgtgcctgcggtgtgaaaggtattcgtccgggcgcgtactgcgaaccgaaaatgacttctgtaggttcacaggacaccaccggcccgatgacccgtgatgaactgaaagacctggcgtgcctgggcttctcggctgacctggtgatgcagtctttctgccataccgcggcgtatccgaagccagttgacgtgaacacgcaccacacgctgccggacttcattatgaaccgtggtggtgtgtcgctgcgtccgggtgacggcgtaatccactcctggctgaaccgtatgctgctgccggataccgtcggtaccggtggtgactcccatacccgtttcccgatcggtatctctttcccggcgggttctggtctggtggcatttgcagccgcaacaggcgtaatgccgctggatatgccggaatccgttctggtgcgcttcaaaggcaaaatgcagccgggcatcaccctgcgcgatctggtacacgcgatcccgctgtatgcgatcaaacaaggtctgctgaccgttgagaagaaaggcaagaaaaacatcttctctggtcgcattctggaaattgaaggtctgccggatctgaaagttgagcaggcatttgaactgaccgatgcgtccgctgagcgttctgccgctggttgtactatcaagctgaacaaagaaccgatcatcgaatacctgaactctaacatcgtcctgctgaagtggatgatcgcggaaggttatggcgatcgtcgtaccctcgaacgtcgtattcagggcatggaaaaatggctggcgaatcctgagctgctggaagccgatgcagatgctgaatacgcggcagtgatcgacatcgatctggcggatattaaagagccaatcctctgtgcaccgaacgacccggacgacgcacgtccgctgtctgcggtacagggcgagaagatcgacgaagtgtttatcggttcttgcatgactaacatcggtcacttccgtgctgcgggtaaactgctggatgcgcacaaaggccagttgccgacccgcctgtgggtggcaccgccaacccgcatggacgccgcacagttgactgaagaaggctactacagcgtcttcggtaagagcggggctcgtatcgagatcccgggctgttctctgtgtatgggtaaccaggcgcgtgtagcagacggtgcgacggtggtttccacctctacccgtaacttcccgaaccgtctggggactggcgcgaatgtcttcctggcttctgcagaactggcggctgttgcggcgctgattggcaaactgccgacgccggaagagtaccagacctacgttgcgcaagtagataaaactgccgttgatacttatcgttatctgaacttcaaccagctttctcagtacaccgaaaaagccgatggggtgattttccagactgcggtgtaa

SEQ ID NO: 482022 - DNA, 1758 bp, Shigella sonnei
atgaaaatgactttgccgtttaaaccccatgtgctggcactaatttgcagtgccgggctttgtgccgcctctgccgggctatatataaaaagccgcacagtggaagcgcctgtggaaacgcaatcgacacaacagactgcgcctgacatcaccgcagttacgcttcctgcaacggtttccgcaccgcccgtaacgcccgccgtcgtcaaatccgcattcagcactgcacaaatcgatcaatgggttgcgcctgtcgcgctgtaccccgattctctgctttcacaagtgttaatggcatcaacctatccggcaaacgttgctcaagcagtgcaatggtcgcacgataatccacttaaacaaggcgatgctgctattcaggcggtatctgaccagccgtgggacgccagcgttaaatcactggtggcctttccacaattgatggcattgatgggcgaaaacccgcaatgggtgcaaaacctgggcgatgcttttctggcgcagccgcaggacgtgatggactcggtacagcgattgcggcaactggcgcaacaaaccggctcgctgaagtcatcaaccgaacagaaagttattaccacaacgaagaaagctgtaccggtaaaacagacagtcacggcacccgtcataccatccaataccgttttaactgccaaccccgtcattacagagccggcaacaaccgtcatttccattgagcccgccaatcctgatgtggtctatattcccaactacaacccaaccgtggtttacgggaactgggccaatactgcgtatccgccggtttatctgccaccaccagccggagaaccgtttgttgacagctttgtgcgcggattcggctatagcatgggcgttgctaccacgtacgcactatttagcagcatcgactgggatgacgacgatcatgaccatcatcatcatgacgatgatgattatcatcaccacgatggcggtcatcgtgacggtaatggctggcaacacaacggcgacaacatcaatatcgacgtcaacaatttcaaccgtatcaccggtgagcatcttactgataagaatatggcatggcggcacaatccaaactaccgtaatggtgtgccctatcatgatcaggatatggcaaagcggtttcatcaaaccgatgtcaacggcggaatgagtgccacgcagctacctgctccaacacgcgacagccagcgtcaggcggcagcaagtcagtttcagcaacgaacacacgccgcccccgtcattacacgagatacccaacgtcaggcagcggcacagcggtttaatgaagctgaacactatgggagctatgacgacttccgcgacttcagccgtcgccaaccactgacccagcaacaaaaggacgccgctcgtcagcgttatcaatcggcctctcctgagcagcgccaggcggttcgcgagaaaatgcagactaacccacagaaccagcagcgaagagaggcagcgcgtgagcgtattcagtctgcaactcccgaacagcgccaggtgtttaaggaaaaagtacagcagcgcccactgaaccaacagcaacgtgataacgcccgccagcgtatacaatcggcatcacctgaacaacgtcaggtttttcgggaaaaagttcaggagagccgcccacaacgtctaaacgacagtaaccatactgtcaggctgaataacgagcaacggtcagcagtacgcgaacgtctctctgagcgcggagcaaggcgacaggaaaggtaa

SEQ ID NO: 482023 - DNA, 1425 bp, Shigella sonnei
atgagtactgaaatcaaaactcaggtcgtggtacttggggcaggccccgcaggttactccgctgccttccgttgcgctgatttaggtctggaaaccgtaatcgtagaacgttacaacacccttggcggtgtttgcctgaacgtcggctgtatcccttctaaagcactgctgcacgtagcaaaagttatcgaagaagccaaagcgctggctgaacacggtatcgtcttcggcgaaccgaaaaccgatattgacaagattcgtacttggaaagagaaagtgatcaatcagctgaccggtggtctggctggtatggcgaaaggccgcaaagtcaaagtggtcaacggtctgggtaaattcaccggggctaacaccctggaagttgaaggtgagaacggcaaaaccgtgatcaacttcgacaatgcgatcattgcagcgggttctcgcccgatccaactgccgtttattccgcatgaagatccgcgtatctgggactccactgacgcgctggaactgaaagaagtaccagaacgcctgctggtaatgggtggcggtatcatcggtctggaaatgggcaccgtataccacgcgctgggttcacagattgacgtggttgaaatgttcgaccaggttatcccggcagctgacaaagacatcgttaaagtcttcaccaagcgtatcagcaagaaattcaacctgatgctggaaaccaaagttaccgccgttgaagcgaaagaagacggtatttatgtgacgatggaaggcaaaaaagcacccgctgaaccgcagcgttacgacgccgtgctggtagcgattggtcgtgtgccgaacggtaaaaacctcgacgcaggcaaagctggcgtggaagtggacgaccgtggtttcatccgcgttgacaaacagctgcgtaccaacgtaccgcacatctttgctatcggcgatatcgttggtcagccgatgctggcacacaaaggtgttcacgaaggtcacgttgccgctgaagttatcgccggtaaaaaacactacttcgatccgaaagttatcccgtctatcgcctataccgaaccagaagttgcatgggtaggtctgactgagaaagaagcgaaagagaaaggcatcagctatgaaaccgccaccttcccgtgggctgcttctggtcgtgctatcgcttccgactgcgcagacggtatgaccaagctgattttcgacaaagaatctcaccgtgtgatcggtggtgcgattgtcggtactaacggcggtgagctgctgggtgaaatcggtctggcaatcgaaatgggttgtgatgctgaagacatcgcactgaccatccacgcgcacccgactctgcacgagtctgtgggcctggcggcagaagtgttcgaaggtagcattaccgacctgccgaacccgaaagcgaagaagaagtaa

SEQ ID NO: 482024 - DNA, 1893 bp, Shigella sonnei
atggctatcgaaatcaaagtaccggacatcggggctgatgaagttgaaatcaccgagatcctggtcaaagtgggcgacaaagttgaagccgaacagtcgctgatcaccgtagaaggcgacaaagcctctatggaagttccgtctccgcaggcgggtatcgttaaagagatcaaagtctctgttggcgataaaacccagaccggcgcactgattatgattttcgattccgccgacggtgcagcagacgctgcacctgctcaggcagaagagaagaaagaagcagctccggcagcagcacccgcggctgcggcggcaaaagacgttaacgttccggatatcggcagcgacgaagttgaagtgaccgaaatcctggtgaaagttggcgataaagttgaagctgaacagtcgctgatcaccgtagaaggcgataaagcttctatggaagttccggctccgtttgctggcaccgtgaaagagatcaaagtgaacgtgggtgacaaagtgtctaccggctcgctgattatggtcttcgaagtcgcgggtgaagcaggcgcggcagctccggcggctaaacaggaagcagctccggcagcggcccctgcatcagcggctggcgtgaaagaagttaacgttccggatatcggcggtgacgaagttgaagtgaccgaagtgatggtgaaagtgggcgacaaagttgccgctgaacaatcgcttatcaccgtagaaggcgataaagcttctatggaggtcccggctccgtttgcaggcgtcgtgaaggaactgaaagtcaacgttggcgataaagtgaaaactggctcgctgattatgatcttcgaagttgaaggcgcagcgcctgcggcagctcctgcgaaacaggaagcggcagcgccggctccggcagcgaaagctgaagccccggcagcagctccggctgcgaaagccgaaggcaaatctgaatttgctgaaaacgacgcttacgttcacgcgactccgctgatccgccgtctggcacgcgagtttggcgttaacctggcgaaagtgaagggcactggtcgtaaaggtcgtatcctgcgcgaagacgttcaggcttacgtgaaagaagctatcaaacgtgcagaagcagctccggcggcgactggcggtggtatccctggcatgctgccgtggccgaaggtggacttcagcaagtttggcgaaatcgaagaagtggaactgggccgtatccagaaaatttctggtgctaacctgagccgtaactgggtgatgatcccgcatgttacccacttcgacaaaaccgatatcaccgagctggaagcgttccgtaaacagcagaacgaagaagcggcgaaacgtaagctggatgtgaagctcaccccggttgtcttcatcatgaaagccgttgctgcagctcttgagcagatgcctcgcttcaatagttcgctgtcggaagacggtcagcgtctgaccctgaagaaatacatcaacatcggtgtggcggtggataccccgaacggtctggttgttccggtattcaaagacgtcaacaagaaaggcatcatcgagctgtctcgcgagctgatgactatttctaagaaagcgcgtgacggtaagctgactgcgggcgaaatgcagggcggttgcttcaccatctccagcatcggcggcctgggtactacccacttcgcgccgattgtgaacgcgccggaagtggctatcctcggcgtttccaagtccgcgatggagccggtgtggaatggtaaagagttcgtgccgcgtctgatgctgccgatttctctctccttcgaccaccgcgtgatcgacggtgctgatggtgcccgtttcattaccatcattaacaacacgctgtctgacattcgccgtctggtgatgtaa

SEQ ID NO: 482025 - DNA, 2664 bp, Shigella sonnei
atgtcagaacgtttcccaaatgacgtggatccgatcgaaactcgcgactggctccaggcgatcgaatcggtcatccgtgaagaaggtgttgagcgtgctcagtatctgatcgaccaactgcttgctgaagcccgcaaaggcggtgtaaacgtagccgcaggcacaggtatcagcaactacatcaacaccatccccgttgaagaacaaccggagtatccgggtaatctggaactggaacgccgtattcgttcagctatccgctggaacgccatcatgacggtgctgcgtgcgtcgaaaaaagacctcgaactgggcggccatatggcgtccttccagtcttccgcaaccatttatgatgtgtgctttaaccacttcttccgtgcacgcaacgagcaggatggcggcgacctggtttacttccagggccacatctccccgggcgtgtacgctcgtgctttcctggaaggtcgtctgactcaagagcagctggataacttccgtcaggaagttcacggcaatggcctctcttcctatccgcacccgaaactgatgccggaattctggcagttcccgaccgtatctatgggtctggggccgattggtgctatttaccaggctaaattcctgaaatatctggaacaccgtggcctgaaagatacctctaaacagaccgtttacgcgttcctcggcgacggtgaaatggacgaaccggaatccaaaggtgcgatcaccatcgctacccgtgaaaaactggataacctggtcttcgttatcaactgtaacctgcagcgtcttgacggcccggtcaccggtaacggcaagatcatcaacgaactggaaggcatcttcgaaggtgctggctggaacgttatcaaagtgatgtggggtagccgttgggatgaactgctgcgtaaagataccagcggtaaactgatccagctgatgaacgaaaccgttgacggcgactaccagaccttcaaatcgaaagatggtgcgtacgttcgtgaacacttcttcggtaaatatcctgaaaccgcagcactggttgcagactggactgacgagcagatctgggcactgaaccgtggtggtcacgatccgaagaaaatctacgctgcattcaagaaagcgcaggaaaccaaaggcaaagcgacagtaatccttgctcataccattaaaggttacggcatgggcgacgcggctgaaggtaaaaacatcgcgcaccaggttaagaaaatgaacatggacggcgtgcgtcacatccgcgaccgtttcaatgtgccggtgtctgatgcagatatcgaaaaactgccgtacatcaccttcccggaaggttctgaagagcatacctatctgcacgcacagcgtcagaaactgcacggttatctgccaagccgtcagccgaacttcaccgagaagcttgagctgccgagcctgcaagacttcggcgcgctgctggaagagcagagcaaagagatctctaccactatcgctttcgttcgtgccctgaacgtaatgctgaagaacaagtcgatcaaagatcgtctggtaccgatcatcgccgacgaagcgcgtactttcggtatggaaggtctgttccgtcagattggtatttacagcccgaacggtcagcagtacatcccgcaggaccgcgagcaggttgcttactataaagaagacgagaaaggtcagattctgcaggaagggatcaacgagctgggcgcagggtgttcctggctggcagcggcgacctcttacagcaccaacaatctgccgatgattccgttctacatctattactcgatgttcggcttccagcgtatcggcgatctgtgctgggcggctggcgaccagcaagcgcgtggcttcctgatcggcggtacttccggtcgtaccaccctgaacggtgaaggtctgcagcacgaagatggtcacagccacattcagtcgctgactatcccgaactgtatctcttacgacccggcttacgcttacgaagttgctgtcatcatgcatgacggtctggagcgtatgtacggtgaaaaacaagagaacgtttactactacatcactacgctgaacgaaaactaccacatgccggcaatgccggaaggtgctgaggaaggtatccgtaaaggtatctacaaactcgaaaccattgaaggtagcaaaggtaaagttcagctgctgggctccggttctatcctgcgtcacgtccgtgaagcggcagagatcctggcgaaagattacggcgtaggttctgacgtttatagcgtgacctccttcaccgagctggcgcgtgatggtcaggattgtgaacgctggaacatgcttcatccgctggaaactccgcgcgttccgtatatcgctcaggtgatgaacgacgctccggcagtggcatctaccgactatatgaaactgttcgctgagcaggtccgtacttacgtaccggctgacgactaccgcgtactgggtactgatggcttcggtcgttccgacagccgtgagaacctgcgtcaccacttcgaagttgatgcttcttatgtcgtggttgcggcgctgggcgaactggctaaacgtggcgaaatcgataagaaagtggttgctgacgcaatcgccaaattcaacatcgatgcagataaagttaacccgcgtctggcgtaa

SEQ ID NO: 482026 - DNA, 765 bp, Shigella sonnei
atggcctacagcaaaatccgccaaccaaaactctccgatgtgattgagcagcaactggagtttttgattctcgaaggcactctccgcccgggcgaaaaactcccaccggaacgcgaactggcaaaacagttcgacgtctcccgtccctccttgcgtgaggcgattcaacgtctcgaagcgaagggcttgttgcttcgtcgccagggtggcggcacttttgtccagagcagcctatggcaaagcttcagcgatccgctggtggagctgctctccgaccatcctgaatcacagtatgacttgctcgaaacacgacacgccctggaaggtatcgccgcttattacgccgcgctgcgtagtaccgatgaagacaaggaacgcatccgtgaactccaccacgccatagagctggcgcagcagtctggcgatctggacgcggaatcaaacgccgtactccagtatcagattgccgtcaccgaagcggcccacaatgtggttctgcttcatctgctaaggtgtatggagccgatgttggcccagaatgtccgccagaacttcgaattgctctattcgcgtcgcgagatgctgccgctggtgagtagtcaccgcacccgcatatttgaagcgattatggccggtaagccggaagaagcgcgcgaagcatcgcatcgccatctggcctttatcgaagaaattttgctcgacagaagtcgtgaagagagccgccgtgagcgttctctgcgtcgtctggagcaacgaaagaattag

SEQ ID NO: 482027 - DNA, 1371 bp, Shigella sonnei
atggaaggtcaacagcacggcgagcagctaaagcgcggccttaaaaaccgccatattcagcttatcgcgctgggtggcgcgatagggacagggctattcctgggtagcgcctccgtaatacagtccgcagggccagggattatcctgggttacgccattgctggttttatcgcctttctgatcatgcgtcagctgggtgaaatggtggtcgaagaacctgtcgcaggctcctttagccactttgcttataaatactggggcagttttgccggtttcgcctctggctggaactactgggtactgtacgttttagttgccatggcagagctgactgccgtgggtaaatacattcagttctggtatccggaaatcccaacctgggtttctgccgccgtattctttgtggtgattaacgccatcaacctgaccaacgttaaagtgtttggcgagatggagttctggtttgccattatcaaagttattgcgatagtagcgatgatcatcttcggcggctggctgctgttcagtggcaacggcggcccgcaggcgagcgttagcaacctgtgggatcaaggtggtttcctgccgcacggcttcaccggactggtgatgatgatggcgattatcatgttctcgttcggtggtctggaactggtggggatcaccgcagcagaagctgataacccggagcaaagtatcccgaaagcgactaaccaggttatctaccgcatcctgattttctatattggttcgttagccgttctgctctcactgatgccgtggacccgcgttaccgccgataccagtccgtttgtgctgatcttccacgagttaggcgatacctttgtggcgaatgcgctgaacatcgtggtactgactgcggcgctctccgtgtacaacagctgcgtatattgcaacagccgtatgctgtttggtctggcacaacagggtaatgcgccaaaagcgctggcgtctgtcgataaacgcggcgtaccggttaacaccattctggtgtctgcgctggttacagcattgtgcgtattgattaactatcttgctccggaatccgcatttggcctgttaatggcactggtggtatccgcactggtgatcaactgggcgatgatcagtctggcgcatatgaagttccgtcgcgccaagcaggaacaaggcgtggtaactcgcttccctgctctgctttatccgctgggtaactggatctgcctgctgtttatggcggcggtactggtgattatgctgatgaccccaggaatggcgatttcggtatacctgatcccggtatggctgatcgtgttaggtatcggctatctgtttaaagagaaaaccgccaaagccgtaaaagcgcattaa

SEQ ID NO: 482028 - DNA, 855 bp, Shigella sonnei
atgacgctatttacaaccttactggtgttaattttcgagcgcctgtttaagttgggcgagcactggcagcttgatcatcgtcttgaagcgttctttcggcgggtgaaacatttttctctcgggcgcacgttaggcatgaccattattgcgatgggcgtgacttttttactgttacgcgcattgcagggagtattgttcaacgttcccacgctgctggtgtggctgctgattggtttgctgtgtattggcgcaggtaaagttcgtcttcattatcatgcttatctgacagctgcttcacgtaatgatagccatgcccgtgccacgatggctggcgaactcaccatgattcacggcgtcccggcaggctgcgacgaacgtgagtatttgcgtgagctgcaaaatgcattgctgtggattaactttcgtttttatcttgcaccgctgttctggttgattgtggggggaacctggggacccgttacgctgatggggtatgcgtttttgcgtgcatggcaatactggctggcgcgataccagacgccgcatcatcgtttacagtccggcattgatgccgtgcttcatgtactggattgggtgccggttcgtcttgcgggtgtggtatatgccttgatcggtcatggggagaaagcgttaccggcctggtttgcttcgctgggtgacttccatacttcgcagtatcaggtgttaacgcgtctggcgcagttctctctggcgcgtgaaccgcatgtcgataaggtggagacgccgaaggcagcggtttcaatggcgaagaaaacctcgttcgtggtcgtggtggtgattgcgctactgacgatttacggagcgttggtgtaa

SEQ ID NO: 482029 - DNA, 552 bp, Shigella sonnei
atgttgttagaacaggggtggctggttggcgcgcgccgcgttccctcaccacattacgattgccgcccggatgacgaaacacccaccctgctggtggtgcacaatattagcctgccgccaggcgagtttggcggtccgtggatcgacgcattattcactggaactattgatccgcaggcacatcctttctttgctgagatcgcccatttgcgcgtctccgctcactgtttgattcgccgtgatggtgaaatagtccagtatgttcctttcgataaacgtgcctggcatgcgggagtctctcagtatcaggggcgtgaacgctgcaatgatttttctattgggattgagcttgaaggcaccgatactctggcgtataccgatgcgcagtatcaacagcttgcggcggttacgcgggcactgatagatcgctatcccgatatcgctaataacatgacgggccattgtgatattgcgccggatcggaaaaccgatcccggtcctgcatttgattgggcacggtttcgtgcgctggtcagcaaggagacaacatga

SEQ ID NO: 482030 - DNA, 894 bp, Shigella sonnei
atgccgcctcgccgctataaccctgacacccgacgtgacgagctgctggaacgcattaatctcgatatccccggcgcggtggcccaggcgctgcgggaagatttaggcggaacagtcgatgccaacaatgacattacggcaaaacttttaccggaaaactctcgctctcatgccacggtgagcacccgcgagaatggcgtattttgcggcaaacgctgggttgaagaggtgtttattcaactggcaggcgacgatgtcaccataatctggcatgtggatgacggcgatgtcatcaacgccaatcaacccttgttcgaacttgaaggcccatcccgcgtgctgttaacgggcgaacgcactgcgcttaattttgtgcaaaccctttcaggagttgccagtaaggtacgccactatgtcgaattactggaaggcaccaacacgcagttgttggatacgcgcaaaaccttacctggcctgcgttcagctctgaaatacgcggtactttgcggcggcggagcgaatcaccgtctggggctttctgatgccttcctgatcaaagaaaatcatattattgcctccggctcagtgcgccaggccgtcgaaaaagcgtcctggctgcacccggatgcgccagtagaagtcgaagtagagaatctggaagaacttgatgaagccctgaaagcaggagccgatatcatcatgctggataacttcgaaacagaacagatgcgcgaagccgtcaaacgcaccaacggcaaggcgctactggaagtgtctggcaacgtcactgacaaaacactgcgcgaatttgccgaaacgggcgtggactttatctccgtcggtgcgctaactaaacacgtacaagcactcgacctttcaatgcgttttcgctaa

SEQ ID NO: 482031 - DNA, 441 bp, Shigella sonnei
atggacaagcaacgcggttttacacttatcgaactgatggtggttattggcatcattgccattttaagcgccattggtattcccgcttatcaaaactacctgcgcaaagctgcactcaccgacatgctacaaacctttgtgccttaccgtacagccgtagagttgtgcgcgctggaacatggtggattagatacctgcgacggtggcagcaatggcattccctcgcctaccaccacccgctatgtttcagccatgagtgtggcaaaaggcgtggtgtcgctgaccgggcaagaaagtctcaatggactaagcgtcgtcatgacaccgggttgggataacgcaaacggcgtcaccggctgggcgcgcaactgcaatattcaaagtgacagcgcattgcagcaagcctgcgaagatgtcttccgctttgatgacgccaactaa

SEQ ID NO: 482032 - DNA, 912 bp, Shigella sonnei
atgaatattccacagctcaccgccctgtgtctgcgttatcagggagtcttgctggatgccagcgaagaggtggttcatgttgcggtagtcgatgcaccttcgcatgagttgctggacgcattgcatttcgctaccaccaaacgtattgagatcacctgctggacgcgccaacaaatggaaggccacgccagtcgcacacaacagacattgcccgtagctgttcaggagaagcatcagcccaaagcagagttgctgactcgaacgttacaatctgcgctggaacaacgtgcgtctgatattcatatcgaaccagcggacaatgcctaccgcatccgcttgcgtatcgacggcgtattgcatcctttaccggatgtttcaccggatgccggagtcgcattaaccgccagattaaaagtgctgggaaacctggatattgcggaacatcgcctgccgcaggacgggcaattcactgtcgaactggcaggaaacgccgtctcatttcgtattgcgaccttaccatgtcggggtggtgaaaaggtggtattaaggttgttacagcaggtgaaccaggcactggatgttaacacgctgggaatgcagccgttacaactggcggactttgctcatgccttgcaacaaccacagggactggtgctggtaactggccctacaggcagcggcaaaacggtcacgctttatagtgccctgcaaaagctgaataccgctgacattaatatttgtagcgtcgaagatccggttgagatccccatagccggactaaaccagacgcaaatccatccgcgtgccgggctcacctttcagggcgttttgcgtgcgttattgcgccaggatcctgacgtcatcatgatcggagagatccgctatggctttaacggcagaaattgccattaa

SEQ ID NO: 482033 - DNA, 504 bp, Shigella sonnei
atggctttaacggcagaaattgccattaaagccgcgcaaaccggtcacctggtgttgtctaccctacacactaattccacctgcgaaacgctggtacgtttacagcaaatgggagtcgcccgctggatgctctcatcagcgcttacgctggtaatagcccagcgtctggtacgtaaactttgcccacattgtcgccagcagcaaggggagcccatccatattccagtcaatgtatggccgtcgccgctgccccactggcaggcacccggttgtgtacattgctaccacggtttttatggtcgtacggccttatttgaagttctgcccataacgccggtcattcgtcagcttatttccgctaataccgacgttgaatcgctggaaacgcacgcacgacaggcgggtatgcgtacgctttttgaaaacggctgcctggccgtggagcaaggcttaaccacctttgaagagttaatccgcgtactggggatgccgcatggcgagtaa

SEQ ID NO: 482034 - DNA, 1107 bp, Shigella sonnei
atggcactacagcaacagatggttaccccacttagcctgaagcgaatcgccatcaattctgcgcagtggcgaggagataaaagcgcggaagtcattcatcaactggcgacgctactcaaagccgggttaacgctttctgaagggctggcactgctggcggaacagcatcccagtaagcaatggcaagcgttgctgcaatcgctggcgcacgatctcgaacagggcattgctttttccaatgccttattaccctggtcagaggtatttccgccactctatcaggcgatgatccgcacgggtgaactgaccggtaagctggatgaatgctgctttgaactggcgcgtcagcaaaaagcccagcgtcagttgaccgacaaagtgaaatcagcgttacgttatcccatcatcattttagcgatggcaatcatggtggttgtggcaatgctgcattttgttctgccggagtttgccgctatctataagaccttcaacaccccactaccggcactaacgcaggggatcatgacgctggcagactttagtggcgaatggagctggctgctggtgttgttcggctttctgctggcgatagccaataagttgctgatgcgccgaccgacctggcttatagtgcggcagaaattgctgttacgcatcccgattatgggttcactgatgcggggacaaaaactcacgcagatctttacgattctggcgctgacacaaagtgcaggcattacttttttgcagggcgtagagagcgtcagagaaacaatgcgctgcccgtactgggtgcaacttctgacacaaatccagcacgatatcagtaacggtcatcccatctggctggcgctaaaaaataccggggagtttagcccgctctgtttgcaattagtgagaacaggagaggcatccggctcgctggacctcatgttagacaacctcgcccatcatcatcgggataacacaatggcgctggcggataacctcgcagccttactggaaccgacgttgctgatcataacgggaggaattatcggtacgctggtggtggcgatgtatctgccaattttccatttaggcgatgcgatgagtgggatgggataa

SEQ ID NO: 482035 - DNA, 1044 bp, Shigella sonnei
atgcgtattgaagaagatctgaagttaggttttaaagacgttctcatccgccctaaacgctccactcttaaaagccgttccgatgttgaactggaacgtcaattcaccttcaaacattcaggtcagagctggtccggcgtgccgattatcgccgcaaatatggacaccgtaggtacattttctatggcctctgcgctggcttcttttgatattttgactgctgtgcataaacactattctgtcgaagagtggcaagcgtttatcaacaattcttccgctgatgtgctgaaacatgtgatggtttctaccggtacgtctgatgcggatttcgaaaaaactaaacagattctcgacctgaacccggcattaaacttcgtttgtattgatgtggcgaatggttattccgaacacttcgtgcagttcgttgcgaaagcgcgtgaagcgtggccgaccaaaaccatttgtgctggcaacgtagtgactggtgaaatgtgtgaggagcttatcctctccggtgctgatatcgttaaagttggcattggcccaggttctgtttgtacaactcgcgtcaaaacaggcgtcggttatccgcagctttctgcggtaatcgaatgtgccgatgcggcgcacggtctgggcggaatgatcgtcagcgacggtggctgcaccacgccgggcgatgtcgcaaaagcctttggcggcggtgccgatttcgtcatgcttggcggcatgctggcgggccacgaagagagcggcggtcgcatcgttgaggagaacggcgagaaatttatgctgttctacggcatgagctccgagtctgcgatgaaacgtcacgttggcggcgttgcggaatatcgcgcagcagaaggtaaaaccgttaagctgccgctgcgaggcccggttgaaaataccgcgcgtgatattttgggcggcctgcgttcagcttgtacatacgttggggcttcacgcctgaaagaactgaccaagcgcaccacatttatccgtgtgcaggaacaagaaaaccgcatcttcaacaacctgtaa

SEQ ID NO: 482036 - DNA, 621 bp, Shigella sonnei; identical to SEQ ID NO: 457698

SEQ ID NO: 482037 - DNA, 744 bp, Shigella sonnei
atgcagacccaggtcctttttgaacatccactaaatgaaaaaatgcgtacatggctgcgcattgagtttttgattcagcaactcaccgttaatttacccatcgttgaccacgctggcgcgctgcatttcttccgtaatgtcagtgaattactggatgttttcgagcgcggcgaagtccgcactgagctgttgaaagaacttgaccggcagcaacgtaaactccagacctggattggcgtgcctggcgtggaccagagccgtattgaagcattaattcagcagttaaaagcggcggggagcgtattaatttccgcgccgcgtatcgggcaatttctgcgtgaagatcgtttgattgctctggtgcgtcagcgactgagcatcccaggcggctgttgcagctttgatttacctacattgcacatttggctgcatctaccccaggcgcagcgcgacagccaggtagaaacctggattgccagcctgaacccgctcacccaggcacttaccatggtgctggatttaattcgccagtcggcccccttccgtaaacaaaccagtctgaatggtttttatcaggataacggtggcgatgccgacttgctgcgcctgaatctgtcgctcgattcacagctttatccgcaaatttccggacataagagccgttttgccattcgttttatgccgctggacactgaaaacggacaggtaccggaacgtctggatttcgaactggcctgttgctaa

SEQ ID NO: 482038 - DNA, 198 bp, Shigella sonnei; identical to SEQ ID NO: 457696

SEQ ID NO: 482039 - DNA, 390 bp, Shigella sonnei
atgaaaaagctgcaaattgcggtaggtattattcgcaacgagaacaatgaaatctttataacgcgtcgcgcagcagatgcgcacatggcgaataaactggagtttcccggcggtaaaattgaaatgggcgaaacgccggaacaggcggtagtgcgtgaacttcaggaagaagtcgggattaccccacaacatttttcgctatttgaaaaactggaatatgaattcccggacaggcatataactctgtggttctggctggtcgaaagctgggaaggggagccgtggggtaaagaagggcaacccggtgagtggatgtcgctagtcggtcttaatgccgatgattttccgccagccaatgaaccggtaattgcgaagcttaagcgtctgtag

SEQ ID NO: 482040 - DNA, 2706 bp, Shigella sonnei
atgctaatcaaattgttaactaaagttttcggtagtcgtaacgatcgcaccctgcgccggatgcgcaaagtggtcaacatcatcaatgccatggaaccggagatggaaaaactctccgacgaagaactgaaagggaaaaccgcagagtttcgtgcacgtctggaaaaaggcgaagtgctggaaaatctgatcccggaagctttcgccgtggtacgtgaggcaagtaagcgcgtctttggtatgcgtcacttcgacgttcagttactcggcggtatggttcttaacgaacgctgcatcgccgaaatgcgtaccggtgaaggtaaaaccctgaccgcaacgctgcctgcttacctgaacgcactaaccggtaaaggcgtgcacgtagttaccgtcaacgactacctggcgcaacgtgacgccgaaaacaaccgtccgctgtttgaattccttggcctgactgtcggtatcaacctgccgggcatgccagcaccggcaaagcgcgaagcttacgcagctgacatcacttacggtacgaacaacgaatacggctttgactacctgcgcgacaatatggcgttcagccctgaagaacgtgtacagcgtaaactgcactatgcgctggtggacgaagtggactccatcctgatcgatgaagcgcgtacaccgctgatcatttccggcccggcagaagacagctcggaaatgtataaacgcgtgaataaaattattccgcacctgatccgtcaggaaaaagaagactccgaaaccttccagggcgaaggccacttctcggtggacgaaaaatctcgccaggtgaacctgaccgaacgtggtctggtgctgattgaagaactgctggtgaaagagggcatcatggatgaaggggagtctctgtactctccggccaacatcatgctgatgcaccacgtaacggcggcgctgcgcgctcatgcgctgtttacccgcgacgtcgactacatcgttaaagatggtgaagttatcatcgttgacgaacacaccggtcgtaccatgcagggccgtcgctggtccgatggtctgcaccaggctgtggaagcgaaagaaggtgtgcagatccagaacgaaaaccaaacgctggcttcgatcaccttccagaactacttccgtctgtatgaaaaactggcggggatgaccggtactgctgataccgaagctttcgaatttagctccatctacaagctggataccgtcgttgttccgaccaaccgtccaatgattcgtaaagatctgccggacctggtctacatgactgaagcggaaaaaattcaggcgatcattgaagatatcaaagaacgtactgcgaaaggccagccggtgctggtgggtactatctccatcgaaaaatcggagctggtgtcaaacgaactgaccaaagccggtattaagcacaacgtcctgaacgccaaattccacgccaacgaagcggcgattgttgctcaggcaggttatccggctgcggtgactatcgcgaccaatatggcgggtcgtggtacagatattgtgctcggtggtagctggcaggcagaagttgccgcgctggaaaatccgaccgcagagcaaattgaaaaaattaaagccgactggcaggtacgtcacgatgcggtactggaagcaggtggcctgcatatcatcggtaccgagcgtcacgaatcccgtcgtatcgataaccagttgcgcggtcgttctggtcgtcagggggatgctggttcttcccgtttctacctgtcgatggaagatgcgctgatgcgtatttttgcttccgaccgagtatccggcatgatgcgtaaactgggtatgaagccaggcgaagccattgaacacccgtgggtgactaaagcgattgccaacgcccagcgtaaagttgaaagccgtaacttcgacattcgtaagcaactgctggaatatgatgacgtggctaacgatcagcgtcgcgccatttactcccagcgtaacgaactgctggatgtcagcgatgtgagcgaaaccatcaacagcattcgtgaagatgtgttcaaagcgaccattgatgcctacattccgccacagtcactggaagaaatgtgggatattccggggctgcaggaacgtctgaagaacgatttcgacctcgatttgccaattgccgagtggctggataaagaaccagaactgcatgaagagacgctgcgtgagcgaattctggcgcagtccatcgaagtgtatcagcgtaaagaagaagtggttggtgctgagatgatgcgtcacttcgaaaaaggcgtcatgctgcaaactctcgactctctgtggaaagagcacctagcggcgatggactatctgcgtcagggtatccacctgcgtggctatgcacagaaagatccgaagcaggaatacaaacgtgaatcgttctccatgtttgcagcgatgctggagtcgttaaaatatgaagttatcagcacgctgagcaaagtccaggtacgtatgcctgaagaggttgaggagctggaacaacagcgtcgtatggaagccgagcgtttagcgcaaatgcagcagcttagccatcaggatgacgactctgcagccgcagctgcactggcggcgcaaaccggtgagcgcaaagtaggacgtaacgatccttgcccgtgcggttctggtaaaaaatacaagcagtgccatggtcgcctgcaataa

SEQ ID NO: 482041 - DNA, 588 bp, Shigella sonnei
gtgctgtggactgcaggctttaatgataagatttgtgcgctaaatacgtttgaatacgatcgggatggcaataacgtgagtggaatactgacgcgctggcgacagtttggtaaacgctacttctggccgcatctcttattagggatggttgcggcgagtttaggtttgcctgcgctcagcaacgccgccgaaccaaacgcgcccgcaaaagcgacaacccgcaaccacgagccttcagccaaagttaactttggtcaattggccttgctggaagcgaacacacgccgcccgaattcgaactattccgttgattactggcatcaacatgccattcgcacggtaatccgtcatctttctttcgcaatggcaccgcaaacactgcccgttgctgaagagtctttgcctcttcaggcgcaacatcttgcattactggatacgctcagcgcgctgctgacccaggaaggcacgccgtctgaaaagggttatcgcattgattatgcgcattttaccccacaagcaaaattcagcacgcccgtctggataagccaggcgcaaggcatccgtgctggccctcaacgcctcacctaa

SEQ ID NO: 482042 - DNA, 918 bp, Shigella sonnei
atgatcaaacaaaggacacttaaacgtatcgttcaggcgacgggtgtcggtttacataccggcaagaaagtcactctgacgttacgccctgcgccggccaacaccggggtcatctatcgtcgcaccgacttgaatccaccggtagatttcccggccgatgccaaatctgtgcgtgataccatgctctgtacgtgtctggtcaacgagcatgatgtacggatttcaaccgtagagcacctcaatgctgctctcgcgggcctgggcatcgataacattgttatcgaagttaacgcgccggaaatcccgatcatggacggcagcgccgctccgtttgtatacctgctgcttgacgccggtatcgacgagttgaactgcgccaaaaaatttgttcgcatcaaagagactgttcgtgtcgaagatggcgataagtgggctgaatttaagccgtacaatggtttttcgctggatttcaccatcgattttaaccatccggctattgattccagcaaccagcgctatgcgatgaacttctccgctgatgcgtttatgcgccagatcagccgtgcgcgtacgttcggtttcatgcgtgatatcgaatatctgcagtcccgtggtttgtgcctgggcggcagcttcgattgtgccatcgttgttgacgattatcgcgtactgaacgaagacggcctgcgttttgaagacgaatttgtgcgtcacaaaatgctcgatgcgatcggtgacttgttcatgtgtggtcacaatattattggtgcatttaccgcttataaatccggtcatgcactgaataacaaactgctgcaggctgtcctggcgaaacaggaagcctgggaatatgtgaccttccaggacgacgcagaactgccgttggccttcaaagcgccttcagctgtactggcataa

SEQ ID NO: 482043 - DNA, 1152 bp, Shigella sonnei
atgtttgaaccaatggaacttaccaatgacgcggtgattaaagtcatcggcgtcggcggcggcggcggtaatgctgttgaacacatggtgcgcgagcgtattgaaggtgttgaattcttcgcggtaaataccgatgcacaagcgctgcgtaaaacagcggttggacagacgattcaaatcggtagcggtatcaccaaaggactgggcgctggcgctaatccagaagttggtcgcaatgcggctgatgaggatcgcgatgcattgcgtgcggcgctggaaggtgcagacatggtctttattgctgcgggtatgggtggtggtaccggtacaggtgcagcaccagtcgtcgctgaagtggcaaaagatttgggtatcctgaccgttgctgtcgtcactaagcctttcaactttgaaggcaagaagcgtatggcattcgcggagcaggggatcactgaactgtccaagcatgtggactctctgatcactatcccgaacgacaaactgctgaaagttctgggccgcggtatctccctgctggatgcgtttggcgcagcgaacgatgtactgaaaggcgctgtgcaaggtatcgctgaactgattactcgtccgggtttgatgaacgtggactttgcagacgtacgcaccgtaatgtctgagatgggctacgcaatgatgggttctggcgtggcgagcggtgaagaccgtgcggaagaagctgctgaaatggctatctcttctccgctgctggaagatatcgacctgtctggcgcgcgcggcgtgctggttaacatcacggcgggcttcgacctgcgtctggatgagttcgaaacggtaggtaacaccatccgtgcatttgcttccgacaacgcgactgtggttatcggtacttctcttgacccggatatgaatgacgagctgcgcgtaaccgttgttgcgacaggtatcggcatggacaaacgtcctgaaatcactctggtgaccaataagcaggttcagcagccagtgatggatcgctaccagcagcatgggatggctccgctgacccaggagcagaagccggttgctaaagtcgtgaatgacaatgcgccgcaaactgcgaaagagccggattatctggatatcccagcattcctgcgtaagcaagctgattaa

SEQ ID NO: 482044 - DNA, 1263 bp, Shigella sonnei
atgatcaaggcgacggacagaaaactggtagtaggactggagattggtaccgcgaaggttgccgctttagtaggggaagttctgcccgacggtatggtcaatatcattggcgtgggcagctgcccgtcacgtggtatggataaaggcggggtgaacgacctcgaatccgtggtcaagtgcgtacaacgcgccattgaccaggcagaattgatggcagattgtcagatctcttcggtatatctggcgctttctggtaagcacatcagctgccagaatgaaattggtatggtgcctatttctgaagaagaagtgacgcaagaagatgtggaaaacgtcgtccataccgcgaaatcggtgcgtgtgcgcgatgaacatcgtgtgctgcatgtgatcccgcaagagtatgcgattgactatcaggaagggatcaagaatccggtaggactttcgggcgtgcggatgcaggcaaaagtgcacctgatcacatgtcacaacgatatggcgaaaaacatcgtcaaagcggttgaacgttgtgggctgaaagttgaccaactgatatttgccggactggcatcaagttattcggtattgacggaagatgaacgtgaactgggtgtctgcgtcgtcgatatcggtggtggtacaatggatatcgccgtttataccggtggggcattgcgccacactaaggtaattccttatgctggcaatgtcgtgaccagtgatatcgcttacgcctttggcacgccgccaagcgacgccgaagcgattaaagttcgccacggttgtgcgctgggttccatcgttggaaaagatgagagcgtggaagtgccgagcgtaggcggtcgtccgccacggagtctgcaacgtcagaccctggcagaggtgatcgagccgcgctataccgagctgctcaacctggtcaacgaagagatattgcagttgcaggaaaagcttcgccaacaaggggttaaacatcacctggcggcaggcattgtattaaccggtggcgcagcgcagatcgaaggtcttgcagcctgtgctcagcgcgtgtttcatacgcaagtgcgtatcggcgcgccgctgaacattaccggtttaacggattatgctcaggagccgtattattcgacggcggtgggattgcttcactatgggaaagagtcacatcttaacggtgaagctgaagtagaaaaacgtgttacagcatcagttggctcgtggatcaagcgactcaatagttggctgcgaaaagagttttaa

SEQ ID NO: 482045 - DNA, 831 bp, Shigella sonnei
atgtcgcaggctgctctgaacacgcgaaatagcgaagaagaggtttcttctcgccgcaataatggaacgcgtctggcggggatccttttcctgctgaccgttttaacgacagtgttggtgagcggctgggtcgtgttgggctggatggaagatgcgcaacgcctgccgctctcaaagctggtgttgaccggtgaacgccattacacgcgtaatgacgatatccggcagtcgatcctggcattgggtgagccgggtacctttatgacccaggatgtcaacatcatccagacgcaaatagaacaacgcctgccgtggattaagcaggtgagcgtcagaaagcagtggcctgatgaattgaagattcatctggttgaatatgtgccgattgcgcggtggaatgatcaacatatggtagacgcggaaggaaacaccttcagcgtgccgccagatcgcaccagcaagcaggtgcttccaatgctgtatggcccggaaggcagcgccaatgaagtgttgcagggctatcgcgaaatggggcagatgctggcaaaggacagatttactctgaaggaagcggcgatgaccgcgcggcgttcctggcagttgacgctgaataacgatattaagctcaatcttggccggggcgatacgatgaaacgtttggctcgctttgtagaactttatccggttttacagcagcaggcgcaaaccgatggcaaacggattagctacgttgatttgcgttatgactctggagcggcagtaggctgggcgcccttgccgccagaggaatctactcagcaacaaaatcaggcacaggcagaacaacaatga

SEQ ID NO: 482046 - DNA, 921 bp, Shigella sonnei
atgactgataaaattgcggtcctgttgggcgggacttccgctgagcgggaagtttctctgaattctggcgcagcggtgttagccgggctgcgtgaaggcggtattgatgcgtatcctgtcgacccgaaagaagtcgacgtgacgcaactgaagtcgatgggttttcagaaagtgtttatcgcgctacacggtcgcggcggtgaagatggtacgctgcagggcatgcttgagctgatgggcttgccttataccggcagcggagtgatggcatctgcgctttcaatggataaactacgcagcaaactgctgtggcaaggtgccggtttaccggtcgcgccgtgggtagcgttaacccgcgcagagtttgaaaaaggcctgagcgataagcagttagcagaaatttctgctctgggtttgccggttatcgttaagccgagccgcgaaggttccagtgtgggaatgtcaaaagtagtagcagaaaatgctctacaagatgcattaagattggcatttcagcacgatgaagaagtattgattgaaaaatggctaagtgggccggagttcacggttgcgatactcggtgaagaaattttaccgtcaatacgtattcaaccgtccggaaccttctatgattatgaggcgaagtatctctctgatgagacacagtatttctgccccgcaggtctggaagcgtcacaagaggccaatttgcaggcattagtgctgaaagcatggacgacgttaggttgcaaaggatggggacgtattgacgttatgctggacagcgatggacagttttatctgctggaagccaatacctcaccgggtatgaccagccacagcctggtgccgatggcggcacgtcaggcaggtatgagcttctcgcagttggtagtacgaattctggaactggcggactaa

SEQ ID NO: 482047 - DNA, 1476 bp, Shigella sonnei
atgaatacacaacaattggcaaaactgcgttccatcgtgcccgaaatgcgtcgcgttcggcacatacattttgtcggcatcggtggtgccggtatgggcggtattgccgaagttctggccaatgaaggttatcagatcagtggttccgatttagcgccaaatccggtcacgcagcagttaatgaatctgggagcgacgatttatttcaaccatcgcccggaaaacgtacgtgatgccagcgtggtcgttgtttccagcgccatttctgccgataacccggaaattgtcgcagctcatgaagcgcgtattccggtgatccgtcgtgccgaaatgctggctgagttaatgcgttttcgtcatggcatcgccattgcaggaacgcacggcaaaacgacaaccaccgcgatggtttccagcatctacgcagaagcggggctcgacccaaccttcgttaacggcgggctggtaaaagcggcgggggttcatgcgcgtttggggcatggtcggtacctgattgccgaagcagatgagagtgatgcatcgttcctgcatctgcaaccgatggtggcgattgtcaccaatatcgaagccgaccacatggatacctaccagggcgactttgagaatttaaaacagacttttattaattttctgcacaacctgccgttttacggtcgtgcggtgatgtgtgttgatgatccggtgatccgcgaattgttaccgcgtgtgggacgtcagaccacgacttacggcttcagcgaagatgccgacgtgcgtgtagaagattatcagcagattggcccgcaggggcactttacgctgctgcgccaggacaaagagccgatgcgcgtcaccctgaatgcgccaggccgtcataacgcgctgaacgccgcagctgcggttgcggttgctacggaagagggaattgacgacgaggctattttgcgtgcgctggagagcttccaggggactggtcgccgttttgatttcctcggtgaattcccgctggagccagtgaatggtaaaagcggtacggcaatgctggtcgatgactacggccaccacccgacggaagttgacgccaccattaaagcggcgcgcgcaggctggccggataaaaacctagtaatgctgtttcagccgcaccgttttacccgtacgcgcgacctgtatgatgatttcgccaatgtgctgacgcaggttgataccctgttgatgctggaagtgtatccggctggcgaagcgccaattccgggagcggacagccgttcgctgtgtcgcacaattcgtggacgtgggaaaattgatcccattctggtgccggaccctgcgcaggtagccgagatgctggcaccggtattaatcggtaacgacctgattctcgttcagggggctggtaatatcggaaaaattgcccgttctttagctgaaatcaaactgaagccgcaaactccggaggaagaacaacatgactga

SEQ ID NO: 482048 - DNA, 1068 bp, Shigella sonnei
atgagtggtcaaggaaagcgattaatggtgatggcaggcggaaccggtggacatgtattcccgggactggcggttgcgcaccatctaatggctcagggttggcaagttcgctggctggggactgccgaccgtatggaagcggacttagtgccaaaacatggcatcgaaattgatttcattcgtatctctggtctgcgtggaaaaggtataaaagcactgatagctgcgccgctgcgtatcttcaacgcctggcgtcaggcgcgggcgattatgaaagcgtacaaacctgacgtggtactcggtatgggcggctatgtatcaggtccaggtggtctggccgcgtggtcgttaggcattccggttgtacttcatgaacaaaacggtattgcgggcttaaccaataaatggctggcgaagattgccaccaaagtgatgcaggcgtttccaggcgctttccctaatgcggaagtggtgggtaacccggtgcgtaccgatgtgctggcgctgccgttgccgcagcaacgtttggctggacgtgaaggtccggttcgtgtgctggtagtgggtggttcccagggcgcacgcattcttaaccagacaatgccgcaggttgctgcgaaactgggtgattcagtcactatctggcatcagagcggtaaaggttcgcaacaatccgttgaacaggcgtatgccgaagcggggcaaccgcagcataaagtgacggaatttattgatgatatggcggcggcgtatgcgtgggcggatgtcgtcgtttgccgctccggtgctttaacggtgagtgaaatcgccgcggcaggactaccggcgttgtttgtgccgtttcaacataaagaccgccagcaatactggaatgcgctaccgctggaaaaagcgggcgcagccaaaattatcgagcagccacagcttagcgtggatgctgtcgccaacaccctggccgggtggtcgcgagaaaccttattaaccatggcagaacgcgcccgcgctgcatccattccggatgccaccgagcgagtggcaaatgaagtgagccgggctgcccgggcgtaa

SEQ ID NO: 482049 - DNA, 1245 bp, Shigella sonnei
atgcgtttatctctccctcgcctgaaaatgccgcgcctgccaggattcagtatcctggtctggatctccacggcgctaaaaggctgggtgatgggctcgcgggaaaaagataccgacagcctgatcatgtacgatcgcaccttactgtggctgaccttcggccttgcggcgattggctttatcatggtgacctcggcgtcaatgcccatagggcaacgcttaaccaacgatccgttcttcttcgcgaagcgtgatggcgtctatctgatcctggcattcattctggcgatcattacgctgcgtctgccgatggagttctggcaacgctacagtgccacgatgctgctcggatctatcatcctgctgatgatcgtgctggtagtgggtagctcggttaaaggggcatcgcgttggatcgatctcggtttgctgcgtatccagcctgcggagctgacaaaactgtcgctgttttgttatatcgccaactatctggtgcgtaaaggcgacgaagtacgtaataacctgcgcggcttcctgaaaccgatgggcgtgattctggtgttggcagtgttactgctggcacagccagaccttggtacggtggtggtgttgtttgtgactacgctggcgatgttgttcctggcgggagcgaaattgtggcagttcattgccattatcggtatgggcatttcagcggttgtgttgctgatactcgccgaaccgtaccgtatccgccgtgttaccgcattctggaacccgtgggaagatccctttggcagcggctatcagttaacgcaatcgctgatggcgtttggtcgcggcgaactttggggacaaggtttaggtaactcggtacaaaaactggagtatctgccggaagcgcacactgactttattttcgccattatcggcgaagaactggggtatgtcggtgtggtgctggcacttttaatggtattcttcgtcgcttttcgcgcgatgtcgattggccgcaaagcgttagaaattgaccaccgtttttccggttttctcgcctgttctattggcatctggtttagcttccaggcgctggttaacgtaggcgcggcggcggggatgttaccgaccaaaggtctgacattgccgctgatcagttacggtggttcgagcttactgattatgtcgacagccatcatgatgctgttgcgtattgattatgaaacgcgtctggagaaagcgcaggcgtttgtacgaggttcacgatga

SEQ ID NO: 482050 - DNA, 1317 bp, Shigella sonnei
atggctgattatcagggtaaaaatgtcgtcattatcggcctgggcctcaccgggctttcctgcgtggactttttcctcgctcgcggtgtgacgccgcgcgttatggatacgcgtatgacaccgcctggcctggataaattacccgaagccgtagaacgccacacgggcagtctgaatgatgaatggctgatggcggcagatctgattgtcgccagtcccggtattgcacaggcgcatccatccttaagcgctgccgctgatgccggaatcgaaatcgttggcgatatcgagctgttctgtcgcgaagcacaagcaccgattgtggcgattaccggttctaacggcaaaagcacggtcaccacgctagtgggtgaaatggcgaaagcggcgggggttaacgttggtgtgggtggcaatattggcctgccagcgttgatgctgcttgatgctgagtgcgaactgtacgtgctggaactgtcgagcttccagctggaaaccacttccagcttacaggcggtggcggcgaccattctgaacgtgactgaagatcatatggaccgctatccgtttggtttgcagcaataccgtgcggcaaaattgcgtatttacgaaaatgcgaaagtttgtgtcgtcaatgctgatgatgccttaacaatgccgattcgcggtgctgatgaacgctgcgtcagctttggcgtcaacatgggtgactatcacctgaatcatcagcagggcgaaacctggctgcgggttaaaggcgagaaagtgctgaatgtgaaagagatgaaactttccgggcagcataactacaccaatgcgctggcagcactggcactggcagacgcagctggtttgccgcgcgccagcagcctgaaagcgttaaccaccttcaccggtctgccgcatcgctttgaagtggtgctggagcacaatggcgtacgctggattaacgattcgaaagccactaacgtcggcagtacggaagcggcgttgaatggcttgcaggtagacggcacgctgcatttgttgctgggcggcgatggtaaatcggcggacttcagtccactggcgcgctatctgaatggcgacaacgtgcgtttgtactgttttggtcgtgacggtgcgcagctggcggcgctacgcccggaagtggcagaacaaaccgaaaccatggaacaagcgatgcgcttgctggctccgcgtgttcagctgggcgatatggttctgctctccccggcctgtgccagccttgatcagttcaagaactttgaacaacgaggcaatgagtttgcccgtctggcgaaggagttaggttga

SEQ ID NO: 482051 - DNA, 1083 bp, Shigella sonnei
atgttagtttggctggccgaacatttggtcaaatattattccggctttaacgtcttttcctatctgacgtttcgcgccatcgtcagcctgctgaccgcgctgttcatctcattgtggatgggcccgcgtatgatagctcatttgcaaaaactttcctttggtcaggtggtgcgtaacgacggtcctgaatcacacttcagcaagcgcggtacgccgaccatgggcgggattatgatcctgacggcgattgtgatctccgtactgctgtgggcttacccgtccaatccgtacgtctggtgcgtgttggtggtgctggtaggttacggtgttattggctttgttgatgattatcgcaaagtggtgcgtaaagacaccaaagggttgatcgctcgttggaagtatttctggatgtcggtcattgcgctgggtgtcgccttcgccctgtaccttgccggcaaagacacgcccgcaacgcagctggtggtcccattctttaaagatgtgatgccgcagctggggctgttctacattctgctggcttacttcgtcattgtgggtactggcaacgcggtaaacctgaccgatggtctcgacggcctggcaattatgccgaccgtatttgtcgccggtggttttgcgctggtggcgtgggcgaccggcaatatgaactttgccagctacttgcatataccgtatctgcgacacgcaggggaactggtcattgtctgcacggcgatagtcggggcaggactgggcttcctgtggtttaacacctatccggcgcaggtctttatgggcgatgtaggttcgctggcgttaggtggtgcgttaggcattatcgccgtactgctacgtcaggaattcctgctggtgattatggggggcgtgttcgtggtagaaacgctttctgtcatcctgcaggtcggctcctttaaactgcgcggacaacgtattttccgcatggcaccgattcatcaccactatgaactgaaaggctggccggaaccgcgcgtcattgtgcgtttctggattatttcgctgatgctggttctgattggtctggcaacgctgaaggtacgttaa

SEQ ID NO: 482052 - DNA, 1359 bp, Shigella sonnei
atgattagcgtaacccttagccaacttaccgacattctcaacggtgaactgcaaggtgcagatatcacccttgatgctgtaaccactgatacccgaaaactgacgccgggctgcctgtttgttgccctgaaaggcgaacgtttcgatgctcatgattttgccgaccaggcgaaagctggcggcgcgggcgcactactggtcagccgtccgctggatatcgacctgccgcagttaatcgtcaaggatacgcgtctggcgtttggtgaactggctgcatgggttcgccagcaagttccggcgcgcgtggttgctctgacaggttcctccggcaaaacctccgttaaagagatgacggcggcgattttaagccagtgcggcaacacgctttatacggcaggcaatctcaacaacgacatcggtgtaccgatgacgttgttgcgcttgacgccggaatacgattacgcagttattgaacttggcgcgaaccatcagggcgaaatagcctggactgtgagtctgactcgcccggaagctgcgctggtcaacaacctggcagcggcgcatctggaaggttttggctcgcttgcgggtgtcgcgaaagcgaaaggtgaaatctttagcggcctgccggaaaacggtatcgccattatgaacgccgacaacaacgactggctgaactggcagagcgtaattggctcacgcaaagtgtggcgtttctcacccaatgccgccaacagcgatttcaccgccaccaatatccatgtgacctcgcacggtacggaatttaccctacaaaccccaaccggtagcgtcgatgttctgctgccgttgccggggcgtcacaatattgcgaatgcgctggcagccgctgcgctctccatgtccgtgggcgcaacgcttgatgctatcaaagcggggctggcaaatctgaaagctgttccaggccgtctgttccccatccaactggcagaaaaccagttgctgctcgacgactcctacaacgccaatgtcggttcaatgaccgccgctgttcaggtactggctgaaatgccgggctaccgcgtgctggtggtgggcgatatggcggaactgggcgctgaaagcgaagcctgccatgtacaggtgggcgaggcggcaaaagctgctggtattgaccgcgtgttaagcgtgggtaaacaaagccatgctatcagcaccgccagcggcgttggcgaacattttgctgataaaactgcgttaattacgcgtcttaaatcactgattgctgagcaacaggtaattacgattttagttaagggttcacgtagtgccgccatggaagaggtagtacgcgctttacaggagaatgggacatgttag

SEQ ID NO: 482053 - DNA, 1494 bp, Shigella sonnei
gtggcagatcgtaatttgcgcgaccttcttgctccgtgggtgccagacgcaccttcgcgagcactgcgagagatgacactcgacagccgtgtggctgcggcgggcgatctctttgtagctgtagtaggtcatcaggcggacgggcgtcgatatatcccgcaggcgatagcgcaaggtgtggctgccattattgcagaggcgaaagcgaaagatgaggcgaccgacggtgaaatccgtgaaatgcacggcgtaccggtcatctatctcagccagctcaatgagcgtttatctgcactggcgggccgcttttaccatgaaccctctgacaatttacgtctcgtaggcgtaacgggcaccaacggcaaaaccacgactacccagctgctggcgcagtggagccaactgcttggcgaaaccagcgcggtaatgggcaccgttggtaacggtctgcttgggaaagtgatcccgacagaaaatactaccggttccgcagtcgatgttcagcatgagctggcggggctggtggagcagggcgcgacgttttgcgcaatggaagtttcctcccacgggctggtacagcaccgtgtggcggcattgaaatttgcggcgtcggtctttaccaacttaagccgcgatcaccttgattatcatggtgatatggaacactacgaagctgcgaaatggctgctttattctgaacatcattgcggtcaggcgattattaacgccgacgatgaagtgggccgccgctggctggcaaaactgccggacgcggttgcggtatcaatggaagatcatattaatccgaactgtcacggacgctggttaaaagcgatcgacgtgaactatcacgacagcggtgcgacgattcgctttagctcaagttggggcgatggcgaaattgaaagccatctgatgggcgcttttaacgtcagcaacctgctgctcgcgctggcgacactgctggcactcggctatccactggctgatctgctgaaaaccgccgcgcgtctgcaaccggtttgcggacgtatggaagtgttcactgcgccaggcaaaccgacggtggtggtggattacgcgcatacgccggatgcactggaaaaagccttacaggcggcgcgcctgcactgtgcgggcaagctgtggtgcgtctttggctgtggtggcgatcgcgataaaggtaagcgtccactgatgggcgcaattgccgaagagtttgctgacgtggcggtggtgacggacgataacccgcgtaccgaagaaccgcgtgccatcatcaacgatattctggcgggaatgttagatgccggacatgccaaagtgatggaaggccgtgctgaagcggtgacttgcgccgttatgcaggctaaagagaatgatgtggtactggtcgcgggcaaaggccatgaagattaccagattgttggcaatcagcgtctggactactccgatcgcgtcacggtggcgcgtctgctgggggtgattgcatga

SEQ ID NO: 482054 - DNA, 1767 bp, Shigella sonnei
atgaaagcagcggcgaaaacgcagaaaccaaaacgtcaggaagaacatgccaactttatcagttggcgttttgcgttgttatgcggctgtattctcctggcgctggcttttctgctcggacgcgtagcgtggttacaagttatctccccggatatgctggtgaaagagggcgacatgcgttctcttcgcgttcagcaagtttccacctcccgcggcatgattactgaccgttctggtcgcccgttagcggtgagcgtgccggtaaaagcgatttgggctgacccgaaagaagtgcatgacgctggcggtatcagcgtcggtgaccgctggaaggcgctggctaacgcgctcaatattccgctggatcagctttcagcccgcattaacgccaacccgaaagggcgttttatttatctggcgcgtcaggtgaaccctgacatggcggactacatcaaaaaactgaaactgccggggattcatctgcgtgaagagtctcgccgttactatccgtccggcgaagtgactgctcacctcatcggctttactaacgtcgatagtcaagggattgagggcgttgagaagagtttcgataaatggcttaccgggcagccgggtgagcgcattgtgcgtaaagaccgctatggtcgcgtaattgaagatatttcttctactgacagccaggcagcgcacaacctggcgctgagtattgatgaacgcctgcaggcgctggtttatcgcgaactgaacaacgcggtggcctttaacaaggctgaatctggtagcgccgtgctggtggatgtcaacaccggtgaagtgctggcgatggctaacagcccgtcatacaaccctaacaatctgagcggcacgccgaaagaggcgatgcgtaaccgtaccatcaccgacgtgtttgaaccgggctcaacggttaaaccgatggtggtaatgaccgcgttgcaacgtggcgtggtgcgggaaaactcggtactcaataccattccttatcgaattaacggccacgaaatcaaagacgtggcacgctacagcgaattaaccctgaccggggtattacagaagtcgagtaacgtcggtgtttccaagctggcgttagcgatgccgtcctcagcgttagtagatacttactcacgttttggactgggaaaagcgaccaatttggggttggtcggagaacgcagtggcttatatcctcaaaaacaacggtggtctgacatagagagggccaccttctctttcggctacgggctaatggtaacaccgttacagttagcgcgagtctacgcaactatcggcagctacggcatttatcgcccactgtcgattaccaaagttgaccccccggttcccggtgaacgtgtcttcccgggatccattgtccgcactgtggtgcatatgatggaaagcgtggcgctaccaggcggcggcggcgtgaaggcggcgattaaaggctatcgtatcgccattaaaaccggtaccgcgaaaaaggtcgggccggacggtcgctacatcaataaatatattgcttataccgcaggcgttgcgcctgcgagtcagccgcgcttcgcgctggttgttgttatcaacgatccgcaggcgggtaaatactacggcggcgccgtttccgcgccggtctttggtgccatcatgggcggcgtattgcgtaccatgaacatcgagccggatgcgctgacaacgggcgataaaaatgaatttgtgattaatcaaggcgaggggacaggtggcagatcgtaa

SEQ ID NO: 482055 - DNA, 366 bp, Shigella sonnei
atgatcagcagagtgacagaagctctaagcaaagttaaaggatcgatgggaagccacgagcgccatgcattgcctggtgttatcggtgacgatcttttgcgatttgggaagctgccactctgcctgttcatttgcattattttgacggcggtgactgtggtaaccacggcgcaccatacccgtttactgaccgctcagcgcgaacaactggtgctggagcgagatgctttagacattgaatggcgcaacctgatccttgaagagaatgcgctcggcgaccatagccgggtggaaaggatcgccacggaaaagctgcaaatgcagcatgttgatccgtcacaagaaaatatcgtagtgcaaaaataa

SEQ ID NO: 482056 - DNA, 942 bp, Shigella sonnei
atgatggaaaactataaacatactacggtgctgctggatgaagccgttaatggcctcaatatccgtcctgatggcatctacattgatgggacttttggtcgcggtggtcactcacgtctgatcctctcgcagcttggcgaagaggggcgtttgctggcgatcgatcgcgacccgcaggctatcgccgttgcgaagactattgatgatccgcgcttctccatcatccacggacctttctccgcgctgggcgaatacgttgccgagcgcgatcttatcggcaagatcgacggcattctcctcgatcttggcgtctcttcaccgcaacttgatgatgctgagcgcggcttttcctttatgcgcgatggtccgctggacatgcgtatggacccaacccgtgggcagtcagccgctgaatggctacaaaccgcagaagaagccgatatcgcttgggtattgaaaacctatggtgaagagcgttttgccaaacgcattgcccgcgccattgtcgagcgtaaccgcgaacagccgatgacccgcaccaaagaactggcggaagtcgtggctgttgcaacgccggtgaaagataagtttaaacatcccgcgacccgtaccttccaggcggtgcgcatttgggtaaacagtgaactggaggagatagagcaggcgctaaaaagctcgctcaacgtgctggccccgggggggcggctttcgatcatcagcttccactcgctggaagaccgtattgtgaaacgttttatgcgtgaaaacagccgcggtccgcaagttccggcagggttaccgatgactgaagagcagctcaaaaaactgggtggccgtcagctgcgagcactaggcaagttaatgccgggcgaagaagaggtggctgagaaccctcgtgcccgtagttcagttctgcgtattgcagagaggacgaatgcatga

SEQ ID NO: 482057 - DNA, 459 bp, Shigella sonnei
atgttccggggagcaacgttagtcaatctcgacagcaaagggcgcttatcagtgcctacccgttaccgggaacagctgcttgagaacgctgtcggtcaaatggtttgcaccattgacattcatcacccgtgcctgctgctttaccccctgcctgaatgggaaattatcgagcaaaaattatcgcgtctgtcgagcatgaacccggttgagcgccgtgtgcagcgcctactgttaggtcatgccagcgaatgtcagatggatggcgcaggtcgattgttaatcgcgccagtactgcggcaacatgccgggctgacaaaagaagtgatgctggttggacagttcaacaagtttgagctgtgggatgaaacaacctggcatcaacaggtcaaggaagatatcgacgcagagcagttggctaccggagacttatcggagcgactgcaggacttgtctctataa

SEQ ID NO: 482058 - DNA, 1500 bp, Shigella sonnei
atgataaaaccgacgtttttacgccgggtggccattgctgctctgctctcaggaagttgttttagcgccgccgccgcgcctcctgcgccgcccgtctcgtatggtgtggaggaagatgtcttccacccggtacgcgcgaaacagggaatggtagcgtctgtggacgccactgccactcaggtgggggtggatatcctcaaggagggcgggaatgccgttgatgccgccgtggcggtgggctacgcgctggcggtaacgcatccgcaggcagggaatctgggcggtggtggttttatgttaatccgctcgaaaaatggcaataccacggctatcgatttccgcgaaatggcacccgccaaagcgacccgcgatatgttcctcgatgatcagggcaacccggacagcaaaaaatcactcacttcgcatctggcttccggcacaccgggtacggtagcaggtttctcgctggcgctggataaatacggcaccatgccgctgaacaaagtcgtgcagcccgcgtttaaactggcacgcgatggttttatcgttaacgacgcgctggctgacgatctcaaaacctacggtagcgaagtgttgccgaatcacgaaaacagtaaagctatcttctggaaagagggcgagccgctgaaaaagggcgacacgctggtgcaggcgaacctggcaaagagcctggagatgattgctgaaaacggcccggacgaattctataaaggcacgattgcggaacagatcgcccaggagatgcagaaaaacggtggcttgatcactaaagaagatttagcggcctataaagcggtcgaacgcactccgataagcggcgattatcgcgggtatcaggtttactccatgccaccgccatcctccggcgggatccatatcgtacaaatcctcaatattctggaaaacttcgatatgaagaaatacggctttggcagcgccgatgcgatgcaaatcatggcagaagcggagaaatacgcctacgccgaccgctcggaatatcttggcgacccggattttgtcaaagtcccgtggcaggcactgaccaataaagcctatgccaaatccattgccgatcaaattgatatcaacaaagcgaagccgtccagtgagattcgccctggcaagcttgcgccttatgagagtaatcaaactacccattactctgtagtggataaagacggtaacgcggtggcggtgacctatacgctgaacaccaccttcggtacgggcattgtcgcgggcgagagcggtattctgcttaataatcagatggatgatttctccgccaaaccgggcgtaccgaacatttacgggctggtgggcggtgatgccaacgccgtcgggccgaataaacgtccgctgtcatcgatgtcaccaaccattgtggtgaaagacggtaaaacttggctggttaccggtagtcctggcgggagtcggattattaccaccgtgctgcaggtaatgactccaacttattga

SEQ ID NO: 482059 - DNA, 441 bp, Shigella sonnei
atgaaacgacttctgattcttacggcactcctgccgtttgtcggctttgcacagcccattaatactctgaacaaccctaaccagccggggtatcagatacccagccagcagcggatgcaaacccagatgcagactcagcaaatccagcaaaaagggatgctgaatcagcaactgaaaacgcaaactcagttgcaacagcagcatttagaaaaccagataaacaataattctcagcgggtgttgcagtcacagccgggggagcgaaatcccgcccggcagcaaatgctgcccaacaccaacggcgggatgttaaacagcaaccgtaatccggatagttcgttgaatcagcagcatatgctgccggaaaggagaaacggcgacatgctgaatcagcccagcacgccgcagcctgacattccgttgaaaactattgggccgtaa

SEQ ID NO: 482060 - DNA, 744 bp, Shigella sonnei
atgagtaactggccttatccccgcatcgtcgctcatcgtggcggcggtaagctggccccggaaaacaccctggcggcaatcgacgtcggggcaaaatacggtcataagatgatcgaatttgacgcgaagttatcgaaagatggcgagatcttcctgctccatgacgacaatctcgaacgcaccagcaacggctggggcgtcgcgggtgaactgaactggcaggatttactgcgcgtggatgcgggcagttggtacagcaaagcgtttaaaggtgagccgctgccgttgctttcgcaggtggcggaacgctgtcgcgaacacgggatgatggcgaatatcgaaatcaaacccaccactggcactggaccattaacgggcaaaatggtggcgctggcggcacgccaactgtgggccggtatgacgccgccgctgctgtcatcgtttgagattgatgctttagaagctgcacaacaggcggcaccggaactgccgcgtggtttattgcttgatgagtggcgcgacgactggcgcgaactgaccgcgcggctgggctgcgtctctattcatctcaatcataagttactcgataaagcgcgagtgatgcagttgaaagacgccggattacggattctggtttataccgtcaataaaccccagcgcgcggcagagttgctgcgctggggcgtggattgcatctgtaccgatgcgattgacgtgattggtccgaactttacggcccaatag

SEQ ID NO: 482061 - DNA, 1071 bp, Shigella sonnei
atggcaggactgaaattacaggcagtaaccaaaagctgggatggcaaaacccaggtcattaaaccgctgacccttgatgtggcggatggcgaatttatcgtgatggtcgggccgtctggctgcgggaaatcgacgctgctgcgcatggttgccgggctggagcgggtgacagaaggcgatatctggatcaacgaccagcgcgtgaccgaaatggagccgaaagatcgcgggattgcgatggtgttccagaattacgcgctttatccgcatatgagcgtagaggagaacatggcgtgggggctgaaaattcgcggcatgggcaagcagcaaattgccgagcgcgttaaagaagcggcgcgcattctggaactggacggtctgcttaagcgtcgtccgcgtgagctatccggcggtcagcgccagcgtgtggcgatgggccgcgcgattgtgcgcgatccggcggtgttcttgtttgatgagccgctctctaacctcgatgccaagctgcgcgtgcagatgcgtcttgaactgcaacagttgcaccgtcgcctgaaaacgacttcactctacgttactcacgatcaggttgaagcgatgacgctcgcccagcgagtaatggtgatgaacggtggcgttgccgaacagattggcacaccagttgaagtctacgaaaagcccgccagcctgtttgtggcgagttttatcggcagcccggcgatgaacctgctgacaggccgcgtgaataatgaaggcacgcatttcgaactggacggcggtatcgtgctaccgctaaacggtggctaccgtcagtatgccgggcgtaaaatgactctcggcattcgcccggaacatatagcgctaagctcgcaggcagaaggtggtgtgccgctggtgatggacacgctggagatcctcggcgcagataacctggcgcacggacgctggggcgagcagaagctggtggtgcgactggcgcatcaggagcgcccgacggcaggcagcacgctgtggctgcatttggcggaaaatcagctgcatctttttgatggtgaaacaggacaacgagtatga

SEQ ID NO: 482062 - DNA, 846 bp, Shigella sonnei
atgattgagaaccgtccgtggctgacgatattcagccataccatgctgatcctcgggatcgcggtgatcctcttcccgctgtacgtggcgtttgtcgcggcgacgctggataaacaggccgtctatgccgcgccgatgacgctcatccccggcacacatctgctggaaaatatccacaacatctgggttaacggggtaggcacgaatagcgcgccgttctggcggatgttgcttaacagctttgtgatggcgttcagcattacgctcggcaaaattaccgtctcgatgctctcggcatttgccattgtctggtttcgttttccgctacgtaacctcttcttctggatgatttttatcaccctgatgctgccggttgaagtacgtatcttcccgacggtggaagtcatcgccaacctgaaaatgctcgacagctacgccggtttaacgctgccgctgatggcctcggcgaccgccacgtttctgttccgccagttctttatgaccctaccggatgaattggtggaagccgcgcggatcgacggcgcgtcaccaatgcgtttcttttgcgacatcgtttttccgttgtccaaaactaatctggcggcgctgtttgtgatcacctttatctacggctggaatcagtatttgtggccgttgttgattattaccgacgttgatctcggcaccaccgtggcagggatcaaagggatgatcgctacaggcgaaggcaccacggaatggaactcggtaatggcggcgatgttgttaacgcttatccctccggtggtgattgttttagtgatgcagcgtgccttcgtgcgcggcctggtcgatagtgagaaataa

SEQ ID NO: 482063 - DNA, 888 bp, Shigella sonnei
atgtcatcatcccgtccggtgttccgctcgcgctggctgccttatctgctggtcgcgccgcagctcatcatcaccgttatcttttttatctggcctgcgggcgaagcgttgtggtactcgcggcaaagcgtcgatccgtttggtttctccagccagtttgtcggtctggataacttcgtcacgctgttccatgacagctactatctagactccttctggacgacgataaaattcagcacctttgtcaccgtcagcggtttgctggtatcgctgttctttgcggcgctggtggagtacatcgtgcgcggcagccgtttctatcaaaccttgatgctgctgccgtatgccgtggctcccgccgttgccgccgtattgtggatcttcctgtttaaccccggtcgcgggctgatcacccattttctcgctgagttcggctacgactggaaccacgcgcaaaacagcggtcaggcaatgtttctggtggtgtttgcctcggtgtggaagcaaatcagctacaactttctgttcttctatgccgcgctgcactccattccccgttcgttgattgaagccgcagctattgacggcgcagggccgattcgccgcttctttaagattgctctgccgcttatcgctccggtgagtttcttcctgctggtggtgaacctggtgtacgccttcttcgacaccttcccggtgatcgacgccgccacgtccggcgggccggttcaggccaccactacgctgatttataagatctaccgcgaaggctttaccggactggatctggcttcgtctgccgcgcagtcggtggtgttgatgttcctcgtcatcgtgctgacggtggtgcagttccgctatgttgaaagcaaggtgcgttaccaatga

SEQ ID NO: 482064 - DNA, 1035 bp, Shigella sonnei
atgatggcatcgaaagccattaaaccggtatatgacgtgtttaaagaggcagggattcaattcgatgagtcgcagtttgtgccgacggtttccggttactactccgacagcaaaacgggccacttactctcccagccattcaacagctcgactcccgttctctattacaacaaagacgccttcaagaaagcggggttagacccggaacagccgccgaaaacctggcaggatctggcggactcttccgcaaaactgaaagcctccggtatgaagtgcggctacgccagcggctggcagggctggatccaactggaaaactttagcgcctggaacggtctgccgtttgccagcaaaaacaacggctttgacggcacggacgcggtgctggagttcaacaagccggagcaggtgaaacacattgccatgctcgaagagatgaacaagaagggcgacttcagctacgtcggtcgtaaggatgaatccaccgagaagttctataacggtgattgcgcgatgaccaccgcctcttccggttctctcgctaatattcgtgagtacgccaaatttaactatggcgtaggcatgatgccttacgacgccgatgcgaaagatgcaccgcaaaacgccattatcggcggggccagcctgtgggtgatgcagggcaaaaataaagaaacgtataccggcgtggcgaagttcctcgacttcctcgcgaagccagaaaacgctgccgagtggcatcagaaaaccggttatctgccaatcaccaaagcagcgtatgacctgacccgtgagcagggcttttatgagaaaaacccaggggcggataccgcgacgcgtcagatgctgaataagccgccgttgccgttcaccaaagggctgcgtctgggcaacatgccgcagatccgcgtgattgtggatgaagagctggagagcgtgtggaccggtaagaagacaccacagcaggcactggataccgccgttgagcgtggaaatcagttgctgcgccgctttgagaaatcgacgaagtcttaa

SEQ ID NO: 482065 - DNA, 714 bp, Shigella sonnei
atggaaaaagtcatgttgtcctttgacaaagtcagcgcccactacggcaaaatccaggcgctgcatgaggtgagcctgcatatcaatcagggcgagattgtcaccctcattggcgcgaacggggcggggaaaaccaccttgctcggcacgttatgcggcgatccgcgcgctaccagcgggcgaattgtgtttgatgataaagacattaccgactggcagacggcgaaaatcatgcgcgaagcggtagcgattgtcccggaagggcgtcgcgtcttctcgcggatgacggtggaagagaacctggcgatgggcggcttttttgccgaacgcgaccagttccaggagcgcataaagtgggtgtatgaactgttcccacgtctgcatgagcgccgtgttcagcgggcaggcaccatgtccggcggtgagcaacaaatgctggcgattggtcgcgcgctgatgagcaacccgcgtttgctgctacttgatgagccatcgcttggtcttgcgccgattatcatccagcaaattttcgacaccatcgagcagctgcgcgagcaggggatgactatcttcctcgtcgagcagaacgccaaccaggcgctaaagctggcggatcgcggctacgtgctggaaaacggccatgtggtgctctccgatactggtgatgcactactggcgaatgaagcggtgagaagtgcgtatttaggcgggtaa

SEQ ID NO: 482066 - DNA, 768 bp, Shigella sonnei
atgagtcagccattattatctgtgaacggcctgatgatgcgcttcggcggcctgctggcggtgaacaacgtcaatcttgaactgtacccgcaggagatcgtctcgttaatcggccctaacggtgccggaaaaaccacggtttttaactgtctgaccggattctacaaacccaccggcggcaccattttactgcgcaatcagcacctggaaggtttaccggggcagcaaattgcccgcatgggcgtggtgcgcaccttccagcatgtgcgtctgttccgtgaaatgacggtaattgaaaacctgctggtggcgcagcatcaacaactgaaaaccgggctgttctctggcctgttgaaaacgccttctttccgtcgcgcccagagcgaagcgctcgaccgcgccgccacctggcttgagcgcattggtttgctggaacacgccaaccgtcaggcgagtaacctggcctatggtgaccaacgccgtctggagattgcccgctgcatggtgacgcagccggagattttaatgctcgacgaaccggcggcaggtcttaacccaaaagaaaccaaagagctggatgagctgattgccgaactgcgcaatcatcacaacaccactatcttgttgattgaacacgatatgaagctggtgatggggatttcagaccgaatttatgtggtcaatcaggggacgccactggcaaacggtacgccggagcaaatccgtaataacccggacgtgatccgtgcctatttaggtgaggcataa

SEQ ID NO: 482067 - DNA, 1278 bp, Shigella sonnei
atgaaaccgatgcatattgcaatggcactgctctctgccgcgatgttctttgtcctcgctggcgtctttatgggcgtgcaactggagctggatggcaccaaactggtggtcgacagcgcttcggatgtccgttggcagtgggtgtttatcggcacggcggtggtctttttcttccagcttttgcgacctgctttccagaaagggctaaaaagcgtttccgggccgaagtttattctgcccgcgattgatggctccacggtgaagcagaaactgttcctcgtggcgctgctggtgcttgcggtgtcgtggccgtttatggtgtcacgtgggacggtggatatcgccactctgaccatgatctacattatcctcggtctcgggctgaatgtggttgttggtctttctggtctgctggtgctggggtacggcggtttttacgccatcggcgcttacacttttgcgctgctcaatcactattacggtctggggttctggacctgtttgccgattgccggactgatggcagcggcggcgggcttcctgcttggttttccggtgttgcgtctgcgcggtgattatctggcgatcgttaccctcggtttcggcgaaattgtgcgcatattgctgctcaataacaccgaaattaccggcggcccgaacggtatcagtcagatcccgaaaccgactttcttcggccttgagttcagccgtaccgcccgtgaaggcggttgggacacgttcagtaatttctttggcctgaaatacgatccctccgatcgcgtcatcttcctgtatctggtggcgttgctgctggtggtgctaagcctgtttgtcattaaccgcctgctgcggatgccgctggggcgtgcgtgggaagcgttgcgtgaagatgagatcgcctgccgttcgctgggcttaagcccgcgtcgtatcaagctgactgcctttaccatcagtgccgcgtttgccggttttgccggaacgctgtttgctgcgcgccagggctttgtcagcccggaatccttcacctttgctgaatcggcgtttgtactggcgatagtggtgctcggcggtatgggatcgcagtttgcggtgattctggcggcaattttgctggtggtatcgcgcgaattgatgcgtgatttcaacgaatacagcatgttaatgctcggtggtttgatggtgctgatgatgatctggcgtccgcagggcttgctgcccatgacgcgcccgcaactgaagctgaaaaacggcgcagcgaaaggagagcaggcatga

SEQ ID NO: 482068 - DNA, 927 bp, Shigella sonnei
atgtctgagcagtttttatatttcttgcagcagatgtttaacggcgtcacgctgggcagtacctacgcgctgatagccatcggctacaccatggtttacggcattatcggcatgatcaacttcgcccacggcgaggtttacatgattggtagctatgtctcctttatgatcatcgccgcactgatgatgatgggcattgataccggctggctgctggtggcggcgggattcgtcggcgcaatcgtcattgccagcgcctacggctggagtatcgaacgggtagcctatcgcccggtgcgtaactctaagcgcctgattgcgctcatctcggcaatcggcatgtccatcttcctgcaaaactacgttagcctgaccgaaggttcgcgtgacgtggcgctgcccagtctgtttaacggtcagtgggtggtggggcatagcgaaaacttctctgcctctattaccaccatgcaggcagtgatctggattgttactttcctcgccatgctggcgctgacgattttcattcgttattcccgtatggggcgcgcctgccgtgcctgcgcggaagatctgaaaatggcgagcctgcttggcatcaacaccgaccgggtgattgctttgacctttgttattggcgcggcgatggcggcagtggctggcgtactgctcggtcagttctacggcgtcattaacccctatatcggctttatggccgggatgaaagcctttaccgctgcggtgctcggtgggattggcagcattccaggggcgatgattggcgggctgatcctggggattgcggaggcgctctcttctgcctatctgagtacggaatataaagatgtggtctcattcgccctgctgattctggtgctgctggtgatgccgaccggtattctgggtcgcccggaggtagagaaagtatga

SEQ ID NO: 482069 - DNA, 1110 bp, Shigella sonnei
atgaaacggaatgcgaaaactatcatcgcagggatgattgcactggcaatttcacacaccgctatggctgacgatattaaagtcgccgttgtcggcgcgatgtccggcccgattgcccagtggggcgatatggaatttaacggcgcgcgtcaggcgattaaagacattaatgccaaagggggaattaagggcgacaagctggttggcgtggaatatgacgacgcctgcgacccgaaacaagccgttgcggtcgccaacaaaatcgttaatgacggcattaaatacgttattggtcatctgtgttcttcttctacccaacctgcatcagatatctacgaagacgaaggtattctgatgatctcgccgggagcgaccaacccggagctgacccaacgcggttatcaacacattatgcgtactgccgggctggactcttcccaggggccaacggcggcaaaatacattcttgagacggtgaagccccagcgcatcgccatcattcacgacaaacaacagtatggcgaagggctggcgcgttcggtgcaggacgggctgaaagcggctaacgccaacgtcgtcttcttcgacggtattaccgccggggagaaagatttctccgcgctgatcgcccgcctgaaaaaagaaaacatcgacttcgtttactacggcggttactacccggaaatggggcagatgctgcgccaggcccgttccgttggcctgaaaactcagtttatggggccggaaggtgtgggtaacgcatcattgtcgaatattgctggcgatgctgccgaaggcatgttggtcactatgccaaaacgctatgaccaggatccggcaaaccagggcatcgttgatgcgctgaaagcagacaagaaagatccgtccgggccttatgtctggatcacctacgcggcggtgcaatctctggcgactgcccttgagcgtactggcagcgatgagccgctggcgctggtgaaagatttaaaagctaacggtgcaaacaccgtgattgggccgctgaactgggatgaaaaaggcgatcttaagggatttgattttggtgtcttccagtggcacgccgatggttcatccacggcagccaagtga

SEQ ID NO: 482070 - DNA, 384 bp, Shigella sonnei
atgaagctgaccatcattcgattagaaaactttagcgaccaggaccggattgacctgcaaaagatctggccggagtattccccttcctctttacaggttgacgataaccaccgtatctacgccgcgcgttttaacgagcgcctgctcgctgccgtacgggtaaccttaagcggcaccgagggagcactggattccctgcgtgtgcgggaagtcacccgacgtcgcggtgtggggcaatatctgctggaagaggttttgcgtaacaatcctggcgtttcatgctggtggatggcggatgcaggcgtggaagatcgcggtgtgatgacagcgtttatgcaggcactgggatttacggcgcaacagggcggctgggagaagcgttaa

SEQ ID NO: 482071 - DNA, 1104 bp, Shigella sonnei
atgaacataaagggtaaagcgttactggcaggatgtatcgcgctggcattcagcaatatggctctggcagaagatattaaagtcgcggtcgtgggcgcaatgtccggtccggttgcgcagtacggtgaccaagagtttaccggcgcagagcaggcggttgcggatatcaacgctaaaggcggcattaaaggcaacaaactgcaaatcgtaaaatatgacgatgcctgtgacccgaaacaggcggttgcggtggcgaacaaagtcgttaacgacggcattaaatatgtgattggtcacctctgttcttcatcaacgcagcctgcgtctgacatctacgaagacgaaggcattttaatgatcaccccagcggcaaccgcgccggagctgaccgcccgtggctatcagctgatcctgcgcaccaccggcctggactccgaccaggggccgacggcggcgaaatatattcttgagaaagtgaaaccgcagcgtattgctatcgttcacgacaaacagcaatacggcgaaggtctggcacgagcggtgcaggacggcctgaagaaaggcaatgctaacgtggtgttctttgatggtatcaccgccggggaaaaagatttctctacgctggtggcgcgtctgaagaaagagaatatcgacttcgtttactacggcggttaccacccggaaatggggcaaatcctgcgtcaggcacgcgcggcagggctgaaaactcagtttatggggccggaaggtgtggctaacgtttcgctgtctaacattgcgggcgaatcagcggaagggctgctggtgaccaagccgaagaactacgatcaggttccggcaaacaaacccattgttgacgcgatcaaagcgaaaaaacaggacccaagcggcgcattcgtttggaccacctacgccgcgctgcaatctttgcaggcgggcctgaatcagtctgacgatccggctgaaatcgccaaatacctgaaagcgaactccgtggataccgtaatgggaccgctgacgtgggatgagaaaggcgatctgaaaggctttgagttcggcgtatttgactggcacgccaacggcacggcgacagatgcgaagtaa

SEQ ID NO: 482072 - DNA, 855 bp, Shigella sonnei
atgactgacaaaatgcaaagtttagctttagccccagttggcaacctggattcctacatccgggcagctaacgcgtggccgatgttgtcggctgacgaggagcgggcgctggctgaaaagctgcattaccatggcgatctggaagcagctaaaacgctgatcctgtctcacctgcggtttgttgttcatattgctcgtaattatgcgggctatggcctgccacaggcggatttgattcaggaaggtaacatcggcctgatgaaagcagtgcgccgtttcaacccggaagtgggtgtgcgcctggtctccttcgccgttcactggatcaaagcagagatccacgaatacgttctgcgtaactggcgtatcgtcaaagttgcgaccaccaaagcgcagcgcaaactgttcttcaacctgcgtaaaaccaagcagcgtctgggctggtttaaccaggatgaagtcgaaatggtggcccgtgaactgggcgtaaccagcaaagacgttcgtgagatggaatcacgtatggcggcacaggacatgacctttgacctgtcttccgacgacgattccgacagccagccgatggcaccggtgctctatctgcaggataaatcatctaactttgccgacggcatcgaagatgataactgggaagagcaggcggcaaaccgtctgaccgacgcgatgcaaggtctggacgaacgcagccaggacatcatccgcgcgcgctggctggacgaagacaacaagtccacgttgcaggaactggctgaccgttacggtgtttccgctgaacgtgtacgccagctggaaaagaacgcgatgaaaaaactgcgcgctgctatagaagcgtaa

SEQ ID NO: 482073 - DNA, 1059 bp, Shigella sonnei
atgaataagcgcgatgcaatcaatcatattcggcagtttggtgggcgtctggatcgcttccgtaaatcggtcggcggctcaggcgacggcggtcgtaacgcaccgaaacgcgcgaaatcctcgccaaaaccggtaaatcgcaaaaccaacgttttcaacgaacaggtgcgctatgccttccacggcgcattgcaggatctgaaaagcaaaccgttcgccacgtttttaacggtgatggttatcgccatctccctgacgctgcccagcgtctgttatatggtgtacaaaaacgttaatcaggcggcgacgcagtattatccgtcaccgcaaatcactgtttacttgcaaaaaacgctggacgatgacgccgctgcgggcgtggtggcacagttgcaggccgagcaaggcgtggagaaagtgaactatctttctcgtgaagacgcactgggcgagttccgtaactggtctggttttggtggtgcgctggatatgctggaagaaaacccgcttccggcagtggcggtggtgatcccgaaactcgattttcaggggacggaatcactcaatacgctgcgtgatcgtatcacgcagattaacggcattgacgaagtgcggatggatgacagctggtttgcccgtctggcggcgttgaccgggctggtcgggcgcgtttcggcgatgatcggcgtgttgatggtggcggcagtgttcctcgtcatcggcaacagcgtacgtctgagcatctttgctcgccgtgactccatcaacgtgcagaaactgattggtgcgacggatggtttcatccttcgcccgttcctgtatggtggcgcactgctgggattttctggcgcattgttgtcattaattttgtcagaaattctggtgctgcgattgtcatcggcggttgcggaagtggcacaggttttcggaacgaagtttgatatcaatgatttatcgttcgatgaatgcctgctattgctgctggtatgctcgatgattggctgggtggcagcgtggcttgccacggtacaacatttacgccactttacgcctgaataa

SEQ ID NO: 482074 - DNA, 669 bp, Shigella sonnei
atgattcgctttgaacatgtcagcaaggcttatctcggtgggagacaggcgctgcagggcgttacgttccatatgcagccgggtgagatggcgtttctgaccggtcattccggcgcagggaaaagtaccctcctgaagctgatctgtgggattgagcggcccagcgccgggaaaatctggtttagcggccatgacatcacgcgtctgaaaaaccgtgaagttccgtttctgcgccgccagattggcatgattttccaggatcaccatctactgatggaccgtactgtctacgataacgtggcgatcccgctgattatcgctggtgccagcggtgacgatattcgtcgccgggtgtcggcggcactggataaagtcgggctactggacaaagcgaagaacttccctattcagctttccggcggtgaacaacagcgtgttggcattgcccgcgcggtggtgaataagcccgcggtactgctggcggacgaaccgaccggtaacctggacgacgcgttgtcggaagggattctacgtctgtttgaagagtttaaccgcgttggggtaaccgtattgatggcaacgcacgacatcaacctgatttcacggcgttcccatcgcatgctcaccctgagcgatggtcacttgcatggaggcgtgggccatgaataa

SEQ ID NO: 482075 - DNA, 1497 bp, Shigella sonnei
atggcgaaagaaaaaaaacgtggctttttttcctggctgggctttggtcaaaaagagcagaccccggaaaaagagacagaagttcagaatgaacaaccggttgtagaagaaatcgttcaggcgcaagagcctgtgaaggcttcggaacaagccgttgaagagcagccgcaggcgcatactgaagccgaggcggaaacttttgctgccgacgttgtggaagtcactgaacaggttgttgaaagtgaaaaagcgcagcctgaagcggaagttgttgcacagccggaaccggtcgtagaagaaacgccggagccagtggctatcgaacgtgaagagctgccgttgccggaagacgtcaacgccgaagaggtttcgccagaagagtggcaggctgaagcggaaaccgtagagattgtcaaagcggcggaagaagaagcggctaaagaagaaatcaccgacgaagagctggaagcacaggcgctggcagccgaagcagcagaagaggcggtgatggtggttcctccggcagaagaagagcagccggtggaagaaatcgctcaggagcaggaaaaaccaaccaaagaaggtttcttcgcgcgcctgaaacgcagcctgttaaaaaccaaagaaaatctcggttccggatttatcagcctgttccgcggtaaaaaaatcgacgatgatctgtttgaggagctggaagagcagcttttgatcgccgatgtgggcgtggaaaccacacgtaaaattatcaccaatctgacggaaggcgcatcccgcaagcagcttcgtgatgccgaggcgctctatggcctgctgaaagaagagatgggtgagattctggcgaaagtcgatgagccgctgaatgttgaaggtaaaacgccgttcgtgatcctgatggtgggcgtcaacggtgtgggtaaaaccacgacgattggtaagctggcacgtcagtttgagcagcagggtaaatcggtgatgctggcggcgggcgatactttccgtgcagcagcggttgaacagcttcaggtctggggtcagcgcaacaatattccggtgattgcccagcataccggggcggattccgcctctgttatcttcgacgccattcaggcagctaaagcgcgtaatatcgacgtcctgattgccgataccgccggacgcctgcagaacaaatcgcacctgatggaagagttgaagaaaatcgtccgcgtgatgaagaaactcgacgttgaagcgccgcatgaagttatgctgactattgatgccagcaccgggcagaacgcggtaagccaggccaaactgttccacgaagctgttggcttaaccggcatcacgctaacgaaactggacggcacggcgaaaggcggggtaattttctcggtggctgaccagtttggtatccctatccgctacattggtgtcggcgaacgtattgaggatttgcgtccgtttaaggcggacgactttatagaggcactttttgcccgagaggattaa

SEQ ID NO: 482076 - DNA, 597 bp, Shigella sonnei
atgaaaaaaccgaatcattccggcagcggccaaatccgcattattggcgggcagtggcgaggccgtaaactcccggttcctgatagcccaggtctgcgccccaccaccgaccgcgtacgcgaaacgttgtttaactggctggctccggtcattgttgacgcccaatgtctggattgcttcgccgggagcggcgcgctggggctggaagcgttatcgcgctacgctgcgggggccacgttaattgagatggatcgtgcagtttctcagcagttaattaagaatctggcgacactaaaagcaggcaatgcacgcgtggtgaacagcaacgcgatgtcattcctggcgcaaaaaggcacaccgcataatatcgtgtttgtcgatccaccgttccgccgtggcttgttagaagagacgataaatttactggaagataacggctggctggctgacgaagccctgatttatgtcgaaagcgaagtcgaaaacggtctgcccaccgttccggcaaactggtcgttacatcgggaaaaagtggcgggtcaggtggcttatcggctgtatcaacgcgaagcacaaggagaaagtgatgctgattaa

SEQ ID NO: 482077 - DNA, 270 bp, Shigella sonnei
atgctgattaatattggtcgtttgttaatgctctgcgtttggggatttttaatcctcaatctggtgcatcccttcccgcgcccgctaaatattttcgttaacgtggcgctgatttttaccgtgctgatgcatggtatgcagctggcgctattgaaatccactttaccgaaagatggcccgcagatgaccaccgccgaaaaggtacggattttccttttcggcgtgtttgaactgctggtctggcagaagaaatttaaagttaaaaaataa

SEQ ID NO: 482078 - DNA, 360 bp, Shigella sonnei
atgagcaaaccacctcttttctttattgttatcattggcttaattgtcgtcgccgcatcgtttcgttttatgcaacagcgacgggaaaaagctgataatgatatggctccgctccagcaaaagctggtggtggtgagcaacaagcgggaaaaaccgattaacgatcgccgttcgcgccagcaggaagtgactccggcaggcaccagtatgcgctacgaggcaagcttcaaaccgcaaagcggaggaatggagcagacgtttcgcctcgacgcccagcagtaccacgccctgacagtgggcgataaaggtacgctgagctataaaggaacgcgctttgttagctttgttggcgaacaataa

SEQ ID NO: 482079 - DNA, 627 bp, Shigella sonnei
atgctttggtcgtttatcgctgtctgtctttccgcatggctatctgtggatgcatcgtatcgtgggccaacctggcaacgctgggtgtttaaaccgttaacccttcttctcctgctgttactggcctggcaagcgccgatgttcgacgccattagctatctggtgctggcagggctgtgcgcctcactgctgggcgatgcgctaaccctgttgccacgtcaacgtctgatgtacgccatcggcgcgtttttcctctcgcacctgctgtacaccatctatttcgccagtcagatgacgctctctttcttctggcctctgccactggtgttgctggttctgggtgcgctgttactggcgattatctggacgcggctggaagagtatcgttggcctatctgcacgtttatcggcatgacgctggtgatggtgtggctggcaggtgaactgtggttcttccgtccgaccgctccggcgctctctgcgtttgttggcgcttcgttgctgtttatcagtaactttgtctggctggggagccactatcgccgacgcttccgtgcggataacgcgattgctgcggcctgctactttgccggtcacttcctcatcatccgctcactgtatctctga

SEQ ID NO: 482080 - DNA, 2199 bp, Shigella sonnei
atgtcgacacctgacaatcacggcaagaaagcccctcaatttgctgcgttcaaaccgctaaccacggtacagaacgccaacgactgttgctgcgacggcgcatgctccagctcgccaacgctctctgaaaacgtctccggcacccgctatagctggaaagtcagtggcatggactgcgccgcctgtgcgcgcaaggtagaaaatgccgtgcgccagcttgcaggtgtgaatcaggtgcaggtgttgttcgccaccgaaaaactggtggttgatgccgacaatgacattcgtgcacaagttgaatctgcggtgcaaaaagcgggctattccctgcgcgatgagcaggccgccgacgagccacaagcatcgcgcctgaaagagaatctgccgctgattacactaatcgtgatgatggcaatcagctggggtctggagcagttcaatcatccgttcgggcaactggcgtttatcgcgaccacgctggttgggctgtacccgattgctcgtcaggcattacggctgatcaaatccggcagctacttcgccattgaaaccttaatgagcgtagccgctattggtgcactgtttattggcgcaacggctgaagctgcgatggtgttgctgctgtttttgattggtgaacgactggaaggctgggccgccagccgcgcgcgtcagggcgttagcgcgttaatggcgctgaaaccagaaaccgccacgcgcctgcgtaacggtgagcgggaagaggtggcgattaacagcctgcggcctggcgatgtgattgaagtcgccgcaggtgggcgtttgcctgccgacggtaaactgctctcaccgtttgccagttttgatgaaagcgccctgaccggagaatccattccggtggagcgcgcgacgggcgataaagttcctgcaggagccaccagcgtagaccgtctggtaacgctggaagtgctgtcagaaccgggtgccagcgccattgaccggattctgaaactgatcgaagaagccgaagagcgtcgcgcccccattgagcggtttatcgaccgtttcagccgtatctatacgcccgcgattatggccgtcgctctgctggtgacgctggtgccaccgctgctgtttgccgccagctggcaggagtggatttataaagggctgacgctgctgctgattggctgcccgtgtgcgttagttatctcaacgcctgcggcgattacctccgggctggcggcggcagcgcgtcgtggggcgttgattaaaggcggagcggcgctggaacaactaggtcgtgttactcaggtggcgtttgataaaaccggtacgctgaccgtcggtaaaccgcgcgttaccgcgattcatccggcaacgggtattagtgaatctgaactgctgacactggcggcggcggtcgagcaaggcgcgacgcatccactggcgcaagccatcgtacgcgaagcacaggttgctgaactcgccattcccaccgccgaatcacagcgggcgctggtcgggtctggcattgaagcgcaggttaacggtgagcgcgtattgatttgcgctgccgggaaacatcccgctgatgcatttgctggtttgattaatgaactggaaagcgccgggcaaacggttgtgctggtagtacgtaatgatgacgtgctgggtatcattgcattgcaggataccctgcgcgccgatgctgcaactgccatcagtgaactgaacgcgctgggggtcaaaggagtgatcctcaccggcgataatccacgtgcagcggcggcaatcgccggggagctggggctggagtttaaagcgggcctattgccggaagataaagtcaaagcggtgaccaagctgaatcaacatgcgcccctggcgatggtcggtgatggtattaacgacgcgccagcgatgaaagctgccgccattgggattgcaatgggcagtggcacagacgtggcgctggaaaccgctgatgcagcattaacccataaccacctgcgcggcctggtgcaaatgattgaactggcacgcgccactcacgccaatatccgccagaacatcaccattgcgctggggctgaaagggatcttcctcgtcaccacgctgttagggatgaccggcctgtggctggcggtgctggcagatacgggtgcgacggtgctggtgacagcgaatgcgttaagattgttgcgcaggagataa

SEQ ID NO: 482081 - DNA, 246 bp, Shigella sonnei
atgaccgatctcttttccagccctgaccacacactcgacgcacttggcctgcgctgcccggaacccgtaatgatggtgcgcaaaactgtgcgcaatatgcagcctggcgaaacgttgctgattatcgccgacgatccggccactacccgcgatattcctgggttttgtacctttatggaacacgaactggttgcgaaagagacggatggactgccttatcgttatttgattcgtaaaggcggttga

SEQ ID NO: 482082 - DNA, 666 bp, Shigella sonnei
atgaacgttttctcgcaaactcaacgctataaggcgttgttctggttatcgttatttcatctgctggtgatcacctccagtaactatctggttcagcttcccgtctccattttgggtttccataccacctggggcgcgtttagcttcccgtttattttccttgctaccgacctgaccgtgcgtatttttggcgcaccgctggcccgtcgtatcatctttgcggtgatgatcccggcgttgctgatctcctacgtcatctcgtcgctattctatatgggttcctggcagggattcggcgtactcgcccacttcaacctgtttgtcgcccgtatcgccaccgccagtttcatggcctacgcgctgggacagatcctcgacgtgcacgtttttaaccgcctgcgtcagagtcgccgctggtggctggcaccgacagcgtccacactgttcggtaacgtcagcgacacgctggcctttttcttcattgccttctggcgtagcccggatgcctttatggctgaacactggatggaaatcgcgctggtcgattactgtttcaaagtgttaatcagtatcgttttcttcctgccaatgtatggcgtattactcaatattctgttgaaaagactggcagataaatccgaaatcaacgctttgcaggcgagttaa

SEQ ID NO: 482083 - DNA, 558 bp, Shigella sonnei
atgcgcaatctggttaaatatgtcggaattggcctgctggttatggggcttgcggcctgtgatgataaagacactaacgctacggcgcagggttcggtcgcggaaagtaacgctaccgggaatcccgtcaacctgcttgatggcaagttaagtttctcgctgccagcggatatgaccgaccagagcggtaagctgggaacgcaggccaataacatgcatgtctggtccgacgccaccgggcagaaagcagtcatcgtcatcatgggcgatgatccgaaagaagatctggcggtgttggcgaagcgtctggaagatcagcaacgtagccgcgatccgcagctgcaagtggtaaccaacaaagccattgagctgaaaggtcacaaaatgcagcagttagacagtattatctccgcgaaaggccagacggcgtactcttccgttattctgggtaacgtgggtaatcaactgctgaccatgcaaattactctgccagctgacgatcagcaaaaagcgcagaccaccgcagaaaacatcattaatacgctggttattcagtaa

SEQ ID NO: 482084 - DNA, 1251 bp, Shigella sonnei
atgaaacactgttgtaaaaatgtggtgatcctcatgcccgaacccgtagccgaacccgcgctaaacggattgcgcctgaatttgcgcattgtctccattgtcatgtttaacttcgccagctacctcaccatcgggttgccgctcgctgtattaccgggctatgtccatgatgtgatgggctttagcgctttctgggcaggattggttatcagcctgcaatatttcgccaccttgctgagccgtcctcatgccggacgttacgccgatttgctgggccccaaaaagattgtcgtcttcggtttatgcggctgctttttgagcggtctgggatatctgacggcaggattaaccgccagtctgcccgtcatcagcctgttattactttgcctgggacgcgtgatccttgggattgggcaaagttttgccggaacgggatcgaccctgtggggcgttggcgtggttggctcgctgcatatcgggcgagtgatttcgtggaacggcattgtcaattacggggcgatggcgatgggtgcgccgttaggcgtcgtgttttatcactggggcggcttgcaggcgttagcgttaatcattatgggcgtggcgctggtggccattttgttggcgatcccgcgtccgacggtaaaagccagtaaaggcaaaccactgccgtttcgcgcggtgcttgggcgcgtctggctgtacggtatggcactggcactggcttctgccggatttggcgtcatcgccacctttatcacgctgttttatgacgctaaaggttgggacggtgcggctttcgcgctgacgctgtttagctgtgcgtttgtcggtacgcgtttgttattccctaacggcattaaccgtatcggcggcttaaacgtggcgatgatttgctttagcgttgagataatcggcctgctactggttggcgtggcgactatgccgtggatggcgaaagtcggcgtcttactggcgggggcagggttttcgctggtgttcccggcattgggcgtagtggcggtaaaagcggttccgcagcaaaatcagggggcggcgctggcaacttacaccgtatttatggatttatcgcttggcgtgaccggaccactggctgggctggtgatgagctgggcgggcgtaccggtgatttatctggcggcggcgggactggtcgcaatcgcgttattactgacgtggcgattaaaaaaacggcctccggaacacgtccctgaggccgcctcatcatcttaa

SEQ ID NO: 482085 - DNA, 1050 bp, Shigella sonnei
atggaaatccctcaacccgataaaacgggcatgcacattctgctcaagctggcctcgctggtagtgatcctcgcgggcattcacgcagcggcagatatcattgtgcagctgttactggcgctgttttttgccatcgtcctcaacccgctcgttacctggtttattcgtcggggagtacaacgccccgttgccattacgattgtagtggtggtgatgctgatcgcactaaccgcgctggtcggcgtactggcggcatcgtttaacgaatttatctctatgctgccgaagtttaataaggagctgacgcgcaaactttttaaattgcaggagatgttgccttttcttaatttgcatatgtcgccggagcgaatgctgcagcggatggactcggaaaaagtggttaccttcaccacagcgctaatgaccgggctttccggggcaatggcgagcgtgcttttgctggtgatgaccgtagtttttatgctgtttgaagtgcgccacgtcccttacaaaatgcgttttgcgctgaataacccacagattcacatcgcaggattacaccgcgcacttaaaggcgtttcgcactatcttgcattgaagacgctactcagtttatggacaggtgtcatcgtctggctggggctggagctgatgggggtgcagtttgcgctgatgtgggcagtactggcgtttttgctcaactacgtgcccaatatcggcgcggtaatttccgccgtaccgccaatgattcaggtgctgctgtttaatggtgtttacgaatgtattctggtcggcgcattgtttttagtggtccatatggtcatcggcaatattttagaaccacggatgatgggccatcgcctggggatgtccaccatggtggtatttctttcattgttaatttggggatggctgctcggcccggtagggatgctactttcggtgccattaaccagtgtgtgtaaaatctggatggaaaccaccaaaggcggtagcaaactggcgattttactggggccaggcagaccgaaaagtcggttaccgggatga

SEQ ID NO: 482086 - DNA, 588 bp, Shigella sonnei; identical to SEQ ID NO: 463050

SEQ ID NO: 482087 - DNA, 1575 bp, Shigella sonnei
atgctctccacactccgccgcactctatttgcgctgctggcttgtgcgtcttttatcgtccatgccgctgcaccagatgaaatcactaccgcctggccggtgaatgtcgggccactaaacccgcacctttacacgcctaaccagatgttcgcccagagcatggtttatgaaccattggtgaaatatcaggcagacggttcggtgatcccgtggctggcaaaaagctggacttattcagaagatggtaaaacctggaccttcaccctgcgtgatgacgtgaaattctccaacggtgaaccgttcgatgccgaggcggcggcagaaaacttccgcgcagtgctcgataaccgtcaacgtcacgcctggctggagctggcaaaccagattgttgatgttaaagcactcagtaaaacagagctgcaaattaccctgaaaagcgcctactatcctttcctgcaagaactggccctgccccgtcctttccgttttatcgctccctcgcagtttaaaaaccatgaaaccatgaacggaattaaagcgccgattggcaccggaccgtggattttgcaggaatcgaaactgaatcagtacgatgtcttcgtccgtaacgaaaactactggggcgaaaagccagcgattaaaaagatcacctttaacgtcatcccggacccgactacccgcgcggtggcgtttgaaactggcgatatcgacctgctgtacggaaacgaagggttattaccgctcgataccttcgcccgctttagccagaatccggcttaccacacccaactgtcacagccgatcgaaaccgtgatgctggcgctcaataccgccaaagcccccaccaacgagctggcagtacgtgaagctcttaattacgcggtaaacaaaaaatcgctgattgataacgcgttatatggcaccccgcaggtcgccgacaccctgtttgccccttctgtgccttacgctaatctcggcctgaaaccgcgccagtacgatccgcagaaagcgaaagagttgctggaaaaagccggttggacgctgcctgcgggcaaagacatccgcgagaaaaatggtcagccgctgcgcattgaactgtcgttcatcggcaccgatgcgttaagcaaatcgatggcggaaatcattcaggctgatatgcgccagattggcgcagatgtctcgctgattggcgaagaagagagcagtatctatgctcgtcagcgcgacggtcgttttggcatgattttccaccgcacctggggcgcgccatacgatccacacgccttcctgagttcaatgcgcgtaccgtcgcacgctgacttccaggcacagcaaggattagccgacaagccgctgattgataaagagatcggcgaagtgctggcgacccatgacgaaacgcaacgtcaggcgctgtatcgcgacattttgacctgtctgcatgacgaggcggtttatctgcctatcagctacatctcgatgatggtggtatcaaaaccggagctgggtaatatcccctacgcgccgatcgccaccgaaattccgttcgaacagattaaaccggtgaaaccttaa

SEQ ID NO: 482088 - DNA, 945 bp, Shigella sonnei
atgttgcgttacgtattacgccgctttctgctgctgatcccgatggtgctcgccgcctcggtgatcatttttctgatgctgcgcctcggtaccggcgacccggcgctcgattatctgcgtttatctaacctgccgccgacgccggagatgctggcctctacccgcaccatgctcgggctggatcagccgctgtacgtccagtacggtacctggttgtggaaggcgctgcatcttgactttggtatctcattcgccagccaacgcccggtgctggacgatatgctgaacttcctgcccgccacgctggaacttgcaggtgcggcgctggtattaattctgctcacttccgtaccgctcggtatctgggcggcgcgccatcgcgaccgtctgccggatttcgccgtacgtttcatcgcgtttcttggcgtgtcgatgcctaacttctggctggcgtttttactggtgatggcgttttcggtgtatctgcaatggctacccgcgatgggttacggcggctggcagcacatcattttgcctgcggtttccattgcctttatgtcgctggcgattaacgcgcgactgctgcgcgccagtatgctggacgtcgccggtcagcgtcacgtcacttgggcgcgtctgcgcggcctgaacgacaaacagaccgaacgccgccatattctgcgcaatgcctcgctgccgatgatcaccgccgtggggatgcacatcggcgaactgattggcgggacgatgattatcgaaaacatctttgcctggccgggcgtcgggcgctatgcggtgtcggcgatttttaaccgtgactatccggtgattcagtgctttacgctgatgatggtggtggtttttgtggtctgtaatttgattgtcgatttgctcaacgccgcgctggacccgcgcattcgtcgtcatgaaggagcgcacgcgtga

SEQ ID NO: 482089 - DNA, 834 bp, Shigella sonnei
gtgaactttttcctctcttcccgctggtcggtacgcctggcgctgatcattatcgccctgctggcgctgattgcgctcaccagccagtggtggctgccgtatgacccccaggcgattgatttgccgtcgcgcctgctttcgccggatgcgcagcactggctgggcaccgatcacttaggtcgcgatattttctcgcggctgatggcagcgacccgcgtgtcgctcggttcggtaatggcctgcctgctgctggtgctgacattagggctggttattggcggcagcgccgggttgattggcgggcgcgttgatcaggccaccatgcgcgtcgccgatatgtttatgaccttcccgacctcgattctgtcgttctttatggttggcgtgctcggcaccgggctgaccaacgtaattatcgccatcgccctgtcgcactgggcgtggtatgcacgcatggtgcgcagcttggtgatttcactacgccaacgcgagtttgtgctggcgtcacggctttccggtgcgggccatgtgcgggtgtttgtcgatcatctggcaggcgcggtgatcccttcgctgctggtgctggcaacgctggatatcggccatatgatgctgcacgtcgcggggatgtctttccttggcctcggtgtgaccgcgccgaccgccgaatggggcgtgatgattaacgacgcgcgccagtatatctggacccagccgctgcaaatgttctggccggggctggcgctgtttatcagcgtgatggcctttaacctggtgggtgacgcactgcgcgatcatctggatcctcatctggtgacggagcacgcacactaa

SEQ ID NO: 482090 - DNA, 765 bp, Shigella sonnei
atgccgcaacagattgaactacgtaatatcgcgctacaggccgcgcagccgctggtacacggtgtatcgttaaccctgcaacgcgggcgcgtgctggcgttagtcggcggtagcggcagcgggaaatcattaacctgcgccgcgacgctgggcattttgcccgctggcgttcgccagacggcgggggaaattttagccgatggcaaagcggtttatccctgcgccctgcgcggcatcaaaattgccaccatcatgcagaacccgcgcagcgcctttaatccgctacacaccatgcacacccacgcgcgggaaacctgcctggcgttagggaaacccgccgatgacgctacgcttaccgctgccatagaagcggtggggctggaaaacgccgcgcgcgtgctgaagctgtacccgttcgagatgagcggcggcatgttgcagcgcatgatgattgcgatggcggtgctgtgtgaatcaccgtttatcatcgccgatgaaccgaccaccgacctcgacgtggtagcacaggcgcgcatcctcgatctgctggaaagcattatgcaaaaacaagcgccgggaatgctgctggtcacccatgatatgggcgttgtggcgcgtctggcggatgacgtggcggtgatgtcacaaggtaaaattgtcgaacagggcgatgtagaaacgctgtttaacgcccccaaacatgcggtaacgcgcagcctggtttccgctcatctcgccctctacggtatggagctggcatcatga

SEQ ID NO: 482091 - DNA, 807 bp, Shigella sonnei
atgactttacttaacgtctccggcctttcccatcactatgcccacggtggatttaacggaaaacatcaacatcaggcggtgctgaataacgtttccctgaccctgaaaagcggcgaaaccgtcgccctgctggggcgcagcggctgcgggaaaagtaccctcgcgcggttgctggtgggtttagaatcgcccgcgcaggggaatattagctggcgtggcgaaccgctggcgaaactcaatcgcgcccagcgtaaagcgttccgccgcgatattcagatggtatttcaggactccatcagcgccgtgaatccgcgcaaaaccgtgcgcgagatcctgcgtgaaccgatgcgccacctgctatcactgaaaaaatccgaacaactggcgcgcgccagcgaaatgctgaaggcggtcgatctcgatgacagcgttctcgacaaacgcccaccgcagttaagcggcggccagctccagcgcgtctgcctggctcgcgcgctggcggtcgaaccgaaactactgattctggatgaagccgtttctaaccttgatctcgtgttacaggcgggcgtcattcgcctgctgaaaaagctacaacaacagtttggcaccgcctgcctgttcatcacccacgacttacgcctggtggaacgcttctgtcagcgggtgatggtgatggacaacggacaaatcgtcgaaacccaggtggtgggagataaattaaccttttcctctgacgccggacgtgtgctacaaaacgcggtattacccgcattccccgtgcgccgtcgcaccacagaaaaggtttaa

SEQ ID NO: 482092 - DNA, 402 bp, Shigella sonnei; identical to SEQ ID NO: 461059

SEQ ID NO: 482093 - DNA, 360 bp, Shigella sonnei
atgatcaaactgaagacgccaaactctatggagattgccgggcaaccagctgttattacctacgtgccagaactgaatgcatttcgtggcaaattcctgggcttgtcaggttattgtgattttgtctctgacagcattcaggggctgcaaaaagaaggggaactttccctgcgagagtatcttgaggattgtaaagctgcgggtattgagccgtatgcgcgtacagaaaagattaagacctttacgttacgctatccagaatcgctgagtgaacgccttaataatgcggctgcgcagcaacaagtctctgttaatacctatattattgaaacactgaatgagcgtttgaatcatttataa

SEQ ID NO: 482094 - DNA, 1125 bp, Shigella sonnei
atgcgccatttacgcaatatttttaatctgggtatcaaagagttgcgcagtctgctcggtgataaagcgatgctgacgctgattgtcttctcgtttacggtgtcggtgtattcgtcagcgaccgttacgccaggatcgttgaacctcgcgccgatcgccattgccgatatggatcaatcgcagttatcgaaccggatcgttaacagcttctatcgtccgtggtttttgccaccggagatgatcaccgccgatgagatggatgccggactggacgccggacgctataccttcgcgataaatattccgcctaattttcagcgtgatgtcctcgccggacgccagccggatattcaggtgaacgtcgatgccacgcgcatgagccaggcatttaccggcaatgggtatatccagaatattatcaacggtgaagtgaacagctttgtcgcgcgctaccgtgataacagcgaaccgttggtatcgctggaaacccggatgcgctttaacccgaacctcgatcccgcgtggtttggcggggtgatggcgatcatcaacaacattaccatgctggcgattgtattgaccggatcggcgctgatccgcgagcgtgaacacggcacggtggaacacttactggtgatgccgataacgccgtttgagatcatgatggcgaagatctggtcgatggggctggtggtgctggtggtatcgggattatcgctggtgctgatggcgaaaggtgtactgggcgtaccgattgaaggctcgatcccgctgtttatgctgggcgtggcgctcagtctgtttgccaccacgtcaatcggcatttttatggggacgatagcgcgttcaatgccgcaactggggctgctggtgattctggtgctgctgccgctgcaaatgctttccggtggatccacgccgcgcgaaagtatgccgcagatggtgcaggacattatgctgaccatgccgacgacacactttgttagcctcgcgcaggccattctctaccggggtgccggattcgaaatcgtctggccgcagttcctgacgctgatggcaattggcggcgcgtttttcaccattgcgctgctgcgattcaggaagacgattgggacaatggcgtaa

SEQ ID NO: 482095 - DNA, 2736 bp, Shigella sonnei
atgacgcatctggaactggttcccgtcccgcctgtcgcgcaactggcgggcgtgagccagcattatggaaaaaacgttgcgctgaacaatattactctcgatattccggcccgctgtatggtcgggctgattggtccggatggcgtcgggaagtcgagcttattgtcgttgatttccggtgcccgcgtcattgagcagggcaatgtgatggtgctgggcggcgatatgcgcgacccgaggcatcgccgcgacgtctgcccgcgcatcgcctggatgccgcaggggctgggcaaaaacctctaccacaccttgtcggtgtatgaaaacgtcgattttttcgctcgcctgttcggtcacgacaaagcggagcgggaagtgcgaattaatgagctgctgaccagcacggggttagcaccgtttcgcgatcgtccggcagggaaactctccggcgggatgaagcaaaaacttgggctgtgctgcgcgttaatccacgacccggaactgttgatccttgatgagccaacaacgggggttgacccgctctcccgctcccagttctgggatctgatcgacagtattcgccagcggcagagcaatatgagcgtgctggtcgccaccgcctatatggaagaggccgaacgcttcgactggctggtagcgatgaatgccggagaagtgctggcaactggcagcgccgaagagctacggcagcaaacgcaaagcgctacgctggaagaagcatttataaatctgttaccgcaagcgcaacgccaggcgcatcaggcggtagtgatcccaccgtatcaacctgaaaacgcagagattgccatcgaagcgcgcgatctgaccatgcgttttggttccttcgttgccgttgatcacgttaatttccgcattccacgcggggagatttttggttttcttggttcgaacggctgcggtaaatccaccaccatgaaaatgctcaccggactgctgcccgccagcgaaggtgaggcgtggctgttcgggcaaccggttgatccaaaagatatcgatacccgccgtcgggtgggctatatgtcgcaggcgttttcgctctataacgaactcaccgtgcggcaaaaccttgagttacatgcccgtttgtttcacatcccggaagcggaaattcccgcaagagtggctgaaatgagcgagcgttttaagctcaacgacgttgaagatgttctgccggagtcattgccgctcggcattcgccagcggctttcgctggcggtggcggtgattcatcgcccggagatgttaatcctcgatgagcctacttctggtgtcgatccggtggcgagggatatgttctggcagttgatggtcgatctctcgcgccaggacaaagtgactatcttcatctctacccactttatgaacgaagcggaacgttgcgaccgcatctcactgatgcacgccggaaaagtgcttgccagcggtacaccgcaggaactggttgagaaacgcggagccgccagtctggaagaggcatttatcgcctatttgcaggaagcggcagggcagagcaacgaagccgaagcgccgcccgtggtacacgacaccacccacgcgccgcgtcagggatttagcctgcgccgtctgtttagctacagccgccgcgaagcgctggaactgcgacgcgatccagtacgttcgacgctggcgctgatgggaacggtgatcctgatgctgataatgggttacggcatcagtatggatgtggaaaacctgcgctttgcggtgctcgaccgcgaccagaccgtcagtagccaggcgtggacactcaacctctccggttcccgttactttatcgaacagccgccgctcactagttatgacgagcttgatcgtcggatgcgtgcgggcgatatcacggtggcgattgagatcccgcccaatttcgggcgcgatatcgcgcgtggtacgcctgtggaactcggcgtctggatcgacggagcgatgcccagtcgtgccgaaacggtaaaaggttacgtgcaggcaatgcaccagagttggcttcaggatgtggcgagccgacaatcgacacccgccagccaaagcgggctgatgaacattgagacgcgctatcgctataacccggacgtaaaaagcctgccagcgattgttccggcggtgatcccgcttctgctgatgatgatcccgtcaatgctaagcgcccttagcgtggtgcgggaaaaagagctagggtcgattatcaacctttacgtgacccccaccacccgtagcgaatttttgcttggcaaacagctgccgtacatcgcgctggggatgctgaactttttcctgctctgcggcctgtcggtgtttgtgtttggcgtaccgcataaaggcagtttcctgacgctcaccctggcggcgctgctgtatatcatcattgccaccggaatggggctgctgatctccacctttatgaaaagccagattgccgccattttcggaacggcgattatcacgttgatcccggcgacacagttttccgggatgatcgatccggtagcttcgctggaagggcctggacgttggatcggcgaggtttacccgaccagtcattttctgactatcgcccgcggaacgttctcgaaagcgctggatctgactgatttgtggcaactttttatcccgttgctgatagccatcccgctggtgatgggcttaagcatcctgctgctgaaaaaacaggagggatga

SEQ ID NO: 482096 - DNA, 1068 bp, Shigella sonnei
atggataagagtaagcgccatctggcgtggtgggttgtcgggttactggtggtggctgccgtcgtggcgtggtggctgttgcgcccggcgggtgtgccggaaggctttgctgtcagcaatgggcgcattgaagcgacggaagtggatatcgccagcaaaattgccgggcgtatcgacaccattctggtgaaagaaggccagtttgttcgcgaaggcgaagtgctggcgaagatggatactcgcgtgttgcaggagcagcgactggaagccatcgcgcaaatcaaagaagcacaaagtgccgttgctgccgcgcaggctttgctggagcaacggcaaagcgaaactcgtgccgcgcagtcgctggttaatcaacgccagtccgaactggactccgtggctaaacgtcatacgcgttcccgctcgctcgcccaacgaggggctatttctgcgcaacagctggatgacgatcgcgccgccgctgagagcgcccgagctgcgctggaatcggcaaaagctcaggtatcggcttctaaagcggctatagaagcggcccgtaccaatatcattcaggcccaaactcgcgtcgaagccgcgcaagccactgaacggcgtattgccgcagatatcgatgacagtgaactgaaagccccgcgtgacggacgcgtgcagtatcgggttgctgagccaggggaagtgctggcggcaggcggtcgggtgctgaatatggtcgatctcagcgacgtctatatgactttcttcctgccaaccgaacaggcgggcacgctgaaacttggcggtgaagcccggctgatcctcgatgccgcgccagatctgcgtattccggcgaccatcagttttgtcgccagtgtcgcccagttcacgccaaaaaccgtcgaaaccagcgatgaacggctgaaactgatgttccgcgtcaaagcgcgtatcccaccggaattactccagcagcatctggaatatgtcaaaaccggtttaccgggcgtagcgtgggtgcgggtgaatgaagaactttcgtggcctgacgacctcgtggtgaggttgccgcaatga

SEQ ID NO: 482097 - DNA, 1623 bp, Shigella sonnei
atgaaaattggaactgtggcaggcactaacgacagtacaacgacaatcacaacaaatgatatggtgcaagagcatgttaccaacttcactaaagaactgtttgggtatattgcaaatggtataggtgatgatatatcaagtattgccaggacaatgctcggtgaggttgtggaaaaaatagatgattggcaaatagaacggttccaacaatctattcaagatgacaaaatttcatttaccatacaaacgaatcattcagaaaaatatagtatgctatcgggcatgcgcgctcatattctacgtaggaataactgttatcagtttattgtgacaattaatagtaaaaattacggttgccctcttgataataccgatattaattggtgcagcattgtttatttacttaataatatgacagtaaatgataatgctaatgatgttgcagttactgagtcgtacaaacccatctggaactggaaaatatcgcaatacaatgtatttgatattaaattcgaaacaatgataaaaccccagttcgctgacagaacctatttctccaattgttcacctgttgatcccacaagtaccagaccgacctattttggcgataccgatggctcagtcggtgcagttttgtacgcgctttttgcaacgggacatttgggaatcatggctgaaggagaaaatttccttagccagttgcttaatatagaagatgaagttctcaacgtattgctaagggagaactttaatgagcaacttgacactaatgttaatataataatcagtatcctgaacagaagagacattgttttagaaagtcttcagccttatttggttattaataaagacgcagtcacgccatgtacgtttctgggcgaccagactggcgatcgatttagtaatatctgtggcgataaatttatcatcgatttattaaaacgcataatgagtatcaatgaaaacgttcatgtattagctggaaatcatgaaacgaattgcaatggtaactatatgcagaacttcacgcgcatgaaaccacttgatgaggatacctactctgggataaaagattatcctgtatgtttctatgaccccaaatacaaaataatggcaaatcatcatgggataacttttgatgatcagcgaaaacgttacattataggaccgataacagtctctagtgatgaaatgaccaatgctctcgatccggtcgaattagcggcaattatcaataaaaagcaccatgctgtaattaatggcaaaaagtttaaaaatagccgggctatctcttgtcgatcctttaatcgttatttttctgtttcgacagattacagacctaaacttgaagcactattagcatgctcacaaatgttaggtataaatcaagttgttgcacataacggtaatggtggaagagaatgtataggtgaaacggggacagttttaggtcttaacgcccgtgacagtaaacatgctggaagaatgttcagcatgcataattgccaaattaaccctggtgcagggcctgagataaccactccctggaagtcttaccagcatgaaaaaaacagaaatggacttatgcctttgatcagaaggcgcacaatgttacagctctga

SEQ ID NO: 482098 - DNA, 1608 bp, Shigella sonnei
atgaaagtatttcacaatatatttaagcacttctcttcaaaccatcaagataagcattcagataaagttaacagtcatcaacaccatggcaaggttgataaaaaatatcgatcaaacacagttgaagttaatatgctgaatgacttttcgcaaatagataacgatttaggcctgaatatcatctatttcctgcaacatggtcactggagggtaaatgaacatagtcttcagatggagaaaatatggttttacaatagtgagccatctatagatattcaagaatataatagtttcgccgataatactactaacacgtttatctttacaattataccagacaataaccatgtgataaaattatcgtctcccattacagttaagattgagtgtaaggatggttattattttattaatttctccggagataaatcagacataatttataaatcagacataacttataaagttaatgggctttctatcatacctgaaaatttctttactcttcttagcggtaattttaaagctgactggcgttgggatgtctctaaagagacgtttcctaaggataagtttgatagctatgttaaatctgtgttttctaaaatagacttttataaacaatgtggtgtgattaacccacaaaatgccaacacggcttattttggcgatacagatggaagagtaggcgctgtactttatgcattgctcgtttcagggcatataggcatcagggaaaagggttggagtttattatgtgaattattaaaacacgaaaacatggcttcatctgcatacatacataaaaataataaattgctctacaatttattaaatacgagagacatgatattgaatgagttgcatcaacatgtttttttaaaggacgatgcgataaccccttgtatcttccttggggatcatacaggcgatagatttagtactatttttggtgataaatatatccttactttgctaaattctatgcgaaatatggatggtaataaagatagccgtattaataaaaatgtcatcgttctggctggaaatcatgaaatcaattttaatggtaactatactgcacgactagaaaattataaactctctgccggtgatacgtataacttaattaaaacgctcgatgtttgtcattatgactcagaaacgaaagttttaaccagtcatcacggaataataagaaatgaagaaaatgaatgttattgtctcggtgctttgcaggttccatttaatcagatgaaagacccaattgatcctgaggaattagcaaatatatttaataaaaaacataaacaacacatggatgatcgtcttatccatctaattagaagcaatgctgtagcatccacacctgtatatgaaaattattttaataacactactgctttcagaccaaaacctgaagatatcttcaaatgtggacagacgctcaaaaaaactaaacagaaatatggccattatggattaggggtagatcagcatcaaaaaattgataattataccatggggctaaattcctggaagatagcacctaacgaacgtggtgataaaaaaggtgtcccagggcttagttgttttcaacctcaataa

SEQ ID NO: 482099 - DNA, 975 bp, Shigella sonnei
gtgctggaaagttcagggcaaagcgagtatttcgtcgcgggtcatgtgctgatttctctggcggccatatgcctggcattattcactaccgcatttattatcatttcgcagctcacgcgcggcgttaatacgttttacaatacattgttccccattattggctatgcggggtcaattatcaccatgatatggggttgggcactgttagcaggcaatgatgtgatggcagacgagtttgtcgccggccatgttattttcggcgttggtatgattgccgcctgtgtatcgacggtggcagcgtcatccggtcactttctgctcattcccaaaaatgcagcggggagcaagagcgatggaacgccggtacaggcttattcttcattaatcggtaattgcctcattgccgttcccgttttactcaccctgctcggtttcatttggtctattacgctgttacgtagtgctgacataactccgcattatgtcgcgggtcacgtattgcttgggttaaccgcaatctgtgcctgtctaattggccttgttgccacaattgtccatcaaacacgtaatacgttttcaactaaagaacactggctgtggtgttattgggttatttttctcggctcaatcacggtactgcaggggatatacgtcttagtcagttccgatgcaagcgcccgactggctcccggcattattcttatttgcctcggaatgatctgttacagcatattctcaaaagtctggctactggcactggtctggagacgtacctgttcgttagccaacagaataccgatgatacccgtcttcacctgcctgttttgccttttcctggcatcatttcttgcggaaatggcgcagaccgacatgggatattttattccttcgcgagttctggtcggtttgggagcggtatgctttacgttgttctcaatcgtttcaatattagaagcgggttctgctaaaaaataa

SEQ ID NO: 482100 - DNA, 1203 bp, Shigella sonnei
gtggaaaggtttgatgccattattataggcgctggtgcggcgggtatgttctgttctgcgctggcaggtcaggcaggacgccgggttctgctgatcgataatggtaaaaaaccagggcgcaaaatccttatgtctggcggtgggcgctgcaactttaccaacctttatgtcgaaccaggcgcttatctgagccagaatccgcatttttgtaagtctgcactcgcacgttttacccagtgggatttcattgatctggtcaataaacacggcatcgcatggcacgagaaaacgttagggcaactcttctgcgatgactccgcgcagcagattgtcgacatgctggtggatgagtgcgagaagggcaatgtgaccttcagattgcgtagcgaagtgctgagtgtggcggaggatgaaacaggcttcacgcttgatctgaacggcatgactgtcggttgcgaaaagctggtcatggcgaccggtgggctgtcaatgccggggctgggcgcgtcgccgtttggttataagattgccgaacaatttggcctcaacgtgctgccgacccgtgcgggtctggtgccattcactctgcataaaccgttgctcgaagagttacaggtgctggcgggcgtggcggtgccttccgtgattaccgctgaaaacggcatcgttttccgtgagaacttactcttcacccatcgcggcttgtctggaccggcggtgttgcagatttccagctactggcaaccgggtgaatttgtcagtatcaatctgctaccggatgtggatctcgaaaccttcctgaatgagcagcgtaacgcacatccgaatcagagcctgaaaaacacactggcggttcatctaccgaagcggttggttgaacgcttacagcaactcgggcaaatcccgaatgtttcgctaaaacagctcaacgtgcgtgaccaacaggcactgattagcacattgaccgactggcgtgtacaacccaacggcactgaaggctatcgcactgccgaagtgacgctcggcggcgtggacaccaacgaactctcttcacggacgatggaagcgcgcaaagtgcctgggctgtacttcatcggcgaagtgatggacgttaccggctggctggggggctataacttccagtgggcgtggtcgagtgcgtgggcttgtgcgcaggatttgattgcagcgaagtcgtcctga

SEQ ID NO: 482101 - DNA, 1500 bp, Shigella sonnei
atgctacatttgtttgctggcctggatttgcataccgggctgttattattgcttgcactggcttttgtgctgttctacgaagccatcaatggtttccatgacacagccaacgccgtggcaaccgttatctatacccgcgcgatgcgttctcagctcgccgtggttatggcggcggtgttcaactttttgggtgttttgctgggtggtctgagtgttgcctatgccattgtgcatatgctgccgacggatctgctgcttaatatgggatcgtctcatggccttgccatggtgttctctatgttgctggcggcgattatctggaacctgggtacctggtactttggtttacctgcatccagctctcatacgctgattggcgcgatcatcgggattggtttaaccaatgcgttgatgaccgggacgtcagtggtggatgcactcaatatcccgaaagtattaagtattttcggttctctgatcgtttcccctattgtcggcctggtgtttgctggcggtctgattttcttgctgcgtcgctactggagcggcaccaagaaacgcgcccgtatccacctgaccccagcggagcgtgaaaagaaagacggcaagaaaaagccgccgttctggacacgtatcgcgctgatcctttccgctatcggcgtggcgttttcgcacggcgcgaacgatggtcagaaaggcattggtctggttatgttggtattgattggcgtcgcgccagcaggcttcgtggtgaacatgaatgccactggctacgaaatcacccgtacccgtgatgccatcaacaacgtcgaagcttactttgagcagcatcctgcgctgctcaaacaggctaccggtgctgatcagttagtaccggctccggaagctggcgcaacgcaacctgcggagttccactgccatccgtcgaataccattaacgcgctcaaccgcctgaaaggtatgttgaccaccgatgtggaaagctacgacaagctgtcgcttgatcaacgtagccagatgcgccgcattatgctgtgcgtttctgacactatcgacaaagtggtgaagatgcctggcgtgagtgctgacgatcagcgcctgttgaagaaactgaagtccgacatgcttagcaccatcgagtatgcaccggtgtggatcatcatggcggtcgcgctggcgttaggtatcggtacgatgattggctggcgccgtgtggcaacgactatcggtgagaaaatcggtaagaaaggcatgacctacgctcaggggatgtctgcccagatgacggcggcagtgtctatcggcctggcgagttataccgggatgccggtttccactactcacgtactctcctcttctgtcgcggggacgatggtggtagatggcggcggcttacagcgtaaaaccgtaaccagtattctgatggcctgggtgtttacccttccggctgcggtactgctttccggcgggctgtactggctctccttgcagttcctgtaa

SEQ ID NO: 482102 - DNA, 336 bp, Shigella sonnei
atgataagcaccgtcgcattattttgggctttatgtgtcgtttgcattgttaacatggcgcgctatttctcatcactacgcgcgttgttagtggtactgcgtaactgcgatccattgctctatcaatatgttgatggagggggcttttttacctcacatggccaacccaacaaacaggtgcgtctcgtttggtatatctatgcccaacgttatcgcgatcatcacgatgatgaatttattcgccgctgtgagcgggtgcgtcggcagtttattctgaccagcgcattgtgtggtctggtggtggtcagcctgattgcattgatgatttggcattaa

SEQ ID NO: 482103 - DNA, 435 bp, Shigella sonnei
atggcttataaacacattctcatcgcggtcgatctctccccggaaagcaaagttctggtagagaaagcagtctctatggctcgcccctacaatgcgaaagtttctctgatccacgtagatgtaaactactctgacctatacaccgggcttattgatgtgaatctgggtgatatgcagaaacgcatctctgaagagacacatcatgcgctgaccgagctttccactaatgcaggctacccaatcactgaaaccctgagcggcagcggcgacctgggccaggttctggtcgatgcaatcaagaaatacgatatggatctggtggtttgtggtcaccaccaggacttctggagcaaactaatgtcttccgcacgtcagctgatcaacaccgttcacgttgatatgctgattgttccgctgcgcgacgaagaagaataa

SEQ ID NO: 482104 - DNA, 1470 bp, Shigella sonnei
atgaatacaacaacacccatggggatgctgcagcaacctcgcccatttttcatgatcttttttgtcgagttatgggagcgattcggctactacggcgtgcagggcgtactggcggttttcttcgttaaacagcttggattctcgcaagagcaggcttttgtcacttttggtgcttttgctgcgctggtctatggcctcatttccattggcggctatgtcggcgaccacctgctggggaccaaacgcaccattgttctcggagcacttgtgctggcgattggctacttcatgaccggcatgtcgctacttaagcctgacctgattttcatcgccctggggactatcgctgtcggtaacggcctgtttaaagctaacccagccagcttgctttcgaagtgctatccgccgaaagatccgcggcttgatggcgcattcaccctgttctatatgtcgatcaatatcggctcgttgatagcgttatcgctggcccctgtgatcgctgatagatacggttattcagtcacctacaacctgtgcggggcggggttaattatcgcattactggtttacatcgcctgtcgtggaatggtgaaagacattggttctgaacccgacttcaagccgatgagcttcagcaaactgttgtacgtattacttggcagcgtggtgatgatcttcgtatgtgcatggctgatgcacaacgtagaagtcgccaatctggtgctgattgttctctccatcgtcgtcaccatcatcttctttcgtcaggcattcaagctggataaaaccgggcgcaataaaatgtttgtcgcctttgtcctgatgctcgaagcggtggtgttttacattctctacgcccagatgccaacgtcgctgaacttctttgccatcaacaacgtgcatcatgaaattctcggcttttccataaacccggtcagcttccaggcgcttaacccgttctgggtggtactcgccagcccaatactggcaggcatttacacgcatctgggtaacaaaggcaaagacctctcgatgccgatgaaatttactctcggcatgtttatgtgctcactgggctttttgacggcggcagctgcgggaatgtggtttgcggatgcacaagggctgacatcgccatggtttatcgtgctggtgtatttattccagagcctgggtgaattgtttattagcgcccttggcctggcgatgattgctgccctggtgccgcagcatttgatgggctttattctcgggatgtggttcctgacgcaggctgccgcattcttgctgggcggctatgtggcaacatttaccgcagtgccggacaacattaccgatccgcttgagacgttacccgtctataccaacgtgtttggtaagattggcctggttacgctgggcgttgcagtagtgatgctgttgatggtgccgtggctgaaacgcatgattgcgacgccggaaagccattaa

SEQ ID NO: 482105 - DNA, 753 bp, Shigella sonnei
gtgaaaatctgcttaattgatgaaacaggcgccggagacggcgccttatctgttctggcggcccgctgggggctggagcacgatgaagacaacctgatggcgctggtgttaacgccggaacatctggaattgcgcaagcgtgatgagccaaaacttggcggcatctttgttgattttgttggcggagcgatggcgcaccgacgcaaattcggcggtggtcgcggtgaggcggtggcgaaagcggtgggcattaaaggcgattatttgccggatgtggtggatgccactgcaggactggggcgcgatgcctttgtgctggcttcagtcggttgccgcgtgcggatgctggagcgtaatccagttgttgccgcgctgctcgacgacggcctggcgcgtggttatgcggatgcggaaatcggcggctggttgcaggagcgtttgcagttaattcacgcctccagcctgacggcgctaaccgatattaccccacgcccgcaggtggtctatctcgacccgatgttcccgcataagcagaaaagcgcgctggtgaaaaaagagatgcgtgtctttcagtcgctggtggggccggatcttgatgccgatggattgctggagcctgcacgcttgctggcgaccaaacgcgtggtagtaaagcgcccggactacgcgccaccgctagcgaatgtcgccacgccaaacgcggttgtgactaaagggcatcgctttgatatctatgcaggtacgcccgtgtaa

SEQ ID NO: 482106 - DNA, 2043 bp, Shigella sonnei
atgacgaatccgttactgactccctttgaattgcctccgttttctaaaattctcccggaacatgtcgttccagccgtgactcaggcgctgaacgattgccgcgaaaatgtggcgcgcgtagtagcgcaaggggcaccgtacacctgggaaaatctctgccagccgttggcggaagtggacgatgtgttggggcgtatcttctccccggtcagccacctgaactcggtgaaaaatagcccggaactgcgtgaagcctacgagcaaaccctgccgctgctgtcggaatacagcacctgggtagggcaacatgaagggctgtataaagcgtaccgcgacctgcgcgatggcgatcattacgccacgctgaacacggcgcagaagaaagcggttgataacgccctgcgtgattttgaactctctggcataggtctgccgaaagagaaacagcagcgttacggcgaaattgctacccgtctttctgaactgggcaaccagtacagcaacaacgtcctcgatgcgacgatgggctggaccaaactcgttaccgacgaagcggggctggcggggatgccagaaagcgcgctggctgcggcaaaagcccaggccgaagcgaaagagctggaaggctacctgctgacgctggatatcccaagctacctgccggtaatgacctactgcgacaaccaggctctgcgcgaagagatgtatcgcgcttacagcacccgcgcctccgatcaaggcccgaacgccggtaagtgggataacagcaaggtgatggaagagatcctcgcgctgcgtcacgaactggcgcaactgctgggctttgaaaactacgcctttaaatcccttgccactaaaatggcagaaaacccgcagcaggtgctggatttcttaaccgatctggcaaaacgcgcgcgtccgcaaggcgaaaaagagctggagcaactgcgtgccttcgctaaagccgaatttggtgtcgatgagttgcagccgtgggatatcgcttactacagcgaaaaacagaaacagcacctctacagcatcagcgacgagcagctgcgtccgtacttcccggaaaacaaatcggttaacggcctgtttgaagtggtgaaacgtatttacggcatcaccgctaaagagcgtaaagaggttgatgtctggcatccggatgtacgtttcttcgaactgtatgacgaaaataacgaactgcgcggcagcttctacctcgatctgtatgcccgtgaaaacaagcgcggcggggcgtggatggatgactgcgtaggccagatgcgtaaagctgatggttctctgcaaaaaccggtcgcgtatttgacttgtaacttcaaccgcccggtaaatggtaaaccggcgctgttcactcacgacgaagtgatcaccctgttccacgagttcggtcacggcctgcaccatatgctgacccgcatcgaaaccgctggtgtttccggtatcagcggtgtgccgtgggatgcggtcgaactgccgagtcagtttatggaaaactggtgctgggagccggaggcgctggcgtttatctctggtcactatgaaaccggcgaaccgctgccgaaagagttgctggataaaatgctggcggcgaagaactaccaggcggcgctgtttattctgcgtcagctggagttcggcctgtttgatttccgccttcatgccgagttccgcccggatcagggggcaaaaatcctcgaaactctggcagaaatcaagaaactggttgccgtggtgccatctccgtcctggggccgtttcccgcacgctttcagccatattttcgccggtggttatgcggcaggttactacagctacctgtgggctgacgtactggcggcagatgctttctcgcgctttgaggaagagggcattttcaaccgtgaaaccgggcagtcgttcctcgacaacattctgagccgtggcggttcagaagagccgatggatctgttcaaacgcttccgtggtcgtgaaccgcagctggatgcgatgctggagcattacggcattaagggctga

SEQ ID NO: 482107 - DNA, 843 bp, Shigella sonnei
atgctcagttatcgccacagctttcacgctggcaaccacgccgacgtccttaaacataccgttcagagcctgatcatcgagtcgctgaaagagaaagataaaccgtttctctatctcgatacccacgcaggggccgggcgttatcagttaggcagcgaacatgccgagcgtaccggcgaatatctcgaaggtatcgcccgtatctggcagcaggacgatttgcccgcagaactggaggcgtacatcaatgtggtaaaacacttcaaccgtagcggtcagttgcgttactaccccgggtcgccgttgattgctcgccagctactgcgcgaacaagacagcctgcaactgaccgaactgcacccgagcgattacccgttgctgcgttctgaatttcagaaagacagccgtgcgcgcgtcgaaaaagccgacggtttccagcagcttaaggccaaacttccgccggtttcccgccgtggtttaatccttatcgacccgccgtatgaaatgaaaaccgactatcaggcggtggtcagcgggatagcagaaggttacaaacgtttcgccactggtacttacgcactgtggtatccggtggtgctgcgtcagcaaattaagcgcatgatccacgatctggaagcgaccggtattcgcaaaattctgcaaattgaactggcggtactgccagacagcgatcgccgtggcatgaccgcttccggcatgattgtgattaacccgccgtggaaactggaacagcagatgaataacgtgctgccgtggctgcacagcaaactggttccggcaggcaccgggcacgccaccgtaagctggatcgtgccggagtaa

SEQ ID NO: 482108 - DNA, 1353 bp, Shigella sonnei
atgactaaacactatgattacatcgccatcggcggcggcagcggcggtatcgcctccatcaaccgcgcggctatgtacggccagaaatgcgcactgattgaagccaaagagctgggcggcacctgcgtgaacgtcggctgcgtgccgaaaaaagtgatgtggcacgcggcgcaaatccgtgaagcgatccatatgtacggccctgattatggtttcgataccaccatcaacaagttcaactgggaaacgttgatcgccagccgtaccgcctatatcgaccgtattcatacttcctatgaaaacgtgctcggtaaaaataacgttgatgtaatcaaaggctttgcccgcttcgttgatgccaaaacgctggaggtaaacggcgaaaccatcacggccgatcatattctgatcgccacaggcggtcgtccgagccacccggatattccgggcgtggaatacggtattgattctgatggcttcttcgcccttcctgctttgccagagcgcgtggcggttgttggcgcgggttacatcgccgttgagctggcgggcgtgattaacggcctcggcgcgaaaacgcatctgtttgtgcgtaaacatgcgccgctgcgcagcttcgacccgatgatttccgaaacgctggtcgaagtgatgaacgccgaaggcccgcagctgcacaccaacgccatcccgaaagcggtagtgaaaaatgccgatggtagcctgacgctggagctggaagatggtcgcagtgaaacggtggattgcctgatttgggcgattggtcgcgagcctgccaatgacaacatcaacctagaagccgctggcgttaaaactaacgaaaaaggctatatcgtcgtcgataaatatcaaaacaccaatattgaaggtatttacgcggtgggcgataacacgggtgcagtggaactgacaccggtagcagttgcagcgggtcgccgtctctctgaacgcctgtttaataacaagccggatgagcatctggattacagcaacattccgaccgtggtcttcagccatccgccgattggtactgttggtttaacggaaccgcaggcgcgcgagcagtacggcgacgatcaggtgaaagtgtataaatcctctttcaccgcgatgtataccgccgtcaccactcaccgccagccgtgccgcatgaagctggtgtgcgttgggccagaagagaagattgtcggtattcacggcattggctttggtatggacgaaatgttgcagggcttcgcggtggcgctgaagatgggcgcaaccaaaaaagacttcgacaataccgtcgccattcacccaacggcggcagaagagttcgtgaccatgcgctaa

SEQ ID NO: 482109 - DNA, 174 bp, Shigella sonnei
atgcatccgcttactcatccactgcctgtcacggcgcatgtctcattgttagatgacgactatctcactccggccagagcatcagttaacggcaccacccgtacttctgaccaggactttgaaagcgtttatgcgcattaccagagtgaaaatgcctcagagctaactggataa

SEQ ID NO: 482110 - DNA, 354 bp, Shigella sonnei
atgtcatttctgttacccatccaattgttcaaaattcttgctgatgaaacccgtctgggcatcgttttactgctcagcgagctgggagagttatgcgtctgcgatctttgtactgccctcgatcagtcgcagcccaagatctcccgccacctggcattgcttcgtgaaagcgggctattgctggaccgcaagcaaggtaagtgggttcattaccgcttatcaccgcatattccagcatgggcggcgaaaattattgatgaggcctggcgatgtgaacaggaaaaggttcaggcgattgtccgcaacctggctcgacaaaactgttccggggacagtaagaacatttgcagttaa

SEQ ID NO: 482111 - DNA, 1290 bp, Shigella sonnei
atgttactggcaggcgctatctttgtcctgaccatcgtattggttatctggcagccgaaaggtttaggcatcggctggagtgcaacgctcggcgcagtactggcgttagttacgggcgtggttcatccgggtgatattccggtggtgtggaatatcgtctggaacgcgacggctgcgtttatcgccgtcattatcatcagcctgctgctggatgagtccggcttttttgaatgggcggcgctgcacgtctcacgctggggtaatggtcgtggtcgcttgctgtttacctggattgtcctgctcggtgctgccgttgccgccctgtttgccaatgatggcgcggcgcttattttgacgccgattgtcatcgccatgctgctggctttaggattcagtaaaggcacgacgctggcgttcgtgatggcggccggattcattgccgataccgccagcctgccgcttattgtctccaacctggtgaatatcgtttccgctgatttctttggcctcggctttcgcgaatacgcctcggtgatggtgccggtggatatcgccgcgattgttgccacgctggtgatgctacatctctattttcgcaaagatattccgcagaactacgatatggcgctgctgaaatctcccgcagaagcgatcaaagatcctgctacgttcaaaactggctgggttgttttactgcttctgctggtgggatttttcgtcctggaaccgctcggcattccggtgagcgccattgcagctgtgggcgcgctgatattatttgtcgtcgctaaacgcggtcatgcgattaatacgggtaaagtcctgcgcggtgccccctggcagattgtcatcttctcgctcggcatgtatctggtggtttatggcctgcgcaatgccggattaacggaatatctttctggcgtactcaacgtgctggcggataacggcctgtgggccgcgacgctcggcaccggattcctcaccgccttcctctcttctattatgaacaatatgccgacggtactggttggcgcgttgtccattgatggcagcacggcatctggcgttatcaaagaagcgatggtttatgccaatgtgattggctgcgatttgggaccgaaaattaccccaattggtagcctggctacgctactctggctgcacgtactttcgcagaagaatatgactatcagctggggatattacttccgtacagggattatcatgaccctgcctgtgctgtttgtgacgctggctgcgctggcgctacgtctctctttcactttgtaa

SEQ ID NO: 482112 - DNA, 426 bp, Shigella sonnei; identical to SEQ ID NO: 459773

SEQ ID NO: 482113 - DNA, 297 bp, Shigella sonnei; identical to SEQ ID NO: 462336

SEQ ID NO: 482114 - DNA, 279 bp, Shigella sonnei
atgagtagttggcttgcgatgctgcaagatgccgcagagatgtttgtgtttctcgccgtcgagctttcgttgctgtttatagtgattagtgccggtgtcagcctgataagacaaaaggtgccagaccataaaatccagcagatgatgggggccagaaaagggagaggctatctcctggctgctctgttgggagccgttaccccgttctgtagttgctcgacaatacccatgttacgtggattgttgtcagcgaaagccgggttttgtcagcgccagtga

SEQ ID NO: 482115 - DNA, 192 bp, Shigella sonnei
atgcttgacaacttaataggggcaccccccttctggcaactggcgcacagtagcgcagacaattttccggcactgacggtaagccattttattaccgccaatctgctcccggtgatgctgggtaatattatcggcggtgcagtgctggtgagtatgtgttatcgggctatttatttacgtcaggaatcctga

SEQ ID NO: 482116 - DNA, 1062 bp, Shigella sonnei
atgctcgaaatgttgatgcaatggtatcgccgccgttttagcgacccggaagcgattgccttgctggttattttagttgccggatttggcattatctttttctttagtggcctgcttgctccgttgctggtggctattgtgctggcctatttgctggaatggccaaccgtgcgcctgcaatctattggctgctcccgccgctgggcgacgtcgattgtattggtggttttcgtcggtatattgctactgatggcgttcgtggtactgcctatcgcctggcaacagggcatctacttgatccgcgatatgccggggatgctcaataagctttctgactttgccgccacgttgccgcgccgctatccggcattaatggacgcgggcattattgatgcaatggccgaaaatatgcgcagtcggatgctgaccatgggcgattcggtggtgaaaatttccctcgcctcgctggtcggtttgctgaccattgccgtctatctggtgctggtaccattgatggtcttcttcctgctgaaagacaaagagcagatgctgaacgccgttcgtcgggtgctgccgcgcaaccgtggactggcaggacaggtgtggaaggagatgaatcaacaaatcaccaactatatccgcggcaaagtgctggagatgatcgtggtggggatcgccacttggctggggttcttgctctttgggctgaactattcgctgctgctggcggtgctggtcggcttctcggtacttattccgtacattggcgcatttgtggtgaccattccggtggttggcgtggcgctattccagtttggtgcaggcacggaattctggagctgcttcgcagtgtatctgattattcaggcgctggacggtaatctgttagtaccggtgttgttctccgaagcggttaacctgcatccgctggtgattattttatcggtggtgatcttcggtggtttgtggggattctggggcgtattcttcgctattccattggcgacgctgatcaaagccgtgatccacgcctggcccgatgggcaaatagcgcaagaataa

SEQ ID NO: 482117 - DNA, 1464 bp, Shigella sonnei
atgttcaggcagttgaaaaaaaacctggttgcaaccctcattgctgctatgaccattggtcaggtagccccggcgtttgccgacagcgcagacaccttgccggatatgggaacctccgcaggaagcacgctttccattggtcaggaaatgcagatgggcgactattatgtccgccagctacgcggcagcgcgccgttaattaatgacccgctgttaacgcaatatattaattcgctggggatgcgtctggtttcgcatgccaattcggttaagacaccgtttcatttttttctgatcaacaacgacgaaattaacgcctttgctttctttggcggcaacgtggtgctgcactctgccctgttccgttattccgataacgaaagtcaactggcttcagttatggcgcacgaaatctcccacgtcacccaacgtcacctggcgcgagcgatggaagatcagcagcgcagcgcgccgctgacctgggtcggcgcgttaggttctattttactggcgatggccagtccgcaggcggggatggcggcgctgaccggtacactggcgggaacgcgtcaggggatgatcagtttcacccagcaaaatgaacaggaagcggaccgcattggtattcaggtgctgcaacgctcgggattcgatccgcaggcgatgccaaccttcctcgaaaaattactcgatcaggcgcgttactcctcgcgcccgccggaaattttattgactcacccgttgccggaaagtcgtctggcagatgcccgcaaccgtgctaatcagatgcgcccgatggtggtgcagtcgtcggaagatttctatctggcgaaagcgcgcacactggggatgtataattccggacgtaaccagctcaccagtgatttgctggatgaatgggcgaaaggaaacgttcgtcagcaacgagcggcgcaatatggtcgtgctttacaggcgatggaagccaataaatacgacgaggcgcgtaaaacgctgcaaccgttactggcggcagaacctggcaacgcatggtatctcgatctggctaccgatatcgatcttgggcaaaacaaagccaatgaggcaatcaatcgcctgaaaaatgcccgtgatttgcgcaccaatccggtgttgcagctcaacctggcaaacgcttatctgcaaggcggtcaaccacaagaagcggccaatattctgaatcgctacacctttaataataaagatgacagcaacggctgggatttactggcacaggcggaagccgcgctaaataaccgcgatcaggagctggctgcgcgagcagaaggttatgcgctcgccggacgactcgatcaggccatttcgctgttgagtagcgccagttcgcaggtgaaattaggcagccagcaacaagcgcgttacgatgcgcgcatcgaccagttgcgccagctgcaggaacgctttaagccttataccaagatgtaa

SEQ ID NO: 482118 - DNA, 360 bp, Shigella sonnei
atgaccaaacaggtaaaaatctaccataacccacgctgttcaaagagccgggaaacgctgaacctgctgaaaaaaaacggcgtggagccagaagtggtactctaccttgagacacccgccgatgcggcaacgctgcgcgatttgctgaaaatgctggggatgaatagcgcccgtgaattgatgcgccagaaagaggatctttataaagaactgaacctggctgacagttcgcttagcgaagaggcgctgattcaggcaatggtggataatccgaagctgatggagcgcccgattgtggtcgcgaatggcaaagcgcggattggtcgtccaccggagcaggtactggaaatcgtgggttaa

SEQ ID NO: 482119 - DNA, 747 bp, Shigella sonnei
gtggtaaacttctcgcgattttgtgaaatcctggttgaggtatctctgaacacaccggcacagctctctttgccactttatcttcctgacgacgaaacctttgcaagtttctggccgggggataactcctctttactggctgcgctgcaaaacgtgctgcgtcaggaacatagcggttacatctatctctgggcacgcgaaggcgcggggcgcagccatctgctgcacgcggcttgcgcggaattgtcgcagcgtggcgatgcggtgggctatgtcccgctggataaacgcacctggtttgttccggaagtgctcgacggtatggagcatttgtcgctggtctgtatcgacaacattgagtgtattgcaggcgatgagttgtgggagatggcgattttcgatctctacaatcgaattctggaatcgggcaaaacacgattgttgatcaccggcgatcgtccaccgcggcagttgaatctgggattaccggatctcgcgtcgcgactcgactgggggcagatctacaaattgcagccactttctgatgaagataagttgcaggcgctacagttacgcgcgcgtttgcgtggttttgaactgccggaagatgtggggcgtttcttgctgaagcggctcgacagagaaatgcgcacgctatttatgacgttggatcagttggatcgtgcgtcgattaccgcgcaacgtaagctgaccattccgtttgtgaaagaaattctgaagttgtag

SEQ ID NO: 482120 - DNA, 1290 bp, Shigella sonnei
atgacgcgccgtgctatcggggtgagtgaaagaccgccacttttacagacaatcccgcttagtttgcaacatttgttcgccatgtttggtgcaaccgtcctggtgcccgtcttatttcatattaacccggcgactgtactgttatttaacggtattggaacgctgctgtatctcttcatctgtaaagggaaaattccggcttatcttggttccagctttgcctttatttcaccggtattgttactgttgccgttagggtatgaagtcgcgctgggcggctttattatgtgcggcgtgctgttctgcctggtttcttttatcgtgaagaaagcggggaccggctggctggacgtgctgtttccacctgcggcaatgggcgcaatcgttgccgtcatcggtctggagctggcgggcgtagctgccggtatggcgggtttactcccggctgaagggcaaacgccagactccaaaaccatcatcatctctattaccaccctggcggtcacggttttaggttccgtgctgttccgtggtttcctggcaattatcccgattttaattggcgtgctggtggggtacgcgctctctttcgcaatgggaattgtcgataccacgccgattattaatgctcactggtttgcgctgccaaccctctatacgccgcgcttcgagtggtttgccattctgactattctgccagcggcgttagtggttattgccgaacacgtagggcacctggtagtaacggctaatatcgtcaaaaaagatctgctgcgcgatccaggtctgcaccgttcgatgtttgctaacggcctgtcgactgtgatctccggcttctttggctctacgccaaataccacttacggagaaaacattggcgtgatggcgatcacccgtgtttacagtacctgggttatcggtggggcggcgattttcgctatcctgctttcctgcgtcggtaaactggctgccgctatccagatgatcccattgccggtgatgggcggcgtttcgctgctgctttatggtgtcatcggtgcttccggtattcgtgttttgatcgaatcaaaagtggattacaacaaagcacagaacctgatcctgacttccgtgattttgatcatcggtgtcagtggcgcgaaggtaaacattggcgcggcggagctgaaaggtatggcgctggcgaccatcgtcggtatcggcttaagtttgatcttcaaactgattagtgtgctgcgccctgaagaagtggtgctggacgcagaagacgcggatataacagacaaataa

SEQ ID NO: 482121 - DNA, 627 bp, Shigella sonnei
atgaagatcgtggaagtcaaacacccactcgtcaaacacaagctgggactgatgcgtgagcaagatatcagcaccaagcgctttcgcgaactcgcttccgaagtgggtagcctgctgacttacgaagcgaccgccgacctcgaaacggaaaaagtaactatcgaaggctggaacggcccggtagaaatcgaccagatcaaaggtaagaaaattaccgttgtgccaattctgcgtgccggtctggggatgatggacggtgtgctggaaaatgttccgagcgcgcgcatcagcgttgtcggtatgtaccgtaatgaagaaacgctggagccggtaccgtacttccagaaactggtttctaacatcgatgagcgtatggcgctgatcgttgacccaatgctggcaaccggtggttccgttatcgcgaccatcgacctgctgaaaaaagcgggctgcagcagcatcaaagttctggtgctggtagctgcgccagaaggtatcgctgcgctggaaaaagcgcacccggacgtcgaactgtataccgcatcgattgaccagggactgaacgagcacggatacattattccgggcctcggcgatgccggtgacaaaatctttggtacgaaataa

SEQ ID NO: 482122 - DNA, 1038 bp, Shigella sonnei
gtgaccgataaaacctctcttagctacaaagatgccggtgttgatattgacgcgggtaatgctctggttggaagaatcaaaggcgtagtgaagaaaacgcgtcgtccggaagtgatgggcggtctgggcggcttcggtgcgctgtgtgcattgccgcaaaaatatcgtgaacccgtgctggtttccggcactgacggcgtaggtaccaagctgcgtctggcaatggacttaaaacgtcacgacaccattggtattgatctggtcgccatgtgcgttaatgacctggtggtgcaaggtgcagaaccgctgtttttcctcgactattacgcaaccggaaaactggatgttgataccgcttcagcggtgatcagcggtatcgcggaaggatgtctgcaatcgggctgttcactggtgggtggcgaaacggcagaaatgccggggatgtatcacggtgaggattacgatgtcgcgggtttctgcgttggcgtggtagaaaaatcagaaatcatcgacggctctaaagtcagcgacggcgatgtgctgattgcactcggttccagcggtccgcactcgaacggctattcgctggtgcgcaaaattcttgaagtcagcggttgtgatccgcaaaccaccgaacttgatggtaagccattagccgatcatctgctggcaccgacccgcatttacgtgaagtcagtgctggagttgattgaaaaggtcgatgtgcatgccattgcgcacctgaccggcggcggcttctgggaaaacattccgcgcgtattgccagataatactcaggcagtgattgatgaatcttcctggcagtggccggaagtgttcaactggctgcaaacggctggtaacgttgagcgccatgaaatgtatcgcaccttcaactgcggcgtcgggatgattatcgccctgcctgctccggaagtggacaaagccctcgccctgctaaatgccaacggtgaaaacgcgtggaaaatcggtatcatcaaagcctctgattccgaacaacgcgtggttatcgaataa

SEQ ID NO: 482123 - DNA, 639 bp, Shigella sonnei
atgaatattgtggtgcttatttccggcaacggaagtaatttacaggcaattattgacgcctgtaaaaccaacaaaattaaaggcaccatacgggcagttttcagcaataaggccgacgcgttcggccttgaacgcgcccgccaggcgggtattgcaacgcatacgctcatcgccagcgcgtttgacagtcgtgaagcctatgaccgggagttgattcatgaaatcgacatgtacgcacccgatgtggtcgtgctggctggttttatgcgcattctcagcccggcgtttgtctcccactatgccgggcgtttgctgaacattcacccttctctgctgccgaaatatcccggattacacacccatcgtcaggcgctggaaaatggtgatgaagagcacggtacatcggtgcatttcgtcaccgatgaactggacggtggcccggttattttacaggcgaaagtcccggtatttgctggtgatacggaagatgacatcaccgcccgcgtgcaaacccaggaacacgctatttatccactggtgattagctggtttgccgatggtcgtctgaaaatgcacgaaaacgccgcgtggctggatggtcaacgtctgccgccgcagggctacgctgccgacgagtaa

SEQ ID NO: 482124 - DNA, 2067 bp, Shigella sonnei
atgggtcaggaaaagctatacatcgaaaaagagctcagttggttatcgttcaatgaacgcgtgcttcaggaagcggcggacaaatctaacccgctgattgaaaggatgcgtttcctggggatctattccaataaccttgatgagttctataaagtccgcttcgctgaactgaagcgacgcatcattattagcgaagaacaaggctccaactctcattcccgccatttactgggcaaaattcagtcccgggtgctgaaagccgatcaggaattcgacggcctctacaacgagctgctgctggagatggcgcgtaaccagatcttcctgattaatgaacgccagctctccgtcaatcaacaaaactggctgcgtcattattttaagcagtatctgcgtcagcacattacgccgattttaatcaatcctgacactgacttagtgcagttcctgaaagatgattacacctatctggcggtggaaattatccgtggcgataccatccgttacgcgctgctggagatcccatcagataaagtgccgcgctttgtgaatttaccgccagaagcaccgcgtcgacgcaagccgatgattcttctggataacattctgcgttactgccttgatgatattttcaaaggcttctttgattatgacgcgctgaatgcctattcaatgaagatgacccgcgatgccgaatacgatttagtgcatgagatggaagccagcctgatggagttgatgtcttccagtctcaagcagcgtttaactgctgagccggtgcgttttgtttatcagcgcgatatgcccaatgcgctggttgaagtgttacgcgaaaaactgactatttcccgctacgactccatcgtccccggcggtcgttatcataattttaaagactttattaatttccccaatgtcggcaaagccaatctggtgaacaaaccactgccgcgtttacgccatatttggtttgataaagcccagttccgcaatggttttgatgccattcgcgaacgcgatgtgttgctctattatccttatcacacctttgagcatgtgctggaactgctgcgtcaggcttcgttcgacccgagcgtactggcgattaaaattaacatttaccgtgtggcaaaagattcacgtatcatcgactcgatgatccacgctgcgcacaacggcaagaaagtgaccgtggtggttgagttacaggcgcgtttcgacgaagaagccaacattcactgggcgaagcgcctgaccgaagcaggcgtgcacgttatcttctctgcgccggggctgaaaattcacgccaaactgttcctgatttcacgtaaagaaaacggtgaagtggtccgttacgcacacatcgggaccgggaactttaacgaaaaaaccgcgcgtctttatactgactattcgttgctgaccgcagatgcgcgtatcaccaacgaagtacggcgggtatttaactttattgaaaacccataccgcccggtgacatttgattatttaatggtgtcaccgcaaaactctcgccgtctgttatatgaaatggtagaccgcgaaatcgccaacgcgcagcaagggctgcccagtggtatcaccctgaagctaaataaccttgtcgataaaggcctggttgatcgtctgtatgtggcctccagctccggcgtaccggttaatctgctggttcgcggaatgtgttcgctgatccccaatctggaaggcattagcgacaacattcgtgccatcagtattgttgaccgttaccttgaacatgaccgggtttatatttttgaaaatggcggcgataaaaaggtctacctttcttccgccgactggatgacgcgcaatattgattatcgtattgaagtggcgacaccgctgctcgatccgcgcctgaagcagcgggtgctggacatcatcgacatattgttcagcgatacggtcaaagctcgttatatcgataaagaactcagtaatcgctacgttccccacggcaatcgccgcaaagtacgggcgcagttggcgatttatgactacatcaaatcactcgaacaacctgaataa

SEQ ID NO: 482125 - DNA, 1542 bp, Shigella sonnei
atgccaatacacgataaatcccctcgtccgcaggagtttgctgcggtcgatcttggttcaaacagttttcacatggtcatagcccgtgtggtagatggtgccatgcagattattggccgcctgaaacagcgggtgcatctggcggacggcctggggccagataatatgttgagtgaagaggcaatgacgcgcggtttgaactgtctgtcgctgtttgccgaacggctacaagggttttctcctgccagcgtctgtatagtcggcacccatacgctgcgtcaggcgctgaacgccactgactttctgaaacgcgcggaaaaggtcattccctacccgattgaaattatttccggtaatgaagaagcccgtctgatttttatgggcgtggaacatacccaaccggagaaaggtcgcaaactggttattgatattggcggcggatctacggaactggtgattggtgaaaatttcgaaccgattctcgttgaaagccgccggatgggttgtgtcagctttgcccagctttacttccctggcggggtcatcaataaagagaattttcagcgcgctcgtatggcggcagcacaaaaactggaaactttaacctggcaattccgtattcagggctggaacgtggcaatgggcgcttccggtaccataaaagccgcccatgaagtgttaatggaaatgggcgagaaagacgggataattaccccggaacgtctggaaaaactggtaaaagaagttttacgtcaccgtaatttcgcatcgctgagtttaccgggtctttccgaagagcggaaaacagtcttcgttcctggactggcgattttatgcggtgtgtttgatgctttagccatccgtgaactgcgcctttctgacggggcgttacgcgaaggcgtactgtacgaaatggaaggacgtttccgtcatcaggatgtgcgtagtcgcaccgccagcagcctcgccaaccagtatcacatcgacagcgaacaggcccgacgggtgctggataccactatgcaaatgtacgaacagtggcgggaacagcaaccgaagctggcgcatccgcaactggaggcgctactgcgatgggccgccatgctgcatgaggtcgggttgaatatcaaccacagcggtttgcatcgccactccgcttatattctgcaaaacagtgacttgccgggttttaatcaggaacagcagctgatgatggcgacactggtgcgctatcaccgtaaagcgattaaactcgacgatctgccgcgctttaccttgtttaagaagaaacagttcctgccactgattcagctattgcgccttggcgtattactcaacaatcaacgtcaggcaaccaccacaccgccaacattgacactgattactgatgacagtcactggacactgcgtttcccgcatgactggtttagtcagaatgcgttggtactgcttgatctggaaaaggagcaagaatactgggaaggcgtggctggctggcggttgaaaattgaagaagaaagtacacctgaaatcgccgcttaa

SEQ ID NO: 482126 - DNA, 2244 bp, Shigella sonnei
atgaaactgaatgcaacttatataaaaatgcgtgataaatggtgggggcttccgctgttcctgccttctttaatcttgcccattttcgcccacattaatactttcgcgcatatttcttccggtgaggtttttctcttttatctgcctctgacactgatgatcagcatgatgatgtttttcagctgggcggcattgccagggatcgccttagggatttttgtccgcaaatatgcagagctgggtttttacgaaacgctatcattaacggctaattttattatcattatcattctctgttggggcggttacagggtctttactccccggcgtaacaacgtttcacatggtgatacccgtttaatttcccagcgtatattctggcagattgtgtttcctgcaacgctgtttctgatacttttccagtttgctgcatttgtaggattactggcgagcagagaaaatctggtcggtgtcatgccttttaacctcgggactttaatcaattatcaggccttactggtgggtaatctgatcggtgtcccgctgtgctacttcatcattcgggtagtgcgaaatccattttatttacgtagctattattcgcaattaaaacagcaggttgatgccaaagtcaccaaaaaagagttcgcgctctggctactggcattaggtgctttattgttgctgttatgcatgccgttaaatgaaaaaagcacaatttttagcaccaattataccttgtcattattgctgcccctgatgatgtggggagcgatgcgctatggttataagctgatttcgctgctctgggcggtcgtgttgatgatcagcatccacagctatcaaaattacattcccatttatcctggctataccacgcagctgaccataacctcctccagttatctggtattctcttttattgtcaattatatggctgtactggcaacccgtcagagagcggtagtcagacgcattcagcggcttgcgtatatggacccggtggttcatctgccaaatgttcgcgccctgaatcgcgcgttgcgtgatgctccctggtctgcgctttgttatttacgcatccctggcatggaaatgctggttaagaactatggcatcatgctgcggattcaatacaagcaaaaactttctcactggctgtcacccttgctggaaccgggtgaagatgtttatcagctttcgggtaacgatctcgcgctgcgactgaatacagaatcgcaccaggagcgcattaccgcactggatagtcatctcaagcaatttcgtttcttttgggatgggatgccgatgcaaccgcagattggcgtcagttactgctatgtgcgctcgccagtgaatcatatctacctgctgctgggagagctaaatacggtcgccgaactttccatcgtgaccaacgccccggaaaatatgcagcgtcgcggggcaatgtatttgcaacgcgaattgaaagataaagtcgcgatgatgaatcgactacagcaggcgctggaacacaaccattttttcctgatggcccagccgattaccggtatgcgtggtgatgtttaccatgaaattcttctgcgcatgaaaggtgagaatgatgaactgatcgtccccgatagcttcttgccggtcgcgcacgaatttggtttatcgtcgagtatcgacatgtgggtcattgagcatacgctgcaatttatggctgaaaacagagcgaagatgcccgctcaccgttttgctattaatctgtctccaacctcggtatgtcaggctcgttttcctgttgaagtcagtcagttgctggctaaatatcagattgaagcgtggcaacttatttttgaagtcaccgaaagtaatgctctgaccaatgttaagcaggcgcaaatcaccttgcagcatcttcaggaattaggctgccagattgcgattgatgatttcggcaccggctacgccagctatgcacggcttaaaaatgtgaatgccgatctgcttaaaattgacggcagctttatccgcaatattgtgtcaaatagtctggattatcagattgtggcgtcgatttgccatctggcgcgaatgaagaaaatgcgggtagtggcagagtacgttgaaaacgaagagatccgcgaggcggtgctctctttggggatcgattatatgcagggttatcttattggtaagccgcagccgttaattgatacgttgaatgaaatcgaacccattcgcgaaagtgcctga

SEQ ID NO: 482127 - DNA, 153 bp, Shigella sonnei
atgtcccacgctgtggacggtacttacattaaggcacaacaggacaaaatggtcaattcttcgttatgtaaaaaaacgtcagtggatacatattttaatgttatggaagttaatttaattatttacaatgatgatgtaataatgatgaattaa

SEQ ID NO: 482128 - DNA, 174 bp, Shigella sonnei; identical to SEQ ID NO: 2652

SEQ ID NO: 482129 - DNA, 516 bp, Shigella sonnei
atgaaatttaaaaaatgtcttctgcctgtggcaatgttagcgtcattcactctggcaggatgccagtcaaatgctgacgatcatgccgccgatgtttatcaaaccgatcaactgaataccaaacaagaaactaaaaccgttaatattatttccattcttcccgcaaaagttgccgtagacaactcccaaaataaacggaacgcacaagccttcggcgcgcttattggcgcagtcgctggcggtgttatcggccacaacgtcggttctggcagcaattccggaacgacggcaggggcagttggcggcggagctgtaggcgcggcagcgggttctatggtgaatgataaaaccttagtggaaggtgtttctttaacatataaggaaggcaccaaagtgtatacctccacccaggtgggtaaagagtgccagtttacgacaggtttagccgttgttattaccacaacgtataacgaaacgcgtattcagccaaatactaaatgtcctgaaaagagctaa

SEQ ID NO: 482130 - DNA, 540 bp, Shigella sonnei
atgaagaaagtttttctttgcgccatcttagcctccttaagctatccggctatcgcctcatcattgcaggatcaactctctgctgtcgcagaagcggaacagcaaggtaaaaatgaagagcaaaggcagcatgacgaatgggtcgcggagcgcaacagggaaatccagcaagagaagcaacgtcgcgcaaatgcccaggccgccgctaacaaaagagcggcaacggcagcggcaaataagaaagctcgtcaggataaactggacgccgaagccactgcggacaaaaaacgcgatcaaagttatgaagatgagctacgcagcttagagattcagaaacaaaaactgacgctggcgaaagaagaagcccgcgttaagcgagaaaacgaatttatcgatcaggaactgaagcacaaagctgcgcaaaccgatgtggtgcaatctgaagctgacgccaacagaaatatgactgaaggcggtcgcgatctgatgaaaagcgtgggcaaagcagaagagaacaaatcggacagctggtttaattaa

SEQ ID NO: 482131 - DNA, 1578 bp, Shigella sonnei
atgacggaaaacattcataagcatcgcatcctcattctggacttcggttctcagtacactcaactggttgcgcgccgcgtgcgtgagctgggtgtttactgcgaactgtgggcgtgggatgtgacagaagcacaaattcgtgacttcaatccaagcggcattattctttccggcggcccggaaagtactactgaagaaaacagcccgcgtgcgccgcagtatgtctttgaagcaggcgtaccggtattcggcgtttgctatggcatgcagaccatggcaatgcagttgggcggtcacgttgaagcctctaacgaacgtgaatttggctacgcgcaggttgaagtcgtaaacgacagtgcactggttcgcggtatcgaagatgcgctgaccgcagacggtaaaccgctgctcgatgtctggatgagccacggcgataaagttaccgctatcccgtccgacttcgtcaccgtagccagcaccgaaagctgcccgtttgccattatggctaacgaagaaaaacgcttctatggcgtacagttccacccggaagtgactcacacccgccagggtatgcgcatgctggagcgttttgtgcgtgatatctgccagtgtgaagccctgtggacgccagcgaaaattatcgacgatgctgtagcccgcatccgtgagcaggtaggcgacgataaagtcatcctcggcctctctggtggcgtggattcctccgtaaccgcaatgctactgcaccgcgctatcggtaaaaacctgacttgcgtattcgtcgacaacggcctgctgcgtctcaacgaagcagagcaggttctggatatgtttggcgatcactttggtctgaacattgttcacgttccggcagaagatcgcttcctgtcagcgctggctggcgaaaacgatccggaagcaaaacgtaaaatcatcggtcgcgttttcgttgaagtattcgatgaagaagcgctgaaactggaagacgtgaagtggctggcgcagggcaccatctaccctgacgttatcgaatctgcggcgtctgcaaccggtaaagcacacgtcatcaaatctcaccacaacgtgggcggcctgccgaaagagatgaagatgggcctggttgaaccgctgaaagagctgttcaaagacgaagtgcgtaagattggtctggagctgggcctgccgtacgacatgttgtaccgtcacccattcccgggaccaggccttggcgttcgtgtgctgggtgaagtgaagaaagagtactgtgacctgctgcgccgtgctgacgccatcttcattgaagaactgcgtaaagcggacctgtacgacaaagtcagccaggcgttcactgtgttcctgccggtacgttccgttggcgtaatgggcgatggtcgtaagtatgactgggttgtctctctgcgtgctgtcgaaaccatcgactttatgaccgcacactgggcgcgtctgccgtacgatttcctcggtcgcgtttccaaccgcattatcaatgaagtgaacggtatttcccgcgtggtgtatgacatcagcggcaagccgccagctaccattgagtgggaatga

SEQ ID NO: 482132 - DNA, 1467 bp, Shigella sonnei
atgctacgtatcgctaaagaagctctgacgtttgacgacgttctcctcgttcctgctcattctaccgttctgccgaatactgctgacctcagcacccagctgacgaaaactattcgtctgaatatccctatgctttccgcagcaatggataccgtaacggaagcgcgcctggctattgctctggctcaggaaggcggtatcggctttatccacaaaaacatgtccattgaacgccaggcagaagaagttcgccgtgtgaaaaaacacgaatctggtgtggtgactgatccgcagactgttctgccaaccacgacgctgcgcgaagtgaaagaactgaccgagcgtaacggttttgcgggctatccggtcgttaccgaagaaaacgaactggtgggtattatcaccggtcgtgacgtgcgttttgttaccgacctgaaccagccggttagcgtttacatgacgccgaaagagcgtctggtcaccgtgcgtgaaggtgaagcccgtgaagtggtgctggcaaaaatgcacgaaaaacgcgttgaaaaagcgctggtggttgatgacgaattccacctgatcggcatgatcaccgtgaaagacttccagaaagcggaacgtaaaccgaacgcctgtaaagacgagcaaggccgtctgcgtgttggtgctgcagttggcgcaggtgcgggtaacgaagagcgtgttgacgcgctggttgccgctggcgttgacgttctgctgatcgactcctcccacggtcactcagaaggcgttttgcagcgtatccgtgaaacccgtgctaaatatccggatctgcaaatcatcggcggcaacgtggcaacagctgcaggtgcacgcgctttggcagaagctggttgcagcgcggttaaagtcggtatcggccctggttctatctgtacgactcgtatcgttactggcgtaggtgttccgcagatcactgccgttgctgacgcagttgaagccctggaaggcaccggtattccggttatcgcagatggtggtattcgcttctccggcgacatcgccaaagctatcgccgctggcgcaagcgcggtgatggtaggttccatgctggcgggtactgaagaatctccgggtgaaatcgaactctaccagggccgttcttacaaatcttaccgtggtatgggttccctgggcgcgatgtccaaaggttcctctgaccgttatttccagagcgataacgctgccgacaaactggtgccggaaggtatcgaaggtcgcgtagcttataaaggtcgcctgaaagagatcattcaccagcagatgggcggcctgcgctcctgtatgggtctgaccggctgtggtactatcgacgaactgcgtactaaagcggagtttgtacgtatcagcggtgcgggcattcaggaaagccacgttcacgacgtgaccattactaaagagtccccgaactaccgtctgggctcctga

SEQ ID NO: 482133 - DNA, 1371 bp, Shigella sonnei; identical to SEQ ID NO: 458063

SEQ ID NO: 482134 - DNA, 216 bp, Shigella sonnei
atggaactgcattgtccacaatgtcagcatgtgcttgatcaggataacggccatgcgcgttgcccatcctgcggggaaattattgaaatgaaagctctttgtccagactgccatcaaccgttgcaggtgttaaaagcctgcggtgcagtagattacttctgtcagcacgggcatggcttgatatcgaaaaaacgcgttgaattcgtgctggcttaa

SEQ ID NO: 482135 - DNA, 1473 bp, Shigella sonnei
atggtacctgtggtcgcgcttgtcgggcgccctaacgtaggaaaatccacgttatttaaccgtctaactcgcacccgagatgcgctggttgcggatttcccgggtctgactcgtgaccgtaagtacggtcgtgcggaaattgaaggccgtgagtttatctgtattgataccggcgggattgatggcacagaagacggtgtagaaacccgcatggcggaacagtcgctgctggcgattgaagaagcggacgtcgtactgtttatggtggatgcgcgcgcgggcttgatgccggcagatgaagcgattgccaaacatctgcgctctcgtgaaaaaccgaccttcctggtggcaaacaaaactgacggtctggatcccgatcaggcagtggttgatttctactcgcttggtttaggtgaaatctacccgatcgccgcatctcacggtcgtggcgtattaagtctgctggagcgtgtgctgctgccgtggatggaagatctcgcaccgcaagaggaagtcgacgaagacgctgaatactgggcgcaatttgaagcggaagagaacggcgaagaagaagaggaagacgacttcgacccgcaaagtctgccgatcaaactggcgattgtgggtcgtccgaacgtaggtaagtctacactcactaaccgtattcttggtgaagagcgcgttgttgtttatgacatgcctggcacgacgcgtgacagtatctacattccaatggaacgcgatggacgtgagtatgtgctcattgacaccgctggcgtacgtaaacgcggcaaaatcaccgatgctgtagagaaattctccgtaatcaaaacgttgcaggcaattgaagataccaacgtggtgatgttagtgattgatgcgcgcgaaggtatttccgatcaggatctctcgctgctgggctttattctcaatagtgggcgctcacttgtcattgtggtgaataagtgggatggcctgagccaggaagtgaaagagcaggtgaaagaaacgctggacttccgtctgggctttatcgattttgctcgtgtgcactttatctctgccttgcacggcagtggtgttggtaacttgtttgaatcagtacgtgaagcgtatgacagctccacccgtcgtgtggggacctctatgctgacgcgcatcatgacgatggctgttgaagatcaccaaccgccgctggtacgcggtcgtcgtgtgaagctgaaatatgcccacgctggtggttataacccgccgattgtggtgattcacggtaatcaggtgaaagacctgcctgattcctacaagcgctacttgatgaactacttccgcaaatcgctggacgtaatgggatcgccgattcgtattcagttcaaagaaggggaaaacccgtatgcgaacaagcgtaacaccctgacgccaacccagatgcgtaaacgtaagcgtctgatgaagcacatcaagaaaaataaataa

SEQ ID NO: 482136 - DNA, 1179 bp, Shigella sonnei
atgcaattgcgtaaattactgctgccaggactgctttccgttacccttttaagcggctgttcgctgtttaacagcgaagaagatgtggtaaagatgtccccattgccaaccgttgaaaaccagtttacgccgaccacggcgtggagcacttccgttggtagcggcattggcaacttctattccaatcttcatccggcactggcggacaacgttgtctatgcagcggaccgcgctggtttggtaaaagcgctgaatgcggatgatggcaaagaaatctggtctgtcagcctggccgagaaagatggctggttctctaaagagcctgcattactttctggcggtgtgaccgtgtctggtgggcatgtctacattggcagcgaaaaggcgcaggtttacgcgctgaataccagcgatggtactgtggcatggcaaactaaagtcgcgggtgaagcactttctcgcccggtggtcagcgacggtctggtgttaatccacactagtaacggtcagttacaagcgctgaacgaagctgacggcgctgtcaaatggacagttaacctcgatatgccttcgctctctttgcgtggcgagtctgcgccggcaacggcttttggtgcggccgtcgtggggggcgataatggtcgcgtcagcgcagtgctgatggaacagggccagatgatttggcagcagcgtatttcccaggcgaccggttctaccgaaattgaccgtctgagcgatgttgacacgactcccgtcgttgttaacggcgttgttttcgctctggcctataatggtaacctgacggcgcttgatctgcgcagtggtcagattatgtggaaacgcgaactgggttcggtgaatgatttcatcgtcgacggcaatcgcatctatctggtcgatcaaaatgaccgggtgatggcgttgaccattgatggcggcgttacgctgtggacacaaagcgatctgctgcatcgcctgctgacttcgccggtgctgtataatggcaacctggtggtaggtgacagtgaaggttatctgcactggattaacgtcgaagatggtcgtttcgttgcccagcaaaaagttgatagttccggtttccagactgaaccggttgccgctgacggcaaactgctgatccaggcaaaagacggaaccgtgtactctattacacgttaa

SEQ ID NO: 482137 - DNA, 621 bp, Shigella sonnei
gtggaaatttacgagaacgaaaacgaccaggtagaagcggttaaacgcttttttgctgaaaatggcaaagcactggctgttggggtgattttgggcgttggcgcactgattggctggcgctactggaacagccatcaggttgattctgcacgctccgcttctcttgcctatcaaaatgcggttaccgcagtgagcgaaggcaaaccggatagcatcccggcggcggaaaaatttgctgctgaaaataaaaatacttatggtgcgctggcttctttggaacttgcgcagcaatttgttgacaaaaatgaactagagaaagctgccgcccagttacaacaggggctggcagacacgagtgatgaaaatctcaaagccgtgataaatctgcgtcttgctcgcgttcaggtacagctcaagcaggctgatgccgcgctgaaaacccttgataccatcaaaggtgaagggtgggctgccattgttgccgacctgcgtggtaaagcattgttgagcaaaggtgataagcaaggtgcgcgtagtgcatgggaagcaggcgtgaaaagcgatgttactccggcactgagcgaaatgatgcagatgaaaattaataatttgtccatctga

SEQ ID NO: 482138 - DNA, 1275 bp, Shigella sonnei
gtggcaaaaaacattcaagccattcgcggcatgaacgattacctgcctggcgaaacggccatctggcagcgcattgaaggcacactgaaaaacgtgctcggcagctacggttacagtgaaatccgcttgccgattgtagagcagaccccgctattcaaacgtgcgattggtgaagtcaccgacgtggttgaaaaagagatgtacacctttgaggatcgcaatggcgacagcctgactctgcgccctgaagggacggcgggctgtgtacgcgccggcatcgagcatggtcttctgtacaatcaggaacagcgtctgtggtatatcgggccgatgttccgtcacgagcgtccgcagaaagggcgttatcgtcagttccatcagttgggctgcgaagttttcggtctgcaaggtccggatatcgacgctgaactgattatgctcactgcccgctggtggcgtgcgctgggtatcttcgaacacgtaactcttgagctgaactctattggttcgctggaagcacgcgccaattaccgcgatgcgctggtggcattccttgagcagcataaagaaaagctggacgaagactgcaaacgccgcatgtacactaacccgctgcgcgtgctggattcaaaaaatccggaagtgcaggcgcttctcaacgacgctccggcattaggtgattatctggacgaggaatctcgtgagcattttgccggtctgtgcaaactgcttgagagcgcggggatcgcttacaccgtaaaccagcgtctggtgcgtggtctggattactataaccgtaccgttttcgagtgggtgactaacagcctcggctcccagggcaccgtgtgtgcaggcggtcgttatgacggtctggtggaacaactgggcggtcgtgcaacaccggcagtcggttttgcgatgggcctcgaacgtcttgtattgttagtacaggccgttaatccggaatttaaagccgatcctgttgtcgatatatacctggtggcttcaggtgctgatacacaatctgcggctatggcattagctgagcgtctgcgtgatgaattaccgggcgtgaaattgatgaccaaccacggcggcggcaactttaagaaacagtttgcccgtgctgataaatggggggcccgcgttgctgtggtgctgggtgagtctgaagtggctaacggcacagcagtagtgaaggatttgcgctctggtgagcaaacggcagttgcgcaggatagcgtagccgcgcatttgcgcacgttactgggttaa

SEQ ID NO: 482139 - DNA, 1119 bp, Shigella sonnei
atgcataaccaggctccaattcaacgtagaaaatcaacacgtatttacgttgggaatgtgccgattggcgatggtgctcccatcgccgtacagtccatgaccaatacgcgtacgacagatgtcgaagcaacggtcaatcaaatcaaggcgctggaacgcgttggcgctgatatcgtccgtgtctccgtaccgacgatggacgcggcagaagcgttcaaactcatcaaacagcgggttaacgtgccgctggtggctgacatccacttcgactatcgcattgcgctgaaagtagcggaatacggcgtcgattgtctgcgtattaaccctggcaatatcggtaatgaagagcgtattcgcatggtggttgactgtgcgcgcgataaaaacattccgatccgtattggcgttaacgccggatcgctggaaaaagatctgcaagaaaagtatggcgaaccgacgccgcaggcgttgctggaatccgccatgcgtcatgttgatcatctcgatcgcctgaacttcgatcagttcaaagtcagcgtgaaagcgtctgacgtcttcctcgctgttgagtcttatcgtttgctggcaaaacagatcgatcagccgctgcatctggggatcaccgaagccggtggtgcacgcagcggggcagtaaaatccgccattggtttaggtctgctgctgtcggaaggcatcggcgacacgctgcgcgtatcgctggcggccgatccggtcgaagagatcaaagtcggtttcgatattttgaaatcgctgcgtatccgttcgcgagggattaacttcatcgcctgcccgacctgttcgcgtcaggaatttgatgttatcggtacggttaacgcgctggagcaacgcctggaagatatcatcactccgatggacgtttcgattatcggctgcgtggtgaatggcccaggtgaggcgctggtttctacactcggcgtcaccggcggcaacaagaaaagcggcctctatgaagatggcgtgcgcaaagaccgtctggacaacaacgatatgatcgaccagctggaagcacgcattcgtgcgaaagccagtcagctggacgaagcgcgtcgaattgacgttcagcaggttgaaaaataa

SEQ ID NO: 482140 - DNA, 1014 bp, Shigella sonnei
atgaatactgaagccacgcacgaccaaaatgaagcacttactaccggcgctcgcctgcgtaatgctcgcgaacaactaggacttagtcagcaggccgttgccgagcgactttgcctgaaggtttccacggtacgcgacattgaagaagataaggcacccgccgatcttgcttcaacattcctgcgcggatatatccgctcttatgcgcgtctggtacatattccagaagaagaactgctgccagggctggaaaagcaggctccactacgggctgcaaaagttgcgccaatgcagagtttttccctcggtaaacgccgcaaaaaacgtgatggctggctgatgaccttcacctggctggtgttgtttgtggttatcggcctgagcggtgcctggtggtggcaagaccacaaagctcagcaggaagagatcaccactatggccgatcaatcttcggcagaactgagcagtaatagcgagcaggggcagagtgtcccgttaaatacgtcgacaactacagacccggctacaacgtccacgccgccagcgtctgtggatactaccgcaaccaacacgcaaacacctgccgtaactgcgccagcaccagctgttgatccgcaacagaatgcggttgtttcgccttcgcaggcaaatgttgataccgccgcgaccccggtaccaacggcagcaacaacgccagatggtgctgcgccgttgccaaccgatcaggctggcgtgaccacgccggcggctgatccgaatgcgctggtgatgaactttactgccgattgctggctggaggtcactgatgctaccggtaaaaaattgtttagcgggatgcagcgtaaagacggtaatttgaatttaaccggccaggcaccgtataaactgaaaattggtgcgccagccgcagtacagatccagtatcaagggaaacctgtcgatctgagtcgttttatcagaactaaccaggttgcgcgtctgaccctcaatgccgaacaatcaccggcgcagtaa

SEQ ID NO: 482141 - DNA, 1155 bp, Shigella sonnei
atgtctgaacaattagtcacacctgaaaacgtcaccacgaaagatggaaaaatcaacctgctggatctcaaccgtcagcagatgcgggagttttttaaagatttaggtgaaaaacccttccgcgccgatcaggtgatgaagtggatgtatcactattgctgcgacaactttgatgagatgaccgacatcaacaaagtgttgcgcggcaaactgaaagaggtggcggagatccgcgcaccggaagtggttgaagaacagcgttcatccgacggcaccattaaatgggcgatcgccgttggcgatcagcgcgtcgaaacggtgtatatcccggaagacgaccgtgccacgctctgcgtctcttcgcaggtggggtgtgcgctggagtgtaaattctgttccaccgcccagcagggctttaaccgcaacctgcgggtgtcggaaattatcggccaggtgtggcgggcggcgaaaatcgtcggcgcagcaaaagtcaccggtcagcggccaatcactaacgtagtgatgatgggcatgggcgagccgctgctcaacctgaacaacgtcgttccggcgatggaaatcatgcttgatgatttcggttttggcctgtctaaacgtcgcgtcacgctttctacttccggtgtagttccggcgctggataaactgggcgatatgatcgacgttgcactggcaatttccctgcacgcgccgaacgacgaaattcgtgacgaaattgtgccgatcaacaaaaagtacaatatcgaaacgttccttgctgcggtgcgccgttatctggagaaatccaacgccaatcagggccgagtcactattgaatacgtgatgcttgaccacgttaacgacggcactgaacacgcgcaccaactggcggaactgctgaaagatacgccgtgtaagatcaacctgatcccgtggaacccgttcccgggtgcgccgtatggacgcagctcgaacagccgtatcgaccgtttctcaaaagtgctgatgagctacggtttcaccactattgtgcgtaaaactcgtggtgatgatatcgatgctgcctgtggtcagttggcgggcgatgttatcgaccgtacgaaacgtaccctgcgtaaacggatgcagggtgaagccatcgacattaaagcggtctga

SEQ ID NO: 482142 - DNA, 432 bp, Shigella sonnei
atggctattgaacgtactttttccatcatcaaaccgaacgcggtagcaaaaaacgtcattggtaatatctttgcgcgctttgaagctgcagggttcaaaattgtcggcaccaaaatgctgcacctgaccgttgaacaggctcgtggcttttatgctgaacacgatggaaaaccgttctttgatggtctggttgaattcatgacctctggcccgatcgtggtttccgtgctggaaggtgaaaacgccgttcagcgtcaccgcgatctgctgggcgcgaccaatccggcaaacgcactggccggtactctgcgcgctgattacgctgacagcctgaccgaaaacggtacccacggttctgattccgtcgaatctgccgctcgcgaaatcgcttatttcttcggcgaaggcgaagtgtgcccgcgcacccgttaa

SEQ ID NO: 482143 - DNA, 2313 bp, Shigella sonnei
atgcctcgcttgttaaccaaacgcggctgctggataacgctggcagctgcgccatttctcctttttcttgcagcgtggggagcagataaactctggcctctaccgctgcatgaagtcaatcccgcacgagtggtcgtggcgcaggatggtacgccgctctggcgcttcgccgatgctgacggcatctggcgttatccggtaacaatcgaagatgtttctccacgttaccttgaagcgctgatcaattatgaagatcgctggttctggaagcatccgggggtgaatccattctcggtggcgcgcgcagcatggcaagatctcacttcgggacgggttatttccggtggcagcacgctcactatgcaggttgctcgtctgcttgatcctcaccccaaaacatttggcggcaaaattcgccagctctggcgcgcgttgcaactggaatggcatctgtctaagcgtgaaattctgaccttgtatcttaaccgcgctccgtttggcggtacgttgcaggggatcggtgcggcaagttgggcttatctcggaaagtcgcctgcgaatttaagctattccgaggcggcaatgctggcggttttgccgcaagcgcccagccgtcttcgcccggatcgttggccggagcgtgccgaagccgcgcgtaataaagtgctcgaacggatggctgcgcaaggtgtgtggtcccgtgagcaggtaaaagagtcaagggaagaacccatctggctggcaccccgacaaatgccgcaactggcaccgctgttttcgcgcatgatgctcggtaaaagcaaaagcgacaaaatcgttactacgctggatgccggtcttcaacgacgtctggaagaactggcgcaaaactggaaagggcggttgccaccgcgcagctcactggcgatgatcgtggttgatcataccgatatgcgtgttcgcggctgggtgggatcggttgatctcaacgatgattcacgctttggtcatgttgatatggtcaatgcgatccgatcgccaggatcggtgctcaaaccgtttgtttatggtctggcgctggatgaaggcttgatccacccggcatcactgctgcaagacgtcccccggcgcaccggtgattatcgaccaggtaactttgatagcggttttcatggcccgatcagcatgagcgaggcgctggtgcgctcgctgaacttacctgctgtgcaggtgctggaagcctatggaccgaaacggtttgcggcaaagttacgcaatgttggattgccgttatatttgcccaacggcgctgcgccgaatctttcactcattctcggcggcgctggtgcaaaactggaagatatggcggcagcgtataccgcgtttgctcgccacggcaaggcaggcaaattgcgcttacagcctgacgatccgctgcttgaacggcctttaatgtcgtcgggggcggcgtggatcattcgccggattatggctgatgaagcgcaacccttgccggatagtgccttgccgcgcgtcgccccactggcatggaaaacgggcaccagctatggctatcgtgacgcctgggcgattggggttaacgctcgctatgtcattgggatctggactggcagacctgacggcacgcccgttgttggtcagtttggctttgccagtgccgtaccattgttgaatcaggtcaataatatcttactgtcgcgcagtgcgaatctgccggaagacccgcgcccgaactcagtcactcgtggcgttatctgctggccgggcggacagtctttgccggaaggtgacggtaactgtcgccgccgcctggcaacctggctgctggatggcagccagccgccaacgctgttactgtcagagcaggaagggattaatggcattcgcttccccatctggctggatgacaaagggcagcgcgtcgccgctgactgcccgcaggcgaagcaagaaatggtaaatgtctggccgctaccgctggaaccctggctgcccgcatcagaacgtcgcgctgtgcgcttaccaccggcctcgacaatttgcccgccatacggtcacgatgcccagctccctctgcagctgacaggcgttcgcgatggcgcgattattaaacgtttaccgggcgcagcggaagcgactttgccgttgcaatcaagtggaggggcaggtgaacgctggtggtttctgaatggcgaaccgttaactgaacgcgggcgcaacgtgaccctgcatttgacggataaaggtgattatcaattgctggtgatggatgacgtggggcaaatcgcgacagtgaaatttgtcatgcaatag

SEQ ID NO: 482144 - DNA, 4962 bp, Shigella sonnei
atgaaaaagttacgcgtagccgcctgcatgctaatgctggcgctggcagggtgcgacaacaacgataacgcgccaacagcggtgaaaaaagatgcgccttctgaagttactaaagcggcctcttcagaaaacgcgagttcagcaaaactctccgtgccggagagacaaaaactggcccaacagagtgccggtaaggtgctgacattgctggatctctctgaagtccaacttgatggtgcagccacgctggtgctgacgttctccatccctctcgacccggatcaggatttctcacgcgttattcatgtcgtcgataaaaaaagcggcaaagtggatggtgcctgggagctgtcagataatcttaaagagctacgtttacgccacctcgaaccgaaacgtgatttgatcgttactattggcaaggaggtcaaagcactcaacaacgcaaccttcagtaaagattacgaaaaaactataactacccgcgacatccaacccagcgtcggttttgccagccgtggttcgctgctgcctggcaaagtcgttgaagggctgccggtaatggcgctcaacgttaataatgtcgatgttaacttcttccgcgttaagccagaatctctgccagcattcattagccaatgggaataccgcaattcgctggcgaactggcagtcagacaaactgctgcagatggcggatctggtctacaccggacggtttgatctcaatcctgcgcgtaacacccgtgaaaaattattgctgccgctgggcgatatcaaaccgcttcagcaggcgggcgtgtatctggctgtgatgaatcaggctggacgttacgattacagtaatcccgcgacgctgtttacgttaagtgatatcggcgtttcagctcaccgttatcacaatcgtctggatatctttacccaaagtctggaaaacggcgcggcccagcaaggaattgaagtctctttattaaatgagaaaggacagactctgactcaggcaaccagtgacgctcaggggcatgtgcagctggaaaatgataaaaatgcggcattactgctggcacgtaaagacggtcagacaacgctactcgatttaaaacttccggcgctggacttagcagaatttaacattgctggcgcgccaggctatagcaaacagtttttcatgtttggcccacgcgatctttatcgcccaggtgaaacggtaatcctcaatggtttactgcgcgatgcagacggtaaagcattgcccgatcaacccatcaagttagacgtgattaaacctgacgggcaggtactcaggaacgtcgttagtcagccggagaatggcctctaccactttacctggccactcgatagcaatgcggcaaccggtatgtggcatattcgcgccaacacgggcgataaccagtaccggatgtgggatttccacgtcgaagattttatgccagagcgtatggcgctgaatctgaccggtgagaaaaccccgcttacgccgaatgatgaagtgaaattctccgtggtgggatactacctgtacggtgcgcctgctaatggtaatactttgcaagggcaacttttcctgcgcccactgcgtgaggctgtgtcagccttacctggttttgaattcggcgatatagctgccgaaaacctttcccgcacgctggatgaagttcagttgacgctggatgataaagggcgcggcgaagtttctacagaaagccagtggaaggaaacgcattccccattgcaggttattttccagggcagtttgctggaatcgggcggtcgcccggtgacgcgccgcgctgagcaggctatctggcctgccgatgcattgccggggctccgtccgcagttcgccttgaaatcggtttacgattatcgcactgacagcacggtgaaacagcccattgttgatgaaggcagtaacgccgcttttgacatcgtttatagcgatgcgcaaggcgtgaaaaaagccgtgtcgggcttgcaggtgcgcctgattcgcgaacgccgcgattactactggaactggtcagaagatgaaggctggcagtcacagtttgatcaaaaagatctgatcgaaaatgaacaaactctggatcttcaggcggatgaaaccggtaaggtcagtttcccggtagagtggggcgcttatcgtctggaagtcaaagcgccgaatgaagcggtcagtagcgtgcgtttttgggctggctatagctggcaggacaacagcgacgggagcggcgcagtgcgacccgaccgtgtcacgctgaaactagataaagccagttatcgccccggcgataccattaagttgcatattgccgcgccaacggcgggtaaaggttatgcgatggtcgagtccagtgaagggccgctgtggtggcaagagattgatgttccggctcaagggctggatctgacgattccggtcgataaaacctggaatcgtcatgatctttatttgagtacgctggtggtgcgtcctggcgataaatctcgctccgcgacgccaaaacgcgcggttggtgtgttgcatctgccgcttggtgatgaaaaccgtcgcctcgatctggcgctggaaacaccagcaaaaatgcgtcccaatcaaccattaaccgtgaaaattaaagccagcactaaaaatggcgagaagcctaaacaggtgaatgtgctggtgtctgccgttgatagtggtgtgctgaatattactgactacgttacgccagatccgtggcaggcgttctttggtcagaaacgctatggcgcagacatttacgatatttacggtcaggttattgaaggtcaggggcgtctggcagctctgcgtttcggtggcgatggtgatgagctgaaacgtggtggtaaaccgccggtcaatcacgtcaatattgtcgcgcagcaggcgctgtcggtaacgctcaacgaacagggcgaaggctcggttacactgccgattggcgattttaacggtgaattgcgcgtcatggcgcaagcctggacggcagatgatttcggtagcaacgaaagcaaagtgatagttgccgcaccggtgattgctgaactgaacatgccgcgctttatggcgagtggcgatacctcgcgtctgacgctggatatcactaatcttaccgataaaccgcaaaaactgaacgttgccctgaccgccagtggtttgcttgaactggtcagcgattcacccgcagccgttgaattagcgccaggtgtgcgtactacgctgtttatcccggtgcgagcattgccgggttatggcgatggagaaattcaggccaccattagcgggttagcgttaccgggtgaaaccgttgccgatcagcataagcagtggaaaatcggcgtccgtccggcgttcccggcacaaacggttaattacggtacggcgttacagcctggtgagacatgggcgattccggcggatggattgcaaaacttctcgcctgttacgctggaagggcaattgttgttgagcggcaaaccaccgctgaacattgcacgttatatcaaagagttaaaagcgtatccgtacggctgtcttgagcaaaccgccagcggcctgttcccgtcactttataccaacgcagcccaactgcaggcgttgggcatcaaaggcgacagtgatgagaaacgccgtgcatcggtcgatatcggcatttcccgtttgctgcaaatgcaacgtgataacggcggctttgcgctgtgggataaaaacggtgacgaagagtactggctgacggcttacgtgatggatttcctggtccgcgcaggcgaacagggttacagcgtgccgacagacgccattaaccggggtaatgagcgtctgctgcgctatttacaagatccgggcatgatgtcgatcccgtacgcggataatctcaaagccagtaaattcgccgttcagtcttacgctgcgctggtgctggcccgtcagcaaaaagcaccactgggtgcgctgcgtgaaatctgggagcatcgtgcagatgccgcttctggtttaccgctgctgcaacttggcattgcgctgaaaaccatgggtgatgcgacgcgtggtgaagaagcgattgcgctggcgctgaaaacgccgagaaatagtgatgagcggatatggctgggtgattacggtagtccactgcgcgacaacgcgttaatgctctccttgctggaagaaaataaactgctacccgatgagcagtacactttgctgaacacactttcgcagcaggcgtttggtgaacgctggctatcgacgcaggaaagtaacgcgttgttcctggctgcccgtacgattcaggatttaccgggtaaatggcaggcgcaaacctctttctcagctgagccgctgacaggcgagaaagcgcaaaacagcaatctgaatagcgatcaacttgtcaccttgcaggtgagcaacagtggcgatcagccgttatggttgcgtatggatgccagcggttatccgcaatccgcacctttaccggcgaacaatgtgctgcaaatcgagcgtcatattcttggtactgatggtaagagcaaatcgctggactcgttacgtagcggcgatctggtgctggtgtggttgcaggtaaaagccagtaacagcgtgccggatgcgttagtcgtggatctgctgcctgtgggtctggaactggaaaaccagaatctggcgaacggtagcgccagcctggagcaaagtggtggcgaagtgcagaacttactgaaccagatgcagcaggcgagtattaagcacattgagttccgtgacgatcgctttgtggcggcggttgccgttgatgaataccaaccggtaacgctggtgtatctggcgcgggcggtgacgccgggaacgtatcaggtaccgcaaccgatggtggaatcaatgtatgttccccaatggcgggcgaccggcgcggctgaagatctgctgattgtccgaccgtaa

SEQ ID NO: 482145 - DNA, 846 bp, Shigella sonnei
atgtccacgacatggtttgtaggagccgactggctcgccgaacatattgatgacccggaaattcagattatcgatgcccgcatggcgtcgcctggacaggaagatcgtaacgttgctcaggagtatctgaatggacatattcccggcgcagtgttttttgatatcgaagcgctttctgatcacacttccccgcttccgcacatgctgccgcgcccggaaacgttcgccgtggcgatgcgtgaattaggcgttaaccaggataagcacctgattgtctatgacgaaggtaatcttttctcagccccacgagcatggtggatgctgcgcacctttggtgtagagaaagtgtcgattctggggggtggacttgcaggctggcagcgcgatgatctgctgttagaagaaggtgcagtagagctgccggaaggagagtttaacgccgcgtttaatcctgaagccgtggtgaaagtaaccgatgtattattggcaagccatgaaaatacggcgcaaattattgatgcccgcccggctgcacgttttaacgcagaagttgatgaacctcgcccaggtttacgtcgcggacatattcccggagcactgaatgttccgtggacggaactggtgcgcgaaggcgaactaaaaacgaccgatgaactggatgcgatattttttggtcgcggcgtcagctacgacaaaccaattatcgtcagctgcggctctggtgtaacggcagccgtggttttgttagcactcgcgacgctggatgtgccaaacgtgaaactgtacgacggcgcatggagtgaatggggcgcgcgggcagatttaccggttgagccagtgaaataa

SEQ ID NO: 482146 - DNA, 777 bp, Shigella sonnei
atgtccgaaacaaaaaacgaacttgaagacctgctggaaaaagcagcaaccgaaccggcgcaccgcccggcctttttccgtactctactggaatccaccgtctgggtgcttggtacggcggcgcagggcgaggctgtggttgaagatagtgcgcttgatttacagcactgggaaaaagaagacggcaccagcgtcattccttttttcacctcgttagaagcgcttcaacaggcggttgaagacgaacaggcatttgtcgtaatgcccgttcgcacattgtttgagatgacccttggcgaaacgctcttccttaatgccaaactgccgaccggtaaagaatttatgccgcgtgaaatcagtttgttgattggtgaagagggaaatccgctgagcagccaggaaatcctggaaggcggtgaatcgctgatattatcggaagtcgcagagccgccagcacaaatgattgattcactcaccaccttatttaaaaccattaagccggtgaagcgtgcttttatttgttcaattaaagagaacgaagaggcacagcctaatttacttattggcattgaagccgatggtgatatcgaagaaattattcaggcgacgggaagtgtagcgaccgatacattacctggcgatgaaccaatcgatatttgtcaggtgaaaaaaggggaaaaaggaattagccactttattaccgaacatattgtgccattctatgaacgtcgctggggtggttttttgcgtgactttaaacaaaaccggataatctaa

SEQ ID NO: 482147 - DNA, 1284 bp, Shigella sonnei
atgacagaagcgatgaagattaccctctctacccaacctgccgacgcgcgctggggagaaaaagcaacttacagcattaataatgacggcattaccctgcatttgaacggggcagacgatctggggctgatccagcgtgcggcgcgcaagattgacggtctgggcatcaagcatgttcagttaagcggtgaaggctgggatgcggatcgctgctgggcattctggcaaggttacaaagccccgaaaggcacgcgtaaagtggagtggccggatctggacgatgcccagcgccaggaactggataaccgcctgatgatcatcgactgggtgcgtgacaccatcaacgcaccggcagaagaattgggaccatcgcaactggcacagcgtgctgttgatctgatcagcaacgtcgcgggcgatcgtgtgacttatcggatcaccaaaggcgaagatctgcgtgagcaaggttatatggggctgcacaccgtcggacgcggttcagaacgttctccggtattgctggcgctggattacaacccaactggcgataaagaagcgccagtgtacgcgtgcctggtaggtaaaggtatcacttttgactccggcggctacagcatcaaacagactgcgtttatggactcgatgaagtcggacatgggcggcgcggcaacggttaccggggcgctggcatttgccattacgcgcggactgaacaagcgcgtgaagctgttcctctgctgtgcggataacctgattagcggcaatgcgttcaagctgggcgatatcatcacctatcgcaacggtaaaaaagttgaagtgatgaacactgatgccgaagggcgtctggtgcttgccgatggtctgattgatgccagtgcgcagaaaccggaaatgatcattgatgcggcgaccctcaccggggcggcgaaaactgcgctgggtaatgattatcacgcgctgttcagttttgacgatgcgcttgccggtcgtttgctggcgagtgcctcacaagagaacgaaccattctggcgtctgccgctggcggaattccaccgcagccagctgccgtctaactttgccgaactgaacaataccggaagcgcggcgtatccggcaggcgcgagcacggcggcgggcttcctgtcgcactttgttgagaactatcagcaaggctggctgcatatcgactgctcggcgacttaccgtaaagcgccggttgaacagtggtctgcgggcgctacgggacttggtgtgcgcacgatagctaatctgttaacggcgtaa

SEQ ID NO: 482148 - DNA, 201 bp, Shigella sonnei; identical to SEQ ID NO: 458078

SEQ ID NO: 482149 - DNA, 336 bp, Shigella sonnei
atgccaaagattgttattttgcctcatcaggatctctgtcctgatggcgctgttctggaagctaatagcggtgaaaccattctcgacgcagctctgcgtaacggtatcgagattgaacacgcctgtgaaaaatcctgtgcttgcaccacctgccactgcatcgttcgtgaaggttttgactcgctgccagaaagctcagagcaggaagacgacatgctggacaaagcctggggactggagcccgaaagccgtttaagctgccaggcacgcgttaccgacgaagatttagtagtcgaaatcccgcgttacactatcaaccatgcgcgtgagcattaa

SEQ ID NO: 482150 - DNA, 1851 bp, Shigella sonnei
atggccttattacaaattagtgaacctggtttgagtgctgcgccgcatcagcgtcgtctggcggctggtattgacctgggcacaaccaactcgctggtggcgacagtgcgcagcggtcaggccgaaacgttagccgaccatgaaggccgtcacctgctgccatctgttgttcactatcaacagcaagggcattcggtgggttatgacgcgcgtactaacgcagcgcttgacaccgccaacaccattagttctgttaaacgcctgatggggcgctcgctggctgatatccagcaacgctatccgcatctgccttatcaattccaggccagcgaaaacggcctgccgatgattgaaacggcggcggggctgctgaacccggtgcgcgtttctgcggacatcctcaaagcactggcggcgcgggcaactgaagccctggcaggcgagctggatggtgtagttatcaccgttccggcgtactttgacgatgcccagcgtcagggcaccaaagacgcggcgcgtctggcggggttgcatgttctgcgcttacttaacgaaccgaccgctgcggctatcgcctacgggctggattccggtcaggaaggcgtgatcgctgtttatgacctcggtggcgggacgtttgatatttccattctgcgcttaagtcgcggcgtgtttgaagtgctggcaaccggcggtgattccgcgctcggcggcgatgatttcgaccatctgctggcggattacattcgcgagcaggcgggcattcctgatcgtagcgataaccgcgttcagcgtgaactgctggatgccgccattgcagccaaaatcgcgctgagcgatgcggactccgtgaccgttaacgttgcgggctggcagggcgaaatcagccgtgaacaattcaatgaactgatcgcgccactggtaaaacgaaccttactggcttgtcgtcgcgcgcttaaagacgcgggtgtagaagctgacgaagtgctggaagtggtgatggtgggcggttctactcgcgtgccgctggtgcgtgaacgggtaggcgaatttttcggtcgtccaccgctgacttccatcgacccggataaagtcgtcgctattggcgcggcgattcaggcggatattctggtgggtaacaagccagacagcgaaatgctgctgcttgatgtgatcccactgtcgctgggcctcgaaacgatgggcggcctggtggagaaagtgattccgcgtaataccactattccggtggcccgcgctcaggatttcaccacctttaaagatggtcagacggcgatgtctatccatgtaatgcagggtgagcgcgaactggtgcaggactgccgctcactggcgcgttttgcgctgcgtggtattccggcgctaccggctggtggtgcgcatattcgcgtgacgttccaggtcgatgccgacggtcttttgagcgtgacggcgatggagaaatccaccggcgttgaggcgtctattcaggtcaaaccgtcttacggtctgaccgatagcgaaatcgcttcgatgatcaaagactcaatgagctatgccgagcaggacgtaaaagcccgaatgctggcagaacaaaaagtagaagcggcgcgtgtgctggaaagtctgcacggcgcgctggctgctgatgccgcgctgttaagcgccgcagaacgtcaggtcattgacgatgctgccgctcacctgagtgaagtggcgcagggcgatgacgttgacgccatcgaacaagcgattaaaaacgtagacaaacaaacccaggatttcgccgctcgccgcatggaccagtcggttcgtcgtgcgctgaaaggccattccgtggacgaggtttaa

SEQ ID NO: 482151 - DNA, 516 bp, Shigella sonnei
atggattacttcaccttctttggcttgcctgcccgttatcaactcgatacccaggcgctgagcctgcgttttcaggatctacaacgtcagtatcatcctgataaattcgccagcggaagccaggcggaacaactcgccgccgtacagcaatctgcaaccattaaccaggcctggcaaacgctgcgtcatccgttaatgcgcgcggaatatttgctttctttacacggttttgatctcgccagcgagcagcatactgtgcgcgacaccgcgttcctgatggaacagttggagctgcgcgaagagctggacgagatcgaacaggcgaaagatgaagcgcggctggaaagctttatcaaacgtgtgaaaaagatgtttgatacccgccatcagttgatggttgaacagttagacaacgaggcgtgggacgcggcggcggataccgtgcgtaagctgcgttttctcgataaactgcggagcagtgccgaacaactcgaagaaaaactgctcgatttttaa

SEQ ID NO: 482152 - DNA, 324 bp, Shigella sonnei; identical to SEQ ID NO: 35842

SEQ ID NO: 482153 - DNA, 387 bp, Shigella sonnei
atggcttacagcgaaaaagttatcgaccattacgagaatccgcgtaacgtgggttcctttgacaacaacgacgagaacgtcggcagcggcatggtgggggcaccggcctgtggcgacgtgatgaagttgcagattaaagtcaacgatgaaggtatcattgaagacgcgcgttttaaaacttacggctgcggttctgctatcgcttccagctccctggtcaccgaatgggtgaaagggaagtctctcgacgaagcgcaggcgatcaaaaataccgatattgctgaagaacttgaactgccgccggtgaaaattcactgttctattctggcagaagacgcgatcaaagccgccattgcggactataaaagcaaacgtgaagcaaaataa

SEQ ID NO: 482154 - DNA, 1215 bp, Shigella sonnei
atgaaattaccgatttatctcgactactccgcaaccacgccggtggacccgcgtgttgccgagaaaatgatgcagtttatgacgatggacggaacctttggtaacccggcctcccgttctcaccgtttcggctggcaggctgaagaagcggtagatatcgcccgtaatcagattgccgatctggtcggcgctgatccgcgtgaaatcgtctttacctctggtgcaaccgaatctgacaacctggcgatcaaaggtgcagccaacttttatcagaaaaaaggcaagcacatcatcaccagcaaaaccgaacacaaagcggtactggatacctgccgtcagctggagcgcgaaggttttgaagtcacctacctggcaccgcagcgtaacggcattatcgatctgaaagaacttgaagcagcgatgcgtgatgacaccatccttgtttccatcatgcacgtaaataacgaaatcggcgtggtgcaggatatcgcggctatcggcgaaatgtgccgtgctcgtggcattatctatcacgttgatgcaacccagagcgtgggcaaactgcctatcgacctgagccagttgaaagttgacctgatgtctttctccggtcacaaaatctatggcccgaaaggtatcggtgcgctgtatgtacgtcgtaaaccgcgcgtacgcatcgaagcgcaaatgcacggcggcggtcacgagcgcggtatgcgttccggcactctgcctgttcaccagatcgtcggaatgggcgaggcctatcgcatcgcaaaagaagagatggcgaccgagatggaacgtctgcgcggcctgcgtaaccgtctgtggaacggcatcaaagatatcgaagaagtttacctgaacggtgacctggaacacggtgcgccgaacattctcaacgtcagcttcaactacgttgaaggtgagtcgctgattatggcgctgaaagacctcgcagtttcttcaggttccgcctgtacgtcagcaagcctcgaaccgtcctacgtgctgcgcgcgctggggctgaacgacgagctggcacatagctctatccgtttctctttaggtcgttttactactgaagaagagatcgactacaccatcgagttagttcgtaaatccatcggtcgtctgcgtgacctttctccgctgtgggaaatgtacaagcagggcgtggatctgaacagcatcgaatgggctcatcattaa

SEQ ID NO: 482155 - DNA, 489 bp, Shigella sonnei
atgagactgacatctaaagggcgctatgccgtgaccgcaatgcttgacgttgcgctcaactctgaagcgggcccggtaccgttggctgatatttccgaacgtcagggaatttccctttcttatctggaacaactgttttcccgtctgcgtaaaaatggtctggtttccagcgtacgtggaccaggcggtggttatctgttaggcaaagatgccagcagcatcgccgttggcgaagtgattagcgccgttgacgaatctgtagatgctacccgttgtcagggtaaaggcggttgccagggcggcgataaatgcctgacccacgcgctgtggcgtgatttgagcgaccgtctcaccggttttctcaacaacattactttaggcgaactggttaataaccaggaagtgctggatgtgtctggtcgtcagcatactcacgacgcgccacgcacccgcatacaagacgcgatcgacgttaagttacgcgcttaa

SEQ ID NO: 482156 - DNA, 738 bp, Shigella sonnei
atgctgcaaaatattcgaattgtgctggtggagacgtcacacaccggcaatatgggttctgttgcccgtgccatgaaaacaatgggattaaccaatctgtggctggttaatccactggtgaaacccgactcccaggcgattgccctggcagcaggggccagcgatgtgattggtaatgctcacatcgtcgatacgctcgacgaagcgttagccggttgtagcctggtggtgggcaccagcgcacgctcccgcacgctgccgtggccgatgctcgacccgcgcgaatgcggtctgaaaagcgtcgctgaagcggcaaataccccggtggcgctggtgtttggtcgtgagcgcgtcggcttgaccaatgaagagttgcagaaatgccattatcatgtcgcgattgcggcaaacccggaatacagttcgctgaacttggcaatggcggttcaggttattgcctatgaagtgcgtatggcctggctggcaactcaggaaaatggcgagcaggtcgagcatgaagagacgccgtatccgctggtcgatgatctggagcgtttttatggtcatctggaacaaacgctgctggcaaccggttttatccgtgaaaaccatccggggcaggtgatgaataaattgcgccgtctgtttacccgtgcgcgcccggaaagccaggaattgaatatcctgcgcgggattctggcttctatagagcagcagaataaaggtaataaggcctga

SEQ ID NO: 482157 - DNA, 804 bp, Shigella sonnei
atgcatccgatgctgaacatcgccgtgcgcgcagcgcgcaaggcgggtaatttaattgccaaaaactatgaaaccccggacgctgtagaagcgagccagaaaggcagtaacgatttcgtgaccaacgtagataaagctgccgaagcggtgattatcgacacgattcgtaaatcttactcacagcacaccatcatcaccgaagaaagcggtgaacttgaaggtactgatcaggatgttcaatgggttatcgatccactggatggcactaccaactttatcaaacgtctgccgcacttcgcggtatctatcgccgttcgtatcaaaggccgcaccgaagttgctgtggtatacgatcctatgcgtaacgaactgttcaccgccactcgcggtcagggcgcacagctgaacggctaccgtctgcgcggtagcaccgctcgcgatctcgacggtaccattctggcgaccggcttcccgttcaaagcaaaacagtacgccactacctacatcaacatcgtcggcaaactgttcaacgaatgtgcagacttccgtcgtaccggttctgcggcgctggatctggcttacgtcgctgcgggtcgtgttgacggtttctttgaaatcggtctgcgtccgtgggatttcgcggcaggcgagctgctggttcgtgaagcaggcggcatcgtcagcgacttcaccggtggtcataactacatgctgaccggtaacatcgttgctggtaacccgcgcgttgtgaaagccatgctggcgaacatgcgtgacgagttaagcgacgctctgaagcgttaa

SEQ ID NO: 482158 - DNA, 855 bp, Shigella sonnei
atggcgctgccagtgaacaaacgcgttctcaaaattctgtttattctctttgttgttgccttctgcgtttatttagtgccgcgcgttgccatcaacttcttctattatcctgacgataaaatttacggtcccgacccctggtcggcggaatccgtcgaatttacggctaaggacggtactcgtctgcaaggctggtttattccttcttcgacgggccctgctgacaatgccatcgcaaccatcattcatgctcacggcaatgccggaaatatgtccgcccactggccgctggtcagttggttacccgagcgtaatttcaacgtttttatgtttgattatcgcgggtttggtaaatcaaaaggcacgccgtcccaggccggattgctggacgatacgcaaagtgccatcaatgtggtgcgccatcgcagtgatgtaaacccacaacggctggtgctgttcgggcagagtattggcggggcgaatattcttgctgttattggtcaggatgatcgtgaaggcatacgtgcggtgatcctcgactccacatttgcctcttatgcaaccatcgccaatcagatgatccccggcagtggctacttacttgatgagagttacagcggcgaaaattatatcgccagcgtcagcccgatcccgcttttactcattcacggtaaagctgatcacgttatcccatggcagcacagcgaaaagttgtatagcctggcaaaagagacaaaacggttgatcctaatcccggatggcgaacacattgatgctttttccgatcgtcacggcgatgtttatcgcgaacagatggtggactttatccttagcgcgttgaatccgcagaactaa

SEQ ID NO: 482159 - DNA, 1281 bp, Shigella sonnei
atgatgcctacgcttgctccaccatctgtcctttcggctccccagcgccgctgccagatcttgctgacgctctttcagccggggttgaccgccaccatggcaaccttcagcgagcttaatggtgtggatgatgatattgccagtcttgatatcagcgaaacaggacgggagatcctgcgctatcatcaactcacactgacgactggttatgacggtagctaccgggttgaaggtacagtgcttaaccaacgtttgtgtttatttcactggctacgacgtggtttccgtctgtgtccgtcatttattaccagccaattcacccccgccctgaagagtgaactgaagcggcgcggaattgcgcgtaacttttacgacgataccaatctacaagcgttagtgaatctctgctcccgacggctgcaaaaacgctttgaaacgcgcgatattcatttcctgtgtctgtatctgcaatattgtttgctgcaacaccacgctggaattacgcctcagtttaatccgctccaacgtcgctgggcggaatcctgccttgaatttcaggtagcgcaggaaattggacgccactggcagcgtcgggcgctccagcctgtaccgcctgatgagccactgtttatggcattacttttttccatgttgcgggttcccgatccattgcgtgatgcgcatcagcgagacagacaattgcgtcagtctatcaaacgtctggtaaaccattttcgtgagctgggaaatgttcgtttttatgatgaacaggggttatgcgatcagctttatacccacctcgcccaggcgttaaatcgcagtttgtttgccatcggtattgataataccctgccggaagagttcgccagactgtacccacgcctggtgcgcaccacccgcgcggcgctggccggatttgaaagtgaatacggcgtccatctttctgatgaggaaagcggtctggtcgcggtgattttcggtgcctggctaatgcaggaaaacgatctgcatgaaaaacagattattctactgaccgggaatgatagcgagcgagaagcgcagattgagcagcagttacgcgaactaacgttactgccgctcaacattaagcatatgtcggtaaaggcatttttgcagacaggcgctccgcgtggcgcggcactgattattgcgccttataccatgccattaccgctcttttcaccaccgctgatctatacggacctgacgctgacaacacatcaacaggagcagatccgcaaaatgctcgaatcagcatga

SEQ ID NO: 482160 - DNA, 1140 bp, Shigella sonnei
atggttttgcaatccacgcgctggttggcgctcggctatttcacatacttttttagttacggcatttttctacctttctggagcgtctggcttaaagggattggtttaacgccagaaaccatcggcctgttattgggggcaggtctggttgcccgttttctcgggagtttgctcatcgcgccccgcgtcagcgatccttcccgcctgatttccgccttgcgcgtgctggcactgctgacacttctctttgctgtcgccttctgggcgggggcgcacgtagcgtggctgatgctggtgatgattggctttaacctctttttctcaccgctggtaccgttgaccgatgcactggcgaatacgtggcaaaagcagttcccgcttgattacggcaaagtgcgactgtggggctcggtggcgtttgtcattggctcggcgctgacgggcaaactggtcactatgtttgattatcgggtgatcctcgcgctgttgacgttgggcgtggcatccatgctgctcggctttctcatccgtccgacgattcagccacaaggggcaagtcgccagcaggagagcaccggttggtctgcgtggttggcgctggttcgccagaactggcgctttctggcctgcgtttgtttattgcagggggcacatgcggcctattacggttttagcgccatttactggcaggcagctggctactcggcctcggcggtggggtatttgtggtcgctgggcgtggtggcggaagtcattatctttgcgctgagtaataaacttttccgccgttgtagtgctcgcgatatgctgttgatctcggcgatttgcggcgtagtgcgctggggcattatgggagcaactacggcgttgccgtggttgatagtggtgcaaattttgcattgcggcaccttcacggtctgccacctggccgccatgcgctatattgctgttcgccagggtagcgaagtcatccgtttacaggcggtttactctgccgtcgcgatgggcggcagtatcgctatcatgaccgttttcgccggtttcctgtatcaatatctgggccacggcgtgttctgggtaatggcgctggtggcgcttccggcaatgtttttgcgcccgaaagttgttccctcatgctga

SEQ ID NO: 482161 - DNA, 891 bp, Shigella sonnei
atggaactacggcatttacgctatttcgtcgcagtggcgcaggcactgaactttacccgtgcggcggaaaaactgcatacctcacagccttcgttaagcagccagatccgcgatcttgaaaactgtgtcggtgttccgttactggtgagggataagcgcaaagtcgcgttgacggcggcgggagaatgttttctccaggacgcgctggcaatcctcgaacaagcggaaaatgccaaattacgggcgcggaaaattgttcaggaagacagacaattaaccattggctttgtgccatcggcggaagtgaatttattgccaaaagtattaccaatgtttcgtctcagacagccagacaccttgattgagctggtgagtttaatcaccacgcaacaggaggaaaaaattcgccgtggtgaactcgacgtcggcttaatgcgccatcctgtttatagcccggagattgattatctggagctttttgacgaaccattagtggtggtgttaccggttgatcaccctttagcacatgaaaaagagatcaccgccgcgcaactggatggcgtgaatttcgtcagtaccgatccggcgtattccggttcgcttgcgccgatcgttaaagcgtggtttgcgcaagaaaacagccagccaaatatcgtccaggtggcaacgaatattctggtgaccatgaatctggtgggcatggggctgggcgtcactttgatacccggttatatgaataattttaataccgggcaggttgtttttcgtcccattgccggaaatgtgccttccattgctttactgatggcgtggaagaaaggggagatgaagccggcattacgcgatttcatcgccattgtgcaggaacgtttggcaagcgtaacggcataa

SEQ ID NO: 482162 - DNA, 1362 bp, Shigella sonnei
atgaccacaccctcagatttaaacatttaccaactgattgatacccaaaatggtcgggtcactccgcgtatttataccgacccagatatttaccaactggagcttgaacgtattttcggccgttgctggttatttctcgcccacgaaagccagatcccaaaacctggtgatttctttaacacctacatgggggaagatgcggttgtcgtagtgcgtcagaaagacggcagcattaaggcgtttctcaaccaatgccgccaccgggccatgcgtgtgagttatgcagattgcggcaacactcgcgcctttacctgtccgtatcacggctggtcttatggcattaacggcgagttgatcgatgtaccgctggaacctcgcgcctacccacaagggttgtgtaaatcccactggggactaaacgaagttccttgtgtggagagttataaagggctgatttttggcaactgggataccagcgcaccgggcctgcgtgattacctgggtgacattgcctggtatctggatggcatgctggatcgtcgcgaaggcggcaccgaaattgtcggcggcgtacaaaagtgggtgatcaactgtaactggaaattcccggcagagcagttcgccagtgaccagtatcatgctctgttcagccatgcttctgccgttcaggtattaggggcgaaagatgatggcagcgataagcgcctcggtgatggacaaaccgcccgcccggtgtgggaaaccgccaaagatgcgctgcaatttggtcaggacggtcacggtagcggtttcttctttactgaaaaaccggatgctaatgtctgggtcgatggcgcagtttcaagctattaccgcgaaacctatgccgaagcagaacaacgtttaggtgaagttcgcgccctgcgcctggcgggtcataacaatattttccccacgctttcatggctcaacggcactgccacgctccgcgtctggcatccgcgcggccctgatcaagttgaagtgtgggcgttctgtattactgacaaagccgcctccgatgaagttaaagccgcttttgaaaacagcgccactcgtgcttttggtcctgctggttttctcgagcaggatgactcggagaactggtgtgaaatccagaaattgcttaaaggccaccgcgcccgcaacagcaaactgtgtctggaaatggggcttggtcaggaaaagcgccgcgacgacggcattcctggcattactaactatatcttttcagaaactgccgctcgtggaatgtaccaacgctgggccgatcttctgagtagcgaaagctggcaggaagtgctcgataaaaccgccgcttaccagcaggaggtgatgaaatga

SEQ ID NO: 482163 - DNA, 519 bp, Shigella sonnei
atgagtgcgcaagtttcactagagttacatcaccgcattagccagtttctctttcacgaagccagcttactggacgactggaaatttcgtgactggctggagcagctcgacaaagagattcgttacaccatgcgcaccacagttaacgcgcaaacacgcgaccgccgcaaaggcgtccagccaccgacaacctggatttttaatgacaccaaagaccagctggagcggcgaatcgcccgtctggaaacgggcatggcctgggcagaagagccgccgtcacgcacccgtcacttaatcagcaactgccagataagcgaaaccgacatcccaaacgtatttgctgtgcgggtaaattatctgctttatcgggcacaaaaagagcgcgatgaaacattctatgttggaacgcgtttcgacaaagttcgccgtctggaagatgacaactggcgcttgctggaacgggatatcgtcctggatcaagcggtaatcacttcccataacctgagtgtactgttctga

SEQ ID NO: 482164 - DNA, 321 bp, Shigella sonnei
atgaatcgaatttatgcgtgtcccgttgcggatgtgccggagggtgaggctctccggatcgatacctcgcccgtcatcgccctgttcaacgttggcggcgagttttatgccattaacgatcgttgcagccatggtaatgcgtcgatgtcagaagggtatctggaagatgacgccacggtggagtgcccgctacacgccgccagtttttgcctgaaaacggggaaagcgttatgcctgcccgccaccgatccgctcaccacttatccagtacacgttgaaggtggtgacattttcatcgacttaccggaggcgcagccatga

SEQ ID NO: 482165 - DNA, 813 bp, Shigella sonnei
atgagcgatctgcataacgagtccatttttattaccggcggcggatcgggattagggctggcgctggtcgagcgatttatcgaagaaggcgcgcaagttgccacgctggaactgtcggcggcaaaagtcgccagtctgcgtcagcgatttggcgaacatattctggcggtggaaggtaacgtgacctgttatgccgattatcaacgcgcggtcgatcagatcctgactcgttccggcaagctggattgttttatcggcaatgcaggcatctgggatcacaatgcctcactggttaatactcccgcagagacgctcgaaaccggcttccacgagctgtttaacgtcaacgtactcggttacctgctgggcgcaaaagcctgcgctccggcgttaatcgccagtgaaggcagcatgattttcacactgtcaaatgccgccaggtatcctggcggcggtggcccgctgtacaccgccagtaaacatgccgcaaccggacttattcgccaactggcttatgaactggcaccgaaagtgcgggtgaatggcgtcggcccgtgtggtatggccagcgacctgcgcggcccacaggcgctcgggcaaagtgaaacctcgataatgcagtctctgacgccggagaaaattgccgccattttaccgctgcaatttttcccgcaaccggcggattttacggggccgtatgtgatgttggcatcgcggcgcaataatcgcgcattaagcggtgtgatgatcaacgctgatgcgggtttagcgattcgcggcattcgccacgtagcggctgggctggatctttaa

SEQ ID NO: 482166 - DNA, 1203 bp, Shigella sonnei
atgaaagaaaaaacgatcattattgtcggtggcgggcaagcggcggcaatggctgcggcctcgctacgccagcaagggttcaccggtgagctgcatctgttttccgatgagcgacatcttccttatgaacgacctccactctcgaaatccatgttgctggaagattccccgcagttacagcaggtgttacccgctaactggtggcaggaaaacaatgttcatctgcattccggtgtaaccatcaaaacgctgggtcgcgacacacgagagttagtgttaaccaacggcgaaagctggcactgggatcagctttttatagcaatcggcgcggcagctcgaccgctgccgttgcttgatgcactgggagaacgctgctttaccctacgccatgccggtgatgccgccagactgcgagaagttctgcagcccgaacggtcagtcgtgattgtcggtgccggaactattggtctggaactggctgccagcgccacgcagcgcagatgtaaggtgacagtgattgaactggcggcaaccgtcatgggccgtaatgcaccaccgcccgtgcaacgctatcttttacagcgccaccagcaggctggtgtgcgcattctgctcaataatgccattgaacatgtggtcgatggtgaaaaagtagaactgacgctgcaaagtggggaaacgcttcaggctgatgtggtgatttacggtattggtatcagcgccaacgagcaactggctcgcgaggccaaccttgatactgccaatggcattgtcattgatgaggcttgccgcacctgcgatcccgcgatctttgccggtggcgatgtggcaatcactcgtcttgataatggtgcactacaccgctgcgaaagctgggaaaacgccaataaccaggcgcaaattgccgctgccgcaatgttagggctaccgctaccgctactgccgccgccgtggttctggagcgatcagtacagtgataacttacagtttattggcgatatgcgtggcgatgactggctttgtcgtggcaacccggaaactcagaaggcgatttggtttaatctgcaaaacggcgtgcttatcggtgcggtcacgctgaatcaggggcgtgagattcgcccaattcgcaaatggatccagagcggcaaaacgtttgatgcgaaactgctgatagatgagaacatcgcgcttaaatcactgtaa

SEQ ID NO: 482167 - DNA, 1068 bp, Shigella sonnei
atgtttgtgaagctcttacgttccgttgcgattggattaattgtcggcgctattctgctggttgccatgccttcgctgcgcagccttaacccgctttccactccgcaatttgacagtaccgatgagacgcctgccagctataatctggcggttcgccgcgccgcgccagcggtggttaacgtttacaaccgtggtttgaacaccaactctcacaaccagcttgagatccgcaccctgggatccggtgtaatcatggatcaacgcggttatatcatcaccaataaacacgtcatcaacgacgccgatcagatcatcgtcgccttacaggatggtcgtgtatttgaagcattgctggtgggatctgactctctaaccgatctggcggtacttaaaattaatgccactggcggtttacctaccattccaatcaatgcacgtcgcgtaccgcatattggcgacgtggtactggcgatcggtaacccgtacaacctcgggcagaccattacccaggggattattagtgccacgggtcgaattggtctgaacccgaccgggcggcaaaacttcctgcaaaccgatgcttccattaaccacggtaactctggcggcgcgctggtgaactcgctgggcgaactgatgggcattaacacgctgtcgtttgataagagtaacgatggcgaaacgccggaaggtatcggctttgcgattcctttccagttagcaaccaaaattatggataagctgatccgcgatggtcgcgtgatccgcggctacattggcattggcggacgtgagatcgcaccgctgcacgcacagggcggtggtatagatcaactgcaagggatcgtggttaatgaagtgtcacctgacggcccggcggcgaatgcgggtattcaggtcaacgatctgattatttcggtggataacaaaccggccatctctgctctggagacgatggatcaggtggcggaaattcgccctggttcggtgatcccggttgtagtgatgcgtgatgataagcagttaacgctgcaggtcaccattcaggaatatccggcaaccaattaa

SEQ ID NO: 482168 - DNA, 1368 bp, Shigella sonnei
atgaaaaaacaaccccagctgttgagtgcattagcgttaagtgtcgggttaactctctcggcgtcatttcaggccgtcgcgtcgattccaggccaggttgccgatcaggcccctctccccagtctggctccaatgctggaaaaagtgcttccggcagtggtgagcgtacgggtggaaggaacggccagtcagggacagaaaatcccggaagaattcaaaaagttttttggtgatgatttaccggagcaacctgcacaacccttcgaaggtttaggctccggtgtcatcatcaacgccagtaaaggctatgtgctgaccaacaaccatgtgattaatcaggcacagaaaatcagtattcagctcaatgatgggcgcgagtttgatgcaaaactgattggtagcgatgaccagagcgatatcgccctgttacaaattcaaaacccgagcaaattaacgcaaatcgctattgccgactccgataaattgcgcgtcggtgattttgccgtagcggtcggtaacccatttggccttgggcaaaccgccacctctggcattgtttccgcattaggacgcagcgggttgaatcttgaaggtctggaaaactttatccagacagatgcttccattaaccgcggtaactccggcggtgcactgttaaaccttaacggtgagttaattggcatcaacactgcaatccttgcgcctggcggcgggagcgtcgggattggatttgccatccccagtaatatggcgcgaacactggcgcagcagcttatcgactttggtgaaatcaaacgcggtttgttaggcatcaaaggcaccgagatgagtgccgatatcgccaaagccttcaaccttgacgtgcagcgtggcgcgtttgtcagcgaagtgttgccaggttctggctcggcgaaagcgggcgtcaaagcgggcgatattattaccagcctcaacggcaaaccgctgaatagctttgctgagttgcgctctcgtatcgcgaccaccgagccgggcacaaaagtgaaacttggcctgctgcgtaacggcaaaccactggaagtagaagtgacgctcgataccagcacctcttcgtcggccagcgctgaaatgatcgcgccagcgctggaaggtgcaacgttgagcgatggtcagctaaaagatggcggcaaaggtattaagatcgatgaagttgtcaaaggaagcccagctgctcaggctggcttgcaaaaagacgatgtgatcattggcgtcaaccgcgatcgggtgaactcgattgctgaaatgcgtaaagtgctggcggcaaaatcggccatcatcgccctgcaaattgtacgcggcaatgaaagcatctatctgctgatgcgttaa

SEQ ID NO: 482169 - DNA, 399 bp, Shigella sonnei
atgacctgggaatatgcgctaattgggttagtcgtcggcatcattattggtgctgtggccatgcgttttggtaatcgtaaactacgccagcaacaggcgttgcagtacgaactggaaaagaataaagctgaactggacgagtatcgcgaagagctggttagccactttgcccgcagcgcggaattactggataccatggcgcacgactatcgccagctgtatcagcacatggcgaaaagttccagcagcctgctgccggaactgtctgctgaagcaaacccgttccgtaatcgtctggcagagtctgaagccagcaacgatcaggcaccggtgcagatgcctcgcgactattctgaaggcgcatccggcctgctgcgtactggcgcgaagcgcgactaa

SEQ ID NO: 482170 - DNA, 1128 bp, Shigella sonnei
atgcaaagcgttaccccaacatcgcaatacctgaaggcgctcaatgaaggcagccatcaacccgacgacgttcaaaaagaggccgtcagccgcctggaaattatttatcaggaactcatcaatagcacgccaccagcccccaggacgagtgggctaatggcgcgggtcggtaagctgtggggtaaacgcgaagacacaaagcatacgccagtgcgtggcttatatatgtggggcggtgtaggacgcgggaaaacctggctgatggaccttttctatcaaagcctgccgggagagcggaaacagcgcctgcactttcaccgttttatgctgcgggtgcatgaagagctaactgccttacaggggcagaccgatccgctggaaattattgccgatcgctttaaagccgaaactgacgtgctctgttttgacgaattttttgtttctgatattaccgatgccatgctacttggcggtctgatgaaagccttgttcgcccgcggtattaccctggtagcgacgtcaaatattccgccggacgaactttatcgaaatggcttgcaacgtgcgcgttttctgcctgcaatcgatgccattaaacagcattgtgatgtaatgaacgtggacgctggtgttgattatcgactgcgtacactcactcaggcgcatctgtggctttcgccactccacgatgaaacccgggcgcaaatggataaactatggttggcgctggcgggggggaaacgagaaaattcaccgacgttagaaatcaaccatcggccattagcgacaatgggcgtcgagaaccagacgctggcggtctcttttactacgctgtgcgtcgacgcccgcagtcagcatgactatattgcgctctcacgtctctttcatacggtcatgttgtttgatgtaccagttatgacgcggttgatggagagcgaagcgcggcgctttattgcgctggtggatgagttttacgagcgccatgtcaaattagtggtgagtgcagaagtgccgctgtatgaaatttatcagggcgatcggctgaagtttgagttccagcgttgcctgtcacgtctgcaagagatgcaaagcgaagagtatctgaagcgcgagcatttggcgggttaa

SEQ ID NO: 482171 - DNA, 429 bp, Shigella sonnei
atgaaaacttttacagctaaaccagaaaccgtaaaacgcgactggtatgttgttgacgcgaccggtaaaactctgggccgtctggctactgaactggctcgtcgcctacgcggtaagcacaaagcggaatacactccgcacgtagataccggtgattacatcatcgttctgaacgctgacaaagttgctgtaaccggcaacaagcgtactgacaaagtgtactatcaccacaccggccacatcggtggtatcaaacaagtgagctttgaagagatgattgctcgccgtcctgagcgtgtgattgaaatcgcggttaaaggcatgttgccaaaaggcccgctgggtcgtgctatgttccgtaaactgaaagtttacgcgggtaacgagcacaaccacgcggcacagcaaccgcaagttcttgacatctaa

SEQ ID NO: 482172 - DNA, 393 bp, Shigella sonnei
atggctgaaaatcaatactacggcactggtcgccgcaaaaattccgcagctcgcgttttcatcaaaccgggcaacggtaaaatcgtaatcaaccaacgttctctggaacagtacttcggtcgtgaaactgcccgcatggtagttcgtcagccgctggaactggtcgacatggttgagaaactggacctgtacatcaccgttaaaggtggtggtatctctggtcaggctggtgcgatccgtcacggtatcacccgcgctctgatggaatacgacgagtccctgcgttctgaactgcgtaaagctggcttcgttactcgtgacgctcgtcaggttgaacgtaagaaagtcggtctgcgtaaagcacgtcgtcgtccgcagttctccaaacgttaa

SEQ ID NO: 482173 - DNA, 639 bp, Shigella sonnei
atggctgtcgctgccaacaaacgttcggtaatgacgctgttttccggtcctactgacatctatagccatcaggtccgcattgtgctggctgagaaaggtgtaagtttcgagatcgaacacgtggaaaaggacaatccgcctcaggatctgattgacctcaacccgaatcagagcgttccgaccctggtggatcgtgagctgaccctgtgggaatctcgcatcattatggaatatctggatgagcgtttcccgcatccgccactgatgcctgtttacccggtagctcgcggtgaaagccgtctgtacatgcatcgcatcgaaaaagactggtacacgctgatgaacaccatcatcaacggttcagcttctgaagcagatgccgcacgtaagcaactgcgcgaagaactgctggcgattgcgccggtcttcggtcagaagccgtacttcctgagcgatgagttcagcctggtcgattgctatcttgctccgctgctgtggcgtctgccgcaactgggtatcgagctcagcggcccgggtgcgaaagagctgaaaggctatatgacccgcgtctttgagcgtgactctttccttgcttctttaactgaagcagaacgtgaaatgcgtctgggccggagttaa

SEQ ID NO: 482174 - DNA, 498 bp, Shigella sonnei
atggatttgtcacagctaacaccacgtcgtccctatctgctgcgtgcattctatgagtggttgctggataaccagctcacgccgcacctggtggtggatgtgacgctccctggcgtgcaggttcctatggaatatgcgcgtgacgggcaaatcgtactcaacattgcgccgcgtgctgtcggcaatctggaactggcgaatgatgaggtgcgctttaacgcgcgctttggtggcattccgcgtcaggtttctgtgccgctggctgccgtgctggctatctacgcccgtgaaaatggcgcaggcacgatgtttgagcctgaagctgcctacgatgaagataccagcatcatgaatgatgaagaggcatcggcagacaacgaaaccgttatgtcggttattgatggcgacaagccagatcacgatgatgacactcatcctgacgatgaacctccgcagccaccacgcggtggtcgaccggcattacgtgttgtgaagtaa

SEQ ID NO: 482175 - DNA, 1323 bp, Shigella sonnei
atgttcggcataattatatctgtcatcgtattaattacgatgggctatttgatcctgaaaaactacaaacctcaggtggtgctggctgccgcaggtgtcttcctgatgatgtgcggagtctggttagggttcggtggtgtactcgatcccgccaaaagcagcggctacttgatcgtcgacatttataatgaaatcctgcgcatgctgtccaaccgcattgccggattggggctgtcgattatggcggtgggcggttatgcccgctacatggagcgcataggagccagtcgcgcgatggtgagcttgctaagccgcccgttaaaactcattcgctcgccgtatattattctgtcggcaacttacgtcatcggccaaatcatggcgcagtttattaccagcgcctccggtctgggtatgttgctgatggtcaccttatttccgacgctggtgagtctgggagtaagtcgcctctctgcggtggcggttatcgcaaccacgatgtccattgagtgggggattctggaaacgaactccatttttgcagcccaggtcgcgggaatgaaaattgccacatacttcttccactaccagcttccggtcgcctcttgcgtcattatctcggtggcgatctcccactttttcgtgcaacgcgcttttgacaaaaaagataaaaatatcaatcacgaacaggcagagcaaaaaactctcgataatgtcccgccgctctattacgccattttacctgtgatgccgttaatcctgatgctcggctcgctgttcctcgcccacgtcgggctgatgaagtcagaactgcatctggtggtggtgatgttactaagtttgacggtgacgatgtttgttgagttcttccgcaagcataacttgcgcgaaacaatggacgatgtgcaggcgttttttgacggcatgggtacgcagtttgccaacgtggtaacgctggtggtcgcgggtgaaatatttgcgaaaggcttaacgacgattggcactgttgatgcggttatcaggggtgcggagcattctggtctgggcggtattggcgtgatgattattatggcgctagtcattgccatttgtgccattgtgatgggctctggcaatgcgccgtttatgtcatttgccagtcttattccgaatatcgcagccggactacatgtaccagcggttgtaatgattatgccgatgcattttgccacgacgctagcgcgcgcggtttcgccgattactgcggtggtgaagcggacagcgatccccatggcagtcggtttcgtggtgaatatgattgccacaatcacgctattttattaa

SEQ ID NO: 482176 - DNA, 792 bp, Shigella sonnei
atgggccttatgaacgcatttgattcgcaaaccgaagattcttcacctgcaattggtcgcaacttgcgtagccgcccgctggcgcgtaaaaaactctccgaaatggtggaagaagagctggaacagatgatccgccgtcgtgaatttggcgaaggtgaacaattaccgtctgaacgcgaactgatggcgttctttaacgtcgggcgtccttctgtgcgcgaagcgctggcagcgttaaaacgcaaaggtctggtgcaaataaacaacggcgaacgcgctcgcgtctcgcgtccttctgcggacactatcatcggtgagttttccggcatggcgaaagatttcctttctcatcccggtgggattgcccatttcgaacaattacgtctgttctttgaatccagtctggtgcgctatgcggctgaacatgccaccgatgagcaaatcgatttgctggcaaaagcactggaaatcaacagtcagtcgctggataacaacgcggcattcattcgttcagacgttgatttccaccgcgtgctggcggagatccctggtaacccaatcttcatggcgatccacgttgccctgctcgactggctgatcgccgcacgtccaaccgtggctgatcaggctctgcacgagcataacaacgttagctatcaacagcatattgcgatcgttgatgcgatccgccgtcatgatcctgacgaagccgatcgtgcgttgcaatcgcatctcaacagcgtctctgctacctggcacgctttcggtcagaccaccaacaaaaagaaataa

SEQ ID NO: 482177 - DNA, 894 bp, Shigella sonnei
atggcaacgaatttacgtggcgtaatggctgcactcctgactccttttgaccaacaacaagcactggataaagcgagtctgcgtcgcctggttcagttcaatattcagcagggcatcgacggtttatacgtgggtggttcgaccggcgaggcctttgtacaaagcctttccgagcgtgaacaggtactggaaatcgtcgccgaagaggcgaaaggtaagattaaactcatcgcccacgtcggttgcgtcagcaccgccgaaagccaacaacttgcggcatcggctaaacgttatggcttcgatgccgtctccgccgtcacgccgttctactatcctttcagctttgaagaacactgcgatcactatcgggcaattattgattcagcggatggtttgccgatggttgtgtacaacattccagccctgagtggggtaaaactgaccctggatcagatcaacaccctggttacgttgcctggcgtcggtgcgctgaaacagacttctggcgatctctatcagatggaacagatccgtcgtgaacatcctgatctggtgctctataacggttacgacgaaatcttcgcttccggcttgctggcaggcgctgatggtggtatcggcagtacttacaacatcatgggctggcgatatcaggggatcgtgaaggcgctgaaagaaggcgatatccagaccgcgcagaaactgcaaactgagtgcaacaaagtcattgatttactgatcaaaactggcgtattccgcggcctgaaaactgtcctgcattatatggatgtcgtttctgtgccgctgtgccgcaaaccgtttggaccggtagatgaaaaatatctgccagaactgaaggcgctggcccagcagttgatgcaagagcgcgggtga

SEQ ID NO: 482178 - DNA, 1491 bp, Shigella sonnei
atgagtactacaacccagaatatcccgtggtatcgccatctcaaccgtgcacaatggcgcgcattttccgctgcctggttgggatatctgcttgacggttttgatttcgttttaatcgccctggtactcaccgaagtacagggtgaattcgggctgacgacggtgcaggcggcaagtctgatctccgcagcctttatctctcgctggttcggcggcctgatgctcggcgctatgggtgaccgctacgggcgtcgtctggcaatggtcaccagcatcgttctcttctcggccgggacgctggcctgcggctttgcgccaggctacatcaccatgtttatcgctcgtctggtcatcggcatggggatggcgggtgaatacggttccagcgccacctatgtcattgaaagctggccaaaacatctgcgtaacaaagccagtggttttttgatttcaggcttctctgtgggggccgtcgttgccgctcaggtctatagcctggtggttccggtctggggttggcgtgcgctgttctttatcggcattttgccaatcatctttgctctctggctgcgtaaaaacatcccggaagcggaagactggaaagagaaacacgcaggtaaagcaccagtacgcacaatggtggatattctctaccgtggtgaacatcgcattgccaatatcgtaatgacactggcggcggctactgcgctgtggttctgcttcgccggtaacctgcaaaatgccgcgatcgtcgctgttcttgggctgttatgcgccgcaatctttatcagctttatggtgcagagtacaggcaaacgctggccaacgggcgtaatgctgatggtggtcgtgttgtttgctttcctctactcatggccgattcaggcgctgctgccaacgtatctgaaaaccgatctggcttataacccgcatactgtcgccaatgtgctgttctttagtggctttggcgcggccgtgggatgctgcgtaggaggcttcctcggtgactggctgggaacccgcaaagcgtacgtttgtagcctgctggcctcgcagctgctgattattccggtatttgcgattggcggcgcaaacgtctgggtgctcggtctgttactgttcttccagcaaatgcttggacaagggatcgccgggatcttaccgaaactgattggcggttatttcgataccgaccagcgtgcagcgggcctgggctttacctacaacgttggcgcattgggtggcgcactggccccaatcatcggcgcgttgatcgctcaacgtctggatctgggtactgcgctggcatcgctctcgttcagcctgacatttgtggtgatcctgctgattggtctggatatgccttcccgcgttcagcgttggctgcgcccggaagcattgcgtactcatgacgctatcgacggcaaaccatttagcggtgccgtgccatttggcagcgccaaaaacgatttagtcaaaaccaaaagttaa

SEQ ID NO: 482179 - DNA, 690 bp, Shigella sonnei
atgtcgttacttgcacaactggatcaaaaaatcgctgctaacggtggcctgattgtctcctgccagccgattcctgacagcccgctcgataaacccgaaatcgtcgcagccatggcattagcggcagagcaggcgggcgcggttgccattcgcatcgaaggtgtggcaaatctgcaagccacgcgtgcggtggtgagcgtgccgattattggaattgtgaaacgcgatctggaggattctccggtacgcatcacggcctatattgaagatgtcgatgcgctggcgcaggcgggcgcggacattatcgccattgacggcaccgaccgcccgcgtccggtgcctgttgaaacgctgctggcacgtatacatcatcacggtttactggcgatgaccgactgctcaacgccggaagacggcctggcatgccaaaagctgggagccgaaattattggcactacgctttctggctataccacgcctgaaacgccagaagagccggatctggcgctggtgaaaacgttgagcgaagccggatgtcgggtgattgccgaagggcgttacaacacgcctgctcaggcggcagatgcgatgcgccacggcgcgtgggcggtgacggtcggttctgccattacgcgtcttgaacacatttgtcagtggtacaacacagcgatgaaaaaggcggtgctatga

SEQ ID NO: 482180 - DNA, 876 bp, Shigella sonnei
atgaccacactggcgattgatatcggcggtactaaacttgccgccgcgctgattggcgctgacgggcagatccgcgatcgtcgtgaacttcctacgccagccagccagacaccagaagccttgcgtgatgccttatccgcattagtctctccgttgcaagctcatgcgcagcgggttgccatcgcttcaaccggaattattcgcgacggcagtttgctggcgctgaatccgcataatctcggtggattgctacactttccgttagtcaaaacgctggaacaacttaccaatttgccgaccattgccattaacgacgcgcaggccgcagcatgggcagagtatcaggcgctggaaggcgatgtaaccgagatggtgtttatcaccgtttccactggcgtcggcggcggtgtagtgagcggcggtaaactgcttaccggccctggcggtctggcggggcatatcgggcatacgcttgccgatccacacggcccagtctgcggctgtggacgcacaggttgcgtggaagcgattgcttctggtcgcggtattgcagcggcagcgcaaggtgaactcatgggcgcggatgcgagaactattttcacacgcgccgggcagggcgacgagcaggcgcagcaactgattcaccgctccgcacatgtgctggcaaggctgatcgctgatattaaagccacaactgattgccagtgcgtggtggtcggtggcagcgttggtctggcagaagggtatctggcgttggtggaaacgtatctggcgcaggagccagcggtatttcatgttgatttactggcggcgcactaccgccatgatgcaggtttacttggggcagcgctgttggcccagggagaaaaattatga

SEQ ID NO: 482181 - DNA, 465 bp, Shigella sonnei
atgatgatgggtgaagtacggtcattaccgtctgctgggttacatcctgcgttacaggacgcgttaacgctggcattagctgccagaccgcaagaaaaagcgccgggtcgttacgaattacagggcgacaatatttttatgaatgtcatgacgtttaacactcaatcgcccgttgagaaaaaagcggagctgcacgagcaatacattgatatccagctgttattaaacggtgaagaacggattctgtttggcatggcaggcactgcgcgtcagtgtgaagagttccaccatgaggatgattaccagctttgcagcaccattgaaaacgagcaagccatcatcctgaaaccgggaatgttcgccgtgtttatgctaggagagccgcataagccgggatgcgttgttggcgagccgggtgagattaaaaaggtggtggtgaaggttaaggctgatttaatggcttaa

SEQ ID NO: 482182 - DNA, 306 bp, Shigella sonnei
gtgatttacattgaacagcttgaattaatccataaaagtggtgatgtgttgtatccagtaaaaataaccagaaaatcatcaggaaaaactgccttccaccttgttccattcggcttaaataagactcacgaccttctagaggtggaagatgcttcagaagcaattcggctggtgattgatgaacgtcattccattcgctgcagtacacttacagcaactattacgaataaaaagggcaagcgaattaagcggacaggtatatacagtatcaagggtgttaacataaaagaatacaacgtcaggtaa

SEQ ID NO: 482183 - DNA, 480 bp, Shigella sonnei
atggaatcgctctcagagagaacctcaacaggctaccagcaaatccacgacggtattattcacctggtcgatagcgcccggacggaaacggtacgtagcgttaacgcgctgatgaccgcgacatactgggaaattggccgacgaattgtcgaatttgaacaaggtggcgaggcaagggctgcgtatggtgcgcagctaatcaagcgactatcaaaggatttaagtctaaggtataagcgtggtttctctgcaaaaaacttacgccaaatgaggcttttttacctcttttttcaacatgttgaaattcgccagacagtgtctggcgaattaacaccattgggaattccgcagacaccatctgcagaattcccatcggcaaagatttggcagacgctgtctgccaaattgagaggctgtttgatatttccacagcttttgtattgcatctcctattttcggtttgtatattcatgcaaataa

SEQ ID NO: 482184 - DNA, 1419 bp, Shigella sonnei
atgagtcagaatgtttatcaatttatcgacctgcagcgcgttgatccgccaaagaaaccgctgaagatccgcaaaattgagtttgttgaaatttacgagccgttttccgaaggccaggccaaagcgcaggctgaccgctgcctgtcgtgcggcaacccatactgcgagtggaaatgtccggtacacaactacatcccgaactggctgaagctcgccaacgaggggcgtatttttgaagcggcggaactgtcgcaccagaccaacaccctgccggaagtttgcggacgagtctgcccgcaagaccgtctgtgcgaaggttcctgcactctgaacgatgagtttggcgcggtgaccatcggcaacattgagcgttatatcaatgataaagcgttcgaaatgggctggcgtccggatatgtccggcgtgaagcaaaccggtaaaaaagtggcgattatcggcgcaggcccggcaggtctggcgtgtgcggatgtcctgacgcgtaacggcgtaaaagccgttgtcttcgaccgtcatccagaaattggcgggctgctgaccttcggtattccggccttcaagctggaaaaagaggtaatgacgcgtcgccgtgaaatcttcaccggcatgggtattgaattcaaactcaataccgaagtgggccgcgacgtgcagctggacgatctgctgagtgattacgatgccgtcttccttggcgtcgggacttatcagtcaatgcgcggcgggctggaaaacgaagacgccgatggcgtgtacgcagcgctgccgttccttatcgccaacaccaaacagttaatgggctttggtgaaacccgcgacgaaccgttcgtcagcatggaaggcaaacgcgtggtggtccttggcggtggcgacactgcgatggactgcgtgcgtacgtccgtgcgccagggagcgaagcacgttacctgtgcctatcgtcgtgatgaagagaacatgccgggttcccgccgcgaagtgaaaaacgcgcgggaagaaggcgtagagttcaaattcaacgtccagccactggggattgaagtgaacggtaacggcaaagtcagcggcgtaaaaatggtacgtaccgaaatgggcgaaccggatgccaaaggccgtcgccgcgcggagatcgttgcaggttccgaacatatcgttccggcagatgcagtgatcatggcgtttggtttccgtccacacaacatggaatggctggcaaaacacagcgtcgagctggattcacaaggccgcatcatcgccccggaaggcagcgacaacgccttccagaccagcaacccgaaaatctttgctggcggcgatatcgtccgtggttccgatctggtggtaaccgctattgccgaaggtcgtaaggcggcagacggtattatgaactggctggaagtttaa

SEQ ID NO: 482185 - DNA, 4554 bp, Shigella sonnei
atgacacgcaacccccgtcgccacgctctttctgtacccgtgcgcagcggttcggtagtggggttcccgcagagcctgggggaggttcacgatatgttgtacgataaatcccttgagagggataactgtggtttcggcctgatcgcccacatagaaggcgaacctagccacaaggtagtgcgtactgcaatacacgcactggcccgcatgcagcaccgtggcgcgattctcgccgatggtaaaaccggtgacggttgcggcttgctgttacaaaaaccggatcgcttttttcgcatcgttgcgcaggagcgcggctggcgtttagcgaaaaactacgccgtcgggatgctattcctgaataaagatcctgaactcgccgctgccgcacgccgcatcgttgaagaagaactgcaacgcgaaaccttgtcgattgtgggctggcgtgatgtccccactaacgaaggcgtactgggtgaaatcgccctctcctctctgccccgcattgagcaaatttttgtgaacgccccggcaggctggcgtccgcgcgatatggagcgccgtctgtttatcgcccgccgccgcattgaaaagcgtctcgaagccgacaaagacttctacgtctgtagcctatcgaatctggtgaacatctataaaggtctgtgtatgccggcggatctgccgcgcttttatctggatcttgcggacctgcgtctggaatcggccatttgcctgttccaccagcgcttctccactaacaccgtaccgcgctggccgctggcgcaaccgttccgctatctggcgcataacggtgaaatcaacaccatcactggtaaccgccaatgggcgcgtgcgcgtacctataaattccagacgccgcttatccctgatctgcacgacgccgcaccgttcgtcaacgaaaccggctctgactccagttcgatggataacatgctggaactcctgctggcaggcgggatggatatcatccgcgccatgcgtctgttagtgccacccgcctggcagaacaacccggatatggacccggaactgcgtgccttctttgactttaactccatgcatatggagccgtgggatggcccggcgggcatcgtgatgtccgacggtcgttttgccgcctgtaacctcgaccgtaacggtctgcgtccggcgcgctacgtcatcaccaaagataagctcatcacctgcgcctctgaagtcggtatctgggattaccagcctgacgaagtggtcgaaaaaggccgcgtcgggccaggcgaactgatggttatcgacacccgcagtgggcatattctgcactcggcagaaaccgatgacgatctgaaaagccgccatccatataaagagtggatggagaaaaacgtccgccgactggtaccgtttgaagatctgcccgatgaagaagtgggtagccgcgaactggacgacgacacgcttgccagctaccagaaacagtttaactacagcgcggaagagctggactccgtaattcgcgtactgggcgaaaacggtcaggaagcggtcggttcgatgggcgatgataccccattcgccgtgctctccagtcagccgcgcattatttacgactacttccgccagcagtttgcccaggtgactaacccgccaatcgacccgctgcgtgaagcgcatgttatgtcgctcgccaccagtatcggtcgtgaaatgaacgtcttttgcgaagcagagggccaggcgcaccgtttaagctttaaatcgccgattctgctctactccgatttcaaacagctcacgacgatgaaagaggagcactaccgcgcagatacgctggatatcacctttgacgtcactaaaaccacgctcgaagcgacagtcaaagagctgtgcgacaaagccgaaaaaatggtacgtagcggcaccgtgctgctggtgctctccgaccggaatatcgctaaagatcgcctgccggttccagccccgatggcggttggcgcgatccagacccgtctggtcgatcaaagcctgcgttgcgatgccaacatcatcgtcgaaaccgccagcgcccgcgatccgcaccacttcgccgtgttgctgggcttcggcgcgacggctatttatccataccttgcctatgaaacgctgggccgcctggtagacacccatgcgattgccaaagattatcgtaccgtgatgctcaactaccgtaacggcatcaacaaaggcttgtacaaaatcatgtccaaaatgggcatctccaccatcgcctcttaccgctgctcgaaactgtttgaagcggtcggtctacacgatgatgtagtgggcctgtgcttccagggggcggtcagccgcattggtggggcaagctttgaagacttccagcaggatctgctgaatctgtcgaaacgtgcctggctggcgcgtaagcccatcagccagggcggcctgctgaaatacgtccacggcggcgaataccacgcctacaacccggacgtggtgcgcacgctgcaacaagcggtacaaagcggcgagtacagcgactatcaggaatacgcgaagctggttaatgagcgtccggcaaccacgctgcgcgatctgctggcaattacgccgggtgaaaacgcggtcaacattgctgatgttgaaccggcaagcgaactgtttaaacgcttcgataccgctgcgatgtctatcggcgcgttaagcccggaagcccacgaggcgctggcggaagcgatgaacagcatcggcggtaactcaaactccggtgaaggcggtgaagatccggcgcgctacggcaccaacaaagtgtcgcgcatcaagcaggtggcttccggtcgctttggggttactccggcgtatctggtcaatgccgacgtcattcagattaaagtcgcccagggcgcgaagccgggcgaaggcggtcagttgccgggtgataaagtcactccttacatcgccaaactgcgctattcggtgcccggagtgacgctgatctccccgccgccgcaccacgatatctactctatcgaggacttagcgcagctcattttcgacctcaagcaggttaacccgaaagcgatgatctccgtgaagctggtttccgaaccgggcgtaggcaccatcgcgactggcgtggcaaaagcttatgccgatttaatcaccatcgcaggctatgacggtggcaccggcgcaagcccgctgtcgtcagtgaaatacgcaggttgcccgtgggagctggggcttgttgaaacccagcaggcgctggttgccaatggtctgcgtcataagatccgtttgcaggtcgatggcggcctgaaaaccggtgttgatatcatcaaagcggcgattctcggcgcagaaagcttcggcttcggcactggcccaatggtcgcgctcggctgtaaatatctgcgtatttgccacctgaacaactgcgcaacgggtgtggcaactcaggatgacaaactgcgtaagaatcactatcacggcctgccgttcaaggtgacgaattactttgagtttatcgcccgtgaaacccgcgagctgatggcacagctgggggtaacgcggctggtggatctgattggtcgcaccgacctgctgaaagagctggacggtttcaccgccaaacagcagaaactggcgctgtcgaagctgctggagaccgccgaaccgcatccaggtaaggcactctactgcaccgaaaacaacccgccgtttgataacggcctgctgaacgcgcagttgctgcaacaggcgaaaccgtttgtcgatgaacgccagagcaaaaccttctggttcgatatccgcaataccgatcgctccgtgggcgcgtcgctttcaggctatatcgcccagacgcacggcgatcaggggctggcagccgatcctatcaaagcgtacttcaacggcaccgcaggccagagtttcggtgtatggaacgcgggcggcgtggaactgtacctgaccggggatgccaacgactatgtcggtaaaggcatggcgggcggcttaatcgccattcgtcctccggttggttccgccttccgcagccatgaagcaagtattatcggcaacacctgcctgtatggcgcgaccggtggtcgtctgtatgccgcaggccgcgcgggtgaacgtttcggcgtgcggaactccggtgctatcaccgtggtagaaggcattggcgacaacggctgtgaatatatgacgggcggtattgtctgtattctgggtaaaaccggcgttaacttcggtgcgggcatgaccggcggcttcgcttacgttctcgatgaaagcggtgatttccgcaaacgcgttaacccggaactggtcgaggtcttaagcgttgacgatctggcgatccatgaagagcatctgcgcggtcttatcaccgagcatgttcagcatactggctctcagcgcggtgaagagattctggcgaactggtcaaccttcgccactaaatttgcgctggttaaaccgaagtccagtgatgtaaaagcactgctgggtcatcgtagtcgtagcgcagcagagttgcgcgtgcaggcgcagtaa

SEQ ID NO: 482186 - DNA, 930 bp, Shigella sonnei
atgcagttacagaaattagtcaatatgtttggtggtgatctcacccgtcgttatgggcaaaaggtgcataagctgacgctgcacggcggtttcagttgcccgaatcgcgacggcaccatcgggcgcggcggctgcaccttctgtaatgttgcctcgtttgccgacgaagcgcagcagcatcgttccattgccgaacagctggcgcatcaggcgaatttaattaatcgcgcgaaacgttacctcgcctatttccaggcgtataccagcacctttgccgaagttcaggtgctgcgttcgatgtatcaacaggcggtgagccaggccaatattgtcggtttgtgtgtcggcacgcgcccggactgcgtgccggatgcggtgctggatctgctttgcgaatataaagaccagggctacgaagtgtggctggagctggggctgcaaaccgtgcacgacaaaacgctacatcgcattaatcgcggtcatgatttcgcctgttatcagcgcacgacgcagctggcacgccagcgcgggctgaaggtgtgctcgcatttaattgtcggtctgccaggcgaagggctggctgaatgtctgcaaacgctggagcgggtagtggaaaccggtgttgacggtataaagctacatccgttgcatattgtgaaaggcagcattatggcgaaagcctgggaagcggggcgtttgaacggtattgaactggaggattacacgctcactgccggagaaatgattcgccatacgccaccggaagtgatctaccaccgcatttccgccagcgcccgtcgcccgacgctgcttgctcctctgtggtgcgaaaatcgatggacgggaatggtcgagctggatcgctatctgaatgaacatggcgtacagggatcggcgctgggacgtccgtggctacctccaacggagtag

SEQ ID NO: 482187 - DNA, 2337 bp, Shigella sonnei
atgaagcaaattcgtctgctggcgcagtattatgttgacctgatgatgaagttaggtctggtgcgcttctcaatgttgctggcgctggccctcgtcgttcttgccattgtggtacaaatggcggtaaccatggtgctgcatggtcaggtcgaaagcattgatgttattcgttctatcttctttggtttgttgattacgccgtgggcgatctactttctatcggtggtcgtcgagcaactggaggagtcacgacaacgtctgtcacggctggtgcaaaaactggaggagatgcgcgagcgcgatttgagcctcaacgttcagttaaaagataatattgcccagctaaatcaggaaatcgccgttcgtgaaaaagcggaagcagaactgcaggaaaccttcggccaactgaaaattgaaatcaaagagcgcgaagagacacaaattcagctcgagcagcaatcctcattcttacgttccttccttgatgcttcacccgacctggttttttatcgtaacgaagataaagagttttccggctgtaaccgcgcgatggagctgctgaccggaaaaagcgaaaaacaactggttcacctgaaacctgttgatgtttactcaccggaagccgccgcaaaagtcattgaaaccgatgaaaaagtgttccgtcataatgtgtcactgacctatgaacagtggctggattacccggacgggcgcaaagcctgctttgaaatccgtaaagtgccgtactacgaccgcgtgggtaaacgtcacggtttgatgggctttggtcgagacattaccgagcgtaagcggtatcaggatgcgcttgaacgggccagccgcgacaaaacgacgtttatctccaccatcagtcacgaattgcgtacaccgctgaacggtatcgtcggtctgagccgcattctgctggataccgaactcaccgccgagcaggaaaaatatctcaagaccatccatgtttcggccgtcacgctggggaatatctttaacgatattatcgacatggataagatggaacggcgcaaggtccagcttgataatcaaccggttgatttcaccagcttccttgccgatctggaaaatctctccgcattgcaggcgcaacaaaaaggattgcgctttaacctggagccgacgctgccattaccgcatcaggtcattaccgacgggacgcgtttacggcagatcctgtggaacctcatcagtaacgccgtcaaattcacccagcaaggccaggttaccgtgcgcgtgcgctacgatgaaggcgatatgctgcattttgaagtggaagactctggtatcggcattccgcaggatgagctggataaaattttcgccatgtattaccaggtgaaagacagtcatggcggtaaacctgccaccggcaccggtattggtctggccgtttctcgtcgtctggcgaaaaatatgggcggcgatattacggttaccagcgaacagggcaaaggttcaacctttacgttgacgatccacgcaccgtcggtagcagaagaggtcgatgatgcgtttgatgaagacgatatgcctttaccggcgctgaatgtgctgctggtggaagacattgaactgaacgtgattgttgcgcgttctgtgctggaaaaattaggtaacagcgttgatgtcgccatgaccggcaaggcggcgctagagatgtttaaaccgggcgaatacgacctggtgttactggatattcagttgccagatatgaccgggctggatatctctcgtgaactgacgaagcgttatccgcgagaggatttaccgccgctggtggccttaaccgctaacgtgctgaaagacaaacaagagtacctcaatgctggaatggatgatgtgctgagtaagccgctttctgttccggcgctaaccgcgatgatcaagaaattctgggatacccaggatgatgaggagagtacggtgacgacagaagagaacagtaaatcagaagcattgctcgatattcccatgctggaacagtatctcgaacttgtaggaccgaagctgatcaccgacgggttagcggtgtttgagaagatgatgccgggctatgtcagcgtgctggagtcgaatctgacggcgcaggataaaaaaggcattgttgaggaaggacataaaattaaaggtgcggcggggtcagtggggttacgccatctgcaacagctgggtcagcaaattcagtctcctgaccttcctgcctgggaagataacgtcggtgaatggattgaagagatgaaagaagagtggcgtcacgacgtagaagtgctgaaagcgtgggtggcaaaagccactaaaaaatga

SEQ ID NO: 482188 - DNA, 654 bp, Shigella sonnei; identical to SEQ ID NO: 457831

SEQ ID NO: 482189 - DNA, 729 bp, Shigella sonnei
atgagtaaaagccgcttaacggtgtttagtttcgttcgccgttttcttttgctgttaatggttgtcctcgccgttttctggggcgggggcatcgcgttgtttagtgttgcgcctgttcccttctcagcggtaatggtcgagcgacaggtcagcgcctggctgcatggcaattttcgttacgtggcacattctgactgggtcagtatggatcaaatctcgccgtggatgggactggcggtgattgccgcagaagatcagaaattttctgagcactggggctttgatgtcgcttccattgagaaagccctggcgcacaacgagcgcaatgaaaaccgtattcgcggtgcttcaacgatttctcagcagacggccaaaaatctctttttatgggatgggcgtagctgggtacgaaaagggctggaagctggattaacgctggggatagaaacagtctggagcaaaaagcgtatcctgacggtttacctgaatatcgccgaatttggcgacggtgtgtttggcgtcgaagctgcggcacaacgttatttccacaaacccgcgagcaaacttacccggtcggaagctgcattactggcagctgtattacctaatccacttcgtttcaaagtctcctcgccatcgggctacgtgcgtagccgtcaggcgtggattttacggcagatgtatcagttaggcggtgagccgtttatgcaacaacaccagctggattaa

SEQ ID NO: 482190 - DNA, 633 bp, Shigella sonnei
atgattcgcttatctgaacaaagtcccctgggcaccggaagacatcggaaatgttatgcgcatccggaagatgcccaacgctgtatcaagattgtctaccatcgtggcgatggtggcgataaagagatccgccgtgagttaaagtactacgcgcatcttggtcgccggttaaaagactggagtggaataccgcgctatcacggtaccgttgagacggattgcggaaccggttatgtctacgatgtgattgcagattttgacggcaaactctccattacgctgaccgaatttgctgaacaatgccgttacgaagaagacattgcacaactgcgccagctactgaaacagctgaagcgttatttgcaggataaccgtatcgtgacgatgtcgctgaagccgcagaatatcctctgtcaccgcatcagtgagtcagaggttatcccggtcgtctgcgacaacattggtgaaagcacattgattccactggcgacctggtcgaagtggtgttgtctgcgtaagcaagagcggttatggaaacgatttatcgcccaaccggcgctggctattgccctgcagaaagatctgcaacctcgtgagagcaaaacgctggccctcacttcgcgcgaagcttaa

SEQ ID NO: 482191 - DNA, 273 bp, Shigella sonnei; identical to SEQ ID NO: 457834

SEQ ID NO: 482192 - DNA, 855 bp, Shigella sonnei; identical to SEQ ID NO: 457835

SEQ ID NO: 482193 - DNA, 492 bp, Shigella sonnei
atgacaaataatgatacaactctacagcttagcagtgttcttaacagggaatgtacgcgaagccgcgtccactgtcagagcaaaaaacgcgccctggaaatcatcagcgagctggcggcgaaacaacttagcctgccgcctcaggtggtttttgaagctatcctgacgcgggaaaaaatgggcagtaccggtatcggcaatggtattgccattccgcatggcaaactggaagaagatactctgcgcgccgttggcgttttcgttcagctcgaaacgcctatagctttcgatgccatcgacaaccaaccggtggacttactttttgccctgctggtgtcggcagaccaaactaaaacgcacctgcatactctgtcgctggtggcgaaacgtctggcggacaaaaccatctgccgccgtttacgcgcagcccagagcgatgaagagctgtatcaaatcattacggataccgaaggtactccggatgaagcgtag

SEQ ID NO: 482194 - DNA, 288 bp, Shigella sonnei
atgcagctcaacattaccggaaataacgtcgagatcaccgaggcactgcgcgaatttgttacagccaaatttgccaaacttgagcaatattttgaccgaatcaaccaggtctatgttgttctgaaagtggagaaagtcatccacacctcagatgcaacactgcatgtaaacggtggtgaaattcatgccagcgcggaaggtcaggacatgtacgctgccattgatggcttaattgataagctggcacgccagttgaccaaacataaagataaactgaaacaacactaa

SEQ ID NO: 482195 - DNA, 1434 bp, Shigella sonnei
atgaagcaaggtttgcaactcaggcttagccaacaactggcgatgacgccacagctccaacaggcaattcgtctgttgcagttgtcgacgctggaacttcagcaggagctacagcaggcgctggagagtaatccgctgcttgagcaaatcgacactcatgaagaaatcgacacccgcgaaacgcaagacagtgaaacgctggacaccgccgacgcgctcgaacaaaaagagatgccggaagagctgccgctcgatgccagttgggacaccatttacaccgctggtacaccatccggcaccagcggtgactacattgacgatgagctgccggtctatcagggcgaaacgacgcagaccttgcaggattacctgatgtggcaggtcgagctgacaccgttttccgacactgaccgcgctattgctacctctatcgtcgatgccgttgatgacatcggttatctgactgtcccgctggaagatattctcgaaagtatgggcgatgaagagatcgacatcgacgaggttgaagccgtccttaagcggatccaacggtttgatccggtcggtgtagcggcaaaagatctgcgtgactgcctgctaatccaactctcccaattcgataaaaccacgccgtggctggaagaggccagactgatcattagcgatcatctcgatctgttagccaatcacgacttccgcactttaatgcgcgtcacgcgtctgaaagaagatgtgctgaaagaagccgtcaatctgatccagtcgctcgatccgcgccccgggcagtcgatccagactggcgaacctgagtatgtcattccagatgtgctggtgcgtaagcataacggtcactggacggtagaactcaacagtgacagcattccgcgtctgcaaatcaaccagcactacgcctcgatgtgcaataacgcgcgcaacgatggtgacagccagtttatccgcagcaatctgcaggatgccaaatggttgatcaagagtctggaaagccgtaacgatacgctactgcgcgtgagtcgctgtatcgttgaacagcagcaagccttctttgagcaaggtgaagaatatatgaaaccgatggtactggccgatatcgcccaggctgtcgaaatgcatgaatcgacgatatctcgcgtgaccacgcaaaaatacctgcatagtccacgaggcatttttgaactgaagtatttcttttccagtcacatcaataccgagggcggcggcgaagcttcctccacggcgattcgtgcgctggtgaagaaattaatcgcggcggaaaacccagcgaaaccgttgagcgacagcaagttaacctctttgctgtcggaacaaggtatcatggtggcacgccgcactgttgcgaagtaccgagagtctttatccattccgccgtcaaaccagcgtaaacagctcgtttga

SEQ ID NO: 482196 - DNA, 726 bp, Shigella sonnei
atggcaacattaactgcaaagaaccttgcaaaagcctataaaggccgtcgcgtggtagaagacgtcagcctgaccgtcaactccggggaaattgtcggtctgctggggccaaacggtgccggtaagaccaccactttctacatggttgtaggcattgtgccgcgcgatgcgggcaacatcattattgatgatgacgatatcagtctgctgcctctgcatgcacgcgcgcgccgcggtatcggctatctgccacaggaagcctccattttccgtcgcctcagcgtttacgataacctgatggcggtactgcaaattcgtgacgacttgtctgctgaacaacgtgaagaccgcgcgaacgagctgatggaagagtttcacattgagcacctgcgtgacagcatggggcagtcactctccgggggtgaacgtcgccgtgtagaaattgcccgcgcactggctgcgaatccgaaatttattctgctcgacgaaccgtttgccggggttgacccgatctcggttatcgacattaaacgcatcattgagcacctgcgcgacagcggcctgggcgtgctgatcactgaccacaacgtgcgtgaaacactggcggtttgtgaacgcgcttatatcgtcagtcaggggcatttgatcgcccacggcacgcctacagaaatcttacaagacgaacacgttaagcgtgtataccttggggaagacttcagactctga

SEQ ID NO: 482197 - DNA, 558 bp, Shigella sonnei
atgaaattcaaaacaaacaaactcagccttaatcttgtgcttgccagctcacttctggccgccagcattccggcatttgccgtaaccggagacactgatcagccgatccacattgaatcggaccagcaatctcttgatatgcaaggcaacgtggttacctttaccggtaatgtcatcgtcacccagggcaccatcaaaattaatgccgacaaagtggtcgttacccgtccgggcggcgaacaaggtaaagaagtgattgacggctacggtaaaccggcaacgttctaccagatgcaggacaacggtaaacccgttgaaggtcacgcttcccagatgcactacgaactggcaaaagattttgtcgttctgacgggtaatgcttatctgcagcaggtcgatagcaacattaagggcgataagatcacttacctggtaaaagagcagaaaatgcaggctttcagcgacaaaggcaagcgcgtaaccaccgttctggtgccgtcgcagctgcaggacaaaaacaacaaaggccagaccccggcacagaagaagggtaattaa

SEQ ID NO: 482198 - DNA, 576 bp, Shigella sonnei
atgagtaaagccagacgttgggttatcattgtgctatcactggcggttctggtgatgatcggcattgatatggccgaaaaagacgataccgcccaggtggtcgtcaacaacaatgatcccacctataaaagcgagcatacggacacgctcgtctataacccagaaggggcactaagctatcgattgattgctcaacacgttgaatattattccgatcaggccgtttcgtggtttacgcagccggtacttaccacgtttgataaggataaaatcccgacatggtccgtaaaagcagataaagccaagctgaccaatgaccggatgctctatttatatggacacgttgaagtcaacgcacttgtgccagactctcaacttcgcagaatcacgacggataacgcgcagatcaatctggtgacgcaggatgttacctctgaagacctcgtcacgttatacggaacaacatttaactccagcggtctgaaaatgcgcggcaacttacgcagcaagaacgccgagctgattgaaaaggttagaacatcctatgaaattcaaaacaaacaaactcagccttaa

SEQ ID NO: 482199 - DNA, 567 bp, Shigella sonnei
atgagcaaagcaggtgcgtcgcttgcgacctgttacggccctgtcagcgccgacgttatagcaaaagcagagaacattcgtctgctgatcctcgatgtcgatggcgtactgtcagatggcctgatttatatgggcaataatggcgaagagctgaaagcgttcaatgttcgtgacggttatggcattcgttgtgcgctcacctctgatattgaagtcgctatcattaccgggcgaaaggctaaactggtagaagatcgttgtgccacattggggatcactcacttgtatcaggggcagtcaaacaaactgatcgcctttagcgatctgctggaaaaactggcgattgccccggaaaatgtggcttatgtcggcgatgatctcatcgactggccggtaatggaaaaagtgggtttaagcgtcgccgtggccgatgcgcatccactgttgatcccgcgcgccgattacgtgacgcgcattgctggcggtcgtggcgcagtgcgcgaagtttgcgacttattactcctggcgcagggcaaactggatgaagccaaagggcaatcgatatga

SEQ ID NO: 482200 - DNA, 987 bp, Shigella sonnei
atgtcgcacgtagagttacaaccgggttttgactttcagcaagcaggtaaagaagtcctggcgattgaacgtgaatgcctggcggagcttgatcaatacatcaatcagaatttcacgcttgcctgtgaaaagatgttctggtgtaaagggaaagttgtcgtcatggggatggggaaatcggggcacatcgggcgcaaaatggccgcaacgtttgccagcaccggtacaccttcatttttcgtccatcctggtgaagccgcgcatggtgatttaggcatggtcaccccacaggatgtggtgattgctatctctaactcaggtgaatccagcgaaatcacggccttaattccagtgcttaagcgtcttcacgtaccgttaatctgcatcaccggtcgcccggagagcagcatggcgcgcgccgcagatgtgcatctgtgtgttaaagtagcgaaagaagcctgtccgttagggctggcaccgaccagcagcaccaccgccacgctggttatgggcgatgccctcgctgtcgcgctgttaaaagcacgcggctttactgctgaagattttgcgctctcacacccaggcggcgcactgggtcgtaaacttctgctgcgcgtaaacgatattatgcatacgggcgatgagatcccgcatgttaagaaaacggccagtctgcgtgacgcgttgctggaagttacccgcaaaaatcttggtatgactgtcatttgcgatgacaatatgatgattgaaggcatctttaccgacggtgatttacgccgtgtcttcgatatgggcgtggatgttcgtcagttaagtattgccgatgtgatgacgccggggggaatacgtgtgcgccctggcattctggccgttgaggcactgaacttaatgcagtcccgccatatcacctccgtgatggttgccgatggcgaccatttactcggagtgttacatatgcatgatttactgcgtgcaggcgtagtgtaa

SEQ ID NO: 482201 - DNA, 978 bp, Shigella sonnei
atgcttttagctacggcactgttaattgttggtttacttttggtcgtttacagtgccgaccgcctggtttttgccgcgtctattctttgccgaacctttggcatcccgccgctgatcatcggcatgacggtggtcagtattggtacatcgttaccagaaatcatcgtctcgcttgccgcgtctctgcacgaacaacgcgatttagccgttggtacagccctcggctcaaacattatcaatattttgctgatcctcggtctggctgcgctggttcgtccttttaccgtccattccgatgttctgcgtcgtgaattacccttaatgttgttggtcagcgtagtggccggttccgtactctatgacggacaacttagtcgcagcgatggtatctttctcctctttctggctgtgctatggctgctgttcattgttaaacttgcacgtcaggctgaacgtcaggggactgacagcctgaccagagagcagcttgcagagctgccgcgtgacggcggattgcccgtcgcgtttttatggctcggcattgcgcttatcatcatgccagtggccacgcggatggtggttgataacgccacggtgctggcgaattactttgccatcagcgagttgacgatgggtctgacggcaattgctatcggaaccagcctgccggaactggcaaccgcaatagcgggggttcgcaaaggtgaaaacgacattgctgtcggaaatatcattggcgcaaacatttttaatattgtcatcgtgttgggtttacccgcgctgataacgccaggagagattgagccattggcgtacagtcgtgactacagcgtgatgttgctggtgagcattatttttgcgttgctgtgctggcggcgctccccgcaaccgggccgtggtgtaggggtattattaactggcggatttatcgtatggctggcgatgttgtactggttatcgccaatactcgttgaataa

SEQ ID NO: 482202 - DNA, 810 bp, Shigella sonnei
atggagcagtctgtggcgaatttagtcgatatgcgcgatgtcagttttacgcgtggcaatcgctgcatcttcgataatatttccctgaccgtgccgcgagggaagatcacggcgatcatggggccatcgggcatcggtaaaacgacgctactccgtctgattggcgggcaaatcgcaccagatcatggtgagatccttttcgatggtgagaatattccggcgatgtctcgttcgcgcctgtatacagtgcgcaaacggatgagcatgttatttcagtccggggcgttgttcactgatatgaacgtatttgacaacgtcgcctatccactgcgcgaacatacccaactacccgcgccattgttgcatagtacggtgatgatgaagctggaggccgtggggctgcgtggagcggctaaactaatgccttctgaactttccggtgggatggcgcggcgtgcagcgctggcgcgtgcgattgcgctggagccggatctcatcatgtttgatgaaccttttgttgggcaagatcccatcaccatgggcgtactggtgaagctgatttctgagctgaacagcgcgctgggcgtgacttgtgtggtggtttctcacgatgtgccggaagtgttaagtattgcggatcacgcctggatcctggcggacaaaaaaattgtcgctcatggcagtgcccaggcgttgcaggcgaatcctgatccgcgcgtacgtcagtttctggacgggatagctgacgggcctgttccgttccgctatcctgccggcgattatcacgctgatcttttaccagggagttaa

SEQ ID NO: 482203 - DNA, 783 bp, Shigella sonnei
atgctgttaaatgcgctggcgtcgctcggacataaagggattaaaaccctgagaacgttcgggcgggccgggttaatgttattcaatgcgctggtcggcaaaccggaatttcgcaaacatgcgccgctgctggtgcgccagctctataatgtcggcgtcctgtcgatgctgattattgtggtttctggcgtgttcatcggaatggtgttggggctgcaaggttatctggttctgaccacttatagtgcggaaaccagtctgggtatgctggtggcgttatcgctactgcgtgaactggggccggtggttgccgcgttgttgtttgccgggcgtgctggttcggcgctaaccgcagaaatcggcctgatgcgcgctacagagcaactctccagtatggagatgatggcggtggatccgctgcgtcgggttatttctccctgtttctgggctggggttatttcattaccactgttgacggttattttcgtcgccgtggggatctggggcggatctctggtcggcgtcagttggaaaggcattgatagcgggttcttctggtcggcaatgcaaaatgccgtcgactggcgtatggatctggtcaactgtctgattaagagcgtggtgttcgccatcacggtgacgtggatttcgttgtttaacggctacgacaccatcccgacgtctgccgggattagccgggcaaccactcgcaccgttgtccactcgtctctggctgttctggggctggattttgtgctgaccgcattgatgtttgggaattga

SEQ ID NO: 482204 - DNA, 552 bp, Shigella sonnei
atgcaaacgaaaaaaaatgaaatttgggtgggtatctttttattagcagcactgctggcggcgctgtttgtttgcctgaaggcggcgaacgtgacgtccatacgtactgaaccgacctacacgctttatgcgacgttcgataacattggcggcctgaaagcgcgctctccggtcagtattggtggcgttgttgtgggtcgggtggcggatattacgctggacccgaaaacctatctgccgcgcgtaacgctggaaattgaacaacgttataaccacattccagataccagttcgctgagcattcgtacttccggcctgctgggggaacaatatctggcattaaacgtcggttttgaagacccggaactggggactgctatcctgaaggatggcgatacaattcaggacactaagtctgcgatggtgctggaagatctcattggtcagttcctttacggtagtaaaggcgatgacaataagaatagtggcgatgcgccagctgctgcgccaggtaataatgaaaccactgaacctgtgggtacaacgaaataa

SEQ ID NO: 482205 - DNA, 636 bp, Shigella sonnei
atgtttaaacgtttaatgatggtcgctttgctggtgattgcacctctgagtgcggcaaccgcggcagaccagaccaatccttataagctgatggacgaggcggcgcagaaaacgttcgatcgcctgaagaatgagcaaccgcaaattcgggccaacccggattatctgcgtaccattgttgatcaggaactgctgccatacgtacaggtgaaatacgccggtgcgctggtgctgggccagtattacaagagtgcgacccctgctcaacgtgaagcctactttgccgctttccgtgagtacctgaagcaggcttacggtcaggcgctggcgatgtatcacggtcaaacctatcagattgcgccagaacagccgctgggcgataaaaccattgtgcctattcgcgttaccattattgacccgaatggccgtccgccggtgcgtctggacttccagtggcgtaaaaactcccagacgggaaactggcaggcttacgacatgattgctgaaggcgtcagtatgatcaccaccaaacaaaacgagtggggaacgctgctgcgtaccaaaggtatcgacggcctgactgcgcaactgaaatcgatttctcaacagaaaatcactctggaagagaaaaaataa

SEQ ID NO: 482206 - DNA, 294 bp, Shigella sonnei
atgagcgagtcactgagctggatgcagacgggtgacacgctggcgttatccggagagctggatcaggacgttctgctaccgctttgggaaatgcgtgaggaagcggtgaaggggattacctgcatcgatcttagccgtgtgtcccgcgtggatacgggtggactggcactgctgctccatcttatcgatctggcgaaaaagcagggcaacaacgtgacgcttcagggggtaaacgacaaagtgtataccctcgcgaaattgtataatttgcctgctgatgttctgcctcgttaa

SEQ ID NO: 482207 - DNA, 270 bp, Shigella sonnei; identical to SEQ ID NO: 1092

SEQ ID NO: 482208 - DNA, 1260 bp, Shigella sonnei
atggataaatttcgtgttcaggggccaacgaagctccagggcgaagtcacaatttccggcgctaaaaatgctgctctgcctatcctttttgccgctctactggcggaagaaccggtagagatccagaacgtcccaaaactgaaagacgtcgatacatcaatgaagctgctaagccagctgggtgcgaaagtagaacgtaatggttctgtgcatattgatgcccgcgacgttaatgtattctgcgcaccttacgatctggttaaaaccatgcgtgcttctatctgggcactggggccgctggtagcgcgctttggtcaggggcaagtttcactgcctggcggttgtacgatcggtgcgcgtccggttgatctacacatttctggcctcgaacaattaggcgcgaccatcaaactggaagaaggttacgttaaagcttccgtcgatggtcgtctgaaaggcgcacatatcgtgatggataaagtcagcgttggcgcaacggtgaccatcatgtgtgctgcaaccctggcggaaggtaccacgattattgaaaatgcagcgcgtgaaccggaaatcgtcgataccgcgaacttcctgattacgctgggtgcgaaaattagcggtcagggcaccgatcgtatcgtcatcgaaggtgtggaacgtttaggcggcggtgtctatcgcgtgctaccggatcgtatcgaaaccggtactttcctggtggcggcggcgatttctcgcggcaaaattatctgccgtaacgcgcagccagatactctcgacgccgtgctggcgaaactgcgtgacgctggagcggacatcgaagtcggcgaagactggattagcctggatatgcatggcaaacgtccgaaggctgttaacgtacgtaccgcgccgcatccggcattcccgaccgatatgcaggcccagttcacgctgttgaacctggtggcagaagggaccggattcatcaccgaaacggtctttgaaaaccgctttatgcatgtgccggagcttagccgtatgggcgcgcatgccgaaatcgaaagcaataccgttatttgtcacggtgttgaaaaactttctggcgcacaggttatggcaaccgatctgcgtgcatcagcaagcctggtgctggctggctgtattgcggaagggacgacggtggttgatcgtatttatcacatcgatcgtggctacgaacgcattgaagacaaactgcgcgctttaggtgcaaatattgagcgtgtgaaaggcgagtaa

SEQ ID NO: 482209 - DNA, 279 bp, Shigella sonnei
atggaaagtaatttcattgactggcatcccgctgacatcattgcgggtttgcgcaagaagggaacgtcaatggcggcggagtctcgcagaaatggtttgagttcctcaacgctggcaaacgcattatcgcgcccatggccgaaaggagagatgattattgcgaaagccctgggaactgacccctgggttatctggccatcacgctaccatgatccgcagacccatgagtttatcgacagaacgcagttgatgcgtagctacactaaaccgaaaaaatga

SEQ ID NO: 482210 - DNA, 972 bp, Shigella sonnei
atgaatttagaaaaaatcaatgagttaaccgcgcaagatatggcgggtgttaatgcggcaatccttgagcagcttaattccgacgtccaactgatcaatcagttaggctattacatcgtcagcggcggcggtaaacgtattcgtccgatgattgctgtactggctgcacgagctgttggctatgagggaaatgcgcatgtcaccattgctgccctgatcgagtttatccacacggcgactctgctacacgacgacgttgtggatgaatcagatatgcgcaggggtaaagctaccgccaacgccgcatttggcaatgccgccagcgtgctggtaggcgattttatttatacccgcgcgttccagatgatgaccagcctcggttcactcaaagtgctggaagtcatgtcagaagctgtaaacgtcatcgcagaaggtgaagttctgcaactgatgaacgttaacgatccggacatcactgaagaaaactacatgcgcgttatctatagcaaaaccgcgcgtctgtttgaggctgccgcgcagtgttccgggattctggctggctgtacgccggaggaggagaaaggcctgcaggattatgggcgctatctcggcactgctttccagttgatcgacgatttactcgattacaatgccgatggcgaacagttaggtaaaaatgtcggcgacgatctgaacgaaggtaaaccgacgctgccgctgctgcatgcgatgcatcatggcacaccagaacaggcacagatgatccgtaccgccatcgaacagggtaacggtcgccatcttctggaaccggttctggaagcaatgaacgcttgtggatctcttgaatggacgcgtcagcgtgccgaggaagaagcagacaaagccatcgcagcattacaggtgctcccggacaccccttggcgagaagcactcatcggcctcgcgcacatcgctgttcaacgcgatcgttaa

SEQ ID NO: 482211 - DNA, 312 bp, Shigella sonnei
atgtacgcggttttccaaagtggtggtaaacaacaccgagtaagcgaaggtcagaccgttcgcctggaaaagctggacatcgcaactggcgaaactgttgagttcgctgaagtgctgatgatcgcaaacggtgaagaagtcaaaatcggcgttcctttcgttgatggcggcgtaatcaaagctgaagttgttgctcacggtcgtggcgagaaagttaaaatcgttaagtttcgtcgtcgtaaacactatcgtaagcagcagggtcatcgtcagtggttcactgatgtgaaaattactggcatcagcgcctaa

SEQ ID NO: 482212 - DNA, 258 bp, Shigella sonnei; identical to SEQ ID NO: 1097

SEQ ID NO: 482213 - DNA, 966 bp, Shigella sonnei
atgaagcagcaggcaggcattggcattcttttggcgctcaccacagcaatttgctggggggcgttgccaatcgcaatgaagcaggtgctggaggtgatggaacctccgacaatcgtgttttaccgtttcttgatggcgagtattggccttggtgccattcttgcggtgaagaagaggttgccgccattacgcgtgtttcgtaagccacgctggttgattttgttggcagtggcgaccgccgggctgtttgggaacttcatcctgttcagctcatccttgcaatacctgagtccgaccgcttcgcaggtgattgggcaactctcgccagttggcatgatggttgccagcgtatttatcctgaaagagaaaatgcgcagcactcaggttgtaggggcattgatgctcctgagcggcctggtgatgttttttaacaccagtctggtcgagatatttacaaagctcaccgattacacctggggagttatctttggggtcggtgcggcgacggtttgggtgagttatggcgtggcgcaaaaggttttattgcgtcggctggcctcaccgcagatcctgtttttactgtacactttatgtacaattgcgctcttccctctggcaaagcctggagtgatagcgcagcttagccactggcagctcgcatgtttaattttttgcggactgaatacattggtaggatatggcgccctggcggaagcgatggctcgctggcaggcagcgcaggtgagcgcgatcatcacgctcaccccactgtttacgctgtttttttcagatcttttatcactggcctggcccgatttcttcgccagaccgatgttaaaccttttaggttatctcggtgcgtttgtcgtggttgcgggcgcgatgtattccgccattggtcatcgtatttggggcggattacgtaagcatacaacggtggtatcgcaaccccgcgcaggcgaatga

SEQ ID NO: 482214 - DNA, 1173 bp, Shigella sonnei
atgaagtttgttgatgaagcatcgattctggtcgttgcaggtgatggcggtaatggttgcgtgagcttccgccgcgaaaagtatattccgaaaggcggcccggatggcggcgacggtggtgatggtggtgacgtatggatggaagccgacgaaaacctgaacacgcttatcgattatcgttttgaaaaatctttccgtgcagagcgcggtcagaacggcgcaagccgcgattgtaccggtaagcgcggtaaagacgtgacgattaaagtgccggtaggtacgcgtgtaatcgaccagggtactggtgaaaccatgggcgatatgactaaacacggtcagcgtctgctggttgctaagggcggctggcacggtctgggcaatacccgtttcaaatcgtccgttaaccgtacaccacggcagaaaaccaacggtacgccgggtgataagcgtgagctgctgctggagctgatgctgctggctgacgtcggtatgttggggatgccaaacgcgggtaaatcgacctttattcgcgcggtatcggcggctaaaccgaaagtggcggattatccgtttaccactctggtgccaagtctgggtgtggtacgaatggacaacgaaaagagcttcgttgttgccgatattccaggactgattgaaggcgctgcggaaggcgcaggtctgggtatccgcttcctgaagcacctggaacgttgccgcgtcctgttgcacctcatcgatatcgatccgattgacggcaccgatccggttgaaaacgcgcgtattattatcagcgagctggaaaaatacagccaggatctggcggcgaaaccgcgttggttagtgttcaataagatcgatctgctggataaggcagaagctgaagagaaagcgaaagcgattgctgaagcgctgggctgggaagataaatattatctgatctctgcggcgagcggactgggcgtgaaagatctctgctgggatgtgatgacctttatccttgaaaacccggtcgtgcaggctgaagaagcgaaacagccagagaaagtcgaattcatgtgggacgattatcatcgccagcagcttgaagagattgctgaagaggatgatgaagactgggatgacgactgggacgaagacgacgaagaaggcgttgagttcatttacaagcgttaa

SEQ ID NO: 482215 - DNA, 1434 bp, Shigella sonnei
atgcgattttccagatttatcatcggattgaccagctgtatagcgttcagtgttcaggccgcaaatgttgatgagtacattactcaactccccgctggtgccaaccttgccctgatggtgcaaaaagtcggcgcgtcggcccccgctattgattaccacagtcagcagatggcgctgcctgccagtacccagaaagtgattactgcgctggcggcgttgattcaactcggccccgattttcgttttaccacgacgcttgaaaccaaaggcaatgtggaaaacggcgtacttaagggtgacttagtggcgcgatttggtgccgatccgacgttaaaacgtcaggatattcgcaatatggtcgcgactttgaaaaaatctggcgtcaaccaaatcgatggcaatgtgttgatagatacctccattttcgccagccacgataaagcccccggctggccatggaatgacatgacacaatgctttagcgctccgcctgccgccgccatagttgaccgcaactgtttctccgtctcgctctacagtgcccaaaaacccggtgatatggcctttatacgcgtggcatcttattaccccgttacgatgttcagccaggtacgcaccctcccccgtggttctgccgaagcgcaatactgcgaactggatgtcgtaccaggcgacctgaaccgctttacgctgacgggatgcctgccacaacgttctgagccgctcccgttggcttttgccgtgcaggatggagccagttatgccggtgcaattctgaaagatgagttaaaacaggcgggtatcacctggagcggaacactgctgcgccagactcaggttaacgaacctggaacggtagttgccagtaaacagtcggccccgctgcacgatctgcttaagattatgctgaaaaagtcggataacatgatcgccgatacggttttccgcatgataggccatgcgcgcttcaatgtacctggtacatggcgggccgggtcggacgctgtgcgtcagatcctgcgccagcaagccggtgtcgatattggaaacaccattattgccgatggttcagggctttcgcggcataacctgattgcccccgccaccatgatgcaggtgctgcaatacattgcccaacacgacaatgaacttaactttatctccatgctgccgctggcgggctatgacggctctttgcagtaccgtgcaggtctgcatcaggcgggcgtggatggaaaagtctcagcgaaaaccggttcgttgcagggggtatataacctggcgggattcattaccacagcgagcgggcaacgaatggcgtttgtgcaatatctttctggctatgcagtagaacctgcggatcagcgtaatcgccgtattccgttagtgcgttttgaaagccgtttgtataaagatatttatcagaacaattag

SEQ ID NO: 482216 - DNA, 477 bp, Shigella sonnei
atgcaagctattccgatgaccttacgcggcgctgaaaaattacgcgaagagctggattttctgaaatctgtgcgccgtcctgaaatcattgctgctatcgcggaagcgcgtgagcatggcgacctgaaagaaaacgccgaataccacgcagctcgtgaacagcagggcttctgcgaaggccgtatcaaagacatcgaagccaagctgtcaaacgcgcaggtgattgatgtcaccaaaatgcctaacaatgggcgcgttatttttggtgctaccgtaacggtgctgaatctggattctgacgaagaacagacttatcgcatcgttggcgatgacgaagctgactttaaacaaaacctgatttctgtaaactcgcctattgctcgtggcctgatcggcaaagaagaagatgatgttgtggtcatcaaaacgccgggcggcgaagtagaatttgaagtaattaaggtggaatacctgtaa

SEQ ID NO: 482217 - DNA, 294 bp, Shigella sonnei; identical to SEQ ID NO: 457860

SEQ ID NO: 482218 - DNA, 630 bp, Shigella sonnei
atgacaggtaagaagcgttctgccagctccagccgctggcttcaggaacactttagcgataaatatgttcaacaggcacagaaaaaggggttacgttcccgtgcctggtttaaacttgatgaaatacagcaaagtgacaaactctttaaaccgggaatgacggttgtcgaccttggtgctgctccgggtggttggtcacaatatgtggtcacccaaattggcggcaaaggccgcatcatcgcttgcgatcttttacctatggatcctatcgttggtgtagactttcttcagggcgattttcgtgatgaactggtgatgaaagcactgctggagcgcgttggcgacagcaaagtccaggttgtcatgtccgatatggcaccaaacatgagcggaacaccggcggtggatatcccccgtgccatgtatctggtggaactggcgctagaaatgtgtcgtgatgtattagcgccaggtggcagttttgtagtgaaggtgttccagggcgaaggtttcgatgagtatctaagggaaattcgctccctgtttacgaaggtcaaagttcgtaagccggactcttctcgtgcacgttcgcgggaagtgtatattgtagcgaccgggcgtaaaccctaa

SEQ ID NO: 482219 - DNA, 1944 bp, Shigella sonnei
ttgagtgacatggcgaaaaacctaatactctggctggtcattgccgttgtgctgatgtcagtattccagagctttgggcccagcgagtctaatggccgtaaggtggattactctaccttcctacaagaggtcaataacgaccaggttcgtgaagcgcgtatcaacggacgtgaaatcaacgttaccaagaaagatagtaaccgttataccacttacattccggttcaggatccgaaattactggataacctgttgaccaagaacgtcaaggttgtcggtgaaccgcctgaagaaccaagcctgctggcttctatcttcatctcctggttcccgatgctgttgctgattggtgtgtggatcttcttcatgcgtcaaatgcagggcggcggtggcaaaggtgccatgtcgtttggtaagagcaaagcgcgcatgctgacggaagatcagatcaaaacgacctttgctgacgttgcgggctgcgacgaagcaaaagaagaagttgctgaactggttgaatatctgcgcgagccgagccgcttccagaaactcggcggtaagatcccgaaaggcgtcctgatggtcggtcctccgggtaccggtaaaacgctgctggcgaaagcgattgcaggcgaagcgaaagttccgttctttactatctccggttctgacttcgtagaaatgttcgtcggtgtgggtgcatcccgtgttcgtgacatgttcgaacaggcgaagaaagcggcaccgtgcatcatctttatcgatgaaatcgacgccgtaggccgccagcgtggcgctggtctgggcggtggtcacgatgaacgtgaacagactctgaaccagatgctggttgagatggatggcttcgaaggtaacgaaggtatcatcgttatcgccgcgactaaccgtccggacgttcttgacccggccctgctgcgtcctggccgtttcgaccgtcaggttgtggttggcttgccagatgttcgcggtcgtgagcagatcctgaaagttcacatgcgtcgcgtaccattggcacccgatatcgacgcggcaatcattgcccgtggtactcctggtttctccggtgctgacctggcgaacctggtaaacgaagcggcactgttcgctgctcgtggcaacaaacgcgttgtgtcgatggttgagttcgagaaagcgaaagataaaatcatgatgggtgcggaacgtcgctccatggtgatgacggaagcgcagaaagaatcgacggcttaccacgaagcgggtcatgcgattatcggtcgcctggtgccggaacacgatccggtgcacaaagtgacgattatcccacgcggtcgtgcgctgggtgtgactttcttcttgcctgagggcgatgcaatcagcgccagccgtcagaaactggaaagccagatttctacgctgtacggtggtcgtctggcagaagagatcatctacgggccggaacatgtttctaccggtgcgtccaacgatattaaagttgcgaccaacctggcgcgtaacatggtgactcagtggggcttctctgagaaattgggtccactgctgtacgcggaagaagaaggtgaagtgttcctcggccgtagcgtagcgaaagcgaaacatatgtccgatgaaactgcacgtatcatcgaccaggaagtgaaagcactgattgagcgtaactataatcgtgcgcgtcagcttctgaccgacaatatggatattctgcatgcgatgaaagatgctctcatgaaatatgagactatcgacgcaccgcagattgatgacctgatggcacgtcgcgatgtacgtccgccagcgggctgggaagaaccaggcgcttctaacaattctggcgacaatggtagtccaaaggctcctcgtccggttgatgaaccgcgtacgccgaacccgggtaacaccatgtcagagcagttaggcgacaagtaa

SEQ ID NO: 482220 - DNA, 849 bp, Shigella sonnei
atgaaactctttgcccagggcacttcactggaccttagccatcctcacgtaatggggatcctcaacgtcacgcctgattccttttcggatggtggcacgcataactcgctgatagatgcggtgaaacatgcgaatctgatgatcaacgctggcgcgacgatcattgacgttggtggcgagtccacgcgcccaggggcggcggaagttagcgttgaagaagagttgcaacgtgttattcctgtggttgaggcaattgctcaacgcttcgaagtctggatctcggtagatacatccaaaccagaagtcatccgtgagtcagcgaaagttggcgctcacattattaacgatatccgctccctttccgaacctggcgctctggaggcggctgcagaaaccggtttaccggtttgtctgatgcatatgcagggaaatccaaaaaccatgcaggaagctccgaagtatgacgatgtctttgcagaagtgaatcgctactttattgagcaaatagcacgttgcgagcaggcgggtatcgcaaaagagaaattgttgctcgaccccggattcggtttcggtaaaaatctctcccataactattcattactggcgcgcctggctgaatttcaccatttcaacctgccgctgttggtaggtatgtcacgaaaatcgatgattgggcagctgctgaacgtggggccgtccgagcgcctgagcggtagtctggcctgtgcggtcattgccgcaatgcaaggcgcgcacattattcgtgttcatgacgtcaaagaaaccgtagaagcgatgcgggtggtggaagccactctgtctgcaaaggaaaacaaacgctatgagtaa

SEQ ID NO: 482221 - DNA, 1338 bp, Shigella sonnei
atgagtaatcgtaaatatttcggtaccgatgggattcgtggtcgtgtaggggatgcgccgatcacacctgattttgtgcttaagctgggttgggccgcgggtaaagtgctggcgcgccacggctcccgtaagatcattattggtaaagacacgcgtatttctggctatatgctggagtcagcactggaagcgggtctggcggcagcgggcctttccgcactcttcactggcccgatgccaacaccggccgtggcttatctgacgcgtaccttccgcgcagaggccggaattgtgatatctgcatcgcataacccgttctacgataatggcattaaatttttctctatcgacggcaccaaactaccggatgcggtagaagaggccatcgaagcggaaatggaaaaagagatcagctgtgttgattcggcagaactgggtaaagccagccgtatcgttgatgctgcgggtcgctatatcgagttttgcaaagccacgttcccgaacgaacttagcctcagcgaactgaagattgtggtggattgcgcaaacggtgcgacttatcacatcgcgccgaacgtgctgcgtgaactgggggcgaacgttatcgctatcggttgtgagccgaacggtgtaaacatcaatgccgaagtgggggctaccgacgttcgcgcgctccaggctcgtgtgctggctgaaaaagcggatctcggtattgccttcgacggcgacggcgatcgcgtgattatggttgaccatgaaggcaataaagtcgatggtgatcagatcatgtatatcatcgcgcgtgaaggtcttcgtcagggccagctgcgtggtggtgctgtgggtacattgatgagtaacatggggcttgagctggcgttgaaacagttaggaattccatttgcgcgcgcgaaagtgggtgaccgctacgtactggaaaaaatgcaggagaaaggctggcgtatcggtgcagagaattccggtcatgtgatcctgctggataaaaccactaccggtgacggcatcgttgctggcttgcaggtgctggcggcgatggcacgtaaccatatgagcctgcacgacctttgcagcggcatgaaaatgttcccgcagattctggttaacgtgcgttacaccgcaggtagcggcgatccgcttgagcatgagtcagttaaagctgtgaccgccgaagttgaagcggcgctgggtagccgtggacgtgtgctgttgcgtaaatccggcaccgaaccgttaattcgcgtgatggtagaaggtgaagacgaagcgcaggtaactgaatttgcacaccgtatcgccgatgcagtaaaagccgtttaa

SEQ ID NO: 482222 - DNA, 333 bp, Shigella sonnei
atgtacgaagctcttttggtagttttccttattgtggcaattggccttgttggtctgatcatgctgcagcaaggtaaaggcgctgatatgggagcctccttcggagcaggcgcttccgctacgctgtttggttcaagtggttctggtaacttcatgacccgcatgacggcgctgctggcaacgttattctttatcatcagtctggtgctgggtaacatcaatagcaacaaaaccaataaaggtagcgaatgggaaaatctgagtgcaccggcgaaaaccgaacaaactcagccagctgctccggctaagccgaccagcgatatcccgaactaa

SEQ ID NO: 482223 - DNA, 1518 bp, Shigella sonnei
atggttcagcgattgctgttcttcgtcctgaccatcctggttgtaaaacgtatatcatcccttccgcttcgcctgcttgttgccgcaccatttgtgttactgactgcggcagacatgagtattagcctctattcatggtgtacctttggtacaactttcaatgatggatttgcgattagtgtgctgcagagtgatccggatgaagttgtcaaaatgctggggatgtatatcccttatctatgtgcttttgcttttttatcccttctttttttggcagtaataataaaatatgatgtttccttgccgacaaaaaaagtgacaggaatattattgctgattgtcatttcgggcagtttattttctgcttgtcaatttgcttataaagatgcaaaaaataaaaaagcattcagtccatatatactagcgtcgcgatttgctacctatacgccgtttttcaatctcaattattttgctttagcagcgaaagagcatcaaagattactctcaattgcaaacacggtgccgtattttcaattatcagtcagggatacaggtattgatacctacgtgttgattgtgggggagtctgtacgtgtcgacaatatgtctttgtatggatatacacgctctacgacaccgcaagttgaagcacaaagaaaacagatcaaactgtttaatcaatcaataagcggcgcaccttacactgcgctgtcggttcccctttctttaactgctgattctgttttgagtcatgacattcataattaccccgacaacattattaatatggctaatcaagcaggatttcagactttctggctaagctcgcaatccgcttttcggcagaatggtacagcagttaccagtatcgccatgcgcgccatggaaacagtttatgtcagaggatttgatgaattgttgttgccgcatttatcgcaagcattacagcaaaatacgcagcaaaagaaactgattgttcttcatttaaatggaagccatgaaccggcttgtagcgcctatccgcaatccagcgccgtgtttcaaccgcaggacgatcaggatgcctgctatgacaactccattcattacacagatagtttgctaggtcaggtttttgaattattaaaagatcgccgcgcctcggtcatgtattttgccgaccacggcctggaacgtgaccctacgaagaagaacgtctattttcatggaggcagggaggctagccagcaggcatatcatgtcccgatgtttatctggtatagccccgttcttggggatggcgtggatcgtacaacggaaaacaacatcttttcgacagcttacaataattaccttattaatgcgtggatgggggtaacaaagccggaacaaccgaaaacgctggaggaagtgattgcacactataaaggagactcacgggttgtggatgcaaaccatgatgttttcgattatgtgatgctcagaaaggagtttacagaggataagcaaggtaaccccacccctgaagggcagggttga

SEQ ID NO: 482224 - DNA, 1344 bp, Shigella sonnei
atgacgacgattctcaagcatctcccggtaggtcaacgtattggtatcgctttttccggcggtctggacaccagtgccgcactgctgtggatgcgacaaaagggagcggttccttatgcatatactgcaaacctgggccagccagacgaagaggattatgatgcgatccctcgtcgtgccatggaatacggcgcggagaacgcacgtctgatcgactgccgcaaacaactggtggccgaaggtattgccgctattcagtgtggcgcatttcataacaccaccggcggcctgacctatttcaacacgacgccgctgggccgcgccgtgactggtaccatgctggttgctgcgatgaaagaagatggcgtgaatatctggggtgacggtagcacctataaaggaaacgatatcgaacgtttctatcgttatggtctgctgaccaatgctgaactgcagatttacaaaccgtggcttgatactgactttattgatgaactgggcggccgtcatgagatgtctgaatttatgattgcctgcggtttcgactacaaaatgtctgtcgaaaaagcctactccacagactccaacatgcttggtgcaacgcacgaagcgaaggatctggaatacctcaactccagcgtcaaaatcgtcaacccaattatgggcgtgaaattctgggatgagagcgtgaagatcccggcagaagaagtcacagtacgctttgagcaaggtcatccggtagcgctgaacggtaaaacctttagcgacgacgtagaaatgatgctggaagctaaccgcatcggcggtcgtcacggcctgggcatgagcgaccagattgaaaaccgtatcatcgaagcgaaaagccgtggtatttacgaagctccggggatggcactgctacatatcgcttatgaacgtctgttgaccggtattcacaacgaagacaccattgagcagtatcatgcacatggtcgtcagttgggccgtctgctgtaccaggggcgttggtttgattcccaggcgctgatgctgcgtgactctctgcaacgctgggttgccagccagatcactggtgaagttaccctggagctgcgccgtgggaacgattattcaatcctgaataccgtctcagagaacctgacctacaagccagagcgtctgacgatggaaaaaggcgactcggtgttctcgccagatgatcgtattggtcaattgaccatgcgtaacctggatatcactgatacccgagagaaactttttggttatgccaaaactggcctgctctcctcctctgccacttcaggcgtgccgcaggtggagaatctggaaaacaaaggccagtaa

SEQ ID NO: 482225 - DNA, 285 bp, Shigella sonnei
atgaacagagaggaagccagtctgttcttccggctactgaaccgtcgatatgaaaaagcgagcatcatactgacgtcaaacaaagggttcgcagactggggagaaatgttcggagatcacgtactggcaacagcgatcctggatcggctgctacatcactcaaccacgctgaatatcaaaggagagagttaccggttaaaagagaaacgtaaagctggagtgctgaccaaaaacacaacgccaatcagtgatgatgaaatggtggaaagcggacagcatcagtaa

SEQ ID NO: 482226 - DNA, 510 bp, Shigella sonnei
atgaaaattggcgtattcgtacctattggcaacaacggctggctcatttcgacccacgcgccgcagtacatgccgacctttgaactgaataaagccattgtgcagaaagcggagcattaccatttcgatttcgccctgtcgatgatcaaactgcgtggctttggcggcaaaactgagttctgggatcacaaccttgagtcgttcaccttgatggcgggtctggcagccgtgacctcgcgcattcagatttacgccactgctgccaccttaacgttacctccggcaatcgtcgcccgtatggccgcaaccatcgactccatctctggcgggcgttttggcgtcaacctcgtgactggctggcaaaagcccgtgtatgagcagatgggtatctggcctggcgatgactatttctcccgtcgttacgactatctcaccgaatatgttcaggtgctgcgcgacctgtggggcacggggaaaagcgattttaaggtgatgctgccaacttactga

SEQ ID NO: 482227 - DNA, 639 bp, Shigella sonnei
atgacgcaaggcgcagtgaaaacaacgggtaaacgttcgcgcgcagtaagcgcgaagaaaaaagcgattcttagcgcagcactggacactttttcacaattcggttttcacggcacaaggctggagcagatcgcagagttggcgggtgtttcaaaaaccaatctgctgtattactttccgtcaaaagaggcgctgtatattgccgtgctgcggcagattctcgatatctggctggcaccgttaaaagcgtttcgtgaagatttcgctccgctggcggcgataaaagagtacatccgtctgaagctggaagtctcccgcgattatccgcaggcttcgcgcctgttctgtatggagatgctggcaggcgcgccgctgttaatggatgaactgacgggcgatttgaaggcattaattgatgagaaatctgcgctgattgccggttgggtcaaaagcggcaaactcgcgccgattgatccgcagcatttgattttcatgatttgggcttccactcaacattacgccgatttcgcccctcaggtggaggcggtgacaggcgcgacgttgcgcgatgagatatttttcaatcaaacggttgaaaacgtgcagcggattattattgaggggattcgaccacgttaa

SEQ ID NO: 482228 - DNA, 3963 bp, Shigella sonnei
atgggaaccaccaccatgggggttaagctggacgacgcgacgcgtgagcgtattaagtctgccgcgacacgtatcgatcgcacaccacactggttaattaagcaggcgattttttcttatctcgaacaactggaaaacagcgatactctgccggagctacctgcgctgctttctggcgcggccaatgagagcgatgaagcaccgactccggcagaggaaccacaccagccattcctcgactttgccgagcaaatattgccccagtcggtttcccgcgccgcgatcaccgcggcctatcgccgcccggaaaccgaagcggtttctatgctgctggaacaagcccgcctgccgcagccagttgctgaacaggcgcacaaactggcgtatcaactggccgataaactgcgtaatcaaaaaaatgccagtggtcgtgcaggaatggtccaggggttattgcaggagttttcgctgtcatcgcaggaaggcgtggcgctgatgtgtctggcagaagcgttgttgcgtattcccgacaaagccacccgcgacgcgttaattcgcgacaaaatcagcaacggtaactggcagtcacacattggtcgtagcccgtcactgtttgttaatgccgctacctgggggctgctgtttactggcaaactggtttccacccataacgaagccagcctctcccgctcgctgaaccgcattatcggtaaaagcggtgaaccgctgatccgcaaaggtgtggatatggcgatgcgcctgatgggcgagcagttcgtcacgggtgaaaccatcgcggaagcgttagccaatgcccgcaagctggaagagaaaggtttccgttactcttacgatatgctgggcgaagctgcactgactgccgcagacgcacaggcgtatatggtttcctatcagcaggcgattcacgccattggtaaagcgtctaacggtcgtggcatctatgaaggtccgggcatttcaatcaaactgtcggcgctgcatccgcgctacagccgcgcccagtatgaccgggtaatggaagagctttacccgcgtctgaaatcactcaccctgctggcgcgtcagtatgatattggtattaacatcgatgccgaagaggccgatcgtctggagatctccctcgatctgctggaaaatctctgtttcgagccggaactggcaggctggaacggcatcggttttgttattcaggcttatcaaaaacgctgcccgttggtgatcgattacctggttgatctcgccacccgcagccgtcgccgtctgatgattcgcctggtgaaaggcgcgtactgggatagtgaaatcaagcgtgcgcagatggacggccttgaaggctatccggtttatacccgcaaggtgtataccgacgtttcttatctcgcctgtgcgaaaaagctgctggcggtgccgaatctaatctacccgcagttcgcgacgcacaacgcccatacgctggcagcgatttatcaactggcaggtcagaactactatccgggtcagtacgagttccagtgcctgcatggtatgggcgagccactgtacgagcaggtcaccgggaaagttgccgacggtaaacttaaccgaccgtgtcgtatttatgccccggttggcacacatgaaacgctgctggcgtatctggtgcgtcgcctgctggaaaacggtgctaacacctcgtttgttaaccgtattgccgacacctctttgccactggatgaactggtcgccgatccggtcactgctgtagaaaaactggcgcaacaggaagggcaaactggattaccgcatccgaaaattcccctgccgcgcgatctttacggtcacgggcgcgacaactcggcagggctggatctcgctaacgaacaccgtctggcctcgctctcctctgccctgctcaatagtgcactgcaaaaatggcaggccttgccaatgctggaacaaccggtagcggcaggtgagatgtcgcccgttattaaccctgcggaaccgaaagatattgtgggctttgtgcgtgaagccacgccacgtgaagtagaacaggcgctggaaagtgcggttaataacgcgccaatctggtttgccacgcctccggctgaacgcgcggcgattttgcatcgcgctgccgtgctaatggaaagccagatgcagcaactgattggtattctggtgcgtgaagccggaaaaaccttcagtaacgccattgccgaagtgcgcgaagcggtcgattttctccactactacgccggacaggtgcgggatgatttcgctaacgaaacccaccgtccattagggcctgtggtgtgtatcagtccgtggaacttcccgctggctattttcaccgggcagatcgctgccgcactggcggcaggtaacagcgtgctggcaaaaccggcagaacaaacgccgctgattgccgcgcaagggatcgccattttgctggaagcgggtgtaccccctggcgtggtgcaattgctgccaggtcagggggaaaccgtgggcgcgcaactgacgggtgatgatcgcgtgcgcggggtgatgtttaccggttcaaccgaagtcgctacgttactgcagcgcaatatcgccagccgcctggacgctcagggtcgccctattccgctcatcgctgaaaccggcggcatgaacgcgatgattgtcgattcttcagcactgaccgaacaagtcgtcgtggatgtgctggcctcggcgttcgacagtgcgggtcagcgttgttcggcactgcgcgtgctgtgcctgcaagatgagattgccgaccacacgttgaaaatgctgcgcggtgcaatggccgaatgccggatgggtaatccgggtcgcctgaccaccgatatcggtccggtgattgatagcgaagcgaaagccaatattgagcgccatattcagaccatgcgtagcaaaggccgtccggtgttccaggcggtgcgggaaaacagcgaagatgcccgtgaatggcaaagcggcacctttgtcgccccgacgctgatcgaactggatgactttgccgaattgcacaaagaggtctttggtccggtgctgcatgtggtgcgttacaaccgtaaccagctaccagagctgatcgagcagattaacgcttccggctatggtctgacgcttggtgtccatacgcgtattgatgaaaccatcgcccaggtcactggctcggcccatgttggtaacctgtatgttaaccgtaatatggtgggcgcagtggttggtgtgcagccgttcggcggcgaagggttgtccggtaccgggccgaaagcaggcggtccgctctatctctaccgtctgctggcgaatcgcccggaaagtgcgctggcagtgacgctcgcgcgtcaggatgcagagtatccggtcgatgcacagttgaaagccgcattgactcagccgctaaatgcactgcgggaatgggcagcaaatcgtccagaattgcaggcgttatgtacgcaatatggcgagctggcgcaggcaggaacacaacgattgctgccggggccgacgggtgaacgcaacacctggacgctgctgccgcgtgagcgcgtgttgtgtattgccgatgatgagcaggatgcgctgactcagctcgccgccgtgctggcggtgggcagccaggtactgtggccggatgacgcgctgcatcgtcagctagtaaaggcattgccatcggcagtcagcgaacgtattcaactggcgaaagcggaaaatataaccgctcaaccctttgatgcggtgatcttccacggtgattcggatcagcttcgcgcattgtgtgaagccgttgctgcgcgggatggcgcaattgtttcggtgcagggttttgcccgtggcgaaagcaatatccttctggaacggctgtatatcgaacgttcgctgagtgtgaataccgctgccgctggcggtaacgccagtttaatgacgatcggttaa

SEQ ID NO: 482229 - DNA, 1509 bp, Shigella sonnei
atggctattagcacaccgatgttggtgacattttgtgtctatatctttggcatgatattgattgggtttatcgcctggcgatcaacgaaaaactttgacgactatattctgggcggtcgtagtcttgggccattcgtgacggcattatcggcgggtgcgtcggatatgagcggctggctgttaatggggttgcctggcgcggtttttctttccgggatttccgaaagctggatcgccattggcctgacattaggcgcgtggatcaactggaagctggtggccgggcggttgcgtgtgcataccgaatacaataataacgccttaacattgccggattatttcaccgggcgttttgaagataaaagccgcattttgcgcattatctccgcgctggttattttgctgttcttcaccatttattgcgcttcgggcattgtggcaggcgcgcgtctgtttgaaagtacctttggcatgagttacgaaacggctctgttggcgggagctgcgtcgacgatcctttacacctttattggcggtttcctcgcggtgagctggactgacactgtacaggccagcctgatgatttttgccctgatcctgacgccggttatcgtcattatcagtgtcggtggctttggtgactcgctggaagtgatcaaacaaaagagcatcgaaaacgtggatatgctcaaagggctgaactttgttgccattatctcattgatgggttgggggctgggttacttcgggcagccgcacatcctggcgcgttttatggcggcagattctcaccacagcattgtccatgcgcgtcgtatcagtatgacctggatgatcctttgcctggcaggggcggtggctgttggcttctttggtatcgcttactttaacgagcatccggcggtagcaggtgcggtaaaccagaacgctgaacgcgtgtttatcgaactggcgcaaattctgtttaacccgtggattgccgggattctgctgtcggcgattctggcggcggtaatgtcaaccttaagttgccagctgctggtgtgctccagtgcgattaccgaagatttatacaaagcgtttctgcgtaaacaggccagccagaaagagctggtgtgggtaggacgtgtgatggtgctggtggtggcgctggtggcgattgcgctggcggcaaacccggaaaaccgcgtgctgggcttagtgagctacgcgtgggcaggctttggcgcggcgtttggtccggtggtgctgttctcggtgatgtggtcacgcatgacgcgcaacggtgcgctggcggggatgatcatcggtgcgctgacagttatcgtctggaagcagttcggctggctgggactgtacgaaattattccgggcttcatcttcggcagtatcgggattgtagtgtttagtttgctgggtaaagcgccgtcagcggcgatgcaaaaacgctttgccgaggccgatgcgcactatcattcggctccgccgtcacggttgcaggaaaactaa

SEQ ID NO: 482230 - DNA, 831 bp, Shigella sonnei
atgtttgttccgtttctcattatgttgcgcgaaggacttgaagccgcgctgattgtcagtttgattgccagctatcttaagcgtacccagcgaggccgatggattggcgtgatgtggattggcgtgttgcttgccgctgcgttgtgcctgggcttgggtatcttcattaacgaaaccaccggcgaatttccgcaaaaagaacaggaactgtttgaaggtatcgtggcggtgatcgccgtggtgatccttacctggatggttttctggatgcgcaaagtgtcgcgcaacgtcaaagtacaactggagcaggcagtcgatagcgcattgcagcgtggaaatcatcatggctgggcgctggtgatgatggtcttttttgccgttgcaagggaagggctggagtcggtctttttcctgctggcggcatttcaacaagatgtcgggatctggccgccgctgggtgcaatgctcggtcttgctactgccgtggtgctaggcttcctgctctactggggcggtattcgcctcaatcttggtgcattttttaaatggaccagcctgtttattctcttcgtcgccgcagggctggctgctggtgccattcgcgcatttcatgaagccggattgtggaaccactttcaggaaatcgccttcgatatgagcgcagtgctctcaactcactcgctgtttggcacgctgatggaagggatttttggctatcaggaagcaccgagcgtcagcgaagtcgccgtctggtttatttatctcatcccggcgctggtggcatttgctctgccaccacgcgcaggggcgacagcgtctcgctccgcgtaa

SEQ ID NO: 482231 - DNA, 1128 bp, Shigella sonnei
atgaccattaacttccgccgtaacgcattgcagttgagcgtggctgcgctgttttcttctgcttttatggctaacgccgctgatgtgccgcaggtcaaagtgaccgtgacggataagcagtgcgaaccgatgaccattacggttaacgccgggaaaacacagttcattattcagaaccatagccagaaggcgctggagtgggagatcctcaaaggcgtgatggtggtggaagagcgggaaaatatcgcccctggttttagccagaaaatgacggcgaatttacagcctggcgaatacgatatgacctgcggtctgctgactaacccgaaagggaagttgatcgtcaaaggtgaggcaacggcggatgcggcgcaaagtgatgcgctgttaagtcttggtggtgcaattactgcatataaagcgtatgtcatggcggaaaccacgcagctggtgaccgacaccaaagcctttaccgacgcgattaaagcaggcgatatcgaaaaagcgaaagcactgtatgcgccgacgcgccagcactatgagcgcattgaaccgattgctgaactgttctccgatctggatggcagcattgacgcccgtgaagatgattacgagcaaaaagccgccgacccaaaattcactggtttccaccgtctggaaaaagcattgtttggcgacaacaccaccaaagggatggatcagtacgctgagcagctttatacagatgtggtcgatttgcaaaaacgcatcagtgaactggctttcccaccttcaaaagtggtcggcggcgcagccggactgattgaggaagtggcagccagcaaaattagcggtgaagaagatcgctacagccacaccgatctgtgggatttccaggctaacgttgaaggctcgcagaaaattgtcgatttgctgcgtccacaactgcaaaaagccaacccggaactgctggcaaaagtcgatgccaactttaaaaaggtcgataccattctggcgaaataccgtactaaagacggttttgaaacctacgacaaattgaccgatgccgaccggaatgcactgaaaggaccgattactgcgctggcggaagatctggcgcaacttcgcggtgtgctgggactggattaa

SEQ ID NO: 482232 - DNA, 1272 bp, Shigella sonnei
atgcagtataaagatgaaaacggcgtgaatgaaccgtcacgccgacgtttactgaaagggattggtgcgctggcgctggcgggaagttgtccggtcgctcatgcacaaaaaacgcaaagtgcaccgggcacgctttcaccggatgcacgcaatgagaaacagccgttttatggtgagcatcaggcagggatcctgacgccacaacaggccgcaatgatgctggtggcgtttgatgtgcttgccagcgataaagccgatcttgagcggttgtttcgcttgttgactcagcgttttgcttttctgactcagggcggagcagcaccagaaacgccaaatccgcgcctgccaccactcgattccggcattcttggcggctacattgcgcccgataatctcaccatcacgttatcggtgggtcactcattgtttgatgagcgctttggccttgcgccacagatgccaaaaaagctgcagaagatgacgcgtttccccaacgactcgctggatgcggcgttatgtcatggtgatgtgttgctacagatttgcgccaacacccaggacacggttatccatgcgctgcgcgatatcatcaaacacacgccggatttgctcagtgtgcgctggaagcgggaagggtttatttccgatcacgtgtcgcgtagtaaaggcaaagagacgccgattaatttgctgggtttcaaagacggcactgccaatcccgatagccagaatgataagttgatgcaaaaagtggtgtgggtaacggcagatcagcaggagcctgcgtggacaatcggtggcagctatcaggcagtacgcttgattcagtttcgagtggaattttgggacagaacgccgctgaaagaacagcagacgatttttggccgtgataagcaaaccggtgcgccgctgggaatgcagcatgagcatgatgtgcctgattacgccagcgacccggaagggaaggtgattgcgctggacagccatatccggctggcgaatccccgcacggcggagagtgagtccagcctgatgctgcgtcgcggctacagttattcgttgggggtcaccaactccggacaactggatatggggttgctgtttgtctgctaccaacacgatctggaaaaaggcttcctgacagtacaaaaaaggctcaatggcgaagcgctggaggaatacgttaaacctatcggcggcggttattttttttcgctgccgggagtgaaggacgcgaacgattatctcggaagcgcgttattgcgggtttaa

SEQ ID NO: 482233 - DNA, 1065 bp, Shigella sonnei
atggtaacgtcctgtactggacatgttttagataatcaacgcgccaccactcgcggagttttctcctccggtagtcatctcgtcactttgcattttcaacctcatcctttcttttcatgtgttaccgacgccgtaaacggtgcgcgtagccgtttttcggcattttatccaaaagcaaactatggcttacaaggaagccaaccctctgatgttcgtgcgcataatcgcgctgccaacggcgcgtgtgatgaatacaaacaactcaaggtgctctctatgggaagacaaaaagcagtgatcaaagctcgtcgcgaggcaaaacgtgtgctgagacgggattcgcgcagccataagcagcgtgaagaagaatcggtcacctcgcttgtgcagatgggcggcgtagaagccattggtatggcccgcgacagtcgcgatacttcgcccatcctcgcgcgaaatgaagcgcaattgcactatctgaaggctattgagagtaagcagctgatattcgccacgggcgaagccgggggcggaaaaacctggatcagcgcagcaaaagcggcagaggccctgatacataaggatgtcgacaggattatcgtcacccgtccagttctgcaagccgatgaagatcttggcttcttacctggagatatcgcagaaaagtttgctccctattttcgcccggtctacgacgtgctggtccggcgcttaggggcttcctttatgcagtactgcctgcgaccggaaatagggaaggtggaaattgcgccgttcgcctatatgcgtggacgtacctttgaaaatgcagtcgtcattcttgacgaggcgcagaatgtgactgccgcgcaaatgaaaatgtttttaacccgcctcggggagaacgtgacggttatcgtcaacggtgatatcacgcaatgcgatttgcctcgcggcgtgtgctccggattaagtgacgcgctggaacgtttcgaagaagatgaaatggttgggatcgtccggttcggtaaagaggactgcgtacgttcggcactttgccaacgtacgctgcatgcctacagttaa

SEQ ID NO: 482234 - DNA, 687 bp, Shigella sonnei
atgagctttatggcttttgtaacttgtttgacaattgcatttatcgccggttttgctgttgccagaaaattgacactccgaaaagttgcctcatcggtaatcatcgctaaatcgcaacccgtcccttcatctgcaacttcccctgccgctaaggcgtcgacaaggagctatataccgcagaaaacctatcgtgactctcgttggcaagagcgagatgagttatttcagggaatggttgccgaaggtattttattggaaagaaaagagtggttaatcacgcgttgtgaaaaaatgtatttcgataatctggaaaaatggtttggacattattgtcatatccattgccaggtctctctggggcgcttgatcaactttccagaacaacctgagtttagcgaagaagaaagaaagcgtttctttgcaatttataatggcatggcaatggattatgttctggtttcaaagaagaacaataaaatagtctgtgttattgagctggatgacccgagtcatgaaagggcggatcgcattattcgtgaccgttggttggatacaattatgactcttgcacgggtgccttttgtacgagcttctgtcactaaattggaggaaattcctccggtctgggagactcgtgacaaaattcgcccattagtcgcggcgacaaagagtgaaccggtgcattaa

SEQ ID NO: 482235 - DNA, 1218 bp, Shigella sonnei
atggcagtattgacggatactaaagcaaggcatatcaaacctgatgacaaaccattgccccatgggggaattacaggactgactcttcatccttcttcagtaaaagggcggggtaaatgggtttttcgttatgtaagtccggtgacacaaaaaaggcgtaatgctggattgggaacttatcctgaggtcagtattgctgaagctgcacgtgctgcccggataatgcgagagcaacttgctgcaggtgatgacccactggagattaaaaaggctgaagctgaaaaagttgttatcccaacatttgccgatgcagccaggcgtgtacatgctgaattgtcaccgggatgggaaaatccaaagcatgtcaggcagtggttatcgacgcttgaaaattacgcgtttcctcaactgggagcaaaaacgctggattcgattacggctgcggacgtggcagaaacactgcgtccagtctggttaaccttgtcagaaacggcaagccgggttaaacagcgcattcatgttgttatgcagtggggatgggcgcacggtttttgtgtggcaaaccctgttgatgtggttgaccatttgcttcctcagcagacaagaggacgtgatgaacaccaacccgcaatgccctggaggcagttaccgctttttgtggcgaccagtgtgtatacagatgaaccttataatgttacccgcgcactgttattaatggtgatacttacagcaactcgctcgggcgaagccaggggaatgcgctgggctgaaattgattttcataagcgggtatggactatacctgcagaaagaatgaaagctaggctacagcatcgtgttcctttatcccggcaggctatttacattctggaaaatatacgtggcctgcatgatgaactggtgttcccttcacccagaaagcagcagatcctttccgatatggtgttgacaagttttctgcgtaaaaagaaagccgtcagtgacattccggggcgagttgccacggcacatggttttcgctcaacattcagggactggtgtagtgaacaggggtattcgcgggatctggcggaaagggcgctcgctcatacgctgaaaaataaggttgaggcggcatatcatcgtactgatctactggagcagcgtgtaccgatgatgcaggcatgggcggattatgtgatgtctcaacttgctaaaaacactaaggaattcgcttag

SEQ ID NO: 482236 - DNA, 1530 bp, Shigella sonnei; identical to SEQ ID NO: 463473

SEQ ID NO: 482237 - DNA, 288 bp, Shigella sonnei; identical to SEQ ID NO: 15969

SEQ ID NO: 482238 - DNA, 1836 bp, Shigella sonnei
atgcgcacatttacaaatatgttgtatgatatttgtactgttttggggttgtttaaggaaggcgagaatccggcacacaagcggaagagtaccaattttgaaatgcatcaaaaattctgggatcaacgttataatgagatcagtcgtattattgatgctgaaggggtgttcagtcaggagcaacggcggatcatatatgcccgatatgaacatttttattacatgatgaattcttatccagtgcattccacactaaaacctgaattccttcgcagctattgtctgcgcacttttggggttatttttcttgttgtagatatgtataatacatacagaccagagaatgactctgctttttattatcatatttataattttttacagaaatcgtattgtccttgtcttgatcacgctgatacagaaagcgatgaagctgctgttaaacgttatcttcgggaatatctggctgaactgggattcaacaaggaagattttcatgaaaatggaaagctgtatgctctggggaaatatacaggaactatacggaaggataacgggaaaagcaagagcctgatgcaacaatatatcatggctatcaaaaatgaatataaaaaggattaccgggagaagaagctggataaggatgaactggagaaagtgctcaggaatattgataaattctataatgcattttattcattaagtgtcttacttgatatacaacgaaagacgaagatacttcaaagccttgcatattatctcagagtgttggtgagagaaggactctggattcatggtttgtatggttacgctgcgcaatatctttatgactttaccagctttgatacaacgccttatgcaaaaaaattactggaaatgttttataagtttcaaaacagtgcagaaggaacattgtctcgttatagtgtttcacttgatgataaatctcaggaatatatttcccgtctgaaagatcttgtatttaatattaatgataagaatggttgtgatgacgcatatctgaaaaagattataagctattttgggcagttgcagaatgaggctgttcatgtgaccagctgctacgaaacacttgcggtgtacatttgtctgataaggaaaaataaaattaatgatgtgctgcagcattatgatgacatggaaagaaaaggattgtttggtgaattaccttcaggatatgtcaggggggcattatcgttgcttcggacagcactggaggttaaagtaaatagaaaaaatataaagtatggctcgttgttttattggtttgaccatgtaaaagcctatcaggatgcatttattgaaaaaataccacttattgatcctgtatataaggagggtgaaatacagtatgatgcgaacaattttaccctgatgcgtgttattaagatgtataattgtatgcttgaaaagatcagtacgaaaccatatattgcgcccccatatattacaggtttgcttgatgacgtagagaaggtgctggataagataaatattctgatagataaagagtatgtttatgatggtaagacgctggcagaagtcattatggaaaacaaagtattatccagtcgcgaacgtaaagaaactatgatagggcttttcacaggcagtaagaaatatactttactgcaatgtgttgagaagcttggtgtattagttcactatgtgaaatcaccggtcgatgaaattaaaaatgtgatgatgttgtatggcgataaggccgaaaacaggaacagacgcagaatgatatatgatgcgttaaccattatttgtgaagatgacatcaggaataaccctcctgagctgtcgtga

SEQ ID NO: 482239 - DNA, 564 bp, Shigella sonnei; identical to SEQ ID NO: 81816

SEQ ID NO: 482240 - DNA, 261 bp, Shigella sonnei; identical to SEQ ID NO: 13143

SEQ ID NO: 482241 - DNA, 4959 bp, Shigella sonnei
atgtgggatggtggcttacaagaacaggaagtattggctatcgagaaaataaaagctgctttttcagtcaacgtatctaagcctgacaagcctttccgtagcggttcaattagtgagcagctaaaaagctatggttttatcggcaatgaaatgttcccttggaaaggttatgcaggttttcgatttgttgaggcaaaaaaagagggggaattcgatttagttattgtaacacactgcaacgtgatcattgttgaactgaaagactggaaccatcagcctgtaaccgcacgcggagatacttggtttaaaggcgataagaacatggggcgctcgccagtaagcgtgactcgtagcaaaaaattcatgctggacaaaaaactcaagcgtctggtagaccgttttacgaacaaaggctatatcccgattgttcatttttttgttgtgatgaccggcaatgcagatttcagcgcgctgccggaggaacaacggcgccatacgatctcgttaaaagatttcctgaagtttgccgatcgcgggagcttcaataactatttcaaaccgcacccagctaccaaggttcttaacaaggatttccatcttttcgatgatttgttcctagggcctcagacggcaccaaaagccttgagagttaatggctatgaagctaatgatatgattttcgaacatcctaaaaaggtgtatcgagaatatctggcaaaatctgagatatcaacgaacagcgaagcgctactcagagtatggaattttagaaatataacgggaacgaaagcgaataccccggaaggacgagctcagattgtttcacgtgagcgcgaagtgttacagcacatcaatcaccagaatcgtgacctgtataaccactgtctcaggtctttgacgagttttcagaaagacgaggtaacggccgagtatagcgaagtctacgaagttccgccgggtcatgtccggtttaatgagtttatcggaaaatatggtaagaacttttctgatatggaccgcttgaatgtggtgaaactgctcattgcaaagtttagtgatctccatgagatgaaaattgcgcacagggatgtcgccgatcacagtctgtggatttcaccttcaaaagaagttgctctttcgaactttatttcggcttaccaccagccagccggaacggttggcgattaccgtaagcttttatccgtaggtgcagtccacgtaaaagacatgcttgataagggcgagcttacgccttttcagcaagatgttcatactctgggccttgtcgcctggcacttatttagcggtatgcgcatgtcgccaaagagtctggagaaagtacaggacaacatgctaaacagccagcactggtattcatctgtattacgggatgccgttgccgcaaaattcacttctgcaacagaattctttgatgccctgaaacaagccgaacctgctggcaaggatattccaacatttgatgatactgagcttgacccttaccgacatgctatcaatcacgctcgtcaatacccggaagacgatggctttcagtttcaggtcgaaacagtcgacaaagaagtctatatctcgaaaggaaggctcgtgaaggcttggctgaatgttgggggacagggatacgatccgtcaattaatttccaggttctgaagtttttaaagcaggttgagcggctttcttcagttaaaacaacgtatctacctcaaattcgtgaattcggtatcgcatcaaaatcatcaagcctatatatggtcacggatcaggtacagggagaaacctgggataaaatagcggtccccgatgatgaaaaaatcgacctcattggtaagtttgtcgccgccgttgagcacttacatggtctgggtgtttctcacggggacatccaccctggcaatgtgatatttgagacacagagccgtttgctttttctcatcgatatccccgatttttcaccgtccggtgacgaacctaaaaatcacagttacagccctgaatacattgataattgtacttcttttgaacgtgacaactatgcagtgatgaagatgtcctgcgagttgctaggcatgtcatgggggctggaatcagacatttatccgacaatcgcgaatgctatccgagcagagctggaagatccggtttttgggtttaaggatttaggccgctttaaaaaagcgatagatagtaatgacctggtgccagaacaagacctgatagagattactgcaggaaatgccgatgaaataatctctattctgcctgataacgggcatctgtatgtcaaagttaagtcaaatcctaaagcgccagctgaagtaaatgtgactttctctgggattggtggcagttttactgcggtgttcaacaaagatcagaagacgctggttcatggcttcaggccacgggctcgcgtcacaattcgtaagcaagatattgatgaaagccagttcgaaattgatactggtatcaagattattcccggcagtccgcaggatctgtcggcgttgacagtattgcttaatgaagaagaatcttttgcgcgggcaatcgagttgattgccgcaactgaagatgttcaggtacaagagccacttacgcttcagctaaaagatacctttgcaaggcttgataagcagacgcttgaaccttctttaagagaagtgctggaaatcccaacagtgaaactgtggcgcgccattctggatactgaaacagaatcttatccaaacattgaaatcagcggtgaagtggtcccggttgcagatgctcatggagagcttcttctcccttactctgctgatgttgatccactcggtgctttcagaagtagtgatgaagtcgaagccttacaggtcgatcaggaaggtgttgagcgatttattggtgaagtgtcacttaagaagtcagagctcaaagagattcgtcttgtcaaagttagttcagcagccttcaagctgaaggattctgatattgtcttcttccgtacaagaccgactcgtgcatcttatcagaaacgtaaacgcgcactggaacgtctcctagatcgagaaagtgtgctgcctgacttaattgacttgttcgatccatcctgcaaacaggcggctcaaaattatggtatcactctcagcgataccgattttgccagatacgaccgtgaagatcagcacggaaacaagatcagtctgaatgaacagcaaagaaaggcgtttaacaaactggtcaataatggccctctctccctgcttcaggggccaccggggaccggtaaaaccgagttcatcgcggcctttgttcactacctgatcgagaaacagaataccaaacgcattttactggtcagccagtcacacgaggctgtgaatacagcggccgagcgtatcagaaagcattgttcccggcttggtacagagttggacgttgtcaggttcagcaaccgagagggagccgtttcccctggcttaaaagatgtgtactcacacgcaatcacaacagagaagcgcgaactcttcaatgctgaaattaagtaccgtgttgaagcattgagtgaagctattggtctggagccgggatttatttcgggtgttgttcttgcagagctcaatttgttcagacaaatcgatcaccttgagaaattgctctatcaggttaacaatttaacggattcaaatgagagcaatgaactgaaagatattgcagtcgaactcgatttttccatccgctctaagctgagtcaggagtatgggattaacttggacaatggcgtgaaggtctcagcagcaaaagacattctgatttccaagctatgtacagagtatggtgtcagacctgatgaggcaagacgagtaaaagcattagctaaaatatcccgtgatatgcaggatgctatgtcgggagagcgagtgaacctggacgagttttattcgcgctccaggcagttagtggctggcacatgcgttggtattggacaagggcacattggcattcaggagaatatctatgactgggtgattattgatgaggcggcgcgctcgatttcaagtgagctggccattgcaatgcagtcagcccggcgtgtcctgttggtgggtgaccacatgcagcttcctccattgtactcagatgcccacaaggcggcattagcgaggaagctgggtatcaataactcccgcactgaaattgacgaggtattacgaagtgactttgcccgagccttcaactctgcttatggtgcgcagacgagtgcagctttgatgacccagtatcgtatggctccaccgattggtaatctcgtatcgaagacgttttatgacgggaagcttctgaatggagtacgggcaattccggatgtctatcagcaagctccggaagcgttacgtagcgttgtaacctggcttgatactgctaatcagggccaccgagcacatcatcttgaagatcgcggaacaagcatttacaaccgatgtgaagctgacgagattatttctgttcttaaacaggtgtcagagaatgaagaatttgtagctaagctttcaaaacttgttagcaaagatgaagccgctatcggcgtgatatgtatgtatgccgaacaaaagcggttactccgtcagaaattcaatcaggaaatctggagcgagggatttaaggacattgttaaaattgacactgttgacagttatcagggaaaggaaaatcggatcattatcctgtcactgacgcgttcggataagcagcatagcccaggtttcttacgcgttccaaaccgtataaatgtcgcgatgtcacgcgcaatggatcgactgttgattgtgggtaatgccgatatctggaagggaaacaataaagaattgccattaggctacgttgtaagttatatggctgagcgaggtcaggaagctggatacaggttcctctctgctcagcagggaggcaaaaagaaatga

SEQ ID NO: 482242 - DNA, 1437 bp, Shigella sonnei; identical to SEQ ID NO: 13145

SEQ ID NO: 482243 - DNA, 252 bp, Shigella sonnei
atgacggcgttactctccaactgggttgacgcgtgctgcctgttaatggctccgctgaatgatgccctataccgttatgtgatgaacacccgcctgggaaccatccacggcacgtcggtcggcgaactgctggcgtggatcaaagaagatgaaaaccctcgcaaaggcgagatggtgctgattattgaaggccataaagcccaggatgacgaactgcccgccgatgcgctgcgtacgctggcgctgttgtag

SEQ ID NO: 482244 - DNA, 1890 bp, Shigella sonnei
atgaagaaagtgctcactctctcactgctggctctctgcgtttctcatggtgcagcggcagcaaactacgcgctcaataacgacaatattgccctcttgtttgatgatacaaactcaacggtcgtggtgaaggacaacaaggctaaccatccgctcacgccgcaggagttgttctttctgacgctgccggatgagagtaaaatccacaccgcggatttcaaaatcaagcacgtcgaaaagcaggataacgcgattgtcatcgactttacgcacccggattttaacgtcacggtgaagctgaacctggtgaagggaaaatacgccaacatcggctacaccattgccgccgtggggcagccgcgcgacgtcgctaaaatcaccttcttcccgacccaaaaacagtctcaggccccttacgtagacggcgcaatcaatagctctccgatcgttgcggactcgttctttatcctgccggataaaccgatcgtgaatacctacgcctatgaagccaccaccaatctcaacgtagagctgaaaacgccgattcagccagaggcgccggtcagctttactacctggttcggcactttcccggaaaccagccagctgcgccgcagcgtgaaccagtttattaatgacgtacgtccacgcccatacaagccttatctgcactacaacagctggatggatatcggctttttcactccctacactgaacaggatgtgctggggcgtatggacgagtggaacaaggagttcattacgggccgcggcgtggcgctggacgccttcctgctggatgatggctgggacgatctgaccggacgctggctatttggcacggcattcagaaacggttttagcaaagtacgggagaaagccgacagcctgcacagctccgttgggctatggctttcaccgtggggtggctacaacaaaccgcgcgacgttcgcgtttcgcatgcaaaagagtatgggttcgaaaccgtggacggcaaactggcgctgtcgggagcgaactactttaaaaacttcaatgagcggatcatcaagcttatcaaaaacgagcacatcacctcgtttaaactcgacgggatgggtaacgccagttcgcatatcaaaggcagctcgttcgcctcagatttcgatgcatcaatcgccctgctgcacaatatgcgcagcgcaaccccgaatctgtttatcaacctgaccaccggcaccgacgccagcccgtcctggctgttctacgctgattctatctggcgtcagggagatgacatcaacctgtatggttccggtacgccggtgcagcagtggatgacctaccgcgatgccgagacgtaccgctccattgtccgtaaaggccctctgttcccgctgaactcgctgatgtaccacgggatagtcagcgccgagaatgcctattacgggttagagaaggtgcaaacggacagcgactttgccgatcaggtctggagctacttcgcgaccggcacccagctgcaggagctgtatattaccccgtccatgctgaacaaggtgaagtgggatacgctggcgaaggctgcaaaatggtcgaaggaaaatgccagcgtgctggttgatacccactggattggcggcgacccaacggcgcttgccgtgtacggctgggcatcctggagcaaagacaaagccattctcggtttgcgcaacccatcggataagccacaggcctactatctggatttggctaaggatttcgaaataccgacaggagacgtggcgcagtttagtctgaaagcggtatacggcagcaataaaaccgtgcccgttgagtataaaaacgcgacggtgattacgttgcagccgctggaaacgctggtgtttgaggcggtgcccgttaactaa

SEQ ID NO: 482245 - DNA, 483 bp, Shigella sonnei
gtgctcacatcgcccaacaaagcgttcaatttgggcgggctgaaaacctcctactccatgattccagacgactcgctgcgccagcgcttccgccagcagctcgagaagaactccattacctcgcccaatttgttcggggtatggggaatcattctggcctatcaacacggtctgccctggctcgacgcgctgaacggttatctgcaaggcaacgcccggtatctggcggatgccctccagacccacttcccggcgtggaagatgatgaacccggaatcgtcgtatctggcgtggatagacgtaagcgcggatgagcgtagcgcaacgcagctaacccaacatttcgcacggcaggcaggcgtggtcatagaagacggcagccactatgtacaaaacggcgaaaactacctgcggattaattttggcacccagcgctactggctggagcagtccattaaccgaatgctgaaaaatgacaaataa

SEQ ID NO: 482246 - DNA, 690 bp, Shigella sonnei
atgtttgatttcgacaaaatcattgagcgtcaaagtgataagtgccgtaaatgggaccatacctttgtttgctcgcgtttcggtgacgtcccggagtcctttatccccctatggatagccgatatggatttcacctcaccacctgcggtgattgacggtttccggcgcatcgtggagcacggcacctttggttatacctggtgctttgacgaattctacgacgcggtcattgccttccagcgcaaacgtcatcaggttgaggtggaaaagtcgtggatcacgttgacctacggcaccgtatccacgctgcactacacggttcaggcattctgcaaaccgggtgacagcgtgatgatgaacacgccggtctacgatccttttgcgatggcggcacagcgccagggcgtgcaggtactggctaacccgctgcgcgtggaggaaaaccgctatcagcttgattttaatctgatagaagaacagctcaaaacccaccgtccaacgctgtggttctctgctcgccacataacccgtccggcaggatctggcgcgaggaagaaatacgccaggtgtccgatctctgtcaacgctacggcacgattctggtggtcgatgaggttcacgctgaacacattctggatggcaaattcgccagttgtctcacctctggctgtgccgcccaggacaacctga

SEQ ID NO: 482247 - DNA, 1572 bp, Shigella sonnei; identical to SEQ ID NO: 13146

SEQ ID NO: 482248 - DNA, 339 bp, Shigella sonnei; identical to SEQ ID NO: 13147

SEQ ID NO: 482249 - DNA, 825 bp, Shigella sonnei
atgagtaataccgacgcttcaggtgagaagcgagtgacaggcaccagcgagcgacgagaacagatcattcagcgtctgcgacagcaagggagtgtgcaggttaacgatctgtcggcattgtatggcgtatctactgtgacgatccgcaacgatctggcgtttctggaaaagcagggaatcgctgtgcgtgcctatggtggcgcgttgatctgcgatagcacgacgccgtcagtcgagccatcagtggaagacaaaagcgcactgaacaccgcgatgaaacgcagcgttgcgaaagctgccgttgagttgattcagccaggtcatcgggtgctcctcgattccgggaccaccacttttgagattgctcgtctgatgcgcaagcacactgacgtaattgcgatgaccaacggtatgaacgtggctaatgcgttgctggaagcggaaggcgttgagctgctgatgaccggcgggcatttgcgccgtcagtcgcaatctttttacggcgatcaggctgagcaatcgctgcaaaattaccacttcgatatgctgtttcttggtgtagatgcgatcgatctggagcgcggcgtcagcacgcataatgaagatgaagcccgtttaaaccgccggatgtgcgaagttgcggaacggatcatcgtggtcaccgattccagtaagttcaatcgttccagtttacataagatcattgatactcaacgtatcgacatgatcattgttgatgaaggcattcctgcggatagtctggaaggcttgcgaaaggctggggttgaagtgattctggtcggggagctcgcgtcttcgctgtga

SEQ ID NO: 482250 - DNA, 438 bp, Shigella sonnei
gtggtaaagaaagcactcggctccattgctaaatcgggtaaaaccgcaattgttgaagtgctgtcgcccggtcaacacccgactaaacgcgaattaatttacgccgcgacgccagccagcgattttgtctgtggcacgcaacaggtggcttcgggtatcaccgtgcaagtgtttacgaccggccgtggtacgccgtacggcctgatggaggtacccgttattaaaatggcgacccgcaccgggctggcgaaccactggtttgatttaatggatattaacgcaggcactatcgctaccggcgaagaaaccattgaagaggtgggctggaagttgttccactttattctcgacgtcgccagcgggaagaagaaaaccctctcggatcaatggggattgcataaccaactggcagtgtttaacccggcaccggtggcctga

SEQ ID NO: 482251 - DNA, 732 bp, Shigella sonnei; identical to SEQ ID NO: 33315

SEQ ID NO: 482252 - DNA, 783 bp, Shigella sonnei
atggaaacgaagcaaaaagagcgtatccgacgtttgatggaactgcttaagaaaaccgacagaatccatttgaaagacgcagcgcgaatgctggaagtttctgtaatgactattcgtcgcgatctccatcaggaagatgaacctctgccactgaccctactgggtggctatattgtaatggtgaataaacccgcgccatccatgccagtaatccatgacgttccaaaaaatcatcgtgatgacttacctattgcaattctggctgccggaatggttaatgaaaatgatctgatcttctttgataatggtcaggagataccactcgttataagcatgatcccggatgcaatcaccttcaccggtatctgttactcacatcgcgtctttgttgcgttgaatgaaaagcctaatgtaacagcaatactttgtggtggtacgtatcgtgccagaagtgatgctttttacgatgccagtaactcttcgccattagactctctcaatccgcgaaaaatatttatttccgccagcggtgtgcataatcactttggcgtcagctggtttaaccctgaagatcttgccactaagcgtaaagcgatgaaccgtggactacggaaaattttgctcgcccgccacgcgttgttcgatgaagtggcctctgccagcctcgcaccgatctctgcatttgacgttctgattagcgatcgtccgttaccggcagattatgttacgcactgccggaatggttctgtaaagatcattacacctgattcagaagacgaatga

SEQ ID NO: 482253 - DNA, 921 bp, Shigella sonnei
atggacattgcagttattggttccaatatggtggatctcattacttacactaatcagatgcctaaagaaggagaaactctggaagcacctgccttcaaaatcggatgtggtgggaaaggtgctaatcaagcggtggcggcggctaaattgaattcaaaagtcctgatgctgactaaagtaggtgatgatatttttgcggataatactattcgtaatctcgaatcatggggaattaataccacttatgttgagaaggtcccctgtaccagcagtggtgttgcaccgatctttgttaatgccaactcgagcaatagtatattaataattaagggagcgaataaatttctttccccggaagatatcgatcgagctgcagaagatctgaaaaaatgcaaattgatcgttttacaactggaagttcaactggaaacagtttaccacgcgattgagtttggtaagaaaaatggtattgaagtgttattaaatccggctccggcattgcgtgagttagatatgtcttatgcctgcaaatgtgatttctttatcccgaatgaaacagaactggaaatattaaccggtatgtcggttgatacttatgatcatattcgtttggccgcacgttcgttagttgataaagggctgaacaatattattgttaccatgagcgaaaaaggcgcattatggatgacccgcgatcaggaagtccatgttcctgcattcaaagtaaatgctgttgatactagtggcgctggtgacgcatttattggttgcttttcccattattatgttcaaagcggtgatgttgaagccgctttgaaaaaagccgctctctttgccgctttcagcgtcacagggaaaggtacgcaatcatcttatccgagtattgaacaatttaatgaatttttaaccttaaacgaataa

SEQ ID NO: 482254 - DNA, 1317 bp, Shigella sonnei
atgaacgataaaaacatcattcagatgcctgatgggtatctgaataagactcccttgttccagtttattttgttatcgtgtttattcccgctatggggatgcgcagctgcattaaatgacatattaatcactcaattcaaaagtgtattttcgctaagtaactttgcttcagcattggtgcagagcgcattttatggaggttattttttaattgcaataccagcatcccttgtgattaaaaagaccagttataaggtggcaattttaattggcctgacgctgtatattggtggttgtacactttttttccctgcctcgcatatggcaacctacactatgttccttgcagctatttttgcgattgcgattggcctgagtttccttgaaactgcagcgaacacatacagttcaatgatcggtccaaaagcctatgccacattgcggctcaatatcagccagaccttttatccgattggtgctgcgtctggtattttattgggcaaatatctggttttctccgagggggaaagccttgagaagcagatgtccggaatgaacgccgagcaaattcacaactttaaggtgctgatgttagagaacacccttgaaccgtataagtatatgattatgattcttgttgtggtcatggtgttgttccttttaacccgcttcccaacctgtaaagtggcacagacaagtcaccataaatgcccgtcagcaatggatacgctgcgctatctggctaaaaattcgcgctttcgtcgtggtattgtggctcaattcctttatgtgggtatgcaggtcgcagtatggtcatttaccatccgtctggcactggagttgggcgatatcaacgaacgtgatgcttcaaacttcatggtctacagctttgcctgcttctttattggcaagtttatagccaacatccttatgacacgttttaatccggaaaaagtcctaattctctattccgttataggggcgctgtttctggcatatgttgcactggctccaagtttcagcgcggtctatgtcgccgtcctggtaagtgttttgtttggcccttgctgggcgacgatctatgcaggaacactggatacagttgataaccaacatacagaaatggcaggagcagtcattgttatggctattgttggcgcagcggtggttccggcaattcaggggtatattgcagatatgttccactcactacagctttcattcctggtttctatgctctgttttgtctatgtcggtgtctacttctggcgtgaaagcaaagtacgtaatgcactggctgaagtcacagagtcctga

SEQ ID NO: 482255 - DNA, 1014 bp, Shigella sonnei
atgagtacgcgtatttatttgtggcgggcgctttttggcgaaaaacctcgtatcttgctggaaaatagtgattttactgtcacgtcttttcgctatgacagtggtgtcgaggggcttaaaattgcaaacagtcgtggacatttaattattcttccctggatggggcagatggtttgggatgcgcaatttgatggacacagtctcaccatgtgcaatatgtttcgccagcctaaaccggcgacagaggtgatagagacctatggctgttttgcctttcattcaggtttgctggctaatggctgcccatctgcggaagatactcatctgctacacggtgaaatggcctgtgccgcgatggatgaagcatggatggaattagagggagatatgttacgccttaccgggcgttacgagtatgtaatggggttcgggcatcattatctggctcagccaacagtggtccttcacaaatcctctacattgttcgatattaagatggccgtaaccaatctggcttctgtagatatgccactacaatatatgtgccacatgaattatgcatatataccaaatactacgttcagccagaatataccggacgaaatattaaggttgcgtgaatcagtaccttcgcatgttaatcccaccgcccagtggctggcgtttaatcaacggattatgcagggagaagcctctctgtcgacgctgaatcaaccggaattttatgatccagaaatagtcttctttgcagacaaactggacgcttacacagatcagccagagtttcgcatgatcgctcccgatggcactacgtttgttactcgtttctccagtgctgaactaaattatgtgacacgctggatcctttataacggcgagcaacaggtagccgcctttgcattaccagcaacctgtcgacctgaggggtatcttgccgcgcaacgtaatggcacgctgattcaggttgcaccgcagcaaacgcgcacttttacagtcaccacaggtattgaataa

SEQ ID NO: 482256 - DNA, 780 bp, Shigella sonnei
atgatggaactgcaacatcaacgactgatggcgctctccgggcagttgcaactggaaagccttataagcgcagcgcctgcgctgtcacaacaggcagtagaccaggaatggagttatatggacttcctggagcatctgcttcatgaagaaaaactggcacgtcatcaacgtaaacaggcgatgtatacccgaatggcagccttcccggcggtgaaaacgttcgaagagtatgacttcacattcgccaccggagcaccgcagaagcaactccagtcgttacgctcactcagcttcatagaacgtaatgaaaatatcgtattactggggccatcaggtgtggggaaaacccatctggcaatagcgatgggctatgaagcagtccgtgcaggtatcaaagttcgcttcacaacagcagcagatctgttacttcagttatctacggcacatcgtcagggccgttataaaacgacgcttcagcgtggagtaatggccccccgcctgctcatcattgatgaaataggctatctgccgttcagtcaggaagaagcaaagctgttcttccaggtcatcgctaaacgttacgaaaagagcgcaatgatcctgacatccaatctgccgttcgggcagtgggatcaaacgttcgccggtgatgcagcactgacctcagcgatgctggaccgtatcttacaccactcacatgtcgttcaaatcaaaggagaaagctatcgactcagacagaaacgaaaggccggggttatagcagaagctaatcctgagtaa

SEQ ID NO: 482257 - DNA, 129 bp, Shigella sonnei
atgctggcactgcctccggagaaaaaagagtatgacgtgcatcttgatgaaaatctggtgaacttcgacaaacaccccctgcatcatctactctccatctacgactcattctgcagaggagtggcgtga

SEQ ID NO: 482258 - DNA, 1290 bp, Shigella sonnei; identical to SEQ ID NO: 52954

SEQ ID NO: 482259 - DNA, 513 bp, Shigella sonnei; identical to SEQ ID NO: 58147

SEQ ID NO: 482260 - DNA, 897 bp, Shigella sonnei; identical to SEQ ID NO: 52956

SEQ ID NO: 482261 - DNA, 408 bp, Shigella sonnei; identical to SEQ ID NO: 52957

SEQ ID NO: 482262 - DNA, 849 bp, Shigella sonnei
atggtcacttttgagacagttatggaaattaaaatcctgcacaagcagggaatgagtagccgggcgattgccagagaactggggatctcccgcaataccgttaaacgttatttgcaggcaaaatctgagccgccaaaatatacgccgcgacctgctgttgcttcactcctggatgaataccgggattatattcgtcaacgcatcgccgatgctcatccttacaaaatcccggcaacggtaatcgctcgcgagatcagagaccagggatatcgtggcggaatgaccattctcagggcgttcattcgttctctctcggttcctcaggagcaggagcctgccgttcggttcgaaactgaacccggacgacagatgcaggttgactggggcactatgcgtaatggtcgctcaccgcttcacgtgttcgttgctgttctcggatacagccgaatgctgtacatcgaattcactgacaatatgcgttatgacacgctggagacctgccatcgtaatgcgttccgcttctttggtggtgtgccgcgcgaagtgttgtatgacaatatgaaaactgtggttctgcaacgtgacgcatatcagaccggtcagcaccggttccatccttcgctgtggcagttcggcaaggagatgggcttctctccccgactgtgtcgccccttcagggcacagtctaaaggtaaggtggaacggatggtgcagtacacccgtaacagtttttacatcccactaatgactcgcctgcgcccgatggggatcactgtcgatgttgaaacagccaaccgccacggtctgcgctggctgcacgatgtcgctaaccaacgaaagcatgggtaa

SEQ ID NO: 482263 - DNA, 246 bp, Shigella sonnei; identical to SEQ ID NO: 27417

SEQ ID NO: 482264 - DNA, 939 bp, Shigella sonnei; identical to SEQ ID NO: 13302

SEQ ID NO: 482265 - DNA, 720 bp, Shigella sonnei; identical to SEQ ID NO: 13301

SEQ ID NO: 482266 - DNA, 1308 bp, Shigella sonnei
atggtttggctggaaattatcgtagtacttggtgcaatattttttggtattcgccaggggggaatcggtattggtttatgtggcgggcttgggcttgccattctgactctgggatttggtctgcctatggggtcgccgccagtcgacgtgatcctgattattatgaccgttgttgtggcggcctcagccttacaggccgcaggcggaatggattatctggtatgcgtcgctggtaattttatgcggcgtaacccgaaatatatcaacataatcgcgccgattatcacctggtctatgaccattatggccggtactgggtttattgttttttccacgctgccggtgattgctgaagtggcgaaagagtccggtatccgtccttcccgcacgcttgccggttcggttgtcgcttcgcaggttgcgatttccggttcgccgatcagcgccgcaatggcggctatgctcactattatggaggtaaacggtgtcagttttattcaagtgatgtcggtatgtcttcccacctcttttgctgccgcgatggtcgccgcttttattgcttcccgacagggatgtgagttgcaggatgacgaggtctaccttgagcgcctgcaaaaaggactggtgcaaaaatacgagaataatagcagcatcaagccaggtgcgacgctctccgtcggattgttcctgctggcgacggtcgctattgttattcttgctgccttcccccaactgcgtccgggttttgatatcggtaaaccgatggaaacacgcgatatcattattatctgtatgctctctgccgcctgcctgatggtggtgctgtgtaagacggcgaccgatgccattattctcacctccacattccgtgcggggatgagttcgctggcggtaattctcggcattgtaacgttaggcaccacttttattgatgcgcatttaactgagattaaagatattgctggtgatattttgcaggcgtatccgatgttgttggcgctggttctttttggcacttgcgcgctgctctactcgcaaggtgcgaccacgccgttaattatcccgcttgccgtcgcgcttgacgtgcccacctgggcaattctggcgtcctatgtggccgtcaccggagtatttgtactgccaacgtatccaacatcactggctgccatggaatttgatactaccggcacaactcgtgtaggcaaatatgtgctgaatcatccatttatgctgcctgggttggggggaattattgtaagcgtaaagccaatgccgtctgtaacacctgctccttgcagactaaattag

SEQ ID NO: 482267 - DNA, 435 bp, Shigella sonnei; identical to SEQ ID NO: 13800

SEQ ID NO: 482268 - DNA, 351 bp, Shigella sonnei; identical to SEQ ID NO: 13801

SEQ ID NO: 482269 - DNA, 1770 bp, Shigella sonnei
atgagtcagaaatacctcattcgcatcgctgagctggaaaggctgctctctgagcaggctgaagccctccgtcagaaagaccagcaactgagtctggttgaagagacggaggccttcctgcgctctgcactggcacgtgccgaagaaaagatcgaagaagatgaacgggaaatagagcatctgcgggctcagatagaaaaactgcgccggatgctgttcggaacccgttctgaaaaactgcgtcgtgaggttgaacaggctgaagccctgctgaaacaacgcgagcaggaaagcgatcgttacagtgggcgtgaggatgacccgctggttccccgccagttgcgacagtcgcgccatcgtcgtccgttaccggcacatctcccccgtgaaatataccgcctggagcctgaagaaagctgttgcccggagtgtggcggtgagctggattatctgggggaagtcagcgcagaacaactggaactggtgagcagcgccctgaaagtgatccgcacagaacgggtaaaaaaagcctgtacaaaatgtgactgcatcgttgaagcaccggcaccatcccgtccgatagagcgtggtatcgcgggcccggggttacttgcccgcgtgttaacgggaaaatactgcgaacacctgccactgtatcgtcagagtgaaatctttgcccgccagggtgtcgaactgagccgtgccttactctccaactgggttgatgcgtgctgccagttaatgacgccgctgaatgatgccctgtacagttatgtgatgaacacccgcaaggttcacactgatgacacaccagtaaaagtactggcaccgggcaggaagaaggcgaaaacaggatatatctggacgtatgtccgggatgaccgaaatgccggttcgccagaacctccggcggtctggttcgcctactcaccggaccatcagggtaaacatccggagcaacaccttcgtcccttccggggtatcctgcaggcagatgcgttcgcaggttacgatcggctgttcagtgccgaacgtgaaggcggcgcgttgacggaagcaggatgctgggctcatgcgcggcgcaaaatccacgatgtatatatcagtaccaaaagcgcgacggcggaagaagcactgaaactaatcggcgaactgtacgccattgagcacgaaatacgcgggttgccggtgtctgaacgcctggcggtcaggcaaatgcagagtaaaccgctactgacttccctgtataagctgatgcaggagaaagaacacacgttatcgaaaaaatgccgtctgagagatgcgttccggtatatcaggaagcactgggttgcgttgtgcaacttctgtgatgacggtctggcggaggcggacaataacacagcggaaagagcgcttcgtgcagtctgtctcggaaagaaaaattacgtgttcttcggtagcgatcacggcggcgagcgtggtgcactgttgtacgggctgatcggcacctgccggttgaatggtatcgatccggaagcgtatctgcgccatatcctgagcgtactgccggaatggccttccaaccgagttgacgaactcctgccatggaacgtagtactcactctaataaataagcgtcaatacggtgctccgttgacgcttacgaattattgctggagtggcattaggctttgtgattgcgccaatgattatttagcactatcaaacatcagtatcgatggtttatacacaataaagacagatatggcggaatatagtctgttgtaa

SEQ ID NO: 482270 - DNA, 453 bp, Shigella sonnei
gtgccagcattgctgctggatgacggtactttgctgacggaaggcgtagcgattatgcagtatcttgccgacagcgtccccgaccgccagttgctggcaccggtaaacagtatttcccgctataaaaccatcgaatggctgaattacatcgccaccgagctgcataaaggtttcacacctctgtttcgcccagatacaccggaagagtacaaaccgacagttcgcgcgcagctggataagaagctgcaatatgtgaacgaggcactgaaggatgagcactggatctgcgggcaaagatttacaattgctgatgcctatctgtttacggttctgcgctgggcatacgcggtgaaactgaatctggaagggttagagcacattgcggcatttatgcaacgtatggctgaacgtccggaagtacaagacgcgctgtcagcggaaggcttaaagtaa

SEQ ID NO: 482271 - DNA, 861 bp, Shigella sonnei
atgaaaaatattctcgctatccagtctcacgttgtttatggtcatgcgggtaacagtgcggcagagtttccgatgcgccgcctgggcgcgaacgtctggccgctgaacaccgttcaattttctaatcacacccaatacggcaaatggactggctgcgtgatgccgcccagccatttaaccgaaattgtgcaaggcattgccgctattgataaattacacacctgtgatgccgtgttaagtggctatctgggatcggcggagcagggtgaacatatcctcggtatcgtccgtcaggtgaaagcagcgaatccgcaggcgaaatatttttgcgatccggtaatggggcatccggaaaaaggctgtatcgttgcaccgggtgtcgcagagtttcatgtgcggcacggtttgcctgccagcgatatcattgcgccgaatctggttgagctggaaatactctgtgagcatgcggtaaataacgtcgaagaagcggttctggcagcgcgcgaactcattgcgcaagggccacaaattgtgttggttaaacacctggcgcgagctggctacagccgtgaccgttttgaaatgctgctggtcaccgccgatgaagcctggcatatcagccgtccactggtggattttggtatgcgccagccggtaggtgttggtgatgtgacgagcggtttactgctggtgaaactgcttcagggggcaacgctgcaggaggtcctggaacatgtgaccgctgcagtctacgaaatcatggtgaccaccaaagcaatgcaggaatatgagctgcaagtggtggctgctcaggatcgtattgccaaaccagaacattacttcagcgcaacaaagctctga

SEQ ID NO: 482272 - DNA, 1275 bp, Shigella sonnei
atggcaagcagtaacttgattaaacaattgcaagagcgggggctggtagcccaggtgacggacgaggaagcgttagcagagcgactggcgcaaggcccgatcgcgctctattgcggcttcgatcctaccgctgacagcttgcatttggggcatcttgttccattgttatgcctgaaacgcttccagcaggcgggccacaagccggttgcgctggtaggcggcgcgacgggtctgattggcgacccgagcttcaaagctgccgagcgtaagctgaacaccgaagaaactgttcaggagtgggtggacaaaatccgcaagcaggttgccccgttcctcgatttcgactgtggagaaaactctgctatcgcggcgaacaactatgactggttcggcaatatgaatgtgctgaccttcctgcgcgatattggcaaacacttctccgttaaccagatgatcaacaaagaagcggttaagcagcgtctcaaccgtgaagatcaggggatttcgttcactgagttttcctacaacctgttgcagggttatgacttcgcctgtctgaacaaacagtacggtgtggtgctgcaaattggtggttctgaccagtggggtaacatcacttctggtatcgacctgacccgtcgtctgcatcagaatcaggtgtttggcctgaccgttccgctgatcaccaaagcagacggcaccaaatttggtaaaactgaaggcggcgcagtctggttggatccgaagaaaaccagcccgtacaaattctaccagttctggatcaacactgcggatgccgacgtttaccgcttcctgaagttcttcacctttatgagcattgaagagatcaacgccctggaagaagaagataaaaacagcggtaaagcaccgcgcgcccagtatgtactggcggagcaggtgactcgtctggttcacggtgaagaaggtttgcaggcggcaaaacgtattaccgaatgcctgttcagcggttccttgagtgcgctgagtgaagcggacttcgaacagctggcgcaggacggcgtaccgatggttgagatggaaaagggcgcagacctgatgcaggcgctggtcgattctgaactgcaaccttcccgtggtcaggcgcgtaaaactatcgcctccaatgccatcaccattaacggtgaaaaacagtccgatcctgaatacttctttaaagaagaagatcgtctgtttggtcgttttaccttactgcgtcgcggcaaaaagaattactgtctgatttgctggaaataa

SEQ ID NO: 482273 - DNA, 657 bp, Shigella sonnei
atgtctgataacgacgaattgcagcaaatcgcgcatctgcgccgtgaatacaccaaaggcgggttacgccgtcgcgatcttcccgccgatccattaaccctttttgaacgttggctctctcaggcgtgtgaagccaaactggcagaccctaccgcgatggtggtcgctaccgtggatgaacatgctcagccttatcaacgcatcgttttactcaaacattacgacgaaaaaggcatggtgttttacaccaacctcggcagccgtaaagcacatcaaattgaaaataatccgcgcgttagcctgctgttcccgtggcatacccttgagcgccaggtgatggtgatcggtaaagcggaacgactttcgactctcgaagtgatgaaatattttcatagccgcccgcgtgatagccagattggtgcatgggtttcgaagcagtccagtcgcatttctgcccgcggtatccttgaaagtaaattcctggagctgaagcagaagtttcaacagggcgaagtgccattgccgagcttttggggcggttttcgcgtcagccttgaacagattgagttctggcagggcggtgagcatcgcctgcatgaccgctttttgtaccagcgtgaaaatgatgcgtggaagattgatcgtcttgcaccctga

SEQ ID NO: 482274 - DNA, 324 bp, Shigella sonnei
atgaaaaaactgttactgatctgtttgccggtgcttctcaccggctgtagcgcgttcaatcaactggttgagcacatgcaaaccgctacgctggaataccagtgtgatgaaaaaccgttgacggtcaaactgaataatccgcgccaggaagtcagttttgtttacgataatcaactactgcatctcaaacagggcatttcagcgtctggtgtacgttacactgacggaatctatgttttctggtcgaaaggcgatgaagcgactgtctataaacgcgaccgcatcgtattgaataactgtcagttacaaaatccacagcgttga

SEQ ID NO: 482275 - DNA, 1110 bp, Shigella sonnei
atgaaatcgggccgctttattggcgttatgtcaggcaccagccttgatggtgttgatgttgtgttggcgacaatagatgaacaccgggtcgcacagctggcaagcttgagctggccgatcccggtgtctctgaaacaggctgtactggatatttgccagggccagcagcttacactttcgcagtttggacagcttgatactcaactcgggcgactttttgctgatgcggtcaatgccttgcttaaggaacaaaacctgcaggcgagagatatagttgcgatcggctgtcacggtcaaaccgtctggcatgaaccgacgggcgtggcaccacacactttacagattggcgataacaatcaaattgtggcacgcaccggaattacggttgtcggtgattttcgccgtcgcgatattgccttgggaggacaaggcgcaccgctggtacctgcgttccatcatgccttgctggctcacccaaccgagcgacgaatggtgctcaatattggcggcatcgccaatctgtcactgctcattcctgggcagccggttggcggctacgataccggtcctggtaacatgctgatggatgcctggatctggcgtcaggccggtaaaccttacgataaagatgccgagtgggcacgggcgggtaaagttattctcccactgctgcaaaatatgctcagcgacccatatttctcgcaacctgcaccgaaaagcaccggacgcgaatactttaactacggctggctggagcgccatttacgccattttccgggtgttgatccccgtgatgttcaggccacactggcagaactcaccgccgtgaccatttctgaacaagttttgttgagcggtggctgcgaacgattgatggtatgtggtggaggtagtcgtaacccgctactcatggcgcgtctggcggcattactgccaggcacagaagtcaccaccaccgatgccgttggcattagtggcgatgacatggaagcattggcattcgcctggcttgcctggcggacgctggcgggattaccaggaaatctgccttccgtcactggcgcaagccaggagacggtactgggggctattttccctgctaacccgtga

SEQ ID NO: 482276 - DNA, 468 bp, Shigella sonnei; identical to SEQ ID NO: 473290

SEQ ID NO: 482277 - DNA, 435 bp, Shigella sonnei; identical to SEQ ID NO: 459416

SEQ ID NO: 482278 - DNA, 237 bp, Shigella sonnei
gtgaagtttatgctcaatgcaacaggattgcccttacaagatctggtgttcggtgcgtccgtctattttcctccgtttttcaaagcattcgcgtttggattcgtcatctggcttgtcgtacaccgcctgcttcgtggctggatctacgccggtgacatctggcatcccttgttaatggatttatcgctgtttgcgatttgcgtttgccttgctctggcaatactgattgcgtggtaa

SEQ ID NO: 482279 - DNA, 858 bp, Shigella sonnei
atgtcaattaaaacaattaagtatttctcaacaatcattgtagcggtagttgcggttcttgccggatggtggctgtggaattattacatgcaatctccgtggacacgcgacgggaaaatacgcgcagaacaggtttctatcaccccacaggtgtcgggacgtattgttgagctgaatataaaagacaaccagctggttaacgcaggggatcttctgctcacgatcgataaaacgccctttcagatcgccgagctgaacgcacaggctcagctggcgaaagcgcaatctgacctcgcaaaagccaataacgaagcgaatcgtcgtcgtcatctctcacaaaattttatttctgccgaagaactcgataccgctaacctcaatgttaaagcgatgcaggccagtgttaatgccgcacaggccacgctgaaacagacacaatggcaactggcgcaaacggaaattcgcgccccggtgagtggacgggtgactaacctcactacccgcatcggcgattacgctgacaccgggaaaccgctttttgcccttgtcgacagccactcgttttacgtcattggttattttgaagaaaccaagttgcgccatatccgcgaaggtgcaccagcacaaattaccctctatagtgataacaaaacgttacagggtcacgtttccagtatcggtcgggcgatttatgatcagagcgttgaaagtgactcaagccttattccggatgtgaaacctaacgtcccctgggttcgtctcgcccaacgcgttcccgtccgctttgcgctggataaagttccaggcgatgtcacgctggtgtcgggcaccacctgtagcattgccgtaggtcaataa

SEQ ID NO: 482280 - DNA, 1923 bp, Shigella sonnei
atgtgtctggcgctgacggttgcctattatttgaatctggatgaaccctattgggcgatgacctcggctgcagtggttagctttcccaccgttggcggtgtcatcagcaaaagcctcggacgcatcgctggcagtttactgggagccattgcggcactgcttcttgccggacatacgctcaatgagccgtggttttttctattgagcatgtcggcgtggcttggcttttgtacctgggcctgtgcgcacttcacgaataacgtcgcgtatgcatttcaactggcgggctacacggctgccatcatcgcctttccgatggttaatattactgaggccagccagctgtgggatatcgctcaggcgcgcgtttgcgaggtgatagtcggtattttgtgcggcggcatgatgatgatgatcctgcctagcagttccgatgctactgcccttttaactgcattgaaaaacatgcacgcccgattactggaacatgccagtttactctggcagcctgaaacaaacgatgccattcgtgcagcacatgagggggtgattgggcagatactgaccatgaatttgctgcgtatccaggctttctggagccactatcgttttcgccagcaaaacgcgcgccttaatgcgctactccaccagcaattacgtatgaccagtgtcatctccagcctgcgacgtatgttgctcaactggccctcaccgccaggtgccacgcgagaaattctcgaacaattgctgactgcgctcgccagttcgcaaacagatgcttacaccgtcgcacgtattatcgccccgctacgcccgaccaacgtcgccgactaccggcacgtcgccttctggcagcgactacgttatttttgccgcctttatctgcaaagtagtcaggaattacatcgtctgcaaagcggtgtagatgatcatgccagactcgcacggacatccgctctggctcgtcataccgacaacgccgaagctatgtggagcgggctgcgtacattttgtacgttgatgatgattggcgcatggagtattgcatcgcaatgggatgccggtgccaatgcattaacgctggcagcaattagctgcgtactctactccgccgtcgcagcaccgtttaagtcgttgtcactgctgatgcgcacgctggtgttactttcgctattcagctttgtggtcaaatttggcctgatggtccagattagcgatctgtggcaatttttactgtttctctttccactgctggcgacaatgcagcttcttaaattgcagatgcccaaatttgccgcactgtgggggcaactgattgtttttatgggttcgtttatcgctgtcactaatcccccggtgtatgattttgctgattttcttaacgagaatctggcaaaaatcgttggcgttgcgctggcttggctagcgttcgccattctgcgtccaggatcggatgctcgtaaaagccgccgccatattcgcgcgctgcgccgggattttgtcgatcagctaagccgccatccaacactgagtggaagcgaatttgaatcgctcacttatcatcacgtcagtcagttgagtaacagccaggatgcgctggctcgccgttggttattacgctggggtgtagtgctgctgaactgttctcatgttgtctggcaattgcgcgactgggaatcgcgttccgatccgttatcgcgagtacgggataactgtatttcactgttgcggggagtgatgagtgagcgtggcgttcagcaaaaatcactggcggccacacttgaagaattacagcggatttgcgacagccttgcccgtcatcatcaacctgccgcccgtgagctggcggcaattgtctggcggctgtactgctcgctttcgcaacttgagcaagcaccaccgcaaggtacgctggcctcgtaa

SEQ ID NO: 482281 - DNA, 522 bp, Shigella sonnei; identical to SEQ ID NO: 473284

SEQ ID NO: 482282 - DNA, 897 bp, Shigella sonnei
atggttcagcgtattactattgcgccgcaaggcccggagttttcccgttttgtgatgggctactggcgattgatggactggaatatgtccgcccgccagctggtcagttttattgaagagcatctggatctcggcgtgaccaccgtggaccatgctgatatttatggtggctatcagtgcgaagcggcgtttggcgaggcactgaaactggcacctcacctgcgtgaacggatggaaatcgtcagtaaatgcggtatcgcgacgaccgcgcgtgaagaaaacgtcattggtcattacatcactgaccgcgatcacatcattaagagcgccgaacagtcgctaattaatctcgcgaccgatcatctggatctgctgttaatccaccgaccagacccgttaatggatgccgatgaagtggcggacgcgttcaaacatctgcatcagagcggcaaagtgcgtcattttggcgtatcgaactttacgcctgcgcaatttgccctgttgaaatcacgtctgccgtttacccttgccactaatcaggtggaaatatccccggtgcatcagccgttactgctggatggcacgctcgaccaactacaacaactgcgtgttcgtccgatggcgtggtcctgccttggtggtggtcgtctgtttaatgatgattatttccagccgctgcgtgatgaactggctgtggtggcggaggagttaaacgcgggctcgattgaacaggtggtttacgcctgggtattacgtttaccgtcgcagccgctgccaattatcggctcaggtaaaattgagcgcgtacgggcagctgtcgaagcagaaacactgaaaatgacccgtcaacaatggtttcgtatccgtaaagcggcactggggtacgacgtaccgtaa

SEQ ID NO: 482283 - DNA, 240 bp, Shigella sonnei; identical to SEQ ID NO: 473282

SEQ ID NO: 482284 - DNA, 600 bp, Shigella sonnei
atgaacaaacacaccgaacatgatactcgcgaacatctcctggcgacgggcgagcaactttgcctgcaacgtgggttcaccgggatggggctaagcgaattactaaaaatcgctgaagtgccgaaagggtccttctatcactactttcgctctaaagaagcgtttggcgttgctatgcttgagcgccattacgccacatatcaccagcgactgactgagttgctgcaatccggcgaaggtaactaccgcgaccgcatactggcttattaccagcaaacactgaaccagttttgccaacatggaaccatcagtggttgcctgacagtaaaactctctgccgaagtgtgcgatctgtcagaagatatgcgtagcgcgatggataaaggcgctcgcggcgtgattgccctgctctctcaggcgctggaaaatggccatgagaaccactgtttaaccttttgtggcgaaccgctgcaacaggcacaagtgctttacgcactatggctgggtgcgaatctgcaggccaaaatttcgcgcaattccgagccactggaaaacgcgctggcacatgtaaaaaccattattgcgacgcctgccgtttag

SEQ ID NO: 482285 - DNA, 1098 bp, Shigella sonnei
atgtcatctgaaaaactgtattccccactgaaagtgggcgcaataactgcggcaaaccgtatttttatggcaccgctgacgcgtctgcgcagtattgaaccgggtgacatccctaccccgttgatggcggaatactatcgccaacgtgccagtgccggtttgattattagcgaagccacgcaaatttctgcccaggcaaaagggtatgctggtgcacctggcatccatagtccggaacaaattgccgcatggaaaaaaattaccgctggcgttcatgctgaaaatggtcatatggccgtacagctgtggcacactggacgcatttctcacgccagcctgcaacctggcggtcaggcaccggtagcgccttcagcacttagcgcgggaacacgtacttctctgcgcgatgaaaatggtcaggcgatccgtgttgaaacatccatgccgcgtgcgcttgaactggaagagattccaggtatcgtcaatgatttccgtcaggccattgctaacgcgcgtgaagccggttttgatctggtagagctccactctgctcacggttatttgctgcatcagttcctttccccttcttcaaaccatcgtaccgatcagtacggcggcagcgtggaaaatcgcgcacgtttggtactggaagtggtcgatgccgggattgaagaatggggtgccgatcgcattggcattcgcgtttcgccaatcggtactttccagaacacggataacggcccgaatgaagaagccgatgcactgtatctgattgaacaactgggtaaacgcggcattgcttatctgcatatgtcagaaccagattgggcgggaggtgaaccgtatactgatgcgttccgcgaaaaagtacgcgcccgtttccacggtccgattatcggcgcaggtgcatacacggtagaaaaagccgaaacgctgattggcaaagggttaattgatgcggtggcatttggtcgtgactggattgcgaacccggatctggtcgcccgcttgcagcgcagagctgagcttaacccacagcgtgccgaaagtttctacggtggcggcgcggaaggctataccgattacccgacgttgtaa

SEQ ID NO: 482286 - DNA, 408 bp, Shigella sonnei
atgcgtcttcttcataccatgctgcgcgttggcgatctgcaacgctccatcgatttttataccaaagtgctgggcatgaaactgctgcgtaccagcgaaaacccggaatacaaatactcactggcgtttgttggctacggcccggaaaccgaagaagcggtgattgaactgacctacaactggggcgtggataaatacgaactcggcactgcttatggtcacatcgcgcttagcgtagataacgccgctgaagcgtgcgaaaaaatccgtcaaaacgggggtaacgtgacccgtgaagcgggtccggtaaaaggcggtactacggttatcgcgtttgtggaagatccggacggttacaaaattgagttaatcgaagagaaagacgccggtcgcggtctgggcaactaa

SEQ ID NO: 482287 - DNA, 648 bp, Shigella sonnei
atgtccgataacgctcaacttaccggtctgtgcgaccgttttcgtggtttttatcctgttgtgatcgatgttgaaacagccggatttaacgccaaaaccgatgcgctgcttgagattgccgccatcaccctgaaaatggatgaacaaggctggctgatgccggacaccacattacatttccacgtcgaaccatttgtcggcgcaaatttgcagccagaggccctcgccttcaacggcattgacccgaacgatcccgatcgcggcgcggtcagcgaatacgaggcgctgcacgaaatttttaaagttgtacgtaaaggtattaaagcgagcggctgtaaccgcgccattatggtggcgcacaatgccaattttgatcacagctttatgatggccgccgcagaacgcgcctcactgaaacgtaacccgttccaccctttcgccacttttgacactgctgcactggccgggctggcactcggacaaaccgtattgtcaaaggcttgccagaccgctggcatggacttcgacagcacccaggcgcactccgcgctgtacgacaccgaacgcactgctgtgctgttttgtgaaatcgtcaaccgctggaaacgtctgggaggctggccgctacctgccgccgaagaggtgtaa

SEQ ID NO: 482288 - DNA, 1536 bp, Shigella sonnei
atggcagataatccagacccttcatcgctcctgccggacgtgttttcactggcgacccgcgactggtttcttcgcgcctttaaacagccgaccgctgtccagtcgcaaacctggcatgtggcggcgcgaggcgaacatgcgctggtgattgcaccgactggctccgggaaaacgctggcagcatttctctacgccctcgatcggctcttccgcgaaggcggcgaagatacccgcgaggcgcataagcgtaaaacctcacgcatcctctatatttcaccgataaaagccctgggcaccgacgttcagcgcaacttgcagatcccgttgaaaggtattgccgatgaacggcggcggcgcggcgaaacggaagtcaatcttcgcgtagggatccgtactggcgatacgcctgcacaggaacgcagcaaactcacccgtaatccgccggatattctgatcaccacacccgaatcactctatctgatgctgacctcccgcgcgcgcgaaacgctacgcggcgtcgaaacggtaattattgatgaagtccacgcggtagcgggcagtaaacgtggtgcgcatctggcgttaagtctggagcggctcgatgcgctgctccacacctcagcacagcgaattggcctttctgccactgtgcgctcagccagcgatgtggcagcatttcttggtggcaatcgcccggttacggtagtcaacccgcccgcaatgcgccatccgcagatacgaattgtcgtaccggtcgccaatatggatgatgtctcatcggtcgccagcagcaccggcgaagacagccatgccggccgggaaggctccatctggccatatattgaaacgggtatccttgatgaagtgttgcgccatcgctcgaccattgtctttactaattcacgtgggctggcggaaaaactgacggcacgattaaatgagctttacgccgcacgcttacagcgttccccgtctatcgccgttgatgcggcccatttcgagtcgacctccggcgcaacctctaaccgtgtacaaagtagcgacgtttttattgcccgctcacaccacggctccgtctctaaagaacaacgagcaatcaccgagcaggcgctgaaatcgggtgagttacgctgcgtggtcgcaacctccagtctcgaactggggattgatatgggcgcagtggatctgatgattcaggtggcaacgccgctttctgttgccagtgggttacaacgcattggtcgcgccggacatcaggttggcggtgtatctaaagggctgtttttccctcgtacccggcgtgacttagtcgattccgcagtcattgtagagtgtatgttcgcaggcaggctggaaaacctgacaccgccgcataatccactcgacgtccttgcgcagcaaaccgttgccgccgcggcgatggatgcattacaggtagacgaatggtactcccgcgtacgccgtgccgcaccgtgggtcgttctgcccggctccccttctggcgtggtgaaggtaacggacgtccggctgaattag

SEQ ID NO: 482289 - DNA, 1671 bp, Shigella sonnei
atgatcggcgattttcttcatttgctggcggatggcgcgttcttttccgggactattcccccgtggctggcagaagaaaatacgatcgccaatattcaggggttgattgacgagcaacgcaacgcgacgggcatcgttccggggagtcgccatctggtcctcgaacggtgccgtgatgaaattggcgactggcgtattattttgcactctccctatggaagacgggtgcatgaaccctgggcgctggcgattgccgggcgaatacatgccctatggggcgctgacgcgtctgtggtcgccagtgatgacggcattgttgcgcgcattcctgacactgatggtaaattgcccgacgccgcgatttttttgtttgaaccagaaaagttgctgcaaattgtccgcgaggcggtaggcagctcggcacttttcgccgcccgttttcgcgaatgcgccgcgcgggcattattaatgccggggcgcactccgggccatcgcaccccgctttggcaacaacggctgcgcgccagtcagttgctggaaatcgctcagggatatccggattttccggtcattctcgaaaccctacgcgaatgtctgcaagatgtttatgatcttcccgcactggaacgtttgatgcgtcgcctgaacggtggcgaaattcaaatatccgatgtaacgaccactacgccctcgcctttcgccacaagtttattgttcggctatgtcgcggaatttatgtaccagagcgacgccccgctggcagagcgccgggcatccgtactgtcgctggacagcgagttactgcgcaatctactcggacaggtcgatccgggggaattactcgacccgcaggtcattcgccaggtggaagaagagttgcaacgactggctcctggcagaagagcgaaaggtgaagaaggattgttcgacctgctgcgcgaactggggccaatgaccgttgaagacctggcgcaacggcatacaggcagcagtgaagaggttgcgtcgtatctggaaaatcttcttgcagtaaaacgaatcttcccagcgatgattagcggacaggagcgtcttgcctgtatggatgatgccgccaggctgcgtgatgccctcggcgtacgactaccagagtcattgccagagatttatttacatagagtcagttacccgcttcgcgacctctttctgcgctatctccgggctcatgctctggtcacggctgaacaactggctcatgagtttagtctcggtattgccattgtcgaagagcagcttcagcaactgcgtgaacagggtctggtgatgaatctgcaacaagacatctgggtgagcgatgaagtatttcgtcgtctgcgtttgcgctcgctgcaagccgccagagaagcgacgcgtcccgttgcagccacgacctatgcgcgattgctgctggaacgtcagggcgtattacccgcctcactctgggaaagccagatcctgcctgcccgcgtacgcgactattcgtcagaaatgctcgatgaattactggcaaccggtgcggttatctggtcggggcaaaaaaactgggtgaagatgacggcctggtggcactgcatctacaggaatatgctgcagaatcgttcactcccgccgaagcggatcaggcgaatcgttcggcgctgcaacaagcgatag

SEQ ID NO: 482290 - DNA, 786 bp, Shigella sonnei
atgggcgctggtctggcaaggcgtcatcaccagcgacatttgggcaccgttacgcgccctcacccgcagcagttccaacgcacgcacctcaactcgccgcagtcaccgggctcgtcgtggacgtcctgtctatgcgcaacccgtctcgccgctggtatcttacaacacaccaaatctggctggatgctggcgctggcggaaaatatgctcgaccgctacggcatcatcagtcgtcaggcggtgatagccgaaaatatccctggcgggtttccatcgatgcaaacgctttgtcgaagtatggaagactccgggcgaattatgcgaggtcgttttgtagaaggtctgggtggcgcgcaattcgctgaacgtctgactattgaccgattgcgcgatctggcgacacaagccacgcaaacgcgccactatacaccagtggcgctctctgccaacgatccggctaatgtgtggggaaatcttctgccctggcctgcacatccggcaacgctggttccaacgcgtcgggcgggtgcgctggtggtcgtttctggcggcaaattgttactctatctggcgcaaggtggcaaaaaaatgctggtctggcaggaaaaagaggaattactcgccccagaggttttccacgcgctgactaccgcactgcgtcgcgaaccacggctgcgctttacgctaacagaagtgaatgatctaccggtccggcaaacgccgatgtttacgctgctgcgtgaggcgggattttcaagttcgccacaagggctggattggggatag

SEQ ID NO: 482291 - DNA, 348 bp, Shigella sonnei
atgagcaccactatcgaaaaaatccaacgccagattgctgaaaacccgatcctgctgtacatgaaaggttcaccgaaactgccgagctgcggtttctctgcccaggcagtccaggcgcttgccgcatgtggcgaacgttttgcctatgttgatattctgcagaatccggacattcgtgcggaactgccgaaatatgctaactggccgaccttcccgcaactgtgggttgacggcaagctggtcggcggttgtgatatcgtgatcgaaatgtatcagcgtggcgaactgcagcagctgatcaaagaaactgccgctaaatacaagtctgaagagccggacgcggaataa

SEQ ID NO: 482292 - DNA, 816 bp, Shigella sonnei; identical to SEQ ID NO: 459827

SEQ ID NO: 482293 - DNA, 582 bp, Shigella sonnei; identical to SEQ ID NO: 459826

SEQ ID NO: 482294 - DNA, 1170 bp, Shigella sonnei
atgaaaattaactatccgttgctggcgctggcgattggcgcgtttggtatcgggacaacggagttctcgccaatgggcttgttgcccgtcattgcgcgcggtgtggatgtctcgattcccgctgccggaatgttaatcagtgcctatgcagttggcgtaatggtgggcgcgccgctgatgacgcttctactttctcatcgtgcccgccgcagtgcgttgattttcctgatggcaattttcacgctcggcaacgtactttccgccatcgcgccggattatatgaccctgatgctttcacgcattttgaccagcctgaatcacggagcattttttggtttgggttcagtcgtggccgcaagcgtggtgccaaaacataaacaggccagcgcagttgccactatgtttatggggttaaccctggcaaatatcggtggcgtgccggcggcgacctggttgggtgaaaccatcggctggcggatgtcatttctggcaacggcggggctgggagtgatttcaatggtaagtctgttcttctcattacctaaaggtggtacaggggcacgacctgaagtgaaaaaagagctggcggtattaatgcgtccgcaggtgctgtctgcattgctgacgacggtactgggagctggcgcaatgtttactctctacacctatatctctccggtactgcaaagtattacccacgcaacaccggtgttcgtcacggcaatgctggtgctgattggtgtcggattctctatcggtaactatctcggcggcaaactggcagatcgttcagttaacggcacgttgaaaggctttttgttgctgctgatggtgattatgctggcaaccccgttcctggcccgcaatgagttcggcgcagctattagcatggtggtgtggggcgcagcaacctttgcggtcgtaccgccgttacagatgcgcgtgatgcgtgtcgccagtgaagcgccaggtctgtcttcatcagtcaatattggtgcctttaatcttggaaatgcgctgggagcagcggctggtggtgcggtaatttccgctgggctgggatacagctttgtgccggtgatgggggcgattgtcgcgggactggcattattgctggtgtttatgtcagccagaaaacaacctgaaacagtttgcgttgccaacagctaa

SEQ ID NO: 482295 - DNA, 1026 bp, Shigella sonnei
atggcaacaataaaagatgtagcgaaacgagcaaacgtttccactacaactgtgtcacacgtgatcaacaaaacacgtttcgtcgctgaagaaacgcgcaacgccgtgtgggcagcgattaaagaattacactactcccctagcgcggtggcgcgtagcctgaaggttaaccacaccaagtctatcggtttgctggcgaccagcagcgaagcggcctattttgccgagatcattgaagcagttgaaaaaaattgcttccagaaaggttataccctgattctgggcaatgcgtggaacaatcttgagaaacagcgggcttatctgtcgatgatggcgcaaaaacgcgtcgatggtctgctggtgatgtgttctgagtacccagagccgttgctggcgatgctggaagagtatcgccatatcccaatggtggtgatggactggggtgaagcaaaagctgacttcaccgatgcggtcattgataacgcgttcgaaggcggctacatggccgggcgttatctgattgaacgcggtcaccgcgaaatcggcgttatccccggcccgctggaacgtaacactggcgcaggccgccttgtcggttttatgaaggcgatggaagaagcaatgatcaaggtgccggaaagctggattgtgcagggtgactttgaacctgaatccggttatcgcgccatgcagcaaatcctgtcgcagccgcatcgccctactgccgtcttctgtggtggcgatatcatggcaatgggcgcactttgtgctgctgatgaaatggggctgcgcgtcccgcaggatgtttcgctaattggttatgataacgtgcgcaacgcccgctattttacgccggcgctgaccacaatccatcagccaaaagattcgctgggtgaaacagcgttcaacatgctgttggatcgtatcgtcaacaaacgtgaagaaccgcagtccattgaagtgcatccgcgcttgattgaacgccgctccgtggctgacggcccgttccgcgactatcgtcgttaa

SEQ ID NO: 482296 - DNA, 933 bp, Shigella sonnei
atgtggtcagaatattcactcgaagttgttgatgcggtagcgcgtaatggtagttttagcgctgcggcacaggagctgcatcgcgttccttctgcggtcagctataccgtgcgtcagctggaagagtggctggcggtgccgctctttgaacgacggcaccgtgatgtggagctgaccgctgctggagcgtggtttctcaaagaagggcgctctgttgtcaaaaaaatgcagatcacccgccagcaatgtcagcagatagcgaacggctggcgcggtcagttagctatcgcagtggataatattgtcaggccagaacgtacacggcagatgatcgttgatttttatcgccattttgatgatgtcgaacttcttgtctttcaggaagtgttcaacggtgtctgggatgcgctttccgacgggcgcgtggaactggcgattggcgcaacacgcgcgattccggtaggcggtcgttatgccttccgggatatggggatgctaagctggagttgcgttgttgccagccatcacccgctggcgttgatggatggcccgttcagcgatgatacgttgcgcaactggccgtcgttggtgcgcgaagacacctcgcgaacgctacctaaacgtattacctggttgctggataaccaaaaaagagttgtcgtgcctgactgggaatcatcggcaacctgtatctcggcaggattatgcatagggatggtgccaacacatttcgccaaaccgtggcttaatgaggggaagtgggtagcacttgaactggaaaacccctttccggattcggcatgttgtctgacatggcagcaaaatgatatgtcgcctgcgttaacctggttgcttgagtatctcggcgatagtgagacgctgaataaggagtggctgcgggagccggaagagactcccgcaacgggtgattaa

SEQ ID NO: 482297 - DNA, 1212 bp, Shigella sonnei
atgcaacctgggaaaagatttttagtctggctggcgggtttgagcgtactcggttttctggcaaccgatatgtatctgcctgctttcgccgccatacaggccgacctgcaaacgcctgcgtctgctgtcagtgccagccttagtctgttccttgccggttttgccgcagcccagcttctgtgggggccgctctccgaccgttatggtcgtaaaccggtattattaatcggtatgacaatttttgcgttaggtagtctggggatgctgtgggtagaaaacgccgctacgctgctggtattgcgttttgtacaggctgtgggtgtctgcgccgcggcggttatctggcaagcgttagtgacggattattatccttcacagaaagttaaccgaatttttgcgaccatcataccgctggtgggtctatctccggccctggctcctctgttaggaagctggctgctggtccatttttcctggcaggcgattttcgccaccctgtttgccattaccgtggtgctgattctgcctattttctggctcaaacccacgacgaaggcccgtaacaatagtcaggatggtctgacctttaccgacctgctacgttctaaaacctatcgcggcaacgtgctgatatacgcggcctgttcagccagtttttttgcatggctgaccggttcaccgttcatccttagtgaaatgggctacagcccggcagttattggtttaagttatgtcccgcaaactatcgcgtttctgattggtggttatggctgtcgcgccgcgctgcagaaatggcaaggcaagcagttattaccgtggttgctggtgctgtttgctgtcagcgtcattgcgacctgggctgcgggcttcattagccatgtgtcgctggtcgaaatcctgatcccattctgtgtgatggcgattgccaatggcgcgatctaccctattgttgtcgcccaggcgctgcgtcccttcccacacgcaactggtcgcgccgcagcgttgcagaacactctacaactgggtctgtgcttcctcgcaagtctggtagtttcctggcttattagtatcagcacgccattgctcaccaccaccagcgtgatgttatcaacagtagtgctggtcgcgctgggttacatgatgcaacgttgtgaagaagctggctgccagaatcatggcaatgccgaagtcgctcatagcgaatcacactga

SEQ ID NO: 482298 - DNA, 1149 bp, Shigella sonnei
atgagttcatcgtgtatagaagaagtcagtgtaccggatgacaactggtaccgtatcgccaacgaattacttagccgtgccggtatagccattaacggttctgccccggcggatattcgtgtgaaaaaccccgatttttttaaacgcgttctgcaagaaggctctttggggttaggcgaaagttatatggatggctggtgggaatgtgaccgactggatatgttttttagcaaagtcttacgcgcaggtctcgagaaccaactcccccatcatttcaaagacacgctgcgtattgccggcgctcgtctcttcaatctgcagagtaaaaaacgtgcctggatagtcggcaaggagcattacgatttgggtaatgacttgttcagccgcatgcttgatcccttcatgcaatattcctgcgcttactggaaagatgccgataatctggaatctgcccagcaggcgaagctcaaaatgatttgtgaaaaattgcagttaaaacctgggatgcgcgtactggatattggctgcggctggggcggactggcacactacatggcatctaattatgacgtaagcgtggtgggcgtcaccatttctgccgaacagcaaaaaatggctcaggaacgctgtgaaggcctggatgtcaccattttgctgcaagattatcgtgacctgaacgaccagtttgatcgtattgtttctgtggggatgttcgagcacgtcggaccgaaaaattacgatacctattttgcggtggtggatcgtaatttgaaaccggaaggcatattcctgctccatactatcggttcgaaaaaaaccgatctgaatgttgatccctggattaataaatatatttttccgaacggttgcctgccctctgtacgccagattgctcagtccagcgaaccccactttgtgatggaagactggcataacttcggtgctgattacgatactacgttgatggcgtggtatgaacgattcctcgccgcatggccagaaattgcggataactacagtgaacgctttaaacggatgtttacctattatctgaatgcctgcgcaggtgctttccgcgcccgtgatattcagctctggcaggtcgtgttctcacgcggtgttgaaaacggccttcgagtcgctcgctaa

SEQ ID NO: 482299 - DNA, 642 bp, Shigella sonnei
atgtttacggggattgtacagggcaccgcaaaactggtgtcgattgacgagaaaccaaattttcgtacgcatgtggtggagttacccgaccacatgctggacggcctggaaacaggtgcttccgtggcgcataacggttgctgcctgaccgtgacggaaattaacggcaaccatgtcagttttgacctgatgaaagaaacgttacgcattaccaatcttggcgatttaaaagtgggggattgggtaaacgttgagcgtgcggcaaaattcagcgatgaaattggcggacacttaatgtcaggtcatattatgaccaccgctgaagtggcgaaaatattaacctcggaaaataatcgccagatctggtttaaagtccaggatagtcagttgatgaaatatatcctgtacaaaggatttattggcatcgacggtattagcctgaccgtcggcgaagtcacgccaacgcgtttttgcgtccatttaattccggaaactctggaacgcacgactcttgggaagaaaaaactcggcgcacgcgtcaacattgaaattgatccacaaactcaggcagtggtagatacggtagaacgtgtgctggcggcacgagaaaatgccatgaatcaaccaggtacagaagcctga

SEQ ID NO: 482300 - DNA, 1374 bp, Shigella sonnei
gtgcagaagtatatcagtgaagcgcgtctgttattagcattagcaatcccggtgattctcgcgcaaatcgcccaaactgcgatgggttttgtcgataccgtgatggcgggcggctatagtgccaccgacatggcggcggtcgctatcggtacttctatctggcttccggcgatcctctttggtcacggactgctgctggcattaacgccggttatcgcgcaattaaatggttccggtcgacgtgagcgcattgcgcatcaggtgcgacaaggtttctggctggcaggttttgtttccgttctcattatgctggtgctgtggaatgcaggttacattatccgctccatggaaaacatcgatccggctctggcggacaaagccgtgggttatctgcgtgcgttgttgtggggcgcgccaggctatcttttcttccaggttgcccgtaaccagtgtgaaggtctggcaaaaaccaagccgggtatggtaatgggctttatcggcctgctggtgaacattccggtgaactatatctttatttatggtcatttcggtatgcctgagctcggtggcgttggttgtggcgtggctactgcggcggtgtattgggttatgttccttgccatggtttcttacattaaacgcgcccgctccatgcgcgatatccgtaacgaaaaaggcaccgcaaaacccgatcctgcggttatgaaacgactgattcaactcggtttgccgattgcgctggcactattctttgaagtgacactgtttgccgtcgtggctctgttagtgtctccgctcggtattgttgatgtcgcaggacaccagattgccctgaactttagttcactaatgttcgtgcttccaatgtcgctggcggcagcggtaactatccgcgtaggttatcgtctgggtcagggctcaacgctggatgcgcaaaccgctgctcggaccgggcttatggtgggtgtctgtatggcaaccctgacggccattttcacggtttcactgcgggagcaaatcgccctgttgtacaacgacaatcccgaggttgtaacgctggctgcgcatttgatgttgctggcggcggtatatcagatttctgactcaatccaggtgattggcagtgggattttgcgtggttataaagatacgcgttccattttctatatcacctttacagcttactgggtgctgggcttgccaagcggctatattctggcactgaccgatctggtcgttgaacctatggggccagcaggcttctggataggctttattatcggcctgacatcggcagccattatgatgatgctgcgtatgcggttcctgcaacgtatgccgtcagccatcattctgcaacgagcgtcccgctaa

SEQ ID NO: 482301 - DNA, 1257 bp, Shigella sonnei
atgggatctgatgcgaaaaacttgatgagcgacgggaatgtgcaaattgttaagaccggcgaggtcattggcgcgacgcaacttactgaaggcgagttgattgttgaagctggcggaagagccgaaaataccgtggtcacgggggctggctggttgaaagtggcaaccggtgggatcgccaaatgcacacagtacggtaacaatggcacgctatcggtcagcgacggtgccattgccacagatattgttcagtccgagggaggcgcaattagtctctctacgctcgctacggttaatggccgccatcccgaaggtgaattcagcgttgatcagggttatgcctgcggtttgttgctggaaaatggcggtaacctgcgtgtactggaaggacatcgcgcggaaaaaatcattctcgatcaagagggcggcctgttggttaatgggacaacctcagcggtcgtggtagatgaaggtggtgaattgttggtgtatccaagtggagaagccagcaattgtgagattaatcagggcggcgtttttatgctggccgggaaagccagtgatacgttgcttgctggtggcaccatgaataatctcggtggtgaagactctgacactattgttgagaatggatccatttatcgtctggggacggatggccttcagctctacagttccggtaagacgcaaaacctgtcggtgaatgtgggggggcgggctgaagtgcatgccggtacgctggaaaatgcggtaatacaaggtggaacagtgatcctgttgtcacccaccagcgcggacgaaaattttgtcgtagaggaagatcgcgcaccggttgaactgaccgggagtgttgcattactggacggcgcttcaatgattattggttatggcgcagagctgcaacaatcaacgattactgtacagcagggcggtgtgttgattctcgacggcagtacggtaaaaggtgacagcgtcactttcattgttggtaacatcaatctgaatggcggaaaactgtggctgatcactggtgcggcaacgcatgtgcaactgaaagtgaaacgcctgcgcggagagggagcgatttgcctgcaaaccagtgcgaaagaaatttcacctgacttcatcaatgtgaaaggggaagttaacggggatatacgcgttgagataacagatgccagtcggcaaactctgtgtaacgctctgaaattacagccagacgaagacgggattggcgcaacgctccagcctgcgtaa

SEQ ID NO: 482302 - DNA, 306 bp, Shigella sonnei; identical to SEQ ID NO: 472803

SEQ ID NO: 482303 - DNA, 1605 bp, Shigella sonnei
atgaaaaaaattgctattgtgggtgccgggcctacggggatctacaccttattctcgcttctacagcaacaaactccactttctatttctatcttcgagcaggctgacgaggccggtgtcgggatgccatacagtgatgaggaaaactcaaaaatgatgctggcaaatattgccagtattgaaataccgccgattaattgtacgtatctcgaatggctacaaaagcaagaagccagccatctccagcgttatggcgttaaaaaagaaaccttgcacgatcgtcagtttttaccgcgaattctgctgggcgaatatttccgcgatcaatttttacgattagtagaccaggcacgacagcaaaaatttgcagtggctgtttatgaatcatgccaggttaccgatctgcaaattacaaatgctggcgtcatgctcgctacaaatcaggatttacccagcgagacgtttgatttagcggtgattgccacgggtcacgtctggcctgatgaagaagaagcaaccagaacgtattttcccagcccgtggtcaggcctgatggaagcaaaggtcgatgcgtgtaacgtgggtattatgggaacatccttgagcggactggatgcggcaatggcagtggctattcagcatggttcgttcattgaagatgataaacaacacgtcgtttttcaccgcgataacgcaagtgaaaagctaaatatcacgttgatgtcgcgcacgggtattttacccgaagccgatttctattgccctattccctacgagcccttacacatcgtcaccgatcaggcattaaatgctgagattcaaaaaggcgaatatggccttttggatcgggtatttagattgatagtagaggaaatcaagtttgctgatccagactggagccaacgcatagccttagagagcctgaatgtcgattcctttgctcaagcctggtttgccgagcgcaaacaacgcgacccatttgactgggcagaaaaaaatctccaggaagtcgaacgcaataaacgagaaaaacatactgttccctggcgttatgtcattctgcgcctgcatgaagccgtacaggaaattgttccacatctgaatgaacacgaccataaacggttcagtaaaggccttgcccgggttttcatcgataattatgcggcaatcccttcagagtctattcgtcggctgctggccttacgtgaagcggggatcattcatattctcgccctcggtgaagactacaaaatggaaattaatgagtcgcgcaccgtcctgaaaacggaagacaacagctactcgtttgacgtttttattgatgcccgcggacagcgtccgcttaaagtgaaagatattcctttccctgggctacgcgagcaattacagaaaacaggggatgaaatccctgatgttggcgaagattatacgttacagcaacccgaagatattcgtggacgcgtagcgttcggcgcgttgccctggttgatgcacgaccagcctttcgttcagggacttacggcatgtgcagaaattggtgaggcgatggctcgggcggtcgtaaagcctgcatcccgtgctcgtcggcgtctttcgtttgattaa

SEQ ID NO: 482304 - DNA, 765 bp, Shigella sonnei
atgtatcgctggttcctgcgccatttcccacgcggcggtagttatgccgatattcatcatgcactgattgaggaaggatatacggactgggcggagagtctggttgagtatgcgtggaaaaaatggctggcggatgaaaacttcgcgcatcaggaagtttcctctatgcaaaaactggccacagaccccggagagataccattttgcagtcagtttgcccgcagcgacgatcatgctcgcatcggctgttgtgaggataacgcccgaatcgtaaccgctgggtatgccgcgcaaattgccagtatgggttatagcgtgcggattggaagtgtcggctttaacagtcacattggcagctccggtgaacgcgcacgggttgctgtaaccggtaattcttcgcggataagcagcgctggagatagtagtcggattgcgaataccggaatgcgagtacgcgtttgtacattgggtgaacggtgtcatgtcgccagtaatggtgacctggtgcaaatcgccagctttggcgcaaacgccagaattgccaacagcggcgacaatgtacacatcattgccagcggtgaaaattcaacggtagtgagcacgggcgtggtcgactcaattattctcgggccagggggaagcgccgcactggcatatcatgacggcgaaagagttcgcttcgccgtcgccattgaaggtgaaaacaatattcgaaccggagtccgctatcgtcttaatgaacagcatcagtttgttgagtgctga

SEQ ID NO: 482305 - DNA, 786 bp, Shigella sonnei
atgaacccgtcgcaacatgctgaacagtttcagagccagttagcgaactatgtgccacagttcactcccgaattttggccggtgtggttgatcattgccggagtattgctggttgggatgtggttggtgttggggctgcacgccttgcttcgtgctcgtggcgtgaagaaatcagccaccgatcatggtgagaaggtttatctttacagcaaagcggtcagattatggcactggtcgaatgcgttactctttgtattgttgctggcaagtgggctgataaatcactttgcgatggtgggcgcaactgcggttaaaagtctggttgcggtgcatgaagtttgcggatttttgttactggcatgctggctcggctttgtgctgatcaatgccgttggggataatggtcaccactatcgcattcgtcgtcaggggtggctggaacgagcggcaaaacaaacacgattttatttgtttggcattatgcagggggaagaacatcctttcccggcaacaacacagtctaaatttaatcccttacagcaggtcgcctatgttggtgtcatgtgtggattgctgccgttgttactattgacggggctgttgtgtctctatccgcaagccgtgggagatgtgtttcctggcgtaagatactggttattgcaggcgcattttgctctggcatttataagcctcttttttatcttcggacatctttatctttgcaccacggggcgtacgccacacgaaacctttaaaagcatggtcgatggctatcaccggcactaa

SEQ ID NO: 482306 - DNA, 669 bp, Shigella sonnei
atgtccttcactcgacgcaaatttgttctggggatgggaacagtaatcttttttactggttctgcgtcttctctgttagcgaacacgaggcaagaaaaggaagttcggtatgccatgattcatgacgagtcacggtgcaatggctgtaatatttgcgcccgcgcatgccgtaaaactaaccacgtccccgctcagggaagccgtttatcgatagcacacattccagtcaccgataacgacaacgaaacgcagtatcacttttttcgccagtcatgtcagcactgcgaagatgctccgtgcatcgacgtatgcccgacaggggcgtcgtggcgtgatgagcaggggatcgtgcgggtagaaaaatcgcagtgcatcggctgcagttattgcattggcgcttgtccgtaccaggttcgctaccttaaccctgtcactaaagtggcagataaatgtgatttctgcgctgagtcccgactggcaaaaggctttccgcccatttgcgtcagcgcctgtccggaacacgcattgatctttggtcgcgaagatagcccagaaattcaggcgtggttgcaggaaaataaatactatcaatatcagctacttggtgccgggaaaccgcatctgtatcgccggttcggtcaacatttgattaaaaaggaaaatgtatga

SEQ ID NO: 482307 - DNA, 639 bp, Shigella sonnei
atgaaccatcaggatgaattgccgttagcgaaagtcagcgaagttgacgaggcgaagcggcaatggttgcaggggatgcgtcaccccgttgatacggtaaccgaaccggaacctgctgaaatcctggctgagttcattcgccagcattctgcggctgggcagctggtggcgcgcaccgtgtttctctcgccaccctattcggttgcagaagaggaactgtcagttttgctggaaagcattaagcagaacggagactacgcggatatcgcttgtatgacgggaagtcaggatgattactattactcaacgcaggccatgagtgaaaactacgcggcgatgtctttgcaagttgtggagcaggacatttgtcgcgccattgcacacgccgttcgttttgagtgccagacgtatcctcgtccttacaaagtcgccatgctgatgcaagcgccatattacttccaggaagcgcagattgaagctgcgatcgccgcgatggatgttgcacctgaatatgccgatatacggcaggtggagtcatcgacggcggtgttgtacttgtttagcgagcgatttatgacctatggcaaggcttatggcttatgcgaatggttcgaggtagagcagtttcagaacccctga

SEQ ID NO: 482308 - DNA, 2109 bp, Shigella sonnei
atggctaacggttggacaggtaatatattaagagtcaatctcacgacaggaaatattaccctcgaagattccagtaagtttaaaagttttgtcggtggcatgggcttcggctacaaaattatgtatgacgaagtaccgccaggcacgaaacctttcgatgaagcgaataaattagtctttgctaccggcccattaactggatctggtgccccctgtagttctcgcgtaaatatcacctcactttctacttttaccaaaggaaatttagtcgtcgatgcccatatgggtggcttttttgcagcgcaaatgaaattcgctggatacgacgtcattattatcgaagggaaggcgaaatcaccggtatggctgaagattaaagatgacaaagttagcctggaaaaagccgatttcttatggggaaaagggacgcgcgcaacgacggaagaaatttgtcgattgaccagtccggaaacctgtgtggcggctattggtcaggctggggaaaaccttgttcctctctctggcatgttgaatagccgtaaccacagcggcggtgcgggaactggcgcaataatgggttcgaaaaacctgaaagcgattgcggttgaagggacgaaaggggtcaacattgccgatcgtcaggagatgaagcgtctcaacgattacatgatgactgaacttattggtgcgaataacaaccatgtcgtgccaagtacgccgcaatcgtgggcagagtattcagatcccaagtcacgttggacagcacgtaaagggctgttttggggcgcggctgaaggtggtccgattgaaacgggggaaattccgccaggcaatcagaacacggtcggctttcgtacctataaatccgtttttgacttaggtccggcggcagagaaatacacagtaaaaatgagtggctgccactcttgcccgatccgttgtatgacccaaatgaatattcctcgggtgaaagagtttggcgtgcccagcacaggtggtaacacttgtgtagccaactttgtccataccaccatcttcccgaacggtccgaaagattttgaagataaagacgatggtcgtgtgattggtaacctggtgggtctgaatctgttcgatgactacggcctatggtgtaactacgggcagttgcatcgcgactttacctattgttacagcaaaggtgtgttcaagcgtgttctgcctgctgaagagtatgcggaaattcgctgggatcaactggaagcgggtgacgttaacttcattaaaattaaagatttttactaccgtctggcgcatcgtgtgggtgagctgagtcacctggctgatggttcatatgccatcgcagaacgctggaatttgggtgaagagtactggggctacgcgaaaaataaactctggtcgccgtttggctatccggttcaccatgccaatgaagcgtcagcgcaggtcggttccattgttaactgtatgttcaaccgtgactgcatgacgcatacccatatcaactttattggttccggcttgccattgaaactgcaacgtgaagtggcgaaagaactttttggttctgaagatgcttacgatgaaaccaaaaactacacgccaatcaatgacgcaaaaattaaatatgcaaagtggtcgctgttgcgggtctgtttgcataacgccgtcaccctgtgcaactgggtctggccaatgaccgtttcgccgctgaaaagccgtaattaccggggcgatctggcgcttgaagccaaattcttcaaagcgatcaccggcgaagagatgactcaggaaaaattagatttagctgcagagcgtatctttacgttgcatcgtgcctacacggtaaaactgatgcaaaccaaagatatgcgtaatgaacacgatcttatctgttcctgggttttcgacaaggatccgcagatcccggtctttactgaaggtactgacaaaatggatcgtgacgatatgcatgcttcgctcacgatgttctacaaagaaatgggctgggacccacagcttggttgtccaacccgcgaaacattgcagcggctggggctggaagatattgccgccgatctggcagcacacaatctactgcctgcgtaa

SEQ ID NO: 482309 - DNA, 627 bp, Shigella sonnei
atgaacccggttgatcgtccactattagatattggcttaacgcgattagaattcttgcgtatatcaggaaaaggccttgctggtctaacaattgcccctgcgttactgtcacttttgggttgcaaacaggaagatattgatagcggcacagtagggttgataaatacacccaaaggggtgctggtgacccagcgagcgcgatgcacgggttgccaccgctgtgaaatctcttgtaccaacttcaacgatggctcagtagggacattcttctcccgtatcaaaatccatcgcaattatttctttggcgacaacggggttggctctggcggcggcctgtatggcgatctcaactataccgcggacacctgccgtcaatgcaaagagccgcaatgcatgaacgtctgcccgattggtgcgattacctggcagcagaaagaaggctgtattaccgtcgatcataaacgctgtattggctgtagcgcctgtactacggcatgcccgtggatgatggccaccgtaaataccgaaagtaaaaaatcctcgaaatgtgtgttatgcggtgaatgcgcaaacgcctgcccaacaggggcgttaaaaattatcgagtggaaagatattactgtgtga

SEQ ID NO: 482310 - DNA, 210 bp, Shigella sonnei
atgggaaatcggacaaaagaggatgaactgtaccgagaaatgtgcagagttgtcggtaaagttgtgctggaaatgcgcgatctggggcaggaaccaaagcatattgttatcgcaggcgtattacgtactgcattagccaataaacgcattcagcgcagtgagctggaaaagcaggcgatggaaaccgtcattaacgcactggtaaaatga

SEQ ID NO: 482311 - DNA, 1413 bp, Shigella sonnei
atgaaaaagaccaaaattgtttgcaccatcggaccgaaaaccgaatctgaagagatgttagctaaaatgctggacgctggcatgaacgttatgcgtctgaacttctctcatggtgactatgcagaacacggtcagcgcattcagaatctgcgcaacgtgatgagcaaaactggtaaaaccgccgctatcctgcttgataccaaaggtccggaaatccgcaccatgaaactggaaggcggtaacgacgtttctctgaaagcgggtcagacctttactttcaccactgataaatctgttatcggcaacagcgaaatggttgcggtaacgtatgaaggtttcactactgacctgtctgttggcaacaccgtactggttgacgatggtctgatcggtatggaagttactgccattgaaggtaacaaagttatctgtaaagtgctgaacaacggcgacctgggcgaaaacaaaggtgtgaacctgcctggcgtttccattgccctgccagcactggctgaaaaagacaaacaggacctgatctttggttgcgaacaaggcgtagactttgttgctgcttcctttattcgtaagcgttctgacgttatcgaaatccgtgagcacctgaaagcgcacggcggcgaaaacatccacatcatctccaaaatcgaaaaccaggaaggcctcaacaacttcgacgaaatcctcgaagcctctgacggcatcatggttgcgcgtggcgacctgggtgtagaaattccggtagaagaagttatcttcgcccagaagatgatgatcgaaaaatgtatccgtgcacgtaaagtcgttatcactgcgacccagatgctggattccatgatcaaaaacccacgcccgactcgcgcagaagccggtgacgttgcaaacgccatcctcgacggtactgacgcagtgatgctgtctggtgaatccgcaaaaggtaaatacccgctggaagcggtttctatcatggcgaccatctgcgaacgtaccgaccgcgtgatgaacagccgtctcgagttcaacaatgacaaccgtaaactgcgcattaccgaagcggtatgccgtggtgccgttgaaactgctgaaaaactggatgctccgctgatcgtggttgctacccagggcggtaaatctgctcgcgcagtacgtaaatacttcccggatgccaccatactggcactgaccaccaacgaaaaaacggctcatcagttggtactgagcaaaggcgttgtgccgcagctggttaaagagatcacttctactgatgatttctaccgtctgggtaaagaactggctctgcagagcggtctggcacacaaaggtgacgtcgtagttatggtttctggtgcactggtaccgagcggcactactaacaccgcatctgttcacgtcctgtaa

SEQ ID NO: 482312 - DNA, 237 bp, Shigella sonnei; identical to SEQ ID NO: 1349

SEQ ID NO: 482313 - DNA, 1005 bp, Shigella sonnei
atgaaacgcgcgtctttgcttacactcacgcttatcggcgcttttagcgccatccaggctgcctgggcggttgattatccgctaccaccaaccggaagccgactggttgggcaaaatcaaacgtatacggtgcaagaaggggataaaaaccttcaggctattgcccgacgttttgatactgcggcaatgttgatccttgaagccaataacactatcgtcccggtgccaaaacctggtacgacgataactattccttcacaactgttattacctgatgcaccgcgtcaggggattatcgttaaccttgcagagctgcgcctttattattatccgccgggagaaaatattgtgcaggtttatccaataggtattggattgcaggggctggaaacgccggtgatggaaacgcgtgttgggcagaaaatccctaacccaacctggacgcctacggcaggcattcgtcagcgttcgctggagcgtggcattaaattaccgccagtcgttcctgccggaccaaataacccgctaggacgttacgcactgcgcctcgcgcatggtaatggcgaatacctcattcatggcaccagtgcgccggacagcgttggtttgcgcgtcagttcagggtgtattcgcatgaatgcaccggatattaaagccttgttctccagcgtgcggacgggaacgccggtgaaagtgatcaacgaaccggtgaaatattccgtggaacctaacgggatgcgttatgttgaagtacatcgaccactatcagcagaagaacagcaaaacgttcagacaatgccatacacactgccagcaggctttacgcaatttaaagacaataaggctgtagatcagaagttagtcgataaagcgttgtatcgtcgggcagggtatccggtttcggtgagcagtggagcaactcccgcagccagcaatgcgccttcagtagagtcagcgcagaatggtgaaccagagcaagggaatatgttacgcgcgacgcagtag

SEQ ID NO: 482314 - DNA, 417 bp, Shigella sonnei
atggctttattgccggataaagaaaaattgctgcgtaattttttacgctgcgccaactgggaagagaaatatctctacattattgagctgggccagcgtctgactgaattacgcgacgaagaccgaagcccacaaaatagcattcagggctgccagagtcaggtgtggattgtcatgcgccagaatgcgcacggaattattgaattgcagggcgacagcgatgcggcgattgtgaaagggcttattgcggtagtctttattctctacgatcagatgacgccgcaggatattgtcagtttcgatgtgcgtccgtggtttgaaaaaatggcactcacccaacatctcaccccatctcgttcacaaggtctggaagcgatgattcgcgcaattcgcgccaaagccgctgcacttagctaa

SEQ ID NO: 482315 - DNA, 1221 bp, Shigella sonnei
atgactttttccgtcgacaaagtgcgggccgactttccggtgctttctcgtgaggtgaacggtttgccgctggcttatctcgatagcgccgccagtgcgcagaaaccaagccaggtgattgacgccgaggctgagttttatcgtcacggctacgcggcggtgcatcgcggtattcataccttaagcgcccaggcgaccgagaaaatggagaacgtgcgcaagcgggcatcgctgtttattaatgcccgttcggcggaagagctggtgttcgtccgcggcacgacggaagggatcaatctggtcgccaatagttggggcaacagcaacgtgcgggcgggcgataacatcatcatcagtcagatggagcaccacgctaacattgttccctggcagatgctttgcgcacgcgttggcgcagagctgcgtgtgatccctctcaaccccgacggtacgctgcaactggagacgctgcctacgctgtttgatgagaaaactcgcctgctggcaattactcatgtctccaacgtgctgggaacagaaaatccgctggcggaaataatcacgcttgcgcaccagcatggcgcaaaagtgctggtggatggcgctcaggcggtgatgcatcatccggtggatgttcaggcgctggattgcgacttttacgtgttctccgggcataaactgtatggccccaccggaattggcattctttatgtgaaagaagccttgttgcaggagatgccgccgtgggaagggggcggttctatgatcgccaccgtcagcctgagtgaaggcactacctggaccaaagcaccatggcggtttgaagccggtacacccaataccgggggcattattggtcttggcgcggcgcaggagtatgtttcggcgctggggcttaataacatagccgagtatgaacagaatctgatgcattatgcgctatcacagctggaatctgtaccggatctcactctctatggcccacaaaacaggcttggcgttattgcttttaatctcggtaaacaccacgcctatgatgttggcagttttctcgataattacggcattgctgtgcgtaccggacatcactgcgctatgccattaatggcctattacaacgtccctgcgatgtgtcgggcgtcgctggccatgtataacacccatgaagaagtggatcgtctggtgaccggcctgcaacgtattcaccgtttgctgggataa

SEQ ID NO: 482316 - DNA, 1272 bp, Shigella sonnei
atggctggcttaccgaacagcagtaatgcgctgcaacagtggcatcacttgtttgaagctgaagggacaaaacgctcaccgcaagcacagcagcatttacaacaattgctgcgtaccggactgccgacacgtaaacatgaaaactggaaatatacgccgctggaagggctgaccaatagtcagtttgtcagcattgcgggagatatatccccacagcagcgtgatgccttagcgttaacgttagacgccgtgcggctggtgtttgtcgatggacgttacgtgcccgcgctgagcgatgcaattgaaggcagcggatatgaagtgagcattaacgacgaccgtcaggggttacccgacgctattcaggcggaagtgtttctgcatttgacggaaagcctggcacaaagcgtgacgcatatcgccgtgaagcgcggtcaacggccggcaaagccattgctgttaatgcatatcacccagggcgtggcaggtgaagaggtgaacactgcccattaccggcatcatctggatctggcggaaggtgccgaagcaacggtgatcgaacattttgtcagccttaatgatgctcgtcattttaccggggcacggttcactatcaatgtcgcagcgaacgcccacttgcagcatatcaagctggcgtttgaaaacccgctcagtcaccactttgctcataacgatttgttgctggctgaggatgccaccgcatttagccatagtttcctgctgggtggcgcagtgttacgacacaacaccagtacgcaactcaatggcgaaaacagcacgctgcggatcaatagcctggcgatgccggtgaaaaacgaggtgtgtgatacccgtacctggctggaacacaataaaggtttttgtaacagccgacagttgcacaaaactatcgtcagcgacaaaggccgcgcggtatttaacggtttgatcaacgtcgcgcagcacgccatcaaaacggatggtcagatgaccaacaataatctgctgatgggcaaaatggcggaagtggatacaaaaccgcagctggaaatctatgcagatgatgtgaaatgcagccacggcgcgacggtggggcgtattgatgatgaacagatgttctatctgcgctcgcgcgggatcaatcagcaggatgcccagcagatgatcatttacgcctttgctgccgaactgacggaagcactgcgtgatgaggggcttaaacagcaggtgctggcccgaatcggtcaacggctgccaggaggtgcaagatga

SEQ ID NO: 482317 - DNA, 747 bp, Shigella sonnei
atgttaagtattaaagatttacacgtcagcgtggaagataaagctatcctgcgtggattaagcctcgacgttcgtcccggcgaagttcacgccattatggggccaaacggttcgggcaaaagtaccttatcggcaacgcttgccgggcgagaagattatgaagtgacgggcggcacggttgagttcaaaggcaaagatttgcttgcgctgtcgccggaagatcgtgcaggcgaaggcatctttatggccttccagtatccggtggagattcccggcgtcagtaaccagtttttcctgcaaacggcacttaatgcggtgcgcagctatcgcggccaggaaacgctcgaccgctttgattttcaggatttgatggaagagaaaatcgctctcctgaagatgccggaagatttattaacccgttcggtaaacgttggtttttccggcggcgagaaaaagcgcaacgatattttgcaaatggcggtgctggaaccggagttatgcattcttgatgaatcggactccgggctggatattgacgcattaaaagtggttgccgatggcgtgaactcgctgcgtgacggcaagcgctcattcatcattgttacgcactaccaacgcattctcgactacatcaagcctgattacgtccatgtgctatatcagggacgaattgtgaaatccggcgatttcacgttggtcaaacaactggaggagcagggttatggctggcttaccgaacagcagtaa

SEQ ID NO: 482318 - DNA, 1488 bp, Shigella sonnei
atgtctcgtaatactgaagcaactgacgatgtcaaaacctggaccggcggcccgctgaattataaagaaggattcttcacccagttagccaccgatgagctggcaaaggggataaacgaagaggtggtgcgcgcaatttcggcgaagcgtaatgagccggagtggatgctggagtttcgtctaaacgcctatcgcgcatggctggagatggaagaaccgcactggttgaaagcgcactacgacaagctgaattatcaggattacagttactactcagcaccatcgtgcggtaattgtgacgacacttgcgcgtctgaacctggcgcggtgcagcaaactggcgcgaacgcctttttaagtaaagaggtggaggcggcgtttgagcagttgggcgttcccgtgcgggaaggcaaagaggtggcggtggatgccattttcgactctgtttcggttgccactacttatcgcgaaaaactggcggagcagggaattattttctgttcctttggtgaggcgatccacgatcatccggaactggtgcgtaaatatctcggcactgtggtgccgggaaatgacaacttctttgccgcgcttaatgcggcggtagcctctgacggtacgtttatttatgtgcctaaaggcgtgcgctgcccgatggaactttccacctattttcgcattaacgcggaaaaaaccgggcagtttgagcgcaccattctggtggccgacgaagacagctacgtcagctacattgaaggctgttccgctccggtgcgtgacagctatcagttacacgcggcggtggtggaagtcatcatccataaaaacgccgaggtgaaatattccacggtacaaaactggttccctggcgataacaacaccggcggtattctcaatttcgtcaccaagcgtgctttgtgcgaaggcgaaaacagcaaaatgtcatggacgcaatcagaaaccgggtcagcgattacgtggaaatatcccagctgcattttgcgcggcgataactccattggtgagttttactcagtggcgctgaccagcggtcatcagcaagcggataccggcaccaagatgatccacatcggtaaaaacaccaaatcgaccattatctcgaaagggatctctgccggacatagtcagaacagttatcgcggcttagtgaaaatcatgccgacggcaaccaatgcgcgcaatttcactcagtgcgactcaatgctgattggcgctaattgtggggcgcataccttcccgtatgtcgaatgtcgcaataacagcgcacaactggagcacgaggcaacgacatcacgtattggtgaagatcaactgttttactgcctgcaacgcgggattagcgaagaagacgccatctcgatgattgttaacggtttctgcaaagacgtgttctcagaactgccgctggaatttgccgttgaagcacaaaaactcctcgccatcagtcttgaacacagcgtcggataa

SEQ ID NO: 482319 - DNA, 369 bp, Shigella sonnei
atggacatgcattcaggaacctttaacccacaagatttcgcctggcaaggcttaacgctgacacccgcagcggcgatacacatccgtgagctggtggcaaagcagccgggtatggtcggcgtgcgcttaggcgtgaagcaaacgggctgcgcgggctttggctatgtgctcgacagtgttagcgagccggacaaagacgatctgctgtttgaacacgacggcgcgaagctgtttgtcccgctgcaagcgatgccgtttattgatggcacggaagtcgatttcgttcgtgaaggacttaatcagatattcaaatttcacaaccctaaagcccagaatgaatgtggctgtggcgaaagctttggggtatag

SEQ ID NO: 482320 - DNA, 189 bp, Shigella sonnei
atgtctactcaacttgatcccacccagctggccattgaatttttacgccgtgaccagagcaatctttcacctgcccaatatctcaaacgtctgaaacaactagaacttgaatttgctgacctgcttactctctcttctactgaattaaaagaagaaatctactttgcctggcgtctgggcgtgcattga

SEQ ID NO: 482321 - DNA, 411 bp, Shigella sonnei; identical to SEQ ID NO: 459584

SEQ ID NO: 482322 - DNA, 3057 bp, Shigella sonnei
atgattccacagatttcccaggcacccggcgtcgttcaactggtgcttaattttttgcaagagctggagcaacaaggttttaccggcgatacggcgacaagttatgccgatcgtctgacaatgtcgaccgacaacagtatttaccaacttctccccgatgcggtggtatttccgcgttcaaccgcagatgtggcgctgatcgcccgtcttgccgcgcaggaacgctattcatcgctgatctttaccccccgcggcggcggcaccggcactaacggtcaggcgctcaaccaggggattattgttgatatgtcccgccatatgaaccgcatcatcgaaattaaccctgaagagggctgggtgcgcgttgaggccggggtgataaaagatcaactcaatcagtacctgaaaccgttcggctacttttttgcaccagaactttcgaccagcaaccgggcaacgctcggcgggatgatcaataccgatgcatccggtcagggatcgctggtctatggcaaaacgtcagatcacgtacttggcgtacgcgcggtgttgttggggggcgatattctcgatacgcaacctttacccgtcgaactggcggaaacgctgggtaaaaccaataccacaatcgggcgaatttataacacggtttatcaacgttgccgtctgcaacgccagttaatcatcgacaacttccccaaacttaaccgctttcttaccggttacgatctgcgtcatgtctttaacgatgagatgaccgagttcgacctgacgcgcattctgacgggttcagaagggacgctggcctttattaccgaagcgcggctggatattacgcccttgcctaaagtgcgccgtctggtgaacgtcaaatatgactcttttgactccgcgctgcgtaacgcgccgtttatggttgaggcgcgggcgctttcggtagagacggtggactcaaaagtgctgaatctggcgcgggaagatattgtctggcattccgtcagcgagttgattaccgatgtgcctgacaaagagatgctcgggctgaacattgtggaatttgctggtgatgatgaggcgctgattgacgagcgagttaatgcactctgtgtgcggcttgatgagctgattgccagccaacaggcaggtgtgattggctggcaggtgtgccgcgagctggcgggggttgaacgtatctatgcaatgcgcaaaaaagccgttggtctgcttggcaatgccaaaggtgccgctaagccaattccgtttgctgaggatacctgcgtaccgccggaacatctggccgattatattgctgaatttcgcgcgctgctcgacagccacggcttaagctacggtatgttcggtcacgtcgacgcaggtgttttgcacgtccgtccggcactggatatgtgcgatccgcaacaagagattttgatgaagcaaatctctgatgacgtggtggcgctgactgcgaaatacggtggtttgttgtggggcgagcacggcaaaggttttcgcgctgaatacagcccggcgtttttcggtgaggaactttttgcagaactgcgcaaagtgaaagcggcatttgacccgcataaccgactcaacccagggaagatttgcccgccagaaggtctcgatgcgccgatgatgaaagtggacgcggtgaagcgcggtacattcgatcggcagatccccattgcggtacgccagcagtggcgcggtgcgatggagtgtaacggcaacggtttatgcttcaactttgatgcccgtagtccgatgtgtccgtcgatgaagatcacccagaaccggattcattcaccgaaagggcgcgcaacgctggtgcgtgaatggctgcgtttgttggcggatcgcggcgttgatccactcaaactggaacaagaactgcctgaatccggcgtcagtttacggacgttaattgcccgcacgcgcaatagctggcatgcgaataaaggcgaatatgacttctcacacgaagtcaaagaggcgatgtcgggctgtctggcctgtaaagcgtgttcgacccagtgccccatcaaaattgatgtgccggagtttcgctctcgtttcctgcagctctatcacacccgttatttacgcccgctgcgcgaccacctcgtcgctacggtcgagagctacgcaccgctgatggcacgcgcgccgaaaacctttaacttcttcattaaccagccgctggtgcgcaaactctcggaaaaacatatcggcatggttgatttgccactgctgtcggtcccctcgctacaacaacaaatggtggggcatcgctcggcaaacatgacgctggaacagcttgaagctctcaatgcagagcagaaagcgcgcacggtgttggtggtgcaggacccctttaccagctattacgatgcgcaagtggtggcggattttgtccgtctggttgaaaaattaggtttccagcctgtgttactgccattttcgccaaatggcaaagcccagcatatcaaaggctttcttaatcgttttgcgaagacggcgaaaaagacggcggatttcctcaaccgtatggctaagcttgggatgccaatggtgggcgtcgatccggcgctggtactttgttatcgcgatgaatataaactggcgctgggcgaggaacgtggcgagtttaacgtcttacttgcgaatgaatggctggcaagcgcacttgagtcacatccagtggctacagtcagcggtgaatcatggtatttctttggtcactgtaccgaggttaccgctttgccgggcgcgccagcacaatgggccgcgatatttgcccgttttggcgcgaaactggaaaatgtcagcgtgggttgctgcggcatggcagggacttacggacatgaagcgaaaaaccatgaaaattcgctcgggatctatgagttatcctggcatcaggctatgcagcgactgccgcgtaaccgctgtctggcgaccggatattcctgccgtagccaggtaaaacgggttgaaggcacgggggtacgccatcctgtgcaggctttactggagattattaaatga

SEQ ID NO: 482323 - DNA, 1113 bp, Shigella sonnei
atggtaaatgttcgtcagcccagggatgtcgcacaaattctgctttcggtgctgtttttagccatcatgattgtggcatgtctgtggattgttcaaccctttattctcggctttgcatgggccggtacggtggttatcgccacctggccggtattgttacgtttgcaaaagatcatgtttggccgccgctctctcgccgttctggtgatgacgctgttattagtgatggtgtttatcatccctattgctttgctggttaacagtatcgtcgacggcagcggcccgctaattaaagccatttccagcggcgacatgacgttacccgatctggcgtggcttaataccattccggtgattggcgcgaagctgtatgcaggctggcacaacttgctggatatggggggtacggcgatcatggcgaaagtccgcccttatattggcaccaccaccacctggttcgttgggcaggcggcgcatatcgggcgctttatggtgcattgtgcgctgatgcttctcttcagtgccctgctgtactggcgcggtgaacaggtggcacaaggcattcgccattttgcaacccgtctggcaggcgttcgcggagatgccgccgtgctgctggcggcacaggctatccgcgcggtggcgctgggtgtggtggtgacggcgttagtacaggcagtgcttggcagtatcggcctcgccgtatccggcgtaccttatgcaacgttgctaacggtgttaatgatcctctcctgccttgtccagcttggcccgttgccggtactgattccggcgattatctggctctactggaccggcgataccacctggggaacggtattgttagtgtggagcggtgtggttggcacgctggataacgtcatccgcccaatgttaattcgcatgggtgccgatttaccgctgatcctgatcctctctggcgttattggtggtttgattgctttcgggatgatcggtctgtttattggtccggttctgttagccgtttcctggcgtctgtttgccgcgtgggtggaagaagtcccgccgccgacggaccaaccggaagaaattctcgaagaacttggcgaaatcgagaaaccgaataagtaa

SEQ ID NO: 482324 - DNA, 546 bp, Shigella sonnei
gtgatttgttttgatttggcgattgatcagatcgcacaatccgggctaagttccctcaaagtgatctactattccgcgcagctatttagaccagttccggcgctggtaattacagcgtttgtcgcccgtcgcttactgcgctttcgtcatatgcttgcctgtcgtcgtcgcgggttaattgttctaaccgaccgttatcctcaggaccaaattcctggcgcttacgatggtacggtgttcccacctaacgttgaaggtggtcgttttgtctcatggctggcaagccaggaacgtaaagcgtttcactggatggcgagccataagcctgatctggtcatcaaactcaatgttgaccttgaagttgcctgtgcacgtaaacccgaccataaacgggaatcgctggcgaggaagattgccataacgccacagttaacctttggtggtgcacaactggttgatatcgatgccaatcagccactggaacaggtgttggttgatgcagaaaaagcgattacggattttatgaccgcgcgtggttatcactag

SEQ ID NO: 482325 - DNA, 1500 bp, Shigella sonnei
atgctaaatttatttgttggccttgatatatacacagggcttttgttattgcttgctctggcatttgtgttgttctacgaagcaatcaatggttttcatgacacggcgaatgcggtggcaaccgttatttatactcgtgccatgcaaccacaacttgctgtggtgatggcggcattttttaacttttttggcgtgttattgggcggacttagcgttgcctatgccattgtccatatgttgccaaccgatttgttgctgaatatggggtcaacccacggcctggcgatggtcttttccatgctgctggcggcgattatctggaacctgggaacgtggttcttcggtttaccggcctccagttcgcacaccttgattggtgcgattatcggcatcggtttaaccaacgcgctgttaaccggctcatcggtgatggatgcgttaaacctgcgtgaagtgaccaaaattttctcctcgctgattgtttcccctatcgtcggcctggtcattgcgggaggcctgatattcctgctgcgacgctactggagcgggacgaaaaagcgtgaccgtattcaccgcattccggaagatcgcaaaaagaaaaaaggcaaacgtaaaccgccattctggacgcgtattgcgctgattgtttccgctgcgggcgtggcgttttcgcacggcgcgaacgacggacaaaaagggatcggcctggtgatgctggtactggtggggattgcccctgctggcttcgtcgtcaatatgaacgcgtccggctatgaaattacccgtacccgcgatgccgtcaccaacttcgaacactacctgcaacagcatcctgaactgccgcagaagttgattgcgatggaacctccattgcctgcagcatcgactgatggcacgcaagtaacagagtttcactgtcatccggcaaatacctttgatgcgattgcgcgcgttaaaacgatgctgccaggcaatatggaaagttacgagccgttaagcgtgagtcagcgcagccagctgcgccgcattatgctgtgcatctctgatacctccgcgaagctggcgaaactgccaggcgtcagtaaagaagaccagaacctgctgaaaaaactgcgcagcgatatgttaagcaccattgagtacgctccggtgtggatcatcatggcggtagcactggcgctcggcattggcaccatgattggctggcgtcgtgtagcgatgaccatcggtgagaagattggtaagcgcggcatgacgtatgcgcaaggcatggcggcacaaatgacggcggcagtgtctatcggccttgccagttatattgggatgcctgtctccacaacacacgtcctctcgtctgcggtagcagggacgatggtggtggacggcggtgggttacagcgtaaaacggtaaccagcatcctgatggcgtgggtgtttactttaccggcggcaatttttctttctggtgggctgtactggatagcattgcagttgatttaa

SEQ ID NO: 482326 - DNA, 1860 bp, Shigella sonnei
atgagcaaaggaacgaccagccaggatgccccgttcgggacattattgggctacgccccaggtggggtagcaatctactcttcagattacagttctctcgatccgcaggaatacgaagatgacgccgtattccgtagctatatcgacgacgaatatatgggccacaagtggcaatgcgttgaatttgctcgccgttttctctttctgaattacggtgtggtctttactgacgtgggtatggcgtgggagattttctcgctgcgcttcctgcgagaagtggttaatgacaacatcctgccattgcaggcatttcctaacggctcgccgcgtgcgccggtcgcgggtgcgcttcttatctgggataaaggcggtgaatttaaagacactggccatgtcgccatcattacccaattgcatggcaacaaagtccgtattgcggaacagaacgtgattcattccccgttgccgcaagggcaacagtggacgcgtgagctggagatggtggtcgaaaacggctgctataccctgaaagacacttttgatgacaccaccattctgggctggatgatccagacggaagatactgaatacagcttaccgcagccggaaattgcaggcgagctgctgaaaatcagcggagcgcgcctggaaaacaaaggccagtttgacggtaaatggctggatgaaaaagatccgctgcaaaacgcctatgtgcaggccaacggtcaggtgatcaatcaggatccttatcattactacaccattaccgagagtgccgagcaggagctaattaaagccaccaacgagctgcacctgatgtatcttcacgcaaccgacaaggtgctgaaagatgacaacctgctggcgctgttcgacatcccgaaaatcctctggccacgtttgcgtctctcctggcagcgtcgccgtcaccatatgatcactggtcgtatggatttctgcatggatgagcgtggcctgaaggtttacgagtacaacgccgactccgcctcctgtcataccgaagcgggcttgatcctcgaacgttgggcggagcagggctataaaggcaacggcttcaatccggcggaagggctgattaacgaattggctggtgcctggaaacacagtcgtgcacgtccgtttgtccatatcatgcaggacaaagatatcgaggaaaactatcacgcgcagtttatggagcaggcgctgcaccaggcgggctttgaaacgcgtatcttgcgtggattggatgaactgggctgggatgctgccgggcaactgattgatggggaagggcgactggttaactgcgtgtggaaaacctgggcgtgggaaaccgcgtttgatcagattcgtgaagttagcgaccgtgagtttgctgcggtgccaatccgtaccggtcatccgcaaaacgaagtgcgtcttatcgacgtattgctgcgcccggaagtgctagtctttgagccgctgtggacggtgatccccggcaacaaagcgattctgccgatcctctggtcgctgttcccgcaccatcgttacctgctggataccgatttcactgttaatgatgaattggtgaaaacaggttacgcagtgaaaccgattgccggtcgctgtggtagcaatatcgacctggtcagccatcatgaagaggtgctggacaaaaccagcggtaaatttgccgagcagaaaaacatctatcagcaactgtggtgtttgccgaaagtggacggtaaatacattcaggtatgtaccttcaccgtgggcggcaactacggtgggacgtgtttgcgcggtgatgaatcactggtcatcaaaaaagagagtgatattgaaccgttaattgtggtgaaaaagtaa

SEQ ID NO: 482327 - DNA, 867 bp, Shigella sonnei
atgacagacaatacttatcagcccgcgaaagtctggacgtgggataaatccgctggcggcgcgttcgccaatatcaatcgcccggtttctggtccgacgcatgaaaaaacgctgcccgttggcaaacacccattgcaactttattcgctgggaacgccgaacggtcagaaagtaacgattatgcttgaggagctgctggcgctgggcgttactggtgcagagtacgacgcctggctgattcgtattggcgatggcgatcaattctccagcggctttgtcgaagtgaacccaaactcgaagatcccggcgctgcgcgatcatacgcataatccgccgatccgcgtgtttgaatctggttcgatcctgctttatctggcggagaaatttggctacttcctgccgcaggatttggcaaagcgtactgaaacgatgaactggctgttctggttacagggcgcggcaccgttcctcggcggtggttttggtcacttttaccattacgcgccgatgaaaattgagtacgccatcaaccgctttaccatggaagccaaacgtctgctcgacgtgctggataagcaactggcgcagcataagtttgttgcgggcgatgagtacaccattgcggatatggcgatttggccgtggtttggcaatgtggtgttaggcggcgtgtatgatgccgcagagtttcttgatgcgggcagttataagcatgtacaacgctgggcgaaagaagtaggcgaacgtccggcggtgaaacgtgggcgtattgttaaccgcaccaacggaccgctgaatgagcagttgcatgagcgccatgacgccagtgatttcgagacgaatacggaagataagcgtcaggggtaa

SEQ ID NO: 482328 - DNA, 249 bp, Shigella sonnei
atgtgtattggcgttccaggccaggtgctggctgtcggtgaagatattcaccagcttgcgcaggttgaagtatgtggtatcaagcgcgacgtgaatatcgccctgatttgtgaaggtaaccctgccgatctactgggccagtgggtgctggtacacgtcggatttgccatgagcatcatcgacgaagatgaagccaaagccacattagacgcactgcgccaaatggattacgacattaccagcgcgtga

SEQ ID NO: 482329 - DNA, 342 bp, Shigella sonnei
atgcatgagttgtctctttgccagagcgccgttgaaattatccaacggcaggcggagcagcacgatgttaagcgcgtcaccgccgtgtggctggaaattggcgcgctctcctgcgttgaggagagcgccgtccgttttagttttgaaattgtctgccacggaacggtggcgcaagggtgcgatttacatatcgtctataaacccgcccaggcttggtgctgggattgcagccaggtggtggagattcatcagcacgatgcgcagtgtccgctctgtcacggcgagcggttgcgtgtcgataccggcgattcgctgatcgtcaaaagtattgaagttgaataa

SEQ ID NO: 482330 - DNA, 489 bp, Shigella sonnei
atgactgaagagatagcaggtttccagacctccccgaaggcgcaagtacaggcagcgtttgaagaaattgcccggcgttcgatgcacgatctctcttttctgcatccttcaatgccggtgtatgtttctgattttacgctgttcgaaggtcagtggacggggtgtgtgatcaccccgtggatgctgagtgcagttatcttccccggcccggatcaactctggccgctgcgcaaagtgagtgaaaaaattggtctgcaactgccgtatggcactatgacctttaccgttggcgaactggacggtgtttcgcaatatctctcctgttcgctgatgtcgccgctttcgcacagcatgtcgattgaagagggccaacgcctgacggatgactgcgcacgaatgatcctttcgctgccagtcacgaatccggatgtaccacacgcagggcgtcgcgccctgctgtttggtcgcaggagtggcgaaaatgcatga

SEQ ID NO: 482331 - DNA, 495 bp, Shigella sonnei; identical to SEQ ID NO: 460294

SEQ ID NO: 482332 - DNA, 1704 bp, Shigella sonnei; identical to SEQ ID NO: 460293

SEQ ID NO: 482333 - DNA, 1179 bp, Shigella sonnei
atgagtcatgatccacaaccgctgggcggcaaaatcatcagtaaaccggtcatgatttttggaccgttaatcgtcatctgtatgctcctgattgtgaagcgtctggtgttcggtctgggctctgtctctgacctgaacggcggcttcccgtggggcgtgtggatcgcgtttgacctgctgattggcaccggctttgcctgtggcggctgggcgctggcgtgggcggtatacgtctttaaccgtgggcaataccatccgctggtgcgtccggcgctgttggcgagtctgtttggttactcactgggtggcttgtcgatcactatcgacgtgggtcgctactggaacctgccgtacttctacattccgggtcacttcaacgtgaactcggtactgttcgagacggcggtctgtatgaccatctatatcggcgtgatggcactggagtttgctccggcactgtttgaacgtctgggctggaaggtttctctcaagcgtctgaacaaggttatgttcttcatcattgcacttggcgcgctgttgccgaccatgcaccagtcttcaatggggtcactgatgatctcggcgggctacaaggtgcatccgttgtggcagagctatgaaatgttgccgctgttctcgctgctgacggcgttcatcatgggcttctcgattgtcatctttgaaggttcgctggtgcaggcgggtctgcgtggcaacggtccggatgaaaagagtctgttcgtcaagctgaccaacaccatcagtgtgttgctggcgattttcatcgtgctgcgctttggcgagcttatctatcgcgacaagctgtcgttagcgtttgccggtgacttctactccgtgatgttctggattgaagtcctgctgatgctcttcccgctggtcgttctgcgtgtggcgaagctgcgtaatgattcccgcatgctgttcctgtcagcactgagcgcactgttaggttgtgcaacctggcgtctgacctattcgctggtggcattcaacccgggcggcggttacgcctacttcccgacctgggaagaactgttgatttctattggttttgtggctattgagatttgcgcttacatcgtactcattcgtctactgccgatacttcctcctttaaaacaaaacgatcataatcgtcatgaggcgagcaaagcatga

SEQ ID NO: 482334 - DNA, 987 bp, Shigella sonnei; identical to SEQ ID NO: 470747

SEQ ID NO: 482335 - DNA, 1119 bp, Shigella sonnei
atgactggagataacaccctcatccattctcacggcattaaccgtcgtgatttcatgaagctttgtgcagcattagccgccaccatggggttaagtagcaaagccgctgcagagatggccgaatcggttactaacccgcagcgtccgccagttatctggattggcgcgcaggagtgcaccggttgtacggaatctctgcttcgtgcaacgcatccaacggtagaaaacctcgtgctggagactatctctctggagtatcacgaagtgctttccgccgccttcggtcatcaggtcgaagagaacaaacataacgcacttgagaagtacaaagggcagtatgtgttggttgtggatggttccatcccattaaaagataacggtatttattgcatggttgctggtgagccgattgtggatcacatccgcaaagcggcagaaggcgcagcagcgattatcgctatcggttcctgctctgcgtggggcggtgttgccgcagctggagttaacccaactggcgcagtcagcctgcaagaagttctgccaggcaaaaccgttatcaatattccgggctgcccgccgaacccgcacaacttcctcgcgaccgttgcgcacatcatcacttacggcaaaccgccgaaactggatgacaaaaaccgtccgaccttcgcctatggccgtctgattcacgaacactgcgaacgtcgcccgcacttcgatgctggtcgttttgccaaagagttcggtgatgaaggccaccgtgaaggctggtgcctgtaccacctcggctgtaaagggccagaaacttacggcaactgctcaacgctgcaattctgcgatgttggcggcgtgtggccggtagcgattggtcacccatgctatggctgtaacgaagaaggtatcggcttccataaaggcatccatcagcttgccaacgtcgaaaatcagactccgcgttcacagaaaccggatgttaacgctaaagagggcggcaacgtctctgcaggcgctattggtttgctcggcggtgtggttgggctggttgccggtgtcagcgtgatggcggtgcgtgaactgggtcgtcagcaaaagaaagataacgctgactcacggggagaataa

SEQ ID NO: 482336 - DNA, 288 bp, Shigella sonnei; identical to SEQ ID NO: 460289

SEQ ID NO: 482337 - DNA, 888 bp, Shigella sonnei
atgccgcgtttaaccgccaaagatttcccacaagagttgttggattactacgactattacgctcacgggaaaatttcgaaacgtgagttcctcaaccttgcggcgaagtatgcggtgggcgggatgacggcattagcgttgtttgatttgctcaagccaaattatgcgctggcgactcaggtagagtttaccgacccggagattgttgctgagtacatcatgtatccttcgccaaatggtcacggcgaggtacggggttatctggtgaaacccgcaaaaatgagcggcaaaacgccagccgtggtggtggtgcatgagaatcgtggactgaatccgtatatcgaagatgtggcacggcgagtggcgaaggcggggtatatcgccctggcacctgacggcttaagttccgttggaggttatccgggaaatgatgataaaggtcgtgagctgcaacagcaggttgatccaaccaaactgatgaatgatttctttgccgcaattgagtttatgcaacgctatccacaagcggcaggcaaagtgggtattaccggattttgctatggcggtggcgtatcgaacgcggcggctgtcgcgtatccggaactggcctgcgcggtgccgttttatggtcgtcaggcacccactgccgatgtggcgaagattgaagcgcctttactactccacttcgcggaactggacacccgaatcaacgagggctggcctgcttacgaggcggcgttgaaagccaataataaggtttatgaggcgtatatctatccgggggttaatcacggattccataatgattccacgccccgttatgacaaatctgccgccgatcttgcctggcaaaggacactgaaatggttcgataaatatctctcctga

SEQ ID NO: 482338 - DNA, 1041 bp, Shigella sonnei
atggtctggttagcgaatcccgaacgttacgggcagatgcaataccgctattgcggaaaaagcggtttacgcctgcccgcgttatcgctcggtttatggcacaatttcggtcacgttaacgcgctggaatcacagcgtgcgatcctgcgtaaagcgtttgatttgggcattacgcactttgatttagccaacaattacgggccgcctccaggaagcgcagaagagaactttggtcgcctgctgcgggaggattttgccgcttatcgcgatgaactgattatctctaccaaggctggctacgatatgtggcccggcccttacggctctggcggttcacgtaaatacctgctcgccagcctcgaccaaagcctgaagcgtatggggcttgagtatgtcgatatcttttactctcatcgcgtcgatgaaaatacgccgatggaagaaaccgcctctgcgctggctcatgcggtacaaagcggtaaggcgctgtatgtcgggatctcctcttactcgccagagcggacgcaaaaaatggtcgagttgctgcacgagtggaaaattccgcttttaattcatcaaccttcgtacaatttactgaaccgctgggtggataaaagcggcctgctggataccctgcaaaataacggcgtgggctgtattgcctttactcctctggctcagggattgctgaccggaaaatatctcaacggcattccgcaagattcacggatgcatcgtgaagggaataaagttcgtggtctgacgccgaaaatgcttaccgaagccaacctcaacagcctgcgcttattgaatgaaatggcacagcagcgtggacaatcaatggcgcaaatggcgttaagctggttgctgaaagatgatcgcgtgacgtcggtattgattggtgccagccgcgcggagcaactagaggagaacgtgcaggcgctgaataatctgacatttagcaccgaggagctggcgcagattgatcagcatatcgccgatggcgagctgaatctgtggcaggcgtcgtccgataaatga

SEQ ID NO: 482339 - DNA, 495 bp, Shigella sonnei; identical to SEQ ID NO: 261262

SEQ ID NO: 482340 - DNA, 885 bp, Shigella sonnei
atgtctcatttaaaagacccgaccacgcagtattacactggtgaatatcccaaacagaaacaaccgacgccaggcatccaggcgaagatgacaccggtaccggattgcggcgagaaaacctatgttggtagcggtcgcctgaaagatcgtaaagcactggtgacagggggcgattccggaataggtcgcgctgccgccatcgcttacgcgcgtgaaggggctgacgtggcgatcagttatcttcccgtggaagaagaagacgctcaggatgtgaaaaagatcattgaagaatgcggacgcaaagccgttctgctgccaggcgatttaagcgatgagaaattcgcccgttcgctggttcacgaagcgcacaaggcgttaggcgggctggatattatggcgctggtcgccgggaaacaggttgccattccggatattgcagacctcaccagcgaacagtttcaaaagacctttgccattaacgttttcgcgctgttctggctaacccaggaagcgatccccctgctaccgaaaggtgcaagtatcatcaccacttcgtcaatccaggcataccagccaagtccgcatttactggactatgcggctacgaaggcggcgattctgaactacagccgtggcctggcaaaacaggtcgcggagaaaggtattcgggtgaatattgtcgcgccaggccctatctggacggcactgcaaatttccggcggacaaacgcaggataagatcccgcagtttggtcagaaaacgccgatgaagcgtgcggggcaaccggcggaactggcccctgtatatgtttatctggcaagtcaggagtcgagctacgtcaccgcagaagtgcacggcgtgtgcggcggcgagcatttaggttaa

SEQ ID NO: 482341 - DNA, 204 bp, Shigella sonnei
atgcccggttgtgaaaagcaaccgggcatcattgtgaattcactcttacctgatgtggcgaaaacgccttatccggcctacaaacgcacgaagattcaacatgttgcaatagattttgtaggcctgatgagcgtagcgcatcaggcaattctactttacttcgctttggcggtttcttcgccgaccagacctatcttcaggtaa

SEQ ID NO: 482342 - DNA, 426 bp, Shigella sonnei; identical to SEQ ID NO: 261264

SEQ ID NO: 482343 - DNA, 735 bp, Shigella sonnei
gtgggtaataatttgatgcagacggacctttccgtctggggtatgtatcagcacgccgatattgtcgttaagtgcgtgatgattgggcttattttggcctccgtagtcacttgggcaatcttcttcagtaagagcgtagagttcttcaatcagaagcgtcgccttaagcgcgagcagcaactgctggctgaagcgcgttccttaaaccaggccaacgatatcgccgctgattttggtagcaaaagcttaagcctgcatttgctcaatgaagcgcagaatgagctggaactgtcagaaggcagcgacgataacgaaggtattaaagaacgtaccagcttccgtctggagcgtcgggtcgccgcagtgggtcgtcaaatgggccgcggtaacggctatctggcaaccatcggcgcgatttctccgttcgttggtctgtttggtacggtctggggcatcatgaacagctttattggtatcgcgcaaacgcagaccactaacctggcagtcgttgcgccgggtatcgcagaagctctgttagcaacggcaatcggcctcgtggcagcgattcctgcggtcgttatctataacgtatttgcacgccagattggcggctttaaagcgatgctgggtgatgttgcagcgcaggtattgttgctgcaaagccgtgacctggatctggaagccagcgccgctgcgcatccggttcgtgtcgcacaaaaattacgcgcaggataa

SEQ ID NO: 482344 - DNA, 1188 bp, Shigella sonnei
atggcggacaaaaagcttgatactcaactggtgaatgcaggacgcagcaaaaaatacactctcggcgcggtaaatagcgtgattcagcgcgcttcttcgctggtctttgacagtgtggaagccaaaaagcacgcgacgcgcaatcgcgccaatggcgagttgttctatggacggcgcggaacgttaacccatttctccttacaacaagcgatgtgtgaactggaaggtggcgcaggctgcgtgctatttccctgcggggcggcagcggttgctaattccattcttgcttttgtcgaacagggcgatcatgtgttgatgaccaacaccgcctatgaaccgagtcaggatttctgtagcaaaatcctcagcaaactgggcgtaacgacatcgtggtttgatccgctgattggtgccgatatcgttaagcatctgcagccaaacactaaaatcgtgtttctggaatcgccaggctccatcaccatggaagtccacgacgttccggcgattgttgccgccgtacgcagtgtggtgccggatgccatcattatgatcgacaacacctgggcagccggtgtgctgtttaaggcgctggattttggcatcgatgtttctattcaagccgccaccaaatatctggttgggcattcagatgcgatgattggcactgccgtgtgcaatgcccgttgctgggagcagctacgggaaaacgcctatctgatgggccagatggtcgatgccgataccgcctatataaccagccgtggcctgcgcacattaggtgtgcgtttgcgtcaacatcatgaaagcagtctgaaagtggctgaatggctggcagaacatccgcaagtagcgcgagttaaccaccctgctctgcctggcagtaaaggccacgaattctggaaacgagactttacaggcagcagcgggctattttcctttgtgcttaagaaaaaactcagtaatgaagagctggcgaactatctggataacttcagtttattcagcatggcctactcgtggggcgggtatgaatcgttgatcctggcgaatcaaccagaacatatcgccgccattcgcccacaaggcgagatcgattttagcgggaccttgattcgcctgcatattggtctggaagatgtcgacgatctgattgccgatctggacgccggttttgcgcgaattgtataa

SEQ ID NO: 482345 - DNA, 660 bp, Shigella sonnei
atggctgttattcaagatatcatcgctgcgctctggcaacacgactttgccgcgctggcggatcctcatattgttagcgttgtttactttgtcatgtttgccacgctgtttttagaaaacggcctgctgcccgcctcatttttgccaggcgacagcttgttgatactggcaggcgcattgattgcccaaggggttatggattttctgcctacgattgcgattctgaccgccgcagcaagtctgggctgctggctaagttatattcaggggcgctggttagggaataccaaaacggtgaaaggctggctggcacagcttcctgctaaatatcaccagcgcgccacctgcatgtttgaccgccacggtctgctggcgctgctggctggacgttttcttgcatttgtccgtacgctgctgccaaccatggcgggaatttccggtctgccaaaccgccgcttccagtttttcaactggttaagtggattgctgtgggtcagcgtggtaaccagttttggctatgccttaagtatgattccgttcgttaaacgccatgaagatcaggtaatgacgttcctgatgatcctgccaattgccttgttaaccgctggcttgttaggcacgctgtttgtagtgattaaaaaaaaatactgtaacgcctga

SEQ ID NO: 482346 - DNA, 957 bp, Shigella sonnei
atgctacaaaattgcgcacaatcaaattgccgcattattcctaagaaattacgcgatatgaaacgtgaagagatttgccgcttgctggcggataaagttaataaactgaaaaataaagaaaatagtttgtcagaactgttgcccgatgtgcgtttgttgtatggcgagacgcctttcgcacgtacaccggtgatgtacgagcctggcatcataattctcttttccgggcataaaatcggttatatcaatgaacgcgtgtttcgttatgatgccaatgaatacctgctgctgacggtgccgttgccgtttgagtgcgaaacctatgccacgtcagaggtgccgctggcaggattgcgtctcaatgtcgatattttgcagttacaggaactgttgatggacattggcgaagatgagcatttccagccgtcgatggcagccagcgggattaactccgccacgttatcagaagagattttatgcgcggcggagcggttactcgacgtgatggagcgaccactggatgcgcgtattctcggcaaacagatcatccgcgaaattctgtactacgtgctgaccggaccttgcggcggcgcgttactggcgctggtcagtcgccagactcacttcagtctgattagccgcgtgctgaaacggattgagaataaatacaccgaaaacctgagcgtcgagcaactggcggcagaagccaacatgagcgtatcggcgttccatcataattttaagtctgtcaccagcacctcgccgttgcagtatttgaagaattaccgtctgcataaggcgcggatgatgatcatccatgacggcatgaaggccagcgcagcagcgatgcgcgtcgactatgaaagcgcatcgcaatttagccgtgagtttaaacgttacttcggtgtgacgccgggggaagatgcggcaagaatgcgggcgatgcaggggaattaa

SEQ ID NO: 482347 - DNA, 1164 bp, Shigella sonnei
atgaacaactttaatctgcacaccccaacccgcattctgtttggtaaaggcgcaatcgctggtttacgcgaacaaattcctcacgatgctcgcgtattgattacctacggcggcggcagcgtgaaaaaaatcggcgttctcgatcaagttctggatgccctgaaaggcatggacgtgctggaatttggcggtattgagccaaacccggcttatgaaacgctgatgaacgccgtgaaactggttcgcgaacagaaagtgactttcctgctggcggttggcggcggttctgtactggacggcaccaaatttatcgccgcagcggctaactatccggaaaatatcgatccgtggcacattctgcaaacgggcggtaaagagattaaaagcgccatcccgatgggctgtgtgctgacgctgccagcaaccggttcagaatccaacgcaggcgcggtgatctcccgtaaaaccacaggcgacaagcaggcgttccattctgcccatgttcagccggtatttgccgtgctcgatccggtttatacctacaccctgccgccgcgtcaggtggctaacggcgtagtggacgcctttgtacacaccgtggaacagtatgttaccaaaccggttgatgccaaaattcaggaccgtttcgcagaaggcattttgctgacgctaatcgaagatggtccgaaagccctgaaagagccagaaaactacgatgtgcgcgccaacgtcatgtgggcggcgactcaggcgctgaacggtttgattggcgctggcgtaccgcaggactgggcaacgcatatgctgggccacgaactgactgcgatgcacggtctggatcacgcgcaaacactggctatcgtcctgcctgcactgtggaatgaaaaacgcgagaccaagcgcgctaagctgctgcaatatgctgaacgcgtctggaacatcactgaaggttccgacgatgagcgtattgacgccgcgattgccgcaacccgcaatttctttgagcaattaggcgtgccgacccacctctccgactacggtctggacggcagctccatcccggctttgctgaaaaaactggaagagcacggcatgacccaactgggcgaaaatcatgacattacgttggatgtcagccgccgtatatacgaagccgcccgctaa

SEQ ID NO: 482348 - DNA, 828 bp, Shigella sonnei
atggctaatccaaccgttattaagctacaggatggcaatgtcatgccccagctgggactgggcgtctggcaagcaagtaatgaggaagtaatcaccgccattcaaaaagcgttagaagtgggttatcgctcgattgataccgccgcggcctacaagaacgaagaaggtgtcggcaaagccctgaaaaatgcctcagtcaacagagaagaactgttcatcaccactaagctgtggaacgacgaccacaagcgcccccgcgaagccctgctcgacagcctgaaaaaactccagcttgattatatcgacctctacttaatgcactggcccgttcccgctatcgaccattatgtcgaagcatggaaaggcatgatcgaattgcaaaaagagggattaatcaaaagcatcggcgtgtgcaacttccagatccatcacctgcaacgcctgattgatgaaactggcgtgacgcctgtgataaaccagatcgaacttcatccgctgatgcaacaacgccagctacacgcctggaacgcgacacacaaaatccagaccgaatcctggagcccattagcgcaaggagggaaaggcgttttcgatcagaaagtcattcgcgatctggcagataaatacggcaaagccccggcgcagattgttatccgctggcatctggatagcggcctggtggtgatcccgaaatcggtcacaccttcacgtattgccgaaaactttgatgtctgggatttccgtctcgacaaagacgaactcggcgaaattgcaaaactcgatcagggcaagcgtctcggtcccgatcctgaccagttcggcggctaa

SEQ ID NO: 482349 - DNA, 927 bp, Shigella sonnei
atgaaaataatacttctgtttttagcagccctggcaagttttaccgtacacgcgcagcctccttcacagaccgtagaacaaacagtccggcagatttatcagaactataaatcagatgccagtacaccttatttcggtgaaaccggagagcgggcgataacttcagcgcgtattcaacaggcgcttaccctgaacgacaatcttacgctgccgggcaatattggctggctggattatgatccggtttgtgattgtcaggattttggcgatctggtgctagaaagcgttgcgataacccaaactgacgccgatcatgccgatgccgttgtgcgctttcgtatctttaaagatgataaagaaaagaccacgcagacactgaaaatggtggcggaaaatggtcgttgggtcattgacgatattgtcagcaatcatggcagcgtcttacaagcagttaatagcgagaatgaaaaaacgctggccgctttagcttcgttgcaaaaagaacagccggaagcctttgttgccgaactctttgaacatattgctgattatagctggccgtggacgtgggtggtttccgactcttaccgccaggcggttaatgccttctataaaaccaccttcaagacggccaataatcccgatgaagatatgcaaatagaacggcaatttatttacgacaatccgatctgttttggcgaagagtcgctattttcacgcgttgatgaaattcgagtcctggagaaaaccgccgattccgcccgcattcatgttcgttttacgctgaccaatggcaacaacgaagagcaagaactggttttacagcggcgcgaaggcaagtgggaaatcgctgattttatccgcccgaacagcggcagcctacttaagcagattgaggcaaaaaccgccgccagattaaagcaatga

SEQ ID NO: 482350 - DNA, 258 bp, Shigella sonnei
atgaaaacgattttcaccgtgggagctgttgttctggcaacctgcttgctcagtggctgcgtcaatgagcaaaaggtcaatcaactggcgagcaatgtacaaacattaaatgccaaaatcgcccggcttgagcaggatataaaagcactacgcccacaaatctatgctgccaaatccgaagctaacagagccaatacgcgtcttgatgctcaggactattttgattgcctgcgctgcttgcgtatgtacgcagaatga

SEQ ID NO: 482351 - DNA, 2220 bp, Shigella sonnei
atgagctctatctccctgatccaaccggatcgcgacctgttctcctggccgcagtactgggccgcctgttttggaccggcaccgtttttgccgatgtctcgtgaagagatggatcaacttggctgggatagctgcgacatcattttggttactggcgacgcgtatgtcgatcacccaagcttcgggatggcgatttgcggtcgtatgctggaagcacagggctttcgcgtcgggatcatcgcccagccggactggagcagcaaagacgactttatgcgtctgggtaaaccgaatctgtttttcggtgttactgctggcaacatggattcgatgatcaaccgttataccgccgatcgccgtttacgtcatgacgatgcctacacgccggataacgtcgcgggtaagcgcccggatcgcgccacactggtttatacccagcgttgtaaagaggcgtggaaagatgtaccggtgatcctcggcggtattgaggctagtctgcgccgtaccgcacattatgattactggtccgataccgtgcgccgttccgtgctggtggattcgaaagccgacatgctgatgtttggtaacggtgagcgtccgctggtggaggtggcgcaccgtctggcgatgggcgagccgattagtgaaatccgcgatgtgcgtaataccgcgattatcgtgaaagaggcgctgcctggctggagcggcgtggattccccccgtcttgatacccctggaaaaatcgacccaatcccgcatccgtatggtgaagatttgccgtgcgcggataacaaaccggtggcaccgaaaaagcaggaagccaaagccgtaaccgtgcagccaccgcgcccgaaaccgtgggaaaaaacctacgtgttgctgccttctttcgagaaagtgaagggcgataaagtgctgtacgcccatgcttcgcgtattctgcaccacgaaaccaacccaggctgcgtccgcgcattgatgcaaaaacacggtgaccgctatgtgtggatcaacccgcctgctatcccgctttctaccgaagagatggacagcgtttttgcgctgccgtacaagcgcgtgccacatccggcctatggcaatgcccgtattccggcttacgaaatgatccgtttttcggtcaacattatgcgcggctgctttggcggctgttctttctgttctattaccgagcacgaagggcgcattattcagagccgttcggaagattcgatcattaatgagatcgaagcgatccgcgacaccgttccaggttttacgggcgtgatttccgatctcggtgggccaactgccaacatgtatatgttgcactgcaaatcgccacgcgctgaacaaacttgtcgccgtttgtcgtgcgtttatccggatatttgtccgcacatggacactaaccacgaaccgacgatcaacctctatcgccgtgcgcgtgatctgaaaggcattaaaaaaatcctcatcgcctcaggcgtacgttatgacatcgccgtggaagatccgcgctatatcaaagagttggcgacccatcacgtcggcggttatctgaagattgctccggaacataccgaagaagggccgttgtcgaagatgatgaagccgggcatgggcagctatgaccgctttaaagagctgttcgatacctactcgaaacaggcaggtaaagagcagtatctgatcccgtatttcatctctgcgcaccccggtacgcgtgatgaagatatggtgaatttggcgctgtggctgaaaaagcatcgtttccgtctcgaccaggtacagaacttctacccatcgccgctggcgaactcaaccaccatgtattacaccgggaaaaaaccgctggcgaagattggttataagagcgaagacgtcttcgtaccgaagggcgacaaacagcgtcgtttgcataaagcgttgttgcgttaccacgatccggcaaactggccgttaatccgcccggcgctggaagcgatgggcaaaaagcatctgattggcagccgtcgcgattgcttagtgcctgcgccaaccattgaagagatgcgtgaagctcgtcgccagaaccgcaatacccgtccggcgttgactaaacatacgccgatggcgacccagcgtcagacgcctgctacggcaaaaaaagcgtcgtctacgcaatctcgtccggtgaatgctggtgcgaagaaacgccctaaagcggcggttggacgttaa

SEQ ID NO: 482352 - DNA, 1413 bp, Shigella sonnei
atgtcactcagtcggcgtcagttcattcaggcatcggggattgcactttgtgcaggcgctgttcccctgaaggccagcgcagccgggcaacagcaaccgctacccgttccgccgctacttgaatctcgccgtgggcaaccgctgtttatgactgtacaacgtgcgcactggtcatttacgccagggacacgcgcgtcggtctggggaatcaatggtcgttacctggggccgactatccgcgtctggaagggcgacgatgttaagcttatttacagcaaccgcctgacagaaaatgtctcaatgacggtggccgggctacaggtacctggcccgctgatgggcggtccggcacggatgatgtcgccaaacgctgactgggcacccgtactgcctattcgccagaacgcagctactctgtggtatcacgccaatactcccaaccgcacggctcagcaggtctataacggccttgccggaatgtggctggtggaagatgaagtcagcaagtcgctgcctatccccaaccattatgatgtggatgattttccggtcattatccaggataaacggctggataactttggtacgccagaatacaacgaaccgggaagcggcggctttgttggtgatacgctgctggttaacggtgtacaaagcccgtacgttgaagtctcgcgtggctgggtgcgcttgcgactgctgaacgcgtcgaactctcgtcgctatcaactacagatgagcgatggtcgcccgttacatgtgatttctggcgatcagggattcctgcctgctcctgtatcggtgaagcaactttcgctggcaccgggcgagcgccgcgagattctggtggatatgagcaacggcgatgaagtgtcgatcacctgtggcgaagcggcgagcattgttgatcgtattcgcggcttctttgagccatccagtattctggtttctaccctggtgctaacgctgcgcccaaccggccttctgccgctggtcacagacagtcttccgatgcgcttgctgccaactgaaatcatggccggttcgccgattcgcagtcgcgatatcagtctgggtgatgacccgggtattaatggacagctgtgggacgtcaaccgtattgatgtcaccgcgcagcaaggaacgtgggaacgctggacggtacgcgcggacgagccgcaagcgttccatattgaaggcgtgatgttccagatccgtaacgtgaatggtgcgatgccgttcccggaagacagaggctggaaagataccgtttgggttgacggacaagtggagctgcttgtttatttcggtcagccttcctgggcgcacttcccgttctacttcaacagtcagacgctggaaatggcggaccgtggctcgattgggcaactgttagtcaatccggtaccgtaa

SEQ ID NO: 482353 - DNA, 738 bp, Shigella sonnei
atgctatatatctttcgtcttattattaccgtgatttacagcatcttagtctgtgtattcggctccatttactgccttttcagcccgcgtaacccgaaacatgtggccacctttgggcatatgtttggccgtcttgcgccgctgttcggcctgaaagttgagtgccgcaaacctgcagatgctgaaagctacggcaatgctatctatatcgctaaccaccagaacaactatgacatggtgacagcatcgaacattgtgcaaccgccgacggtgacggtaggtaaaaagagcttgctgtggatccccttcttcgggcagttgtactggttaaccggcaacttattgatcgacagaaacaatcgcactaaagctcacggcaccattgcggaagtcgtgaatcatttcaaaaaacgccgtatttccatctggatgttcccggaaggaacccgcagccgtggtcgcggcctgctaccgttcaagactggagcatttcacgcggcaattgcggcgggcgtcccgattattcccgtgtgcgtctctacaacttcgaataagattaatcttaatcgactgcacaacggtctggtgattgtcgaaatgctgccgccaattgacgtcagtcagtatggcaaagatcaggttcgtgagctggctgcccattgtcgttcgataatggaacaaaaaatcgccgagctcgataaagaagtcgcagaacgcgaagccgccggaaaagtttaa

SEQ ID NO: 482354 - DNA, 2259 bp, Shigella sonnei
atgagcgatatggcagagcgccttgcgctacatgaatttacggaaaacgcctacttaaactactccatgtacgtgatcatggaccgtgcgttgccgtttattggtgatggtctgaaacctgttcagcgccgcattgtgtatgcgatgtctgaactgggcctgaatgccagcgccaaatttaaaaaatcggcccgtaccgtcggtgacgtactgggtaaataccatccgcacggcgatagcgcctgttatgaagcgatggtcctgatggcgcagccgttctcttaccgttatccgctggttgatggtcaggggaactggggcgcgccggacgatccgaaatcgttcgcggcaatgcgttacaccgaatcccggttgtcgaaatattccgagctgctattgagcgagctggggcaggggacggctgactgggtgccaaacttcgacggcactttgcaggagccgaaaatgctgcctgctcgtctgccaaacattttgcttaacggcaccaccggtattgccgtcggcatggcgaccgatattccaccgcataacctgcgtgaagtagctcaggcggcaatcgcattaatcgaccagccgaaaaccacgctcgatcagctgctggatatcgtgcaggggccggattatccgactgaagcggaaattatcacttcgcgcgccgagatccgtaaaatctacgagaacggacgtggttcagtgcgtatgcgcgcggtgtggaagaaagaagatggcgcggtggttatcagcgcattaccgcatcaggtttcaggtgcgcgtgtactggagcaaattgctgcgcaaatgcgcaacaaaaagctgccgatggttgacgatctgcgcgatgaatctgaccacgagaacccgacccgtctggtgattgtgccgcgttccaaccgcgtggatatggatcaggtgatgaaccacctcttcgctaccaccgatctggaaaagagctatcgcattaacctcaatatgatcggtctggatggtcgtccggcggtgaaaaacctgctggaaatcctctccgaatggctggtgttccgtcgcgataccgtgcgccgccgactgaactatcgtctggagaaagtcctcaagcgcctgcatatcctggaaggtttgctggtggcgtttctcaacatcgacgaagtgattgagatcattcgtaacgaagatgaaccgaaaccggcgctgatgtcgcggtttggccttacggaaacccaggcggaagcgatcctcgaactgaaactgcgtcatcttgccaaactggaagagatgaagattcgcggtgagcagagtgagctggaaaaagagcgcgaccagttgcagggcattttggcttccgagcgtaaaatgaataacctgctgaagaaagaactgcaggcagacgcgcaagcctacggtgacgatcgtcgttcgccgttgcaggaacgcgaagaagcgaaagcgatgagcgagcacgacatgctgccgtctgaacctgtcaccattgtgctgtcgcagatgggctgggtacgcagcgctaaaggccatgatatcgacgcgccgggcctgaattataaagcgggtgatagcttcaaagtggcggtgaaaggtaagagcaaccaatcggtagtgtttgttgattccaccggtcgtagctatgccatcgacccgattacgctgccgtcggcgcgtggtcagggcgaaccactcaccggcaaattaacgttgccgcctggggcgaccgttgaccatatgctgatggaaagcgacgatcagaaactgctgatggcttccgatgcgggttacggtttcgtctgcacctttaacgatctggtggcgcgtaaccgtgcaggtaaggctttgatcaccttaccggaaaatgcccatgttatgccgccggtggtgattgaagatgcttccgatatgctgctggcaatcactcaggcaggccgtatgttgatgttcccggtaagcgatctgccgcagctgtcgaagggcaaaggcaacaagattatcaacattccatcggcagaagccgcgcgtggagaagatggtctggcgcaattgtacgttctgccgccgcaaagcacgctgaccattcatgttgggaaacgcaaaattaaactgcgcccggaagagttacagaaagtcactggtgaacgtggacgccgcggtacgttgatgcgcggtttgcagcgtatcgatcgtgttgagatcgactctcctcgccgtgccagcaacggtgatagcgaagagtaa

SEQ ID NO: 482355 - DNA, 483 bp, Shigella sonnei
atgacaaacctgacactggatgtaaacattatcgatttcccatcaatccctgtggcgatgttgccgcaccgctgtagccctgagttgctcaactacagtgtggcgaaatttatcatgtggcgtaaagagacggggctttctcctgttaaccaaagccagacttttggcgtcgcctgggacgaccctgccaccaccgcaccggaagcgtttcgctttgatatctgcggcagcgttagcgaaccgattcccgataatcgttatggtgtgagcaatggtgaacttaccggtggacgttatgccgtggcccgccacgttggcgagctggacgatatttcacacacgatatggggcattattcgccactggctgcctgcaagcggcgagaaaatgcgtaaagcaccgattctgtttcactacaccaatcttgccgaaggggtgacggagcagcgactggaaacggatgtttatgtgccgttagcgtga

SEQ ID NO: 482356 - DNA, 393 bp, Shigella sonnei
atgaaaaaattcgcagcagtaatcgcagtaatggccctgtgcagtgcaccggtgatggcagcagagcagggcggtttttctggcccatcggcaacgcaaagtcaggccggaggattccaggggccgaacggcagcgtaacgactgtagaaagcgcaaaatccctgcgtgacgacacctgggtaaccctgcgcggcaatatcgttgaacgcatctctgacgatctctacgtgtttaaagatgccagcggtactatcaatgttgatatcgaccacaaacgctggaacggtgtgacggtgacgccgaaagatacggttgagattcagggtgaagtcgataaagactggaattctgttgaaattgacgtcaaacagatccgcaaagtaaatccgtaa

SEQ ID NO: 482357 - DNA, 660 bp, Shigella sonnei
atgcgaattttactgatagaagatgacatgctgattggcgacggcatcaaaactggccttagtaaaatgggttttagtgtcgactggtttacacaaggtcgtcagggaaaagaggcgctttatagcgcaccttatgatgcggtgatcctggatttaaccttaccaggcatggatggtcgcgatattttgcgcgaatggcgagagaaaggtcagcgtgagccggtactgatcctgaccgcgcgtgatgcgttagcggaacgtgtagaagggctgcgtctgggagctgacgattatctgtgtaaaccttttgcgttgatagaagtcgccgccaggctggaggctctgatgcgccgaaccaacggccaggccagcaacgagctgcgccacggtaacgtcatgctcgaccccggcaaacgtatcgccacgctggctggcgaacccttaacactgaaaccaaaagaatttgccctgctggaattactgatgcgtaacgctggtcgggtactgccgcgcaaactgattgaagagaaactgtatacctgggacgaagaggtcaccagtaatgccgttgaagtgcatgtgcatcatctgcgacgcaaactcggtagtgattttattcgtaccgtgcatggtattggctacacattaggtgagaaatga

SEQ ID NO: 482358 - DNA, 1350 bp, Shigella sonnei
atgaaatttacccaacgtcttagtctgcgcgtcaggctgacgctaatctttttaattctggcctcggtgacctggctgctttccagctttgtcgcctggaaacaaacaacggataacgtcgatgaattgttcgacacccaactgatgctgtttgccaagcggttaagtacgctcgatctcaacgaaatcaacgcggcggatcgcatggcacagacgccaaataaattaaaacacggtcatgttgatgacgatgcgctgacctttgccatctttacccacgacggcagaatggtccttaatgatggcgataacggagaagatattccctatagctatcaacgggaaggttttgctgacgggcaactggtcggtgaagacgatccttggcgttttgtctggatgacctcacctgatggcaaatatcgcatcgttgttggccaggaatgggaataccgtgaagacatggcgctggcgattgttgccgggcaattgatcccgtggctggtcgcactgccgattatgttaatcatcatgatggtactactgggtcgtgaactcgcgccgctgaacaaactggcgctggcactacgtatgcgtgaccctgactcggaaaaaccactaaacgcgactggcgtacccagcgaagtgcgaccactggttgagtcgctaaatcaactgttcgcccgcacacatgcgatgatggttcgagaacgacgctttacctccgatgcagctcacgaactacgtagcccgttaacagcgctgaaagtgcaaaccgaagttgcgcagctctctgacgatgatccgcaggcgcggaaaaaagcactgctccaattacattccgggatcgatcgcgctactcgtctggttgatcaactgctcacgctatcgcggctggactcactggataaccttcaggacgtcgcggagatcccgcttgaagatctcctgcaatcgtcggtgatggatatttaccacacggcgcagcaggcgaaaattgacgtgcgactgacactcaatgcccacagcatcaaacgcactggacaaccgctattgctaagtttgttggtgcgaaaccttctggataacgccgtgcgctacagtccacagggcagcgtggtggacgtcacgctgaatgccgataatttcatcgtgagggataacggccccggtgtgacaccagaggcactggcgcgaattggcgaacgcttctatcgcccccccggacaaaccgctaccggcagtggacttgggctatcgattgtccagcgaatcgccaaattgcatggcatgaatgttgaatttgggaatgcggaacaaggtggatttgaggcgaaggtgagctggtaa

SEQ ID NO: 482359 - DNA, 582 bp, Shigella sonnei
atgagcaacaccctgattatcaacggcgcgaaaaaattcgcccactccaatggtcaactgaacgacaccctgaccgaagtcgcggatggcacactgcgcgacctcgggcatgatgttcgcatcgttcgcgccgacagcgactacgatgtcaaagcggaagtacaaaactttctctgggctgatgtggtgatctggcagatgccaggctggtggatgggcgcgccgtggacagtgaaaaaatacattgatgatgtattcaccgaaggtcacgggacgctgtatgccagcgatggccgtacccgcaaagatccgtcaaaaaaatacggttccggcggcctggtacagggcaaaaaatatatgctttctctgacctggaacgcaccaatggaagccttcaccgaaaaagatcaattcttccacggcgttggcgtcgacggtgtgtatctgccgttccataaagcaaaccaattccttggcatggaaccgctgccgacatttatcgctaatgacgtgataaaaatgcctgatgttccccgctatactgaagaatatcgcaagcatcttgtggaaatttttggttaa

SEQ ID NO: 482360 - DNA, 315 bp, Shigella sonnei
atgcttaccgtaatcgcagaaatccgtactcgtcctggtcaacatcaccgtcaggcggtattggatcagtttgctaaaatcgttccaaccgtactgaaagaagaaggttgccacggctatgcgccaatggtggattgcgctgctggcgtgagtttccagtctatggcaccggattctatcgtgatgattgagcagtgggaaagcatcgcgcaccttgaagcgcatctgcaaaccccgcacatgaaggcgtacagcgaagccgtaaaaggcgacgtgctggagatgaatattcgtattctgcagccagggatttaa

SEQ ID NO: 482361 - DNA, 1893 bp, Shigella sonnei
atgacgcaaacttataacgctgatgccattgaggtactcaccgggcttgagccggttcgccgccgtccggggatgtataccgataccactcgccctaaccatttggggcaagaagttattgataacagtgtcgatgaagcactggcgggtcacgcaaaacgcgtggatgtaatcttacatgctgaccagtcgttagaagttattgacgatgggcgcgggatgccggtggatattcacccggaagagggtgtcccggcggttgaattgattctttgccgtctgcatgcaggcggtaaattctctaacaaaaattaccagttctctggcggcctgcatggcgtggggatttcggtggttaacgccctgtcgaagcgcgttgaagttaacgtgcgccgcgatggtcaggtttataacatcgcctttgaaaatggcgaaaaggtgcaggatttacaggttgtcggcacttgcggtaaacgcaataccggtaccagcgtgcacttctggccggatgaaaccttctttgacagcccgcgattttctgtttcacgcctgacgcatgtgctgaaagccaaagcggtactgtgccccggcgttgagattacctttaaagatgagatcaacaacaccgaacagcgctggtgctatcaggacggtctgaatgattacctggcggaagcggtaaacggtttaccgacgctgccagaaaaaccgtttatcggtaatttcgctggcgatactgaagctgtggactgggcgctactgtggctgccggaaggcggtgaactgctgaccgaaagctacgtcaacctgatcccaacgatgcagggcggtacccatgttaatggcctgcgtcagggcctgttggacgcgatgcgtgagttctgtgaatatcgcaacattctgccgcgcggcgtgaagctgtcggcggaagatatctgggatcgctgcgcctatgttctgtcggtgaaaatgcaggatccgcagtttgccgggcagacgaaagagcgtctctcttcgcgtcaatgcgcggcattcgtttctggcgtggtgaaagatgcctttatcctgtggctgaaccagaacgttcaggcggcggagttgctggcagagatggcgatttccagcgcccagcgtcgtatgcgtgcggctaaaaaagtggtgcgtaaaaagctgaccagcggcccggcgctgcctggcaaactggctgattgtaccgcgcaggaccttaaccgtaccgaactgttcctcgtggaaggtgactccgcaggcggatctgccaagcaggcgcgcgatcgtgaatatcaggcgatcatgccgctgaaaggtaagatccttaacacctgggaagtttcttccgacgaagtgctggcctcgcaggaagtgcatgatatttcggtagcgatcggtatcgatcctaacagcgacgatctgagccagcttcgttatggcaaaatctgtatcctcgcggatgcggactctgatggtctgcacattgccacgctgctctgcgctttgttcgtaaaacacttccgcgcgttggtgaaacacggtcacgtttacgtcgcactgccaccgctctaccgtattgatctcgggaaagaggtttattacgcgctgacggaagaagagaaagagggcgtacttgagcaattaaaacgcaagaaaggcaagccgaacgtccagcgttttaaaggtctgggggaaatgaacccgatgcaattgcgtgaaaccacgcttgatccgaacactcgccgtctggtgcagttgactatcgatgatgaagacgatcagcgtactgacgcgatgatggatatgctgctggcgaagaaacgctcggaagatcgccgcaactggttgcaagagaaaggcgacatggcggagattgaggtttaa

SEQ ID NO: 482362 - DNA, 582 bp, Shigella sonnei
atgtctacgcttctttatttacacggtttcaacagctcgccgcgctctgcaaaagcgagcttgttaaaaaactggctggcggaacatcaccctgacgttgagatgatcattccgcagttgccgccgtatccttccgacgcggcagaactgctggaatccattgtcctggaacatggcggcgattcgctgggtattgtcggttcgtcactggggggatattacgccacctggttgtcacaatgttttatgctgcccgcagtggtggtaaacccggcggtgcgcccgtttgaactgctgacggactatctcggtcagaacgagaacccatacaccgggcagcaatatgtgctagagtcacgccatatttacgatctcaaagtcatgcagattgacccgctggaagcgccggatttgatctggctgctgcaacagacgggagatgaagtgctggattaccgccaggcggtggcgtactacgcttcctgccgccagactgtcatagaaggcggcaaccacgcattcacgggcttcgaagattatttcaacccgatcgtcgattttcttggtctgcaccatctctga

SEQ ID NO: 482363 - DNA, 828 bp, Shigella sonnei
ttggaaagcctgttaacccttcctctggctggtgaggccagagtcaggattttacaaattaccgacactcacctgtttgcacaaaagcacgaagctctgttaggggtaaacacctgggaaagctaccaggcggtgctggaggcgattcgtccacatcagcacgaattcgacctgattgtcgcgacaggtgatttagcgcaggatcaatcctctgcggcctatcagcatttcgctgaaggcatcgcaagttttcgtgcgccctgcgtctggctgccgggcaaccacgatttccagcccgcgatgtacagcgcgttacaggatgcgggtatctccccggcgaagcgggtgtttattggtgagcaatggcaaatcctgttgctggatagccaggtgtttggcgtgccgcacggtgagctgagcgagtttcagcttgagtggctggaacgtaaactggccgatgcgccagaacgccatacgttgctgctgctgcatcatcatccgctacctgcgggttgtagttggctcgatcaacacagtctgcgtaacgcgggcgaactggataccgtgctggcgaagtttccgcacgtcaaatacttgctgtgcggtcatattcatcaggagctggatctcgactggaacggtcgccgcctgctggcaacgccgtcgacctgtgtgcagtttaagccgcactgttccaactttacgctggatactatcgcgcccggctggcgtactctcgagttacatgctgatggcacgctgaccaccgaggtgcatcgcctggcggacacacgtttccaacctgataccgcttcagaaggctactga

SEQ ID NO: 482364 - DNA, 423 bp, Shigella sonnei
atgaagcgttacacacctgactttcctgaaatgatgcgcctgtgcgagatgaacttttcacaattgcgccgtttgttaccgcgcaatgacgcacccggcgaaactgtaagctatcaggtggcaaacgcacaatatcggctgacgattgtggaatcgacccgatacactaccctggtgacaatagaacagactgcgcccgcgatcagttactggagccttccgtcaatgacggtgcgtctgtatcatgacgcgatggtggctgaagtgtgttcaagccagcagatttttcgcttcaaagcgcggtatgattatcctaataaaaagttgcatcaacgcgacgaaaagcatcaaattaatcagtttttagcggactggttgcgatactgtttagcacatggagcgatggcgattccggtttactag

SEQ ID NO: 482365 - DNA, 630 bp, Shigella sonnei
atgcttaagccagacaacctgcccgttacatttggcaaaaacgatgtagaaattattgcacgagaaacactttatcgcggctttttttcattagatctttatagatttcgtcatcgtctattcaacgggcaaatgagtcatgaggtacggcgggaaatttttgagcgcggtcacgccgcagtcttgctaccctttgacccagtgcgcgatgaagttgtgctgattgagcagattcggattgccgcatacgacaccagtgaaaccccctggctactggagatggttgccgggatgatagaagagggtgaaagtgtggaagatgttgcccgtcgcgaagcgattgaagaggcgggactgatagtcaaacggaccaaaccggtgttaagtttcctggcaagcccggggggcaccagtgagcgttcgtcaattatggtgggcgaagtggacgccacgaccgcaagcggtattcatggtctggctgatgaaaacgaagatattcgcgttcatgtggtaagccgggaacaggcataccagtgggtagaagaggggaaaatcgacaacgcagcgtcggtcatcgctttgcaatggctgcagctgcatcatcaagcgttaaaaaatgagtgggcataa

SEQ ID NO: 482366 - DNA, 1482 bp, Shigella sonnei
atgaagaaattgctccccattcttatcggcctgagcctttctgggttcagttcgttgagccaggccgagaacctgatgcaagtttatcagcaagcacgccttagtaacccggaattgcgtaagtctgccgccgatcgtgatgctgcctttgaaaaaattaatgaagcgcgcagtccattactgccacagctaggtttaggtgcagattacacctatagcaacggctaccgcgacgcgaacggcatcaactctaacgcgaccagtgcgtccctgcagttaactcaatccatttttgatatgtcgaaatggcgtgcgttaacgctgcaggaaaaagcagcagggattcaggacgtcacatatcagaccgatcagcaaaccttgatcctcaacaccgcgaccgcttatttcaacgtgttgaatgctattgacgttctttcctatacacaggcacaaaaagaagcgatctaccgtcaattagatcaaaccacccaacgttttaacgtgggcctggtagcgatcaccgacgtgcagaacgcccgcgcgcagtacgataccgtgctggcgaacgaagtgaccgcacgtaataaccttgataacgcggtagagcagctgcgccagatcaccggtaactactatccggaactggcggcgctgaatgtcgaaaactttaaaaccgacaaaccacagccggttaacgcgctgctgaaagaagccgaaaaacgcaacctgtcgctgttacaggcacgcttgagccaggacctggcgcgcgagcaaattcgccaggcgcaggatggtcacttaccgacgctggatttaacggcttctaccgggatttctgacacctcttatagcggttcgaaaacccgtggtgccactggtacccagtatgacgacagcaatatgggccagaacaaagtgggcctgagcttctcgctgccgatttatcagggcggaatggttaactcgcaggtgaaacaggcccagtacaactttgttggtgccagcgagcaactggaaagcgcgcatcgtagcgtcgtgcaaaccgtacgttcctccttcaacaacattaatgcatctatcagtagcattaacgcctacaaacaagccgtagtttccgctcaaagctcattagacgcgatggaagcgggctactcggtcggtacgcgtaccattgttgatgtgttggatgcaaccaccacgctgtacaacgctaagcaagagctggcaaatgcgcgttataactacctgattaaccagttgaatattaagtcagctctgggtacgttgaacgagcaggatctgctggcactgaacaatgcgctgagcaaaccggtttccactaatccggaaaacgttgcaccgcaaacgccggaacagaatgctattgctgatggttatgcgcctgatagcccggcaccagtcgttcagcaaacatccgcacgcactaccaccagtaacggtcataaccctttccgtaactga

SEQ ID NO: 482367 - DNA, 672 bp, Shigella sonnei
atgaaacggacaaaatccatacgccacgcatcgttccgcaaaaactggagcgcacgccatctgacaccagtcgctctcgcggttgccactgtttttatgctggctggctgtgaaaagagtgatgaaacagtgtctctctatcaaaatgctgacgactgttcagctgcaaacccaggcaaaagcgccgaatgtaccaccgcgtacaacaatgcgctgaaagaagccgaacgtactgcgccgaaatacgccacccgtgaagactgtgttgctgaatttggtgaaggtcagtgccagcaggcaccagcccaggctggcatggcaccagaaaaccaggcgcaggcccagcaatccagcgggagtttctggatgccgctgatggccggttacatgatggggcgtctgatgggcggcggcgcgggatttgcacagcagccgctgttctcctcgaaaaacccagccagcccggcttacggtaaatataccgacgcgacgggtaaaaactatggcgcagcccagccaggccgcaccatgaccgtaccgaagacagccatggcaccaaaaccggcgaccactactaccgttacccgtggcggttttggtgaatctgttgccaaacaaagcactatgcagcgtagcgcaaccggcacctcttctcgttcaatgggtggctga

SEQ ID NO: 482368 - DNA, 1161 bp, Shigella sonnei
atggaaagagtcagtattaccgagcgcccggactggcgcgaaaaagcccacgaatacggtttcaattttcacaccatgtacggcgagccgtactggtgtgaagatgcttactacaagttgaccctcgcccaggttgaaaagctggaagaagtcaccgccgaactgcaccagatgtgcctgaaagtggtggaaaaagtgatcgccagcgatgagctgatgaccaaattccgcattccaaaacgcacctggagttttgtgcgtcagtcatggctgactcaccagccatcgctttattcgcgtcttgatctggcatgggatggcactggcgaacctaaactgctggaaaataacgccgatacaccaacgtcactatacgaggcggcgttctttcagtggatctggctggaagatcagcttaacgccggtaacttgccggagggcagcgaccagtttaacagtctgcaagaaaagctaatcgatcgctttgtcgagttgcgtgaacagtatggcttccagttgctgcatctcacctgctgtcgcgacacggtggaagatcgcggaaccattcagtatttgcaggactgcgcgacggaagctgaaatcgctaccgagttcctctacattgacgatatcgggttaggtgaaaaaggtcagttcacggatttacaggatcaggtaatttccaacctgttcaagctgtatccatgggaatttatgttgcgtgagatgttctccaccaagctggaggatgcaggcgtacgctggctggaaccggcgtggaagagcattatctccaacaaagcgcttctaccgctactatgggagatgttcccgaatcacccgaacctgctgcccgcttattttgcggaagatgatcatccgcaaatggaaaaatatgtggttaaaccgatcttctcccgtgaaggcgcaaacgtgtcgatcattgagaacggcaaaaccattgaagcagcggaaggtccgtatggcgaagaagggatgattgttcagcaattccacccgttaccgaaattcggcgacagctatatgctgattggtagctggctggtgaacgatcaacctgccggaattggcattcgtgaagaccgtgcgttgatcacccaggatatgtctcggttttatccacatatttttattgagtaa

SEQ ID NO: 482369 - DNA, 816 bp, Shigella sonnei
atgacacctttagttaaggatatcatcatgtcttcaacacgtatgccagcattgtttttaggtcacggtagtccgatgaacgtgctggaagataatttgtatacccgcagctggcagaagttggggatgacattgccacgcccgcaagcgattgtggtggtttcggctcactggtttacccgtggaacaggagtgaccgcgatggagacgccgcccacgattcatgactttggtggcttcccgcaggcgctgtacgatacgcattatcctgctccgggttcgcctgtgctggcacagcatctggttgagctgttagcgtcggtcccggtgacgctggataaagaagcctggggctttgaccacggttcctggggcgtgctgattaagatgtatcctgacgccgatatcccgatggtgcagttgagtatcgacagtagcaaacctgccgcctggcatttcgaaatggggcgcaaactggcagcgctgcgagatgaaggaataatgttggtcgccagtggcaacgtggtgcataacctgcgtacagtgaagtggcacggtgatagttcaccatatccttgggcgatgtcgtttaatgagtatgtgaaagcgaatctgacgtggcaaggggcggtagagcagcatcctctggtgaattaccttgaccatgaaggtggcgcgttatcgaacccaacgccggagcactatctgccgttgttgtatgtcttaggtgcgtgggatgggcaggagccaattaccattccggtcgatggtatagaaatgggcagcctgagtatgctgtcggtgcagataggttaa

SEQ ID NO: 482370 - DNA, 774 bp, Shigella sonnei
atgtcagtacctctcattctgaccatactggcgggggcagccacgtttattggcgcgtttctcggcgttctcgggcaaaaaccctcgaaccgcttactggcgttttcgctaggatttgcggcggggatcatgttgctcatctcattaatggaaatgcttcctgccgcactagcagctgaaggaatgtcgcctgtgttgggttatggaatgtttatcttcggtctgcttggctattttggcctggaccgcatgttgccacatgcgcatccgcaggatttaatgcaaaaatcggtgcagccgttgccaaaatcgatcaagcgcacagccattctgctcactctcggcatcagtctgcataacttcccggaagggattgccacctttgtcacggcgagcagcaacctggagctgggatttggcatcgcactggccgtcgcgttgcacaatatccctgaaggtctggcagtggcaggcccggtttatgcggcaacggggtctaaacgcaccgcgattctgtgggcggggatttctggactagcagaaattcttggtggtgtgctggcgtggttaatcctcggtagcatgatttccccggtggtcatggcggcaatcatggcggcggttgcaggaattatggtggcgctctcggttgatgaattaatgccgctcgccaaagagattgaccctaataataaccccagctatggcgtactatgtggaatgtcagtgatgggattcagtttagtgctgctacaaacggcgggaattggttaa

SEQ ID NO: 482371 - DNA, 171 bp, Shigella sonnei; identical to SEQ ID NO: 261292

SEQ ID NO: 482372 - DNA, 654 bp, Shigella sonnei; identical to SEQ ID NO: 459142

SEQ ID NO: 482373 - DNA, 291 bp, Shigella sonnei
atgattgacccgaaaaaaattgagcaaatcgctcgccaggttcacgaatcaatgcctaaaggaatcagggagttcggggaagatgtggagaaaaaaatccgccaaaccctacaagctcagctgacgcgcctcgaccttgtaagccgtgaagagttcgacgtccaaacgcaagtcctgttacggactcgtgagaaactggcgcggcttgaacaaagaatgagcgaactggaaaatcgcagtactgagattaaaaagcagccagatccagagactctccccccaacgctgtaa

SEQ ID NO: 482374 - DNA, 552 bp, Shigella sonnei
atgtctgcttttaaaaagtcacttcttgttgctggcgtagcaatgattctttccaataacgtatttgctgacgaaggtcacggcattgttaaatttaaaggtgaagttatctctgctccatgttcaattaaaccaggtgacgaagacttaactgtaaatctgggtgaagtagcagataccgttctgaaaagcgaccagaaatctttggctgagcctttcactattcacctgcaagactgcatgttgagccagggtggaaccacttattcaaaagcgaaggttactttcaccacagcgaatactatgacgggtcagactgacctgctgaaaaacaccaaagaaactgaaatcggtggtgccacaggcgttggcgtacgtattctggatagccagagcggcgaagtgactttaggtactccggtagtaattacattcaacaatactaacagctatcaggaactgaacttcaaagctcgtatggaatccccgggcaaagatgctaccccgggcaacgtttacgctcaggctgactataagattgcttacgagtaa

SEQ ID NO: 482375 - DNA, 1032 bp, Shigella sonnei
atgtataaaaaattaaaattaaccacaataagcgaattgattaaaaatatttattgttcattatccgttctcatcattggttgtgcgtcagcttatgccgttgaattcaacaaagatttaatcgaagccgaagatcgtgaaaacgttaacctttcccaatttgaaactgatggccaattacccgtaggtaaatactcattaaacgctcttattaataataaaaggacgccaatccatctggacctgcaatgggtattaattgataaccaaactgcagtttgtctgactccagagcaattaacattattaggctttactgatgagattattgaagaggctcagcaaaacctgatcgatggttgttaccctatcgaaaaagaaaaacaaattacaacttatctcgataaagggaaaatgcaattatccatatctgcacctcaggcatggttaaaatacaaagatgcaaactggacgcctcctgaactttgggatcatggtattgctggggcatttcttgactacaatttatatgcctctcattatgcaccacatcagggcgataattcacaaaatataagttcctatgggcaggctggggttaatcttggggcctggcgcctgcgtactgattaccagtacgatcagtcatttaacaatggcaaaagccaggcgaacaacctggattttccgcgtatttatttgtttcgcccaatcccagcaattaatgcaaaactaactataggtcaatacgatactgaatcctctattttcgactctttccatttttctggcgtttcgttgaaaagcgatgagaatatgttgccgcctgatctacgtggttacgcaccgcaaatcacgggtgttgcacaaacgaatgcaaaggtcactgtctcacagaacaaccgtattatttatcaagaaaatgttcctcctggcccatttgctattactaatttattcaatacattacaggggcaactggacgtcaaggttgaagaagaggacgggcaagtcactagactggccccctga

SEQ ID NO: 482376 - DNA, 1032 bp, Shigella sonnei
atgtctgcatttaccccggcaagtgaagtcttgctgcgtcacagtgatgatttcgaacaaagccgtattctgtttgccggagacttacaggatgacctgcccgcgcgtttagataccgcggccagccgtgctcatacccagcaattccaccactggcaggtattaagccgccagatgggggataacgcccgtttcagtctggtcgccacggtggatgacgtcgcagattgcgatacgctgatttactactggccgaagaacaaaccggaagcccagttccagttgatgaatttactttctctgctgccagtggggacagatatttttgtcgttggcgagaaccgcagcggcgtgcgcagcgccgagcagatgctggcagattatgcgccgttgaataaagtcgacagcgctcgtcgctgtggcctctattttggtcgtctggaaaaacagccggtatttgatgccgataaattctggggcgaatacagcgtcgatggcctgacggtcaaaacgctgcctggcgtgtttagccgcgacggtctggatgtcggtagccagttgctgctctcgacgttaactccgcacacgaaaggtaaagtgctggatgtcggctgtggcgcgggggtgctttcagttgcctttgcgcgccattcgccgaaaattcgtctcaccttgtgcgatgtctctgcgccagcggtagaagccagccgcgcaacacttgcggccaactgtgttgaaggtgaagtctttgccagcaacgtcttttccgaggtgaaaggtcgttttgatatgatcatctccaacccgccgttccacgatgggatgcaaaccagcctggatgcggcgcaaacgctgattcgcggcgcggtgcgtcatcttaatagcggcggcgagctgcgaattgtagcgaacgccttcctgccttacccggacgtgctggatgagacatttggcttccatgaagtgattgcgcaaaccgggcgtttcaaggtgtatcgcgccattatgacccgccaggcgaagaaaggttaa

SEQ ID NO: 482377 - DNA, 414 bp, Shigella sonnei; identical to SEQ ID NO: 460331

SEQ ID NO: 482378 - DNA, 447 bp, Shigella sonnei
atgaacacgatttcttccctcgaaacgactgatttaccagcggcttaccacattgaacaacgcgcccacgcctttccgtggagtgaaaaaacctttgccagcaaccagggcgagcgttatctcaactttcagttaacgcaaaacggcaaaatggcggcgtttgcgattacgcaagtggtgctggatgaagctacattgttcaatattgcggtcgatcctgactatcagcgtcagggattgggaagggtgctgctggaacatctgatcgacgaactggaaaaacgcggcgtggcgacactatggctggaagtccgtgcctcaaatgctgccgccattgccctgtacgaaagtttaggctttaacgaggcgacgattcgccgcaattactaccccaccacggacggtcgcgaagacgccatcatcatggcgttgccaatcagtatgtaa

SEQ ID NO: 482379 - DNA, 678 bp, Shigella sonnei
atgaagtgggactggattttctttgatgccgatgaaacgctgtttacctttgactcattcaccggcctgcagcggatgtttcttgattacagcgtcacctttaccgctgaagattttcaggactatcaggccgttaacaagccactgtgggtggattatcaaaacggcgcgatcacttcattacagcttcagcacgggcgttttgagagctgggccgaacggctgaaagttgaagcaggcttgcttaacgatgcctttattaatgcgatggcggaaatctgcacgccgctgccgggcgcggtttctctgcttaacgccattcgtggcaacgccaaaatcggcatcatcaccaacggctttagcgccttgcagcaagtgcgtctggaacgcacgggcctgcgtgattacttcgatttgctggtgatttccgaagaagttggcgttgccaaaccgaataagaaaattttcgattatgcgctggaacaggcgggcaatcctgaccgttcacgcgtgctgatggttggcgacactgccgagtccgatattctcggtggcatcaacgccgggcttgcgacctgctggctgaatgcgcacaatcgcgagcaaccagaaggcatcgcgcccacctggaccgtttcttcgttgcacgaactggagcagctcctgtgtaaacactga

SEQ ID NO: 482380 - DNA, 1617 bp, Shigella sonnei
atgccgcttactcaagaagaaagaattatgacgttgtctccttatttgcaagaggtggcgaagcgccgcacttttgccattatttctcacccggatgccggtaagactaccatcaccgagaaggtgctgctgttcggacaggccattcagaccgccggtacagtaaaaggccgtggttccaaccagcacgctaagtcggactggatggagatggaaaagcagcgtgggatctccattactacgtctgtgatgcagtttccgtatcacgattgcctggttaacctgctcgacaccccggggcacgaagacttctcggaagatacctatcgtaccctgacggcggtggactgctgcctgatggttatcgacgctgcaaaaggtgttgaagatcgtacccgtaagctgatggaagttacccgtctgcgcgacacgccgatcctcacctttatgaacaaacttgaccgtgatatccgcgacccgatggaactgctcgatgaagttgagaacgagctgaaaatcggctgcgcaccgatcacctggccgattggctgcggcaagctgtttaaaggcgtttaccacctttataaagacgaaacctatctctatcagagcggtaaaggccacacgattcaggaagtccgtattgttaaagggctgaataacccggatctcgacgctgcggttggtgaagatctggcacagcagctacgtgacgaactggaactggtgaaaggcgcgtctaacgagttcgacaaagaattgttccttgcgggcgaaatcactccggtattcttcggtactgcgctgggtaacttcggcgttgatcatatgctggatggcctggtggagtgggctcctgcgccgatgccgcgtcagactgatacccgtaccgtagaggcgagcgaagacaaatttaccggcttcgtatttaaaattcaggccaacatggacccgaaacaccgcgaccgcgtggcgtttatgcgcgtagtatccggtaaatatgaaaaaggcatgaagctgcgccaggtgcgtactgcgaaagatgtggttatctccgacgcgctgacctttatggcgggcgaccgttcgcacgttgaagaagcgtatccgggcgatatcctcggcctgcacaaccacggcactattcagatcggcgacacctttacccagggtgagatgatgaagttcaccggtattccgaacttcgcaccagaactgttccgtcgtatccgcctgaaagatccgctgaagcaaaaacagctgctcaaagggctggtacagctttccgaagagggcgcggtgcaggtgttccgtccgatctccaacaacgatttgatcgttggtgctgttggtgtgctgcagtttgatgtggtggtatcgcgcctgaagagcgaatacagcgttgaagcagtatatgaatcagtcaacgttgccactgcccgctgggtagaatgtgcggacgcgaagaaattcgaagagttcaagcgtaagaacgaaagccaactggcgcttgatggcggcgataacctcgcttacatcgctaccagcatggtcaacctgcgcctggcgcaggaacgttatcccgacgttcagttccaccagacccgcgagcattaa

SEQ ID NO: 482381 - DNA, 606 bp, Shigella sonnei
atgactatgacaagactgaagatttcgaaaactctgctggctgtaatgttgacctctgccgtcgcgaccggctctgcctacgcggaaaacaacgcacagactaccaatgaaagcgcagggcaaaaagtcgatagctctatgaataaagtcggtaatttcatggatgacagcgccatcaccgcgaaagtgaaggcggcgctggtggatcatgacaacatcaagagcaccgatatctctgtcaaaaccgatcaaaaagtcgtgaccctgagcggtttcgttgaaagccaggctcaggccgaagaggcagtgaaagtggcgaaaggcgttgaaggggtgacctctgtcagcgacaaactgcacgttcgcgacgctaaagaaggctctgtgaagggctacgcgggtgacaccgccaccaccagtgaaatcaaagccaaactgctggcggacgatatcgtcccttcccgtcatgtgaaagttgaaaccaccgacggcgtggttcagctctccggtaccgtcgattcccaggcacagagcgaccgtgctgaaagtatcgccaaagcggtagatggtgtgaaaagcgttaaaaatgatctgaaaactaagtaa

SEQ ID NO: 482382 - DNA, 162 bp, Shigella sonnei; identical to SEQ ID NO: 261922

SEQ ID NO: 482383 - DNA, 1074 bp, Shigella sonnei
gtggggcagcgaatacctgtaacgcttggtaatattgcgccgttgtcgctaaggccgttccagcctggacgaatagctctggtgtgcgaaggcggcggacagcgtggaattttcacggctggcgtgctggatgagtttatgcgcgcgcagtttaatcctttcgatctttatctcggcacatctgccggggcgcagaacctctcggcgtttatctgcaatcagcccggttacgcgcgcaaagtcatcatgcgctataccacaaaacgcgaatttttcgatccattgcgctttgtccgtggaggaaatcttatcgatctcgactggctggtggaggccaccgcaagccagatgccgttgcaaatggataccgccgcgcggttgtttgacagcggcaaatcgttttatatgtgcgcctgtcgtcaggatgactacgcgcctaattactttttaccaaccaaacaaaactggctggatgtgattcgcgcctccagtgcgatacctggcttttatcgtagcggagtgtcgctggaaggcattaactacctggatggcgggatcagtgatgcgattccggttaaagaggcggcaaggcagggcgctaaaacgttggtcgtcattcgcactgtgccgtcacaaatgtactacacgccgcagtggttcaaacgcatggaacgctggctgggtgacagtagcctgcagccgctggtcaatctggtgcagcatcatgaaaccagctatcgtgacattcagcaatttattgagaaaccaccgggcaagctgcggatattcgaaatttatccgccgaagccattacatagtatcgcgcttggcagtcggattccggcgctgcgtgaagactataaacttgggcgtttatgcggtcgttatttcctcgccacggttggcaagctattaactgaaaaagcgccgcttacccgccatctggtgccagtggtgacgccggaatcgatcgttattccgcctgcgccagtcgccaacgatacgctggttgccgaagtgagcgatgctccgcaggcgaacgacccgacatttaacaatgaggatctggcttga

SEQ ID NO: 482384 - DNA, 783 bp, Shigella sonnei
ttgatttgccgttttatcgatacccactgccattttgatttcccgccgtttagtggcgatgaagaggccagcctgcaacgcgcggcacaagcgggcgtaggcaagatcattgttccggcgacagaggcggaaaattttgcccgcgtgcaggcgttagcggaaaaatatcaaccgctgtatgccgcattggggttgcatccggggatgttggaaaaacatagcgatgtgtctcttgatcagctacagcaggcgctggaaaggcgtccggcgaaggtggtggcggtgggggagatcggtctggatctcttcggcgacgatccgcaatttgagaggcagcagtggttactcgacgaacagctgaaactggcgaaacgctacgatctgccggtgatccttcattcccggcgtatacacgacaaactggcgatgcatcttaaacgtcacgatttaccgtgcactggcgtggttcacggtttttccggcagcctgcaacaggccgagcggtttgtacagctgggctacaaaatcggcgtaggcggtactatcacctatccacgcgccagtaaaacccgcgatgtcatcgcaaaattaccgctggcatcgttgttgctggaaaccgacgcgccggatatgccgctcaacggctttcaggggcagcctaaccgaccggaacaggctgtgcgggtgtttgacgtgctttgcgagttgcgcccggaaccagaagatgagattgccgaagtgttgcttaataatacgtatgcgttgtttagcgttagtgggtag

SEQ ID NO: 482385 - DNA, 864 bp, Shigella sonnei
atgaacagcagatgcgctttagtcagtaagattatccccttctcctgcgttgacgggccaggcagtcgtctggctctgtttttgcagggctgcaatctgcgctgcaaaaactgtcacaatccgtggacgatgggacgttgcaatgactgtggggagtgcgtgccacagtgtccgcatcaggcgttgcagattgttgacggcaaagtggtgtggaacgctgtggtttgcgagcagtgtgatacctgcctgaagaggtgtccgcaacatgccacgccaatggcgcaatccatgagcgtggacgaagtgcttagccatgtccgcaaagcggtgctgtttattgaagggataacggtaagcggcggcgaagccacgacccaactgccgtttgtagtggcgctgtttactgctatcaaaaacgatccgcaactgcgccacctcacctgcctggtggacagtaacggcatgttgagcgaaaccggctgggaaaaattactcccggtgtgtgacggcgcaatgctcgatctcaaagcgtgggggagcgaatgtcatcaacacttaaccggacgcgataatcagcagattaagcgcagcatctgtttgcttgcagagcgcggcaagctggcggaactgcgtttgctggtaattccagaccaggtggattatttgcatcacatcgatgagctggcgacgtttatcaagagacttggcgatgttccggttcgcctgaatgcgtttcatgcccacggcgtgtatggcgaggcgcaaagctgggcgagcgccacgccggaagacgttgagccgttggctgatgcgttaaaggtgcgcggggtgagccggttgatatttccggcgctctatttgtga

SEQ ID NO: 482386 - DNA, 1551 bp, Shigella sonnei
atgcccacttctcatgaaaatgcactgcaacaacgttgccagcaaattgtcaccagcccagtgcttagcccggagcagaagcgccattttctggcactggaagcagaaaacaatctgccttatccgcagcttcctgccgaagcccgccgcgcgctggatgagggtgtaatctgcgatatgtttgaaggtcatgcgccgtacaaaccgcgctatgtcttacccgattacgcccgttttctggcgaacggttccgaatggctggagctggaaggcgcgaaagatcttgatgacgcactctctctgctgaccattctttaccaccacgtaccgtcggtcacatcgatgccggtctacctggggcaactggatgcgttgttgcaaccatatgttagaattctaacacaagacgagatcgatgttcgaataaaacgtttctggcgttacctcgacagaaccctgccagacgcctttatgcacgccaatatcggcccgtctgattcgcccattacccgcgcgatcttacgtgcagacgcagagttgaagcaggtttcaccgaacctgacctttatctacgatcctgaaatcacccctgatgacctgctgctggaagtggcgaagaacatctgtgaatgtagcaaaccgcacatcgccaacggtccggtgcatgataaaattttcacaaaagggggctacgggattgtgagctgttacaactcactgccgctgacgggtggtggcagcacgctggtacgccttaacctgaaagccattgccgagcgcagcgaatcgctggatgacttctttacgcgcactctaccgcactactgccagcagcagatcgccatcatcgatgcgcggtgtgaattcctctatcaacaatcacacttctttgagaatagcttcctggtgaaagaagggctgattaaccctgaacgttttgtgccaatgtttggcatgtatgggctggcggaagcggttaacttgctgtgtaagaaagaagggattgccgcgcgctacggtaaagaagccgccgcaaatgaagtgggttatcgcatcagcgcgcaactggcggagtttgtcgccaatacccccgtgaaatatggctggcaaaaacgcgccatgttacacgcacagtcggggatcagttccgatatcggcaccacgccgggcgcgcgtttgccgtatggtgatgagccagatccgatcacccatctgcaaactgtcgccccgcatcatgcttattattattccggcatcagcgacattctgacgctcgacgaaaccatcaaacgtaatccgcaggcgctggtacagctttgcctcggtgcctttaaagccggaatgcgtgaatttactgccaatgtcagcggtaacgatctggttcgcgttaccggttatatggtgcgtttgtcggatttagaaaaatatcgcgccgaaggttcacgcaccaacaccacctggctgggcgaagaagccgcacgcaacactcgtattctggaacgccagccgcgcgtgataagccatgaacagcagatgcgctttagtcagtaa

SEQ ID NO: 482387 - DNA, 780 bp, Shigella sonnei
atgactgatctgaaagcaagcagcctgcgtgcactgaaattgatggacctgaccaccctgaatgacgacgacaccgacgagaaagtaattgctctgtgtcatcaggccaaaaccccggtcggcaataccgccgctatctgtatctatcctcgctttatcccgattgctcgcaaaacgctgaaagagcagggcaccccggaaatccgaatcgctacggtaaccaacttcccacacggtaacgatgacatcgaaatcgcgctggcagaaacccgtgcggcaatcgcctacggtgctgatgaagttgacgttgtgttcccgtaccgcgcgctgatggcgggtaacgagcaggttggttttgacctggtgaaagcctgtaaagaggcttgcgcggcagcgaatgtactgctgaaagtgatcatcgaaaccggcgaactgaaagacgaagcgctgatccgtaaagcgtctgaaatctccatcaaagcgggtgcggacttcatcaaaacctctaccggtaaagtggctgtgaacgcgacgccggaaagcgcgcgcatcatgatggaagtgatccgtgatatgggcgtagaaaaaaccgttggtttcaaaccagcgggcggcgtgcgtactgcggaagatgcgcagaaatatctcgccatcgcagatgaactgttcggtgctgactgggcagatgcgcgtcactaccgctttggtgcttccagcctgctggcaagcctgttgaaagcgctgggccacggtgacggtaagagcgccagcagctactaa

SEQ ID NO: 482388 - DNA, 1323 bp, Shigella sonnei
ttgtttctcgcacaagaaattattcgtaaaaaacgtgatggtcatgcactgagcgatgaagaaattcgtttctttatcaacggcattcgcgacaacactatctccgaagggcagattgccgccctcgcgatgaccattttcttccacgatatgacaatgcctgagcgtgtctcgctgaccatggcgatgcgagattcaggaaccgttctcgactggaaaagcctgcatctgaatggcccgattgttgataaacattccactggtggcgtcggcgatgtgacttcgctgatgttggggccgatggtcgcagcctgcggcggctatattccgatgatctctggtcgcggcctcggtcatactggcggtacgctcgacaaactggaatccatccctggcttcgacattttcccggatgacaaccgtttccgcgaaattattaaagacgtcggcgtggcgattatcggtcagaccagctcactggctccggcggataaacgtttctacgcgacccgtgatattaccgcaaccgtggactccatcccgctgatcaccgcctctattctggcgaagaaacttgcggaaggtctggacgcgctggtgatggacgtgaaagtgggtagcggcgcgtttatgccgacctacgaactctctgaagcccttgccgaagcgattgttggcgtggctaacggcgctggcgtgcgcaccaccgcgctgctcaccgacatgaatcaggtactggcctccagtgcaggtaacgcggttgaagttcgtgaagcggtgcagttcctgacgggtgagtatcgtaacccgcgtctgtttgatgtcacgatggcgctgtgcgtggagatgcttatctccggcaaactggcgaaagatgacgccgaagcgcgcgcgaaattgcaagcagtgctggacaacggtaaagcggcagaagtctttggtcgtatggtagcggcacaaaaaggcccaaccgacttcgttgagaactacgcgaagtatctgccgacagcgatgctgacgaaagcagtctatgctgataccgaaggttttgtcagtgaaatggatacccgcgcgctggggatggcagtggttgcaatgggcggcggtcgtcgtcaggcatctgacaccattgattacagcgtcggctttactgatatggcgcgtttgggcgaccaggtagacggtcagcgtccgctggcggttatccacgcgaaagacgaaaacagctggcaggaagcggcgaaagcggtgaaagcggcaattaaacttgccgataaagcaccggaaagcacaccaactgtctatcgccgtatcagcgaataa

SEQ ID NO: 482389 - DNA, 1224 bp, Shigella sonnei
atgaaacgtgcatttattatggtgctggactcattcggcatcggcgctacagaagatgcagaacgctttggtgacgtcggggctgacaccctgggtcatatcgcagaagcttgtgccaaaggcgaagctgataacggtcgtaaaggtccgctcaatctgccaaatctgacccgtctggggctggcgaaagcacacgaaggttctaccggtttcattccggcgggaatggacggcaacgctgaagttatcggcgcgtacgcatgggcgcacgaaatgtcatccggtaaagataccccgtctggtcactgggaaatagccggtgtcccggttctatttgagtggggatatttctccgatcacgaaaacagcttcccgcaagagctgctggataaactggttgaacgcgctaatctgccgggttacctcggtaactgccactcttccggtacggtcattctggatcagctgggcgaagagcacatgaaaaccggcaagccgattttctatacctccgctgactctgtgttccagattgcctgccacgaagaaacctttggcctggataaactctacgaactgtgcgaaatcgcccgtgaagagctgaccaacggcggctacaacatcggtcgtgttatcgctcgtccgtttatcggtgacaaagccggtaacttccagcgtaccggtaaccgtcacgacctggctgttgagccgccagcaccgaccgtgctgcagaaactggttgatgaaaaacacggtcaggtggtttctgtcggtaaaattgcagacatctacgccaactgcggtatcaccaagaaagtgaaagcaactggcctggacgcgctgtttgacgccaccatcaaagagatgaaagaagcgggtgataacaccatcgtcttcaccaacttcgttgacttcgactcttcctggggccaccgtcgcgacgtcgccggttatgctgtgggtctggagctgttcgaccgccgtctgccggagctgatgtctctgctgcgcgatgacgacatcctgatcctcactgctgaccacggttgtgatccgacctggaccggtactgaccacacgcgtgaacacattccggtactggtttacggcccgaaagtaaaaccgggctcactgggtcaccgtgaaaccttcgcggatatcggccagactctggcaaaatattttggtacttctgatatggaatatggcaaagccatgttctga

SEQ ID NO: 482390 - DNA, 720 bp, Shigella sonnei
atggctaccccacacattaatgcagaaatgggcgatttcgctgacgtagttttgatgccaggcgacccgctgcgtgcgaagtatattgctgaaactttccttgaagatgcccgtgaagtgaacaacgttcgcggtatgctgggcttcaccggtacttacaaaggccgcaaaatttccgtaatgggtcacggtatgggtatcccgtcctgctccatctacaccaaagaactgatcaccgatttcggcgtgaagaaaattatccgcgtgggttcctgtggcgcagttctgccgcacgtaaaactgcgcgacgtcgttatcggtatgggtgcctgcaccgattccaaagttaaccgcatccgttttaaagatcatgactttgccgctatcgctgactttgacatggtgcgtaacgcggtagacgcggctaaagcactgggcattgatgctcgcgttggtaacctgttctccgctgacctgttctactctccggacggcgaaatgttcgacgtgatggaaaaatacggcatcctcggcgtggaaatggaagcggctggtatctacggcgtcgctgcagaatttggcgcgaaagccctgaccatctgcactgtgtctgaccacatccgcactcacgagcagaccactgccgctgagcgtcagaccaccttcaacgacatgatcaaaatcgcactggaatccgttctgctgggcgataaagagtaa

SEQ ID NO: 482391 - DNA, 150 bp, Shigella sonnei
atgatcgatctggaaaaccaggagcgggagattatcaatttaatgttaagccagcgtatttcctggctagccgccgtgcgtatcaggcataaattatcacttgctgaagtaagtaaaatgttaggtatctcgattaattctctaaaatag

SEQ ID NO: 482392 - DNA, 1017 bp, Shigella sonnei
atgtccacattacgcctgctcatctctgactcttacgacccgtggtttaacctggcggtggaagagtgtatttttcgccaaatgcccgccacgcagcgcgttctgtttctctggcgcaatgccgacacggtagtgattggtcgcgcgcagaacccgtggaaagagtgtaatacccggcggatggaagaagataacgtccgcctggcgcggcgcagtagcggtggcggcgcggtgttccacgatctcggcaatacctgctttacctttatggctggcaagccggagtacgataaaaccatctctacgtcgattgtgctcaatgcgctgaacgcgctcggcgtcagcgccgaagcgtccggacgtaacgatctggtggtgaaaacagtcgaaggcgaccgcaaagtctcaggctcggcctatcgcgaaaccaaagatcgtggcttccaccacggcactttgctgctcaatgccgaccttagccgcctggcaaactatctcaatccggataaaaagaaactggcggcgaaaggcattacctcagtgcgttcccgcgtgaccaacctcaccgagctgctgccggggatcacccatgagcaggtttgcgaggccataaccaaggcctttttcgcccattatggcgagcgtgtagaagcggaaatcatctccccggacaaaacgccagacttgccaaacttcgccgaaacctttgcccgtcagagtagctgggaatggaacttcggtcaggctccggcattctcgcatctgctggatgaacgctttagctggggcggcgtggaactgcatttcgacgttgaaaaaggccatatcacccgcgcccaggtgtttaccgacagcctcaaccccgcgccgctggaagccctcgccgggcgactgcaaggctgcctgtaccgcgcggatatgctgcaacaagagtgcgaagcgctgttggttgacttcccggaccaggaaaaagagctacgggagttgtcgacgtggatagcgggggcggtaaggtaa

SEQ ID NO: 482393 - DNA, 645 bp, Shigella sonnei
atggctcgcacaaaactgaaattccggctgcatcgggcagtgattgtcctgttctgtcttgccttgttagtggcactgatgcagggggcgtcatggtttagtcaaaaccaccagcgacagcgtaatccacagctggaagaactggcccgcaccctggcgcgtcaggtgacgctgaacgttgcaccgctgatgcgtaccgactcaccagatgaaaaacgcattcaggcgatcctcgatcagttaacggatgaaagccgcatcctcgacgcgggtgtgtatgacgaacaaggcgatcttatcgcccgttcaggcgaaagcgtcgaagtgcgcgaccggctggcgctcgacggtaaaaaagcaggcggctattttaaccagcagattgtcgagccaattgcgggtaaaaacggaccgctcggctatctgcgcctgacactcgacacccatacgctcgccaccgaagcccaacaggtggataacaccactaacattttacgcctgatgttgctgctctcactggcaatcggcgtagtgctgacccgcacgctgctacagggtaaacgcacccgctggcagcaatcgcccttcctgttaaccgccagcaaaccggtgccggaagaggaagaaagcgagaaaaaagagtga

SEQ ID NO: 482394 - DNA, 969 bp, Shigella sonnei
atgcctaacattacctggtgcgacctgcctgaagatgtctctttatggccgggtctgcctctttcattaagtggtgatgaagtgatgccactggattaccacgcaggtcgtagcggctggctgctgtatggtcgtgggctggataaacagcgtctgacccaataccagagcaaactgggtgcggcgatggtgattgttgccgcctggtgcgtggaagattatcaggtgattcgtctggcaggttcactcaccgcacgggctacgcgcctggcccatgaagcgcaactggatgtcgccccgctggggaaaatcccgcacctgcgcacgccgggtttgctggtgatggacatggattccaccgccatccagattgaatgtattgatgaaattgccaaactggccggaacgggcgagatggtggcggaagtaaccgaacgggcgatgcgcggcgaactcgattttaccgccagcctgcgcagccgtgtggcgacgctgaaaggcgctgacgccaatattctgcaacaggtgcgtgaaaatctgccgctgatgccaggcttaacgcaactggtgctcaagctggaaacgctgggctggaaagtggcgattgcctccggcggctttactttctttgctgaatatctgcgcgacaagctgcgcctgaccgccgtggtagccaatgaactggagatcatggacggtaaatttaccggcaatgtgattggcgacatcgtagacgcgcagtacaaagcgaaaactttgactcgcctcgcgcaggagtatgaaatcccgctggcgcagaccgtggcgattggcgatggagctaatgacctgccgatgatcaaagcagcagggctggggattgcctaccatgccaagccaaaagtgaatgaaaaggcggaagtcaccatccgtcacgctgacctgatgggggtattctgcatcctctctggcagcctgaatcagaagtaa

SEQ ID NO: 482395 - DNA, 1383 bp, Shigella sonnei
gtggcaaaagctccaaaacgcgcctttgtttgtaatgaatgcggggccgattatccgcgctggcaggggcagtgcagtgcctgtcatgcctggaacaccatcaccgaggtgcgtcttgctgcgtcgccaacggtggcgcgtaacgagcgtctcagcggctatgccggtagcgccggggtggcaaaagtccagaaactctccgatatcagccttgaagagctgccgcgtttttccaccggatttaaagagttcgaccgcgtactaggcggcggcgtggtgccgggaagcgccattctgattggcggtaacccaggtgcggggaaatccacgctgctactgcaaacgctgtgcaaactggcccagcagatgaaaacgctgtatgtcactggcgaagagtcgctgcaacaggtggcaatgcgcgctcatcgccttggcctgccgactgacaatctcaatatgttgtcggaaaccagcatcgaacagatctgcctgattgccgaagaagagcaaccgaaactgatggtaattgactcgatccaggtgatgcatatggcggatgtacaatcatcgcctggtagcgtggcgcaggtgcgtgaaacggcggcttatctgacgcgcttcgccaaaacgcgcggtgtggcgattgtcatggttgggcacgtaaccaaagatggctcgctggctggccctaaagtgctggaacactgtatcgactgttcggtgcttctggatggtgatgccgactcccgttttcgcaccttgcgcagccataaaaaccgcttcggcgcggtgaatgagctgggcgtcttcgcgatgaccgaacaggggctgcgtgaagtcagcaacccttcggcaattttcttaagtcgcggagatgaagtgacctccggcagctccgtgatggtggtgtgggaaggaacgcgtccgttgctggtggagattcaggcgctggtcgatcactcgatgatggcgaatccgcgccgcgtggcagtggggctggaacaaaaccgtctggcaatcctgctggctgtcttgcaccgtcacggtggtctgcaaatggccgatcaggatgtatttgtgaacgtggtcggcggcgtgaaggtaaccgaaaccagtgccgatttagcgttactgctggcgatggtttccagcctgcgtgacagaccgctgccacaggatctggtggtgtttggtgaagtcgggctggcaggggagatccgcccggtgcccagcggtcaggaacgaatttcagaagcggcgaaacacggttttcgccgggcgattgttccggcggctaacgtaccgaaaaaagcgccggaagggatgcagatttttggcgttaaaaaactctccgacgcgcttagcgtgttcgacgacttataa

SEQ ID NO: 482396 - DNA, 1233 bp, Shigella sonnei; identical to SEQ ID NO: 458178

SEQ ID NO: 482397 - DNA, 1668 bp, Shigella sonnei
gtggctcaattcgtttataccatgcatcgtgtcggcaaagttgttccgccgaaacgtcatattttgaaaaacatctctctgagtttcttccctggggcaaaaattggtgtcctgggtctgaacggcgcgggtaagtctaccctgctgcgcattatggcgggcattgataaagacatcgaaggtgaagcgcgtccgcagccagacatcaagattggttacctgccgcaggaaccgcagctgaacccggaacacaccgtgcgtgagtccattgaagaagcggtttctgaagtggttaacgccctgaaacgcctggatgaagtgtatgcgctgtacgccgatccggatgccgattttgacaagctggccgctgaacaaggccgtctggaagagatcattcaggctcacgacggtcataacctgaacgtacagctggagcgtgcggcggatgcgctacgtctgccggactgggacgcgaaaatcgctaacctctccggtggtgagcgtcgtcgcgtagcgttgtgccgcctgctgctggaaaaaccagacatgctgctgctcgacgaaccgaccaaccacctggatgccgaatccgtggcctggctggaacgcttcctgcacgacttcgagggcaccgtggtggcgattacccacgaccgttacttcctcgataacgttgcaggctggatcctcgaacttgaccgcggtgaaggtattccgtgggaaggcaactactcctcctggctggagcagaaagatcagcgcctggcgcaggaagcttcacaagaagcggcgcgtcgtaagtcgatcgagaaagagctggagtgggtacgtcagggaactaaaggccgccagtcgaaaggtaaagcacgtctggcacgctttgaagagctgaacagcaccgaatatcagaaacgtaacgaaaccaacgaactgtttattccacctggaccgcgtctgggcgataaagtgctggaagtcagcaacctgcgtaaatcctacggtgatcgcctgctgattgatgacctgagcttctcgatcccgaaaggggcaatcgtcgggatcatcggtccgaacggcgcgggtaaatcgaccctgttccgtatgatctctggtcaggaacagccggacagcggcaccatcactttaggtgaaacggtgaaactggcgtcggttgatcagttccgtgactcaatggataacagcaaaaccgtttgggaagaagtttccggcgggctggatattatgaagatcggcaacaccgagatgccaagccgcgcctacgttggccgctttaactttaaaggggttgatcagggtaaacgcgttggtgaactttccggtggtgagcgcggtcgtctgcatctggcgaagctgctgcaggttggcggcaacatgctgctgctcgacgaaccaaccaacgacctggatatcgaaaccctgcgcgcgctggaaaacgccctgctggagttcccgggctgtgcgatggttatctcgcacgaccgttggttcctcgaccgtatcgccacgcacatcctggactaccaggatgaaggtaaagttgagttcttcgaaggtaactttactgagtacgaagagtacaagaaacgcacgctgggcgcagacgcactggagccgaagcgtatcaagtacaagcgtattgcgaagtaa

SEQ ID NO: 482398 - DNA, 1938 bp, Shigella sonnei
gtggaaaaagccaaacaagttacctggcggctgttggctgccggtgtctgtctgctgacggtcagcagcgtggcgcgagccgactcactggatgagcagcgtagccgttacgcgcaaatcaagcaggcctgggataatcgacaaatggatgtggtcgaacaaatgatgcctggactgaaggattatccgctttatccctacctggaataccgccagatcaccgatgatctgatgaatcaaccggcggtgacggtcactaactttgttcgcgctaaccccacgcttcctcccgctcgcacgctgcaatctcgtttcgtcaatgaactggcgcggcgtgaagactggcgtggcttgttagcctttagcccggaaaagcccggaactaccgaagcgcaatgtaattactactatgcgaaatggaacaccgggcagagtgaagaagcctggcaaggggcgaaagagctgtggctaaccggcaagagccagcctaacgcctgtgacaagttatttagcgtctggcgtgcgtcaggtaaacaagatccgctggcgtatttagagcgtatccgtctggcgatgaaagcgggtaacactggcctggtaacagtgctggcagggcagatgcctgccgattaccagactatcgcctcggcaatcatttcactggcgaacaaccctaatacggtactgaccttcgcgcgtacaaccggagcgaccgattttacccgtcaaatggcagcggtggcgtttgccagtgtggcgcggcaggatgctgaaaatgcacggctgatgatcccgtcgcttgcccaggtgcagcagcttaatgaagatcagattcaggagctgcgcgatatcgtcgcctggcgtttgatgggcaacgatgtcaccgacgagcaggcgaaatggcgcgatgacgtcattatgcgctcgcaatccacgtcgttgattgaacgccgtgtgcgaatggcacttggcaccggcgatcgtcgcggcctgaatacctggctggcgcgtctgccgatggaagcaaaagagaaagatgaatggcgttactggcaggtggatttattgctggaacgcggacgtgaagctgaagcgaaagagattttgcatcaactcatgcaacagcgtggtttctacccgatggttgcagcacaacgcatcggagaagagtatgagctgaagattgataaagcgccgcagaatgttgacagcgccctgactcaggggccggagatggcgcgcgtgcgcgagttgatgtactggaatctcgataacaccgcgcgtagcgagtgggccaatctggtgaagagcaagtcaaaaacagagcaggctcaactggctcggtatgctttcaataaccaatggtgggatcttagcgttcaggcaacgatcgccgggaagctttgggatcatctggaagagcgattcccgctggcttacaacgatcttttcaaacgttacaccagtgggaaagagatcccgcaaagctatgcgatggcgattgcccgtcaggagagcgcctggaatccgaaagtgaaatcaccggtaggggccagcggcctgatgcagattatgcctggtacagcgacccatacggtgaagatgttctctattcctggttatagcagccctgggcaattgctggatccggaaacgaatatcaacattggcaccagttacctgcaatatgtttatcagcagtttggcaataaccgtattttctcctcagcagcttataacgccggacctggacgggtgcgaacctggcttggcaacagcgccgggcgtatcgacgctgtggcatttgtcgagagtattccgttctccgagacgcgcggttatgtgaagaacgtgctggcttatgacgcttactaccgttatttcatgggggataaaccgacgttgatgagcgccacggaatggggacgtcgttactga

SEQ ID NO: 482399 - DNA, 297 bp, Shigella sonnei; identical to SEQ ID NO: 458175

SEQ ID NO: 482400 - DNA, 522 bp, Shigella sonnei
atgcaccaagttatctgtgcgaccaccaatcccgctaaaattcaggccattctgcaggcatttcacgagatcttcggcgaaggatcctgccatattgcatccgttgccgtcgagagcggtgtaccggaacagccctttggcagtgaggaaacgcgcgctggcgcacgaaatcgggtagcaaatgcccgccgtttacttccagaggctgatttttgggtggcgattgaagctggcatcgatggtgacagcactttcagttgggtggtgattgaaaacaccagccagcgcggcgaggcgcgttcggctactttgccgttacctgcggtgattctgcagaaagtgcgtgaaggtgaggcgcttggtcccgtgatgtcgcgttataccggtattgatgagattggtcgtaaggaaggggcgatcggcgtgtttaccgccgggaaactcactcgcgccagcgtctatcaccaggcggtgatcctggcgctgagtccgtttcacaatgccgtgtatcaggcattgtag

SEQ ID NO: 482401 - DNA, 648 bp, Shigella sonnei
atgttacaggtatacctagtccgccacggtgaaacgcagtggaacgccgagcgacgtattcagggccagtctgacagcccgctgaccgccaaaggtgagcaacaggcgatgcaggtggcaacccgtgccaaagagcttggcattacgcatattatcagtagcgatttaggacgcacccggcgtacggcggaaatcatcgcccaggcctgcggctgtgacatcatctttgattctcgcctgcgtgaattaaacatgggtgtgctggagaaaagacatatcgattctctgaccgaagaagaagagaactggcgtcggcagctggtcaatggcaccgttgacgggcgtattcctgaaggcgagtcaatgcaggagctcagcgatcgcgtcaatgcggcactggaatcttgccgggacttaccgcagggaagccgaccgctgctggtgagccatggtattgcactgggatgtctggtgagtacgattctcggattaccagcatgggcagagcgccgcttacgtctgcgtaactgttctatttcgcgcgtggattatcaggaaagcctgtggctggcgtctggctgggtcgttgaaaccgcaggggacatctcgcatctggacgcccctgcattagatgagctgcagcgttaa

SEQ ID NO: 482402 - DNA, 870 bp, Shigella sonnei
atggatcaggccggcattattcgcgaccttttaatctggctggaaggtcatctggatcagcccctgtcgctcgacaatgtagcggcgaaagcaggttattccaagtggcacttacagagaatgtttaaagatgtcactggccatgctattggcgcgtatattcgtgctcgtcgtttgtcgaaatcggcggtcgcactacgcctgactgcgcgtccgattctggacatcgcgctgcaataccgcttcgactctcaacagacatttacccgcgcattcaagaagcagtttgcccagactcctgcactttaccgccgttctcctgaatggagcgcctttggtattcgcccgccgctacgtctgggtgaattcacaatgccagagcacaaatttgtcaccctggaagatacgccgctgattggtgttacccagagctactcctgttcgctggagcaaatctctgatttccgccatgaaatgcgttatcagttctggcacgattttctcggcaacgcgccgaccattccgccagtgctctacggcctgaatgaaacgcgtccgagtcaggataaagacgacgaacaagaggtattctataccaccgcgttagcccaggatcaggcagatggctatgtactgacggggcatccggtgatgctgcagggcggcgaatatgtgatgtttacctatgaaggtctgggaaccggcgtgcaggagtttatcctgacggtatacggaacgtgcatgccaatgctcaacctgacgcgccgtaaaggtcaggatattgagcgatactacccggcagaagacgccaaagcgggagatcgcccaattaatctgcgctgtgaactgctgattcctatccgccgttaa

SEQ ID NO: 482403 - DNA, 474 bp, Shigella sonnei; identical to SEQ ID NO: 458171

SEQ ID NO: 482404 - DNA, 690 bp, Shigella sonnei
atgcaacgggaaacggtctggttagtggaagatgagcaagggatagccgacacgctggtctacatgttgcagcaggaaggttttgccgtcgaggtctttgagcgaggcttgccggtgctggataaagctcgccagcaggttcccgacgtcatgattctcgatgttggtttgcctgatatcagcggctttgaattgtgccgccagttactggcgctccatccggcgttacctgtactgttcctgacggcccgaagtgaagaggtcgatcgcctgcttgggctggaaattggcgctgacgactatgtggctaaaccgttttcaccccgcgaagtgtgcgccagggtgcgcaccttactgcgtcgggtgaagaagttctcgtcgccgtctcccgtcatccgtattggtcattttgaattgaatgaacccgcggcgcagatcagctggtttgacacgccattaacgctgacgcggtatgagtttttattgctgaagacgttactcaagtcgccaggccgcgtctggtcccgccagcaactaatggatagcgtgtgggaagatgcgcaggacacctacgatcgcaccgtcgatacccacattaaaacgttgcgtgccaagctgcgcgccatcaaccccgatctttctccgattaatactcatcgcggcatgggatatagcctgaggggcctgtaa

SEQ ID NO: 482405 - DNA, 1425 bp, Shigella sonnei
atgcgtatcggcatgcggttgctgctgggctattttttactggtggcggtggcggcctggttcgtactggctatttttgtcaaagaagttaaaccgggcgtgcgaagagcaacggaggggacgttaatcgataccgcaacgttgctggcggagctggcgcgtcccgatttgctctctggggacccaacgcatgggcaactggctcaggcgtttaatcagctacaacatcgcccgtttcgcgccaatatcggtggcattaacaaagtgcgcaatgaatatcatgtctatatgaccgatgcgcagggcaaagtattgttcgattcggcaaataaagccgttgggcaggattattcgcgctggaatgacgtctggctaacgttgcgtggtcagtatggtgcgcgtagcacgttgcaaaatcctgccgatcccgaaagttcggtgatgtatgttgccgcgccgattatggacggctcgcggcttattggcgttttgagcgtaggcaaaccgaacgcggcgatggctccggtcattaaacgcagcgagcggcgaattttatgggccagcgccattttgttggggatcgcactggtgattggcgcaggcatggtttggtggatcaaccgctccattgcccggctcactcgctatgctgattccgtcactgacaataagcccgttcctcttcccgatctcggtagtagcgagctgcgtaaactcgcgcaggcgctggaaagtatgcgcgtgaagctggaagggaaaaactatattgagcagtatgtttatgcgttaacccatgagctaaaaagcccactggcggcgattcgtggcgcggcggaaattttacgcgaaggtccgccgcctgaagtagtggctcgttttactgacaacattctgacgcaaaatgcgcgaatgcaggcactggtggaaacgttactacgccaggcaagactggagaatcgtcaggaagtcgttttgactgctgttgatgtggcggcattattccgccgcgtcagcgaagcgcgcaccgtgcagttggcagaaaaaaacatcactctacatgttacgcccaccgaggttaatgttgctgctgaaccggcgttactggatcaggcgctggggaatttactggataacgccatcgattttacccccgagagcggtcgtataacgctaagcgccgaagtggatcaggaacacgtcacgcttaaggtgctggataccggtagtggtattcctgactacgcgctgtcacgtatttttgaacgcttttactctttgccgcgtgcaaatgggcaaaaaagcagcggtctggggttggcgttcgtcagtgaggtcgcccgtttgtttaacggcgaagtcacgctgcgcaacgtgcaggaaggtggcgtgctggcctcgcttcgacttcaccgtcacttcacatag

SEQ ID NO: 482406 - DNA, 1353 bp, Shigella sonnei
atgttgaaatcctccctgttctggaaaatgaccaccctgtttggtgcagtattgctgttgttgattccgataatgctgattcggcaggtgattgtcgaacgtgccgattaccgtagcgatgtggaagatgcgattcgccaaagtaccagcgggccgcaaaaacttgttgggccgcttatcgctattcctgtgaccgagctttatacggtacaggaagaggataaaaccgtggagcggaaacgaagttttatccatttttggttacctgagtcattgatggttgatggcaatcagaacgtggaagaacgcaagatagggatttataccggtcaggtctggcacagtgatttaacgctaaaagccgatttcgatgtttcgcgtcttagcgaactcgacgcgccaaatatcacctttggcaagccatttattgtgattagcgtcggggatgcgcgtggtattggtgtggtgaaagcgcctgaagttaacggaacggcgctgaccattgaacccggcaccgggttagagcaaggcgggcagggcgtgcatatccctttacccgaaggggactggcggaagcagaacctgaagctgaatatggccctgaatttaagcggtaccggcgatctttctgtggtgcctgccgggcgtaatagcgaaatgaccttaaccagcaactggccgcatcccagttttttaggtgattttttgccagtcaaacgggaagttagcgagtcaggttttcaggcgcaatggcaaagcagctggtttgctaataatctcggtgagcgttttgcttcaggcaatgataccggctgggaaaacttcctcgcgtttagcgtcgcagtgacgacgccagccgatcaataccaattaacggaccgggcgactaagtacgccattctgctgattgcactgacttttatggcgttctttgtttttgaaacgctcaccgcgcaacgtttacacccaatgcaatatttgctggtggggctttcattggtgatgttttatttgctcttgctggcgctttctgaacatatcggttttaccgtggcatggataatcgccagtctgattggggcgttaatgaacggtatttatttgcaggcggtattgaaaggctggcgcaatagcatgttgtttaccctcgcgctgttgttgctggatggagtgatgtggggactgctcaactctgtcgatagcgcgctgttgttgggaaccagtgtgctggtggtggcgctggccggcatgatgtttgtgactcgtaatatcgactggtatgcgttttcactgccgaaaatgaaagccagtaaagaagttacaacggacgatgaattacgtatctggaaataa

SEQ ID NO: 482407 - DNA, 717 bp, Shigella sonnei
atgcagaccccgcacattcttatcgttgaagacgagttggtaacacgcaacacgttgaaaagtattttcgaagcggaaggctatgatgttttcgaagcgacagatggcgcggaaatgcatcagatcctctctgaatatgacatcaacctggtgatcatggatatcaatctgccgggtaagaacggtcttctgttagcgcgtgaactgcgcgagcaggcgaatgttgcgttgatgttcctgactggccgtgacaacgaagtcgataaaattctcggcctcgaaatcggtgcagatgactacatcaccaaaccgttcaacccgcgtgaactgacgattcgtgcacgcaacctgctgtcccgtaccatgaatctgggtactgtcagcgaagaacgtcgtagcgttgaaagctacaagttcaatggttgggaactggacatcaacagccgttcgttgatcggccctgatggcgagcagtacaagctgccgcgcagcgagttccgcgccatgcttcacttctgtgaaaacccaggcaaaattcagtcccgtgctgaactgctgaagaaaatgaccggccgtgagctgaaaccacacgaccgtactgtagacgtgacgatccgccgtattcgtaaacatttcgaatctacgccggatacgccggaaatcatcgccaccatccacggtgaaggttatcgcttctgtggtgatctggaagattaa

SEQ ID NO: 482408 - DNA, 687 bp, Shigella sonnei
atgcgtataacgattatcctggtcgcacccgccagagcagaaaatattggggcagcggcgcgggcaatgaaaacgatgggttttagcgaactgcggattgtcgatagtcaggcacacctggagccagccacccgctgggtcgcacatggatctggtgatgttattgataatattaaagttttcccaacactggctgaatcgttacacgatgtcgatttcactgtcgccaccactgcgcgcagtcgggcgaaatatcattactacgccacgccagtagaactggtgccgctgttagaggaaaaatcttcatggatgagccatgccgcgctggtgtttggtcgcgaagattccgggctgactaacgaagagttagcgttggctgacgttcttactggtgtgccgatggtggcggattatccttcgctcaatctggggcaggcggtgatggtctattgctatcaattagcaacattaatacaacaaccggcgaaaagtgacacaacggcagaccaacatcaactgcaagctttacgcgaacgagtcatggcattgctgacgactctggcagtggcagatgacataaaactggtcgactggttacagcaacgcctggggcttttagagcaacgagacacggcaatgttgcaccgtttgctgcatgatattgaaaaaaatatcaccaaataa

SEQ ID NO: 482409 - DNA, 2463 bp, Shigella sonnei
atgcgagtgttgaagttcggcggtacatcagtggcaaatgcagaacgttttctgcgggttgccgatattctggaaagcaatgccaggcaggggcaggtggccaccgtcctctctgcccccgccaaaatcaccaaccacctggtggcgatgattgaaaaaaccattagcggccaggatgctttacccaatatcagcgatgccgaacgtatttttgccgaacttttgacgggactcgccgccgcccagccgggattcccgctggcgcaattgaaaactttcgtcgaccaggaatttgcccaaataaaacatgtcctgcatggcattagtttgttagggcagtgcccggatagcattaacgctgcgctgatttgccgtggcgagaaaatgtcgatcgccattatggccggcgtgttagaagcgcgtggtcacaacgttaccgttatcgatccggtcgaaaaactactggcagtggggcattacctcgaatctaccgtcgatattgctgagtccacccgccgtattgcggcaagtcgtattccggctgatcacatggtgctgatggcaggcttcaccgccggtaatgaaaaaggcgaactggtggtacttggacgcaacggttccgactactccgcggcggtgctggctgcctgtttacgcgccgattgttgcgagatttggacggacgttgacggggtctatacctgcgacccgcgtcaggtgcccgatgcgaggttgttgaagtcgatgtcctaccaggaagcgatggagctttcctacttcggcgctaaagttcttcacccccgcaccattacccccatcgcccagttccagatcccttgcctgattaaaaataccggaaatcctcaagcaccaggtacgctcattggtgccagtcgtgatgaaggcgaattaccggtcaagggcatttccaatctgaataacatggcaatgttcagcgtttccggcccggggatgaaaggaatggtcggcatggcggcgcgcgtctttgccgcgatgtcacgcgcccgtatttccgtggtgctgattacgcaatcatcttccgaatacagtatcagtttctgcgttccgcaaagcgactgtgtgcgggctgaacgggcaatgcaggaagagttctacctggaactgaaagaaggcttactggagccgctggcggtgatggaacggctggccattatctcggtggtaggtgatggtatgcgcaccttgcgtgggatctcggcgaaattctttgccgcgctggcccgcgccaatatcaacattgtcgccattgctcagggatcttctgaacgctcaatctctgtcgtggtaaataacgatgatgcgaccactggcgtgcgcgttactcatcagatgctgttcaataccgatcaggttatcgaagtgtttgtgattggcgtcggtggcgttggcggtgcgctgctggagcaactgaagcgtcagcaaagctggctgaagaataaacatatcgacttacgtgtctgcggcgttgccaactcgaaggctctgctcactagtgtgcatggccttaatctggaaaactggcaggaagaacttgcacaagccaaagagccgtttaatctcgggcgcttaattcgcctcgtgaaagaatatcatctgctgaacccggtcattgttgactgcacctccagccaggcagtggcggatcaatatgccgacttcctgcgcgaaggtttccacgttgtcacgccgaacaaaaaggccaacacctcgtcgatggattactatcatcagttgcgttatgcggcggaaaaatcgcggcgtaaattcctctatgacaccaacgttggggctggattaccggttattgagaacctgcaaaatctgctcaatgcaggtgatgaattggtgaagttctccggcattctttcaggttcgctttcttatatcttcggcaagttagacgaaggcatgagtttctccgaggcgaccacgctggcgcgggaaatgggttataccgaaccggacccgcgagatgatctttctggtatggatgtggcgcgtaaactattgattctcgctcgtgaaacgggacgtgaactggaactggcggatattgaaattgaacctgtgctgcccgcagagtttaacgccgagggtgatgttgccgcttttatggcgaatctgtcacagctcgacgatctctttgccgcgcgcgtggcgaaggcccgtgatgaaggaaaagttttgcgctatgttggcaatattgatgaagatggtgtctgccgcgtgaagattgccgaagtggatgggaatgatccgctgttcaaagtgaaaaatggcgaaaacgccctggccttttatagccactattatcagccgctgccgttggtgctgcgcggatatggtgcgggcaatgacgttaccgctgctggtgtctttgccgatctgctacgtaccctctcatggaagttaggagtctga

SEQ ID NO: 482410 - DNA, 933 bp, Shigella sonnei
atggttaaagtttatgccccggcttccagtgccaatatgagcgtcgggtttgatgtgctcggggcggcggtgacacccgttgatggtgcattgctcggagatgtagtcacggttgaggcggcagagacattcagtctcaacaacctcggacgctttgccgataagctgccgtcagaaccacgggaaaatatcgtttatcagtgctgggagcgtttttgcctggagctgggcaagcaaattccagtggcgatgactctggaaaagaatatgccgatcggctcgggcttaggctccagcgcctgttcggtggtcgcggcgctgatggcgatgaatgaacactgcggcaagccacttaatgacacccgtttgctggctttgatgggcgagctggaaggacgtatctccggcagcattcattacgacaacgtggcaccgtgttttcttggtggtatgcagttgatgatcgaagaaaacgacatcatcagccagcaagtgccagggtttgatgagtggctgtgggtgctggcgtatccgggaattaaagtctcgacggcagaagcccgggctattttaccggcgcagtatcgccgccaggattgcattgcgcacgggcgacatctggctggcttcattcacgcctgctattcccgtcagcctgagcttgccgcgaagctgatgaaagatgttatcgctgaaccctaccgtgaacggttactgcctggcttccggcaggcgcggcaggcggtcgcggaaatcggcgcggtagcgagcggtatctccggctccggcccgaccttgttcgctctatgtgacaagccggataccgcccagcgcgttgccgactggttgggtaagaactacctgcaaaatcaggaaggttttgttcatatttgccggctggatacggcgggcgcacgagtactggaaaactaa

SEQ ID NO: 482411 - DNA, 1287 bp, Shigella sonnei
atgaaactctacaatctgaaagatcacaacgagcaggtcagctttgcgcaagccgtaacccaggggttgggcaaaaatcaggggctgttttttccgcatgacctgccggaattcagcctgactgaaattgatgagatgctgaagctggattttgtcacccgcagtgcgaagatcctctcggcgtttattggtgatgaaatcccgcaggaaatcctggaagagcgcgtgcgcgcggcgtttgccttcccggctccggtcgccaatgttgaaagcgatgtcggttgtctggaattgttccacgggccaacgctggcatttaaagatttcggcggtcgctttatggcacaaatgctgacccatattgcgggcgataagccagtgaccattctgaccgcgacctccggtgataccggagcggcagtggctcatgctttctacggtttgccgaatgtgaaagtggttatcctctatccacgaggcaaaatcagtccactgcaagaaaaactgttctgtacgttgggcggcaatatcgaaactgttgccatcgacggcgatttcgatgcctgtcaggcgctggtgaagcaggcgtttgatgatgaagaactgaaagtggcgctggggttaaactcggctaactcgattaacatcagccgtttgctggcgcagatttgctactactttgaagcagttgcgcagctgccgcaggaagcgcgcaaccagctggttgtctcggtgccaagcggaaacttcggcgatttgacggcgggtctgctggcgaagtcactcggtctgccggtgaaacgttttattgctgcgaccaacgtgaacgataccgtgccacgtttcctgcacgacggtcagtggtcacccaaagcgactcaggcgacgttatccaacgcgatggacgtgagtcagccgaacaactggccgcgtgtggaagagttgttccgccgcaaaatctggcaactgaaagagctgggttatgcagccgtggatgatgaaaccacgcaacagacaatgcgtgagttaaaagaactgggctacacctcggagccgcacgctgccgtagcgtatcgtgcgctgtgtgaccagttgaatccaggcgaatatggcttgttcctcggcaccgcgcatccggcgaaatttaaagagagcgtggaagcgattctcggtgaaacgttggatctgccaaaagagctggcagaacgtgctgatttacccttgctttcacataatctgcccgccgattttgctgcgttgcgtaaattgatgatgaatcatcagtaa

SEQ ID NO: 482412 - DNA, 297 bp, Shigella sonnei; identical to SEQ ID NO: 471229

SEQ ID NO: 482413 - DNA, 777 bp, Shigella sonnei
atgctgattcttatttcacctgcgaaaacgcttgattaccaaagcccgttgaccaccacgcgctatacgctgccggagctgttagacaattcccagcacttgatccatgaagcgcggaaactgacgcctccgcagattagcacgctgatgcgcatcagcgacaaactggcgggtatcaacgccgctcgctttcatgactggcagccagatttcacgccggagaatgcccgccaggctattttggcgtttaaaggtgatgtctacaccggcttgcaggccgaaactttcagcgaagacgatttcgattttgcccaacagcatttgcgaatgctttccggcttgtatggcgtactgcgcccgctcgatttaatgcagccttatcgtctggaaatggggatccgtcttgagaatgcccgagggaaagatctgtatcaattctggggagatatcatcaccaacaagctgaacgaggcgctcgcagcacaaggcgataatgtggtgattaatctggcgtcagatgagtattttaaatcggtgaagccgaagaaattgaatgccgagattatcaagccggtgttcctcgatgagaagaacggcaaatttaagataatcagcttctacgctaagaaagcacgcggtctgatgagtcgtttcattattgaaaatcggctgaccaaaccagagcaactgactggttttaatagcgaaggttacttctttgatgaagcttcctccagcaatggcgaactggtgtttaaacgctacgagcagcgttaa

SEQ ID NO: 482414 - DNA, 894 bp, Shigella sonnei
gtgacaggcattattctcgctgtctttgctctgctggcaatcactcgcggtcttcatggcgtcgcccggctcatgcaggggtttgtcccgttgatggcgataatctgggtgctgaccagcatggtgatttgcgtaataaatatcgggcaacttccccacgtcatttggtctatttttgagagtgcttttggctggcaggaagcggcaggcggcgcggcgggatataccttaagccaggcgattactaacggttttcagcgcagtatgttttccaatgaggcgggaatgggttcgacgccaaacgcggcagcggcagcggcgtcctggcctccgcatccggcagcgcaagggattgtccagatgattggcatttttatcgacaccctggtcatctgtacggcaagcgccatgctgatattactggcgggtaacgacacaacctacatgccgctggaaggtattcagcttatccagaaggcgatgcgggtgctaatgggttcctggggtgctgagtttgttaccctcgtggttattctgtttgccttcagctccatcgttgccaactacatttatgccgaaaacaatctcttctttttacgcctgaacaaccctaaagcgatctggtgtttgcggatctgcaccttcgcaacggtcatcggcggcaccttgctaagtcttccgctgatgtggcaactggcagatatcataatggcctgcatggctattaccaatttgaccgccattttactgctctcgcctgtggttcataccattgccagtgattatctacgccagcgtaaactcggcgtgcgcccggtgtttgatccgttgcgttatccggatatcggtcgccagctttctccggacgcgtgggatgatgtttcgcaggagtaa

SEQ ID NO: 482415 - DNA, 492 bp, Shigella sonnei
atgatttacctgctcttcggcgcaggttgttggttcacttttcgcaccggatttgtgcagtttcgctacatccgccagtttggcaaaagtcttaaaaatagcattcatccacagccaggcggtttaacctcatttcagtcattgtgtaccagtcttgcggcgcgcgtgggtagcggcaacctggccggcgttgcgctggctattaccgccggtggacctggagccgtcttttggatgtgggttgccgcgtttatcggcatggcgacctcgtttgccgaatgttcccttgcacaactttataaagaacgtgacgtcaatggacagtttcgtggaggaccggcatggtatatggcgcgcgggctggggatgcgttggatgggcgttctgttcgccgtctttttgctcatcgcctacggcataattttcagcggagttcaggcgaacgccgttgcccgagccctgagttttcttttgattttcccccgctggtga

SEQ ID NO: 482416 - DNA, 954 bp, Shigella sonnei
atgacggacaaattgacctcccttcgtcagtacaccaccgtagtggccgacactggggacatcgcggcaatgaagctgtatcaaccgcaggatgccacaaccaacccttctctcattcttaacgcagcgcagattccggaataccgtaagttgattgatgatgctgtcgcctgggcgaaacagcagagcaacgatcgcgcgcagcagatcgtggacgcgaccgacaaactggcagtaaatattggtctggaaatcctgaaactggttccgggccgtatctcaactgaagttgatgcgcgtctttcctatgacaccgaagcgtcaattgcgaaagcaaaacgcctgatcaaactctacaacgatgctggtattagcaacgatcgtattctgatcaaactggcttctacttggcagggtatccgtgctgcagaacagctggaaaaagaaggcatcaactgtaacctgaccctgctgttctccttcgctcaggctcgtgcttgtgcggaagcaggcgtgttcctgatctcgccatttgttggccgtattcttgactggtacaaagcgaatactgataagaaagagtacgctccggcagaagatccgggcgtggtttctgtatctgaaatctaccagtactacaaagagcacggttatgaaaccgtggttatgggcgcaagcttccgtaacatcggcgaaattctggaactggcaggctgcgaccgtcttaccatcgcaccggcactgctgaaagagctggctgagagcgaaggggctatcgaacgtaaactgtcttacaccggcgaagtgaaagcgcgtccggcgcgtatcactgagtccgagttcctgtggcagcacaaccaggatccaatggcagtagataaactggcggaaggtatccgtaagtttgctattgaccaggaaaaactggaaaaaatgatcggcgatctgctgtaa

SEQ ID NO: 482417 - DNA, 588 bp, Shigella sonnei; identical to SEQ ID NO: 458158

SEQ ID NO: 482418 - DNA, 567 bp, Shigella sonnei
atgggcaacactaagttggctaatccggcaccgctgggcctgatgggcttcggcatgaccaccattctgcttaacctgcacaacgtgggttatttcgctctggacggtattattcttgccatgggcattttctacggcggcatcgcgcaaatttttgccggtctgctggagtacaaaaaaggcaacactttcggtttaaccgcattcacctcttacggttctttctggttgacgctggttgcgattctgctgatgccgaaactgggtctgaccgatgcgccaaatgcacagttccttggtgtctacctgggtctgtggggcgtatttacgctgtttatgttcttcggcacgctgaaaggcgcacgcgttctgcaattcgttttctttagcctgactgtgctgtttgccctgctggcgatcggtaacattgccggtaacgccgcaatcatccactttgccggctggattggtctgatctgtggtgccagtgcaatctatctggcgatgggtgaagtactgaacgagcagtttggtcgcaccgttctgccgattggtgaatcccactaa

SEQ ID NO: 482419 - DNA, 714 bp, Shigella sonnei
atgaatgttaattacctgaatgattcagatctggattttcttcagcattgtagtgaggaacagttggcaaatttcgcccgattgctcacccataatgaaaaaggcaaaactcgcctctccagcgtactgatgcgcaacgaactgtttaaatcgatggaagggcatcccgagcaacatcgccgcaactggcagctgattgctggagaattacagcattttggtggcgatagtatcgccaacaaactgcgcggacacggtaaattgtatcgggccattttgctcgatgtttcaaaacgattgaagctgaaagccgacaaagagatgtctacgtttgagattgagcaacagttactggaacaatttctgcgtaacacctggaagaatatggacgaggaacataagcaggagtttctgcacgcggtcgatgccagggtgaatgagctggaagagctgctgccgctgctgatgaaagacaaattattggcaaaaggcgtgtcgcatttgctttccagccaattgacccgcattttacgcacccacgcagcaatgagcgtgcttgggcatggtttgctgcgcggcgcgggtctgggaggccctgtgggcgcagcattaaatggggttaaagcggtcagcggcagtgcctatcgcgtgacaattccagccgtaatacaaatcgcctgcctgcgccggatggttagcgccactcaggtctga

SEQ ID NO: 482420 - DNA, 405 bp, Shigella sonnei
atgaaatccgtttttacgatttccgccagcctggcgattagcctgatgctgtgctgcacggcgcaggcaaacgaccataaactcctcggcgtcattgcaatgccgcgtaacgaaaccaacgatctggcgctgaaacttcctgtttgtcgcattgtgaaacgcatacaactctctgccgaccatggcgatttacagttaagcggtgcatcggtttatttcaaagccgcccgtagcgccagtcagagtctgaatattccttcagaaataaaagaagggcaaaccactgactggatcaacattaacagtgataacgacaataaacgctgcgtctcaaaaatcaccttttccggtcatacggtgaactcatcggatatggccacgctgaaaattatcggcgacgactaa

SEQ ID NO: 482421 - DNA, 1917 bp, Shigella sonnei
atgggtaaaataattggtatcgacctgggtactaccaactcttgtgtagcgattatggatggcaccactcctcgcgtgctggagaacgccgaaggcgatcgcaccacgccttctattattgcctatacccaggatggtgaaactctggttggtcagccggctaaacgtcaggcagtgacgaacccgcaaaacaccctgtttgcgattaaacgcctgattggccgccgcttccaggacgaagaagtacagcgtgatgtttccatcatgccgttcaaaattattgctgctgataacggcgacgcatgggtcgaagttaaaggccagaaaatggcaccgccgcagatttctgctgaagtgctgaaaaaaatgaagaaaaccgctgaagattacttgggtgaaccggtaactgaagctgttatcaccgtaccggcatactttaacgatgctcagcgtcaggcaaccaaagacgcaggccgtatcgctggtctggaagtaaaacgtatcatcaacgaaccgaccgcagctgcgctggcttacggtctggacaaaggtactggcaaccgtactatcgcggtttatgacctgggtggtggtactttcgatatttctattatcgaaatcgacgaagttgacggcgaaaaaaccttcgaagttctggctaccaacggtgatacccacctggggggtgaagacttcgacagccgtctgatcaactacctggttgaagaattcaagaaagatcagggcattgacctgcgcaacgatccgctggcaatgcagcgcctgaaagaagcggcagaaaaagcgaaaatcgaactgtcttccgctcagcagaccgacgttaacctgccgtacatcactgcagatgcgaccggtccgaaacacatgaacatcaaagtgactcgtgcgaaactggaaagcctggttgaagatctggtaaaccgttccattgagccgctgaaagttgcactgcaggacgctggcctgtccgtatctgatatcgacgacgttatcctcgtgggtggtcagactcgtatgccaatggttcagaagaaagttgctgagttctttggtaaagagccgcgtaaagacgttaacccggacgaagctgtagcaatcggtgctgctgttcagggtggtgttctgactggtgacgtaaaagacgtactgctgctggacgttaccccgctgtctctgggtatcgaaaccatgggcggtgtgatgacgacgctgatcgcgaaaaataccactatcccgaccaagcacagccaggtgttctctaccgctgaagacaaccagtctgcggtaaccatccatgtgctgcagggtgaacgtaaacgtgcagctgataacaaatctctgggtcagttcaacctggatggtatcaacccggcaccgcgcggcatgccgcagatcgaagttaccttcgatatcgatgctgacggtatcttgcacgtttccgcgaaagataaaaacagcggtaaagagcagaagatcaccatcaaggcttcttctggtctgaacgaagatgaaatccagaaaatggtacgcgacgcagaagctaacgccgaagctgaccgtaagtttgaagagctggtacagactcgcaaccagggcgaccatctgctgcacagcacccgtaagcaggttgaagaagcaggcgacaaactgccggctgacgacaaaactgctatcgagtctgcgctgactgcactggaaactgctctgaaaggtgaagacaaagccgctatcgaagcgaaaatgcaggaactggcacaggtttcccagaaactgatggaaatcgcccagcagcaacatgcccagcagcagactgccggtgctgatgcttctgcaaacaacgcgaaagatgacgatgttgtcgacgctgaatttgaagaagtcaaagacaaaaaataa

SEQ ID NO: 482422 - DNA, 1131 bp, Shigella sonnei
atggctaagcaagattattacgagattttaggcgtttccaaaacagcggaagagcgtgaaatcaaaaaggcctacaaacgcctggccatgaaataccacccggaccgtaaccagggtgacaaagaggccgaggcgaaatttaaagagatcaaggaagcttatgaagttctgaccgactcgcaaaaacgtgcggcatacgatcagtatggtcatgctgcgtttgagcaaggtggcatgggcggcggcggttttggcggcggcgcagacttcagcgatatttttggtgacgttttcggcgatatttttggcggcggacgtggtcgtcaacgtgcggcgcgcggtgctgatttacgctataacatggagctcaccctcgaagaagctgtacgtggcgtgaccaaagagatccgcattccgactctggaagagtgtgacgtttgccacggtagcggtgcaaaaccaggtacacagccgcagacctgtccgacctgtcatggttctggtcaggtgcagatgcgccagggattcttcgctgtacagcagacctgtccacactgtcagggccgcggtacgctgatcaaagatccgtgcaacaaatgtcatggtcatggtcgtgttgagcgcagcaaaacgctgtccgttaaaatcccggcaggggtggacactggagaccgcatccgtcttgcgggcgaaggtgaagcgggcgagcatggcgcaccggcaggcgatctgtacgttcaggttcaggttaaacagcacccgattttcgagcgtgaaggcaacaacctctattgcgaagtcccgatcaacttcgctatggcggcgctgggtggcgaaatcgaagtaccgacccttgatggtcgcgtcaaactgaaagtgcctggcgaaacccagaccggtaagcttttccgtatgcgcggtaaaggcgtcaagtctgtccgcggtggcgcacagggtgatttgctgtgccgcgttgtcgtcgaaacaccggtaggcctgaacgagaagcagaaacagttgctgcaagagctgcaagaaagcttcggtggcccaaccggtgagcacaacagcccgcgctcaaagagcttctttgatggtgtgaagaagttttttgacgacctgacccgctaa

SEQ ID NO: 482423 - DNA, 327 bp, Shigella sonnei
gtgcatagtgaaaatcaaagtaaaggtgtgcattatgcaaaatcactgcgtctcttagaaattaaccatgcgcacttgcagttaatggaatccttattggatgaagggaagaaacacaatatttttaagccagatatcgacccattgcaggtgaatattaatattgctgcgcttgggggatattatttgatcaaccagcatacgcttggcctggtttatcacatcagtatggtttcaccccaggcactggaagccagacgtaaggtcatcaaagagacaatccttagctggcttttggttgacccttcatctaccgcgcacgaataa

SEQ ID NO: 482424 - DNA, 639 bp, Shigella sonnei
atgcccgggcgctttgaactaaaaccaaccctggagaaagtctggcacgcgccggacaattttcgcttcatggacccgctgccgccgatgcatcgtcgggggatcattattgccgccattgtattggtggtcggatttctgcttccatctgatgatacgcccaacgcgccggtggtgacgcgtgaagcgcagttagatattcagtcgcaatcacaaccgccgacagaagaacagctgcgggcgcaattagtcacaccacaaaatgatcctgatcaggtggctccggtcgctccagaacctatacaggaaggccagccagaagaacagccgcaaactacccaaacgcaaccattccagccagatagcggaattgataatcaatggcgctcttaccgtgtcgaacccggtaaaacgatggcgcagctgttccgcgaccacggactgcccgctaccgatgtctatgcaatggcgcaggtagaaggcgcgggtaagccgctgagtaatttgcaaaatgggcagatggtgaaaatccgccagaacgccagcggcgtggtgacgggcttaaccattgatacggggaataatcaacaggtcctgtttacccgccagccggatggcagttttattcgtgcgcggtag

SEQ ID NO: 482425 - DNA, 621 bp, Shigella sonnei
atgaccaccccaacttttgacaccatcgaagcgcaagcaagctacggcattggtttgcaggtagggcaacaactgagtgaatctggcctggaagggctgctgccagaagcactggttgcaggtattgccgatgcgctggaaggcaaacatccggctgtgccggttgatgtggtgcatcgcgcgctgcgtgaaatccacgaacgcgccgatgccgttcgtcgtcagcgtttccaggcgatggctgctgaaggtgtgaaatacctggaagaaaacgccaaaaaagaaggtgtgaatagcaccgaatctggcctgcaattccgcgtgatcaaccagggtgaaggcgcaattccggcacgtaccgaccgcgttcgtgttcattacaccggtaaactgatcgacggcaccgtgtttgacagctccgttgctcgtggtgaacccgctgaattcccggttaatggcgtgatccctggctggattgaagcactgactctgatgccggtaggttctaaatgggaactgactatcccgcaggaactggcatatggcgagcgcggcgcaggcgcatccatccctccgttcagcaccctggtgtttgaagtcgaactgctggaaatcctctaa

SEQ ID NO: 482426 - DNA, 1413 bp, Shigella sonnei
atggtagatcaggtaaaagtcgttgccgatgatcaggctccggctgaacagtcgctacggcgcaatctcacaaaccgacatattcagcttattgccattggcggtgccattggtacggggttgtttatggggtccggcaaaacgattagccttgccgggccgtcgatcattttcgtttatatgatcatcggttttatgctctttttcgtgatgcgggcaatgggggaattgctgctttcgaatctggaatacaaatcttttagtgacttcgcttccgatttactcgggccgtgggcaggatatttcaccggctggacttactggttctgctgggttgtaaccggtatggcagacgtggtggcgatcactgcttatgctcagttctggttccccgatctctccgactgggtcgcctcgctggcggtgatagtgctgctgctgacgctcaatctcgccaccgtgaaaatgttcggtgagatggagttctggtttgcgatgatcaaaatcgtcgccattgtgtcgctgattgtcgtcggcctggttatggtggcgatgcactttcagtcaccgactggtgtggaagcgtcattcgcgcatttgtggaatgatggcggctggttcccgaaaggtttaagtggcttctttgccggattccagatagcggttttcgctttcgtagggattgagctggtaggtacaaccgctgcggaaaccaaagatccggagaaatcactgccacgcgcgattaactccattccgatccgtatcattatgttctacgtcttcgcgctgattgtgattatgtccgtgacgccgtggagttcggtagtcccggagaagagcccgtttgttgaactgtttgtgttggtaggtttgcctgcggctgccagcgtgatcaactttgtggtgctgacctctgcggcgtcttccgctaacagcggcgtcttctctaccagccgtatgctgtttggtctggcgcaggaaggtgtggcaccgaaagcgttcgctaaactttctaagcgcgcagtacccgcgaaagggttgaccttctcgtgtatctgtctgctcggcggcgtggtgatgttgtatgtgaatcctagcgtgattggcgcgttcacgatgattacaaccgtttccgcgattctgtttatgttcgtctggacaattatcctttgctcgtacctggtttaccgcaaacagcgtcctcatctgcatgagaagtcgatctacaagatgccgctcggcaagctgatgtgctgggtatgtatggcgttctttgtgttcgtggtcgtgttgctgacactggaagatgacactcgccaggcgctgttggtcaccccgctgtggtttatcgcactggggctgggctggttgtttattggtaagaagcgggctgctgaactgcggaaataa

SEQ ID NO: 482427 - DNA, 663 bp, Shigella sonnei
atggcttatcgcgaccaacctttaggtgaactggcgctctctattcctcgcgcttcagctctgtttcgtaaatatgatatggattactgctgtggcggtaagcaaacgctggcgcgcgcggcggcacgtaaagaactggatgttgaggtcattgaagctgaactggcaaagcttgctgaacaaccgattgagaaagactggcgtagcgccccgctggcagaaatcattgaccatatcatcgtgcgctaccacgatcgtcaccgcgagcaactgccggagctgatcctgcaagcgactaaagtcgagcgcgttcacgccgacaaaccgagcgtgccaaaagggctgacaaaatacctgactatgctgcatgaagagctatccagccacatgatgaaagaagagcagatcctcttcccgatgatcaaacaaggcatgggcagccaggcaatgggaccaatcagcgtgatggaaagcgagcacgatgaagcgggcgaactgctggaagtgattaaacacaccaccaataacgtcacaccgccgccggaagcctgcaccacctggaaagcgatgtataacggtattaatgaactgattgatgacctgatggatcacatcagcctggaaaacaatgtactgttcccacgcgcgctggcgggtgagtaa

SEQ ID NO: 482428 - DNA, 966 bp, Shigella sonnei
atgattagcggcgtgctgtacgccctgttagcagggttgatgtgggggcttatttttgtcgggccgttgatcgtaccggaatacccggcgatgttgcagtcgatggggcgttatctggcgttagggttaattgcgctgcccattgcctggctgggacgcgtgcgtctgcgtcagttggcgcgtcgcgactggcttaccgccttgatgctcaccatgatgggcaaccttatctattacttctgccttgccagtgccattcaacgtactggcgcgcctgtttccacgatgattatcggcaccctgccggtggtgattcccgtttttgccaatctgctttatagccagcgcgacggcaaactcgcatggggaaaactcgccccggcactggtttgtattggcatcggcctggcgtgtgtgaatattgctgagttaaaccacggactccccgattttgactgggcacgttatacctctggcatcgtgctggcgttagtttccgtggtctgctgggcgtggtatgccctgcgcaacgcccgctggctgcgggaaaatcccgacaaacatccgatgatgtgggcaacggcgcaggcgctggtcacactgccggtttctctcatcggctatctcgtcgcctgttactggctgaatatacaaacgccggacttctccttaccttttggcccccgtccgctggtgtttattagtctgatggttgcgatagccgtgctttgctcatgggttggcgcactctgctggaacgtcgccagccagcgattaccgacagtgattctcgggccgctgattgttttcgaaacgctggcaggtttgctgtacacctttttactccgccagcaaatgccgccgctaatgacgctgagcggtatcgcgctgttagtgattggcgtggtcattgcggtcagagcaaaaccagaaaaacctttaactgaatctgtctcagaaagttga

SEQ ID NO: 482429 - DNA, 861 bp, Shigella sonnei
atgatcgctattactggtgccactggccaacttggtcactatattattgaatccttgatgaaaacggttcctgccagccaaatagtggctatcgttcgtaatccggcaaaagcccaggctctagcagcacaaggcattaccgtgcgtcaggctgactacggcgatgaagccgcactgacatctgcacttcagggagtggaaaaactactgctgatctcttccagcgaagtgggtcaacgtgccccgcagcatcgtaatgttattaatgccgcaaaggcggctggcgtgaaatttatcgcttataccagcctgctacatgcagatacctccccgctcggcctcgccgatgagcacattgagacggagaaaatgctggctgattctggcatcgtttacaccctgctgcgcaacggctggtacagcgaaaactacctcgccagcgccccggcagcactggaacacggcgtatttatcggtgcggcgggcgatggcaaaatcgcctcagcaacgcgggcagattatgcggcagctgcggcacgcgtgattagcgaagccggtcacgaaggcaaggtttacgaactggcgggcgatagtgcctggacgttgacacagttagcggcagagctgaccaaacagagcggcaaacaggttacctatcaaaatctgagcgaagccgatttcgccgcggcactgaaaagcgtcggactgcccgacggactggcggatatgctggcggattctgacgttggcgcatcgaaaggtggtctgtttgataacagcaaaacgcttagcaaattgattggccgcccaacgacaacgttagccgaaagcgtaagccatctttttaatgttaataactag

SEQ ID NO: 482430 - DNA, 381 bp, Shigella sonnei
atgagtcaggttagcctgtcgcaacaactgaaagagggtaatctctttgcggaacagtgcccgtcgcgcgaggtgttgaaacacgtcaccagccgttggggggtgttgattctggtggcgctacgcgaaggtactcatcgctttagcgacctgcggcgcaaaatcggcggggtgagcgaaaagatgcttgcgcagtcgttacaggcgttagaacaggatggttttcttaaccgtatcgcgtatccggtggtgccaccgcatgttgaatacagcctcacgccgctgggcgagcaggtgagcgaaaaggttgctgcactggcggactggattgagttgaatttgcccgaggtgttggcggtgcgggatgaacgtgcggcataa

SEQ ID NO: 482431 - DNA, 1944 bp, Shigella sonnei
atgattaagtttagcgcaacgctcttggccacgctgattgccgccagtgtgaatgcagcgacggtcgatctgcgtatcatggaaaccactgatctgcatagcaacatgatggatttcgattattacaaagacaccgccacggaaaaattcggactggtacgtacggcaagcctgattaacgatgcccgcaatgaagtgaaaaacagcgtactggtcgataacggcgatttgattcaggggagtccgctggcagattacatgtcggcgaaaggattaaaaacaggtgatgttcatccggtttataaggcgctgaatacgctggattatacggtcggtacactcggcaatcatgaatttaactacggtctggattacctgaaaaatgcgctggcgggagcgaaattcccttatgtaaatgccaacgtcattgacgccagaaccaaacagccaatgtttacaccgtatttaattaaagataccgaagtggtcgataaagacggaaaaaaacagacgctgaagattggctatattggcgtcgtgccgccgcaaatcatgggctgggataaagctaatttatccgggaaagtgacggtgaatgatattaccgaaaccgtgcgcaaatacgtgcctgaaatgcgcgagaaaggtgccgatgtcgttgtcgttctggcacattccgggctgtctgccgatccgtataaagtgatggcggaaaactcagtttattacctcagtgaaattccgggcgttaacgccattatgtttggtcatgctcacgccgttttcccgggtaaagattttgctgatatcgaaggggctgatatcaccaaaggcacgctgaatggtgttccggcggtaatgccgggcatgtggggcgatcatcttggggtggtcgacttacaactcagtaatgacagcggtaaatggcaggtgacgcaggcgaaagcggaagctcggccgatttacgacatcgccaataaaaaatccctcgcggcggaagacagcaagctggtagaaacactcaaagccgatcacgatgccacacgccagttcgtcagcaagccaatcggtaaatctgccgacaatatgtatagctatctggcgctggtgcaggacgatccgaccgtgcaagtcgtgaacaacgcgcaaaaagcgtatgtcgaacattacattcagggcgatccggatctggcaaaactgccggtgctttcagctgccgcaccgtttaaagttggtggtcgcaaaaatgacccggcaagctatgtggaggtggaaaaaggccagttgaccttccgtaatgccgccgatctttatctctaccccaatacgctgattgtagtgaaagccagcggtaaagaggtgaaagagtggctggagtgctccgccggacagtttaaccagattgatcctaacagcacgaaaccacagtcactcatcaactgggatggtttccgcacttataactttgatgttattgatggtgtgaattatcagattgatgttacccagcccgcccgttatgacggcgagtgccagatgattaataccaatgcggaaaggattaagaacctgacctttaatggcaagccgattgatccgaacgccatgttcctcgttgccaccaataactatcgcgcttacggcggcaaatttgccggtacgggcgacagccatatcgcttttgcttcaccggatgagaaccgctcggtgctggcagcgtggattgctgatgagtcgaaacgtgcgggggaaattcacccggcggcagataacaactggcgtttagcaccgatagctgccgataagaaactggatatccgtttcgaaacttccccgtcagataaagccgcagcgtttattaaagagaaagggcagtatccgatgaataaagtcgcgaccgatgatatcgggtttgcgatttatcaggtggatttgagtaagtaa

SEQ ID NO: 482432 - DNA, 741 bp, Shigella sonnei
atgttagatcaagtatgccagcttgcacggaatgcaggcgatgccattatgcaggtctacgacgggacgaaaccgatggacgtcgtcagcaaagcggacaattctccggtaacggcagcggatattgccgcacacaccgttatcatggacggtttacgtacgctgacaccggatattccggtcctttctgaagaagatcctcccggttgggaagtccgtcagcactggcagcgttactggctggtagacccgctggatggtactaaagagtttattaaacgtaatggcgaattcaccgttaacattgcgctcattgaccatggcaaaccgattttaggtgtggtgtatgcgccggtaatgaacgtaatgtacagcgcggcagaaggcaaggcctggaaagaagagtgcggtgtgcgcaagcagattcaggtccgcgatgcgcgcccgccgctggtggttatcagccgttcccatgcagatgcggagctgaaagagtatctgcaacagcttggcgaacatcagaccacgtccatcggctcttcgctgaaattctgcctggtggcggaaggacaggcgcagctgtacccgcgcttcggaccaacgaatatttgggacaccgccgctggacatgctgtggctgcagctgccggagcgcacgttcacgactggcagggtaaaccgctggattacactccgcgcgagtcgttcctgaatccggggttcagagtgtctatttactaa

SEQ ID NO: 482433 - DNA, 912 bp, Shigella sonnei
atgttacccaggatcagacacaataattttattggtgcggtggagttatttgtaaagtcatcgtatacaaaaacacattcaaacaatttttttaacaatatccagcatgcatttaagaaaaaagattggatttcgaattatgatagcctgttaactttgagggagttctttcgttgcgcaactcagattgataaaaatagttatcaggtactttcatcaaaaaatggaactgttaacgccatggataagttccttatcagtttcagccttaaagataatggtgccgaatatacaatgacattgcgaggtagtggatttgaatacgaagaaattcccataacaataaatgagtataactcattcatggatttcaaaaaccgcgagtttccgttagaacaaaacagaagattgtatgcctgtgatattctgcagaaaaaacagtctgacataccgaaaaggattaaaggttatattcaccaggcgattggtgacgtgtctttaggttatgccttattggaggatatagtaagcaaattaaaacggggtaaatttgaactccaaataccaggaggtggaattaaagaatgcgatggatggtatattcacgaaaaaataattgatgataattttgccatagtcatagaatctttgggctttgcgcttaaaatctatggaggggatgaacgttttcgtaatggttcctctgttgttttggaggatgaagattactcccttatttataattttctggttaatgcaggttgccaacaagtggaattagccgaacaagtggatgcgatagtaagtgcgaatctggccgcagatagtaatattaccaaagaaaagatttgcgagaaatataagtcgaccattgaggcgtttaaaaaagagcaactagcgttaccagtatga

SEQ ID NO: 482434 - DNA, 555 bp, Shigella sonnei
atgaccctacgcaagattctggcactcacctgcctgctgttgccgatgatggcttccgcacatcagttcgaaaccggtcagcgagtgccgccgattggcattaccgatcggggcgagttggtgcttgataaagatcagtttagctacaaaacctggaacagcgcgcagttagtgggaaaagtgcgagtactgcaacatattgctggtcgcacctctgcaaaagagaaaaacgcgacgctgattgaagcgattaaatcagcgaagttaccgcacgatcgttaccagaccaccactattgttaacaccgacgacgcgattccgggttcagggatgtttgtgcgcagcagtctggagagtaataaaaagctttatccctggtcgcagtttattgtcgatagcaatggcgtcgcgcgcggtgcctggcagctggatgaagaaagttccgctgtagtggtgctggataaggatggtcgcgtgcaatgggccaaagacggggcgctcactcaggaagaggtgcagcaagtgatggacctgctgcaaaagttgctcaaataa

SEQ ID NO: 482435 - DNA, 207 bp, Shigella sonnei; identical to SEQ ID NO: 1927

SEQ ID NO: 482436 - DNA, 1344 bp, Shigella sonnei
atgttaaacagtattttagtcatactctgcttgatcgctgtaagtgcgttcttctcgatgtccgagatctcgcttgccgcctcacgcaaaatcaaacttaaactgctggctgatgaaggcaatataaatgcccaacgcgttctgaatatgcaggaaaatcccggcatgttctttaccgtggtccaaatcggtctgaacgcagtggcgattctcggcggtatcgtcggtgatgcggcattttctccagcttttcacagcctgttctcccgctatatgtcggcagagctctctgagcaactgagctttattctctctttctcgttagtgactggcatgtttatcctgtttgcggatttaaccccgaaacgcatcggtatgattgcgccagaagcggtggctttgcgtatcatcaacccgatgcgcttctgcctgtacgtttgcaccccactggtgtggttcttcaacggcctggcgaacatgatcttccgtattttcaaactgccaatggtacgtaaagatgacatcacttctgatgacatctacgcggtagtggaagccggtgcgctggcgggcgtgttacgtaaacaggaacacgagctgattgaaaacgtctttgagctggaatcccgtaccgttccgtcttcaatgacaccgcgtgaaaacgtgatttggtttgatctccacgaagatgagcaaagcctgaagaataaggtggcggaacatccgcactctaagttcctcgtctgtaatgaagatattgaccacatcatcggttatgtcgattctaaagacctgctgaaccgcgtgctggctaaccaaagcctggcactgaacagcggcgtacaaattcgcaacacgctgattgtgccggatacgttaaccctttcagaggcgttggaaagttttaaaaccgcaggtgaagacttcgcggtgatcatgaacgagtacgcgctggtggtggggatcatcaccctcaacgacgtgatgaccacgctgatgggcgatctggtcggtcaggggctggaagagcagattgtcgcccgtgatgagaactcatggctgattgacggcggcactccgattgacgacgtcatgcgcgtgctggatattgacgaattcccgcagtcgggcaactacgaaaccatcggcggctttatgatgtttatgctgcgtaagatcccgaaacgcaccgattcggtgaaattcgccggctacaaatttgaagtggtggatatcgataactaccgcatcgaccagctgctggtgacccggatcgacagcaaggccaccgccctttcgccaaaactgcctgacgctaaagataaagaagaaagcgtcgcgtaa

SEQ ID NO: 482437 - DNA, 639 bp, Shigella sonnei
atgagtttatttgataaaaagcatctggtttcccccgccgatgccctgcctggacgtaacaccccgatgcccgtagccacgctgcatgcggtcaacggtcactcaatgaccaatgtacctgacggaatggagattgccatttttgcgatgggttgtttctggggtgtggagcgtctgttctggcagttacccggcgtttacagcaccgccgcaggctataccggcggctatacgccaaatccgacttatcgggaagtgtgctccggtgatacgggtcatgccgaagcggtacgcattgtttacgatccttccgtcatcagctatgagcagttgctacaggtattttgggagaatcacgatcccgcccagggaatgcgtcagggcaatgaccacggcacgcagtatcgttcagcgatttatccgctgacccctgaacaggatgccgcagctcgcgccagtctggaacgttttcaggcggcgatgcttgccgccgatgacgatcgtcacatcaccacggaaatcgctaacgccacaccgttttattatgccgaagatgaccaccagcaatatctgcataaaaacccatatggttactgtggaattggcggaattggcgtctgtctgccgccggaagcatag

SEQ ID NO: 482438 - DNA, 1734 bp, Shigella sonnei
gtgcgctatatccgacagttatgctgtgtaagcttactctgcttaagcggatctgccgtcgccgcgaacgtccgtctacaggtcgaggggttatcgggacagctggaaaagaacgttcgtgcgcagctttctacgattgaaagtgatgaagtgacgccagaccgtcgctttcgcgcacgcgtcgatgatgccatccgtgaaggtctgaaagcgctgggttattaccagccgaccattgaatttgatctccgtccaccgccaaagaaagggcggcaggtattgatcgccaaagtcacgccaggtgtaccggtgttaattggcggcaccgatgtggtattgcgcggcggcgcgcggaccgataaagactatttgaaattgctcgatactcgcccggctattggtacggtactgaaccagggcgattatgacaatttcaaaaagtccttaaccagtattgcgttgcgtaaaggttatttcgatagcgaatttaccaaagcgcagctgggcattgcgctcggcctgcataaagccttctgggatattgattataacagtggcgaacgttaccgctttgggcatgtgacctttgaaggatcacaaatccgcgatgaatacctgcaaaatctggtgccgtttaaagagggcgatgagtatgaatcgaaagatctggcggaactgaaccgccgactttctgctaccggctggtttaattcggtggtagtggcaccgcaatttgataaagcgcgcgaaacgaaagtattaccattgacgggcgtggtttcgccgcgaacagaaaacaccatcgaaaccggggtcggttactctacggacgtgggaccgcgcgtgaaagcgacgtggaaaaagccgtggatgaactcttatggtcacagtctgaccaccagtaccagtatttccgcgccggaacagatcctcgacttcagctataaaatgccgctgctgaagaatccactggaacaatattatttggtgcagggcggttttaagcgcactgacctgaacgataccgaatctgactccactacgctggtggcttctcgctactgggatctctccagcgactggcagcgtgccattaacctgcgctggagcctcgaccactttacccagggtgaaattaccaacaccacgatgctgttttatcctggggtgatgattagccgcacgcgttctcgtggtggcctgatgccaacctggggcgactcgcaacgctactctatcgactactccaacacggcctggggttcagatgttgatttctccgttttccaggcgcagaacgtctggatccgcacactgtacgatcgccatcgttttgtgacacgcggcacgctgggctggattgaaaccggtgatttcgacaaagtaccgccggatctgcgtttcttcgccggaggcgatcgtagtattcgcggctacaaatataaatctatcgccccgaaatacgccaacggtgacctgaaaggggcctcgaagctgataaccggatcgctggaataccagtacaacgtgaccggaaaatggtggggcgcggtgtttgtcgatagtggcgaagcggtaagcgatattcgccgcagcgactttaaaaccggtaccgggggcggcgtacgctgggaatcgccggtcgggccaatcaaactcgattttgccgtaccggtcgcggataaagacgaacacgggttacagttttacatcggtctggggccagaattatga

SEQ ID NO: 482439 - DNA, 3780 bp, Shigella sonnei
atgagtttatggaaaaaaatcagcctcggcgtggttatcgttatcttactgttgctgggatcggtggcgtttctggtgggcaccaccagcggcctgcatcttgtatttaaagcggcggatcgctgggtgccaggactggatattggcaacgtcaccggcggctggcgcgatctcaccttgtctgacgttcgttatgagcagccaggcgtggcggtaaaagcgggtaatctgcatctggcggtcggtcttgagtgcctgtggaacagtagcgtttgtattaatgacctggcgctgaaagacattcaggtcaacatcgacagtaaaaaaatgcctccttctgaacaggttgaagaagaggaagatagcggtccgctggatctctccacgccgtatcccatcaccctgacacgggtggcgctggataacgtcaacatcaagattgatgacaccacggtgtcggtgatggacttcacctccggcctgaactggcaggagaaaaccctgaccctgaaaccgacgtcgctgaaaggcctgctgattgctctgccgaaagtggcggaagtggcgcaggaagaggtcgtcgaaccgaagattgaaaatccgcagccggatgaaaagccgctcggcgaaacgctgaaagatctcttttctcgcccggtattgccggaaatgaccgacgtgcatttgccgcttaacctgaacattgaagagtttaagggcgagcagctgcgcgtgacgggcgacacggacatcaccgtgcgcaccatgctgctgaaagtgagcagcattgacggcaatactaaactggacgccctggatatcgattccaaccaggggatcgtcaacgccagcggcacggcgcagctgtcagacaactggccggtggatatcatcctcaacagcacactgaacgtggagccgttgaaaggtgaaaaggtgaagctgaaagtgggcggcgcgctgcgcgaacagctggagataggcgttaacctttccggtccggtggatatggatttacgcgcccagacgcgactggcggaagccggattgccactcaacgtggaagtgaacagcaaacagctttactggccgttcactggtgagaagcagtatcaggcggatgatctgaaactgaaacttaccggcaaaatgaccgagtacacgctctctatgcgtacggcagtgaagggacaggagatcccgccagccaccattacccttgatgccaaaggtaatgaacagcaggtcaatctcgacaaactcaccgtcgcggcgctggaagggaaaactgaactcaaggcgttgctcgactggcagcaggccattagttggcgcggtgagctaacgcttaatggcattaacaccgccaaagagttcccggagtggccgtcgaaactcaatggcttgattaaaacccgcggtagcctgtacggcggcacctggcagatggaggtgccagaactgaagctgaccggtaacgtcaaacagaacaaagtgaacgttgacggcacgctgaaaggcaacagttatatgcagtggatgatccctgggcttcatctggaactcgggccaaacagtgccgaagtgaaaggcgagctgggggtaaaagatctcaatcttgatgccaccatcaacgcgccggggctggataacgcgctgccggggcttggcggtacagcgaaagggctggtgaaagtacgcggcacggtggaagcgccacaactactggcagatatcaccgcgcgcggcctgcgctggcaggaactttccgtggcgcaggttcgcgtggaaggcgacattaaatccaccgatcagatcgccgggaaactcgacgtacgcgttgagcaaatttcgcagccggatgtaaatatcaacctcgtcaccctgaatgccaaaggcagcgaaaagcagcacgagctacagttgcggattcagggcgagcctgtctccgggcagcttaatctggcaggaagttttgatcgcaaagaagaacgctggaagggaactcttagcaatacccgtttccagacgccggtcggcccgtggtcgctgacccgcgatattgcgctggattaccgcaataaggagcaaaaaatcagcatcgggccacactgctggcttaacccgaatgcggaactgtgcgtgccgcaaactatcgatgcgggggccgaagggcgtgcggtggtgaatctcaaccgcttcgacctcgccatgctgaaaccgtttatgccagaaaccactcaggccagcggtatcttcacgggtaaagcggatgttgcctgggacaccacgaaagaggggctgccgcagggcagtatcaccctttcggggcgtaacgtgcaggtaacgcaaaccgtcaacgatgcggcgctgccggtggcgtttcagacactgaatctgacggcggaattgcgtaacaaccgtgccgaattgggctggaccatccgcctgaccaataacggccagtttgatggacaggtgcaggtgaccgatccgcaaggccgccgtaatcttggtggcaacgtcaatatccgtaacttcaaccttgcgatgataaaccccatctttacccgtggggaaaaagcagcggggatggtgagtgccaacttgcgtctgggtggtgatgtgcaaagcccgcagttgtttggtcagcttcaggttacgggtgtggatatcgacggcaactttatgccgtttgatatgcagccgagccagcttgcggtcaactttaacggtatgcgctcgacgcttgccggtacagtacggacccagcagggtgaaatctacctgaacggtgatgccgactggagccaaattgaaaactggcgggcacgagtaacggcgaaaggcagtaaagtgcggatcaccgtgccgccgatggtacgaatggatgtatcgccagatgttgtattcgaggctacaccaaacctgtttaccctcgatggtcgcgtggatgtcccgtgggcgcgcatcgtggtgcacgatctgccggaaagcgcagtaggcgtctccagcgatgtggtgatgcttaacgataacctgcaaccggaagagccgaaaacggcgtcgattccgattaacagtaacctgattgtccacgttggcaacaatgtgcgcattgacgcctttggcctgaaagcgcggctgacgggcgatcttaacgtcgtacaggacaaacaagggctgggcctgaacgggcagatcaacatccctgaagggcgcttccatgcctatggtcaggatctgattgtgcgtaagggtgagttactgttctctggtccgccggatcaaccgtatcttaatattgaagctattcgtaacccggatgctacagaagacgacgtaattgccggagttcgcgtcactggtctggcggacgaaccgaaagcggagatcttctctgacccggcgatgtcgcaacaagctgcattgtcttatttgctacgtggacaagggctggagagcgatcagagcgacagtgcggcaatgacctcgatgctgattggtctgggggttgcgcaaagtggccagattgtgggtaaaatcggcgagacgtttggcgtaagcaatttagcgctcgacacccagggagtaggcgactcctcccaggtagtggtcagcggctatgtattgccaggtctgcaagtgaaatacggcgtgggtatatttgactctatagcaacactcacgttacgttatcgcctgatgcctaagctatatctggaagccgtgtctggtgtagaccaggcactggatttgctctatcagttcgagttttag

SEQ ID NO: 482440 - DNA, 342 bp, Shigella sonnei
atgcgaatatttgtctacggcagtttacgccacaaacaaggcaacagtcactggatgaccaatgcccagttactgggcgatttcagtatcgataactaccagttgtatagcctgggccactatccaggcgcagttccggggaacggaacggtacacggtgaagtttatcgtattgacaacgccacgctggccgaacttgatgccttgcgcaccaggggcggtgaatacgcgcgccagttgattcagacgccgtacgggagtgcatggatgtacgtttatcaacgacccgtcgatggattaaagctaattgaaagcggcgactggttagacagggataagtaa

SEQ ID NO: 482441 - DNA, 531 bp, Shigella sonnei; identical to SEQ ID NO: 458116

SEQ ID NO: 482442 - DNA, 957 bp, Shigella sonnei
atgtggaaacgcttacttgtagtctctgcagtctcggcagccatgtcgtctatggcgttggcagctccattaaccggaggattttcgcaggtcggatcggaatccggctggcgcgccgcagaaaccaatgtggcgaaaagtgaggccgaaaaacgcggaattacgttgaaaattgccgatggtcagcaaaagcaggaaaaccagattaaagcggtacgttccttcgttgcacaaggggtggatgcgatctttatcgctccagtggttgcgacgggttgggaaccggtattaaaagaggcgaaagatgccgaaatcccggtcttcttgctcgaccgttccatcgatgtgaaagacaaatctctctatatgaccaccgttactgccgacaacatcctcgaaggtaagttgatcggtgactggctggtaaaagaagtgaatggcaaaccatgcaacgtggtggagctgcagggcaccgttggggccagcgtcgccattgaccgtaagaaaggctttgccgaagccattaagaatgcgccaaatatcaaaattatccgctcgcagtcaggtgacttcacccgcagtaaaggcaaagaagtcatggagagctttatcaaagcggaaaacaacggcaaaaacatctgcatggtttacgcccataacgacgacatggtgattggtgcaattcaggcaattaaagaagcgggcctgaaaccgggcaaagatatcctcacgggttccattgacggtgtaccggacatctacaaagcgatgatggatggcgaagcgaacgccagtgttgaactgacgccgaacatggcgggacccgctttcgatgcgctggagaaatacaaaaaagacggcaccatgcctgaaaagctgacgttaaccaaatccaccctttacctgcctgataccgcaaaagaagagttagagaagaagaaaaatatggggtattga

SEQ ID NO: 482443 - DNA, 1503 bp, Shigella sonnei
atgacgaccgaccaacaccaggagatcctccgcaccgaaggattaagtaaatttttccccggcgtcaaagcgttagacaacgttgatttcagcctgcgccgtggcgaaatcatggcgctgcttggtgaaaacggggcgggaaaatcaacgctaatcaaagcattaactggtgtataccacgccgatcgcggcaccatctggctggaaggccaggctatctcaccgaaaaataccgcccatgcacaacaactcggtattggcaccgtctatcaggaagtcaacctgctacccaatatgtcggttgctgataatctattcataggtcgcgaacccaaacgtttcggccttctacgccgtaaagagatggaaaagcgcgccaccgaactgatggcatcttacggtttcttcctcgacgtgcgcgaaccgcttaaccgcttttcagtcgcgatgcagcaaatcgtcgccatttgccgggctatcgatctctccgccaaagtgctgatcctcgatgaacccaccgccagcctcgacacccaggaagtggagctattatttggcctgatgcgtcagttgcgcgatcgcggcgtcagcctgatctttgtcactcactttctcgatcaggtctatcaggtcagcgatcggatcactgtcttacgcaacggcagtttcgtaggctgtcgggaaacgcgcgagctaccgcagatcgaactggtaaaaatgatgctggggcgcgagctggatacccacgtgctacagcgtgccgggcgaacattgttgagcgacaaacccgttgccgcgttcaaaaattacggcaaaaaaggaacgatagcaccgtttgatctcgaagtgcgccccggcgagatcgtcggtctggctggcttgctgggatccggacgtaccgaaaccgccgaagtgatcttcggtatcaaacctgctgacagcggcacggcgttgatcaaaggcaaaccgcaaaccctgcgatcgccacatcaggcttcagtactgggcatcggattctgcccggaagacaggaaaaccgatggcatcatcgccgccgcctcggtgcgggaaaatatcatcctcgctctccaggcccagcgcggctggctacgacccatttcccgcaaagagcagcaagagattgccgaacgctttatccgccagcttggcattcgcacaccttcaactgaacaaccgattgaatttctctccggtggcaatcagcaaaaagtgctgctttcacgttggctactgacccgaccgcaatttctgatccttgatgagccaacccgtggcattgatgttggtgcccacgccgagatcatccgcctgattgaaacgctgtgtgctgacggtctggcgctgctggtgatctcctccgaactggaagagctggtgggctatgccgaccgggtgatcatcatgcgcgatcgcaaacaggtggcggagatcccgctggcacagctttccgttccggcgatcatgaacgccattgcggcgtaa

SEQ ID NO: 482444 - DNA, 1023 bp, Shigella sonnei
atgcctcaatctctccctgacactacgccgccaaaaaggcgttttcactggccgacggggatgccgcagctggcggcactgttgctggtgctgctggtcgatagcctggtagccccgcatttctggcaggtggtgcttcaggatgggcgtttgttcggtagccctatcgacattcttaaccgtgcagctcccgttgcgttactggcgattggtatgacgctggtgatcgccaccggtggtatcgatctctctgtgggggcggtgatggctatcgccggagccacaacggctgcgatgacggtcgcgggattcagcctgccgattgttttgttaagcgccctgggcaccggcatcctagcgggattgtggaacggcatactggtagcgatcctcaaaattcagccgtttgtcgccaccctgatcctgatggtcgccgggcgcggcgtggcgcaactgatcaccgccgggcagatcgtcacgtttaactcgccggatctctcatggtttggcagcggatcgctgttgttcctgccaacgccggtcattatcgcggtgctgacgcttctcctgttctggctgttgacccgcaaaacggcgctggggatgtttatcgaagccgttggtatcaacattcgggcggcaaaaaatgccggagtcaacacacgaatcatcgtcatgctcacctacgtgttgagcgggttatgtgcggcgattgcgggcattatcgtggcggcggatattcgcggtgccgatgccaacaacgccggattatggctggagctggatgccattctcgcggtggtgattggcggtggatcgctgatgggcggtcgctttaacctgctgctttcgggagttggggcgctgattattcagggaatgaataccggaattttgctttcgggctttccgccagagatgaaccaggtggtgaaagcggtggtggtgctttgtgtgctgattgttcagtcgcaacgctttatcagtctgattaaaggagtgcgtagccgtgataaaacgtaa

SEQ ID NO: 482445 - DNA, 996 bp, Shigella sonnei
gtgataaaacgtaacttgccgcttatgatcaccatcggcgtctttgtgctgggctatctctactgcctgacgcagtttcctggttttgcttccacaagagtgatctgcaatatcctgaccgataacgcctttcttgggatcattgccgttggcatgacctttgtgatcctctccggtgggatcgatctctccgtcggttcggtgatcgcctttaccggcgtgtttctggcaaaagtgattggcgatttcggcctctcgccgctgctggcgtttccgctggtgctggtgatgggctgtgccttcggcgcatttatggggcttctgatcgacgccctgaagatcccggcgttcatcattacgcttgcggggatgttctttttgcgcggcgtcagctatctcgtttcggaagagtcgattccgataaaccatcccatttatgacacgctctcaagccttgcgtggaaaatccctggcggcggtcgcttaagtgcgatgggactgctgatgttggcggtggtggttatcggcatattcctcgcgcatcgtacccgttttggtaatcaggtatacgccattggcggcaacgcaacgtcggcgaatctgatggggatttccactcgcagcaccactattcgcatttatatgctctccaccggactggcaacgctggcggggattgtcttctcgatttatacccaggccggatatgcgctggcgggcgtaggtgtggagctggatgctatcgcctcagtggtaattggcggtacgcttttgagcggtggcgttggaacggtattagggacgctttttggcgtggcgattcagggactgattcagacttacataaactttgatggcacgctgagttcctggtggacgaaaatcgccatcggtattttgttgtttatttttatagcattacagcgtggattaacggtgctgtgggagaatcgtcagagttcgccagtgacaagagtcaacattgcgcagcaataa

SEQ ID NO: 482446 - DNA, 999 bp, Shigella sonnei
atgaaaacgttaggtgaatttattgtcgaaaagcagcacgagttttctcatgctaccggtgagctcactgctttgctgtcggcaataaaactgggcgccaagattatccatcgcgatatcaacaaagcaggactggttgatatcctgggtgccagcggtgctgagaacgcgcagggcgaggttcagcaaaaactcgacttgttcgctaatgaaaaactgaaagccgcactgaaagcacgcgatatcgttgcggggattgcctctgaagaagaagatgagattgtcgtctttgaaggctgtgaatacgcaaaatacgtggtgctgatggaccccctggatggctcgtccaacatcgatgttaacgtctctgtcggtaccattttctccatctaccgccgcgttacgcctgttggcacgccggtaacggaagaagatttcctccagcctggtaacaaacaggttgcggcaggttacgtggtatacggctcctctaccatgctggtttacaccaccggatgcggtgttcacgcctttacttacgatccttcgctgggcgttttctgcctgtgccaggaacggatgcgcttcccggagaaaggcaaaacctactccatcaacgaaggaaactacattaagtttccgaacggggtgaagaagtacattaaattctgccaggaagaagataaatccaccaatcgcccgtatacctcgcgttatatcggttcactggttgcggatttccaccgtaacctgctgaaaggcggtatttatctctacccaagcaccgccagccacccggacggcaaactgcgtttgctttatgagtgcaacccgatggcattcctggcggaacaagcgggcggtaaagcgagcgatggcaaagagcgtattctggatatcatcccggaaaccctgcaccagcgccgttcgttctttgtcggcaacgaccatatggttgaagatgtcgaacgctttatccgtgagttcccggacgcgtaa

SEQ ID NO: 482447 - DNA, 1374 bp, Shigella sonnei
atgcgcattcatattttaggaatttgtggcacatttatgggcggtctggcgatgctggcgcgccagttaggccatgaagtaacgggttcggacgccaatgtgtatccgccgatgagcaccttacttgagaagcaaggcattgagctgattcagggttacgatgccagccagctcgagccgcagccggatctggtgattattggcaacgccatgacccgtggaaatccgtgtgtggaagcggtactggaaaaaaacatcccttatatgtcaggtccacagtggctgcacgattttgtgctgcgcgaccgctgggtgctggccgttgccggtacacacggcaaaaccaccaccgcgggaatggcgacctggattctggaacagtgtggttacaaaccgggatttgtgatcggcggtgtgccggggaactttgaggtttcggcgcgtctgggcgaaagcgacttctttgttatcgaagcggatgagtacgactgcgccttcttcgacaaacgctctaaatttgtccattactgcccgcgtacgctgatcctcaacaaccttgagttcgatcacgccgatatctttgacgacctgaaagcgatccagaaacagttccaccatctggtgcgtatcgttccggggcagggccgtattatctggccggaaaatgacatcaacctgaaacagaccatggcgatgggctgctggagcgagcaggagctggtgggtgagcagggtcactggcaggcgaaaaagctgaccaccgatgcttccgaatgggaagttttgctggatggcgaaaaagtgggcgaagtgaaatggtcgctggtaggcgaacataatatgcacaatggcctgatggcgattgcagcggctcgccatgttggtgtagcgtcggcagatgccgctaacgcgctgggttcgtttattaatgctcgtcgccgtctggagttgcgtggtgaagcgaatggcgtcacggtatatgacgattttgcccatcacccgacggcgattctggcaacgctggcggcgctgcgtggcaaagttggtggtacggcgcgcattattgctgtgctggaaccgcgctcgaataccatgaaaatggggatctgcaaagacgatctggcaccttcattaggtcgtgccgatgaagtcttcctgctgcaaccggcgcatattccgtggcaggtggcagaagtggcagaagcctgcgttcagcctgcacactggagtggcgatgtggatacgctggcagatatggtggtgaaaaccgctcagcctggcgaccatattctggtgatgagcaacggcggttttggtgggatccatcagaaactgctggatggtctggcgaagaaggcggaagctgcgcagtaa

SEQ ID NO: 482448 - DNA, 552 bp, Shigella sonnei
atgactaagcagcccgaagactggctcgacgacgttcccggtgatgacatcgaagacgaagacgatgaaattatctgggtcagtaaaagtgaaattaaacgtgatgccgaggagctaaaacgccttggcgcggaaattgttgatctggggaaaaacgcgctggataagatcccgttagatgcggatctgcgcgcggctattgagctcgcccagcgtattaagatggaaggtcgccgccgccagttgcagctcatcggtaagatgctgcgccagcgcgacgtagagcctattcgtcaggcgctggataagctgaaaaaccgtcacaaccagcaggtggtgctgttccataaactggaaaacctgcgcgatcgtctgatcgatcaaggtgatgacgccatcgctgaagtattgaatctgtggcccgatgccgatcgtcagcaactgcgtacactgatccgcaacgcgaagaaagagaaagaagggaataagccgccgaaatccgcacgccagattttccagtatctgcgcgaactggcggagaatgaagggtaa

SEQ ID NO: 482449 - DNA, 1353 bp, Shigella sonnei
atggcacttgcaatgaaagtaatctctcaagttgaagcgcagcgcaagattctggaagaagcagtttccactgcgctggagttggcctcaggcaaatcggacggtgcggaagttgccgtcagcaagaccaccggcattagcgtaagcacgcgttatggtgaagtggagaatgttgaattcaatagcgatggcgcgctggggatcactgtttatcaccagaaccgcaaaggtagcgcatcatccaccgatttaagcccgcaggccattgcccgtactgtacaggcggcgctggatattgcccgttatacctcgccagatccctgtgccggcctggcagacaaagagctgctggcctttgacgcaccagatctcgacttgttccaccctgcggaagtttccccggatgaagccattgaactggcggcccgcgcagaacaggcagcattacaggcggataaacgtatcaccaataccgaaggtggcagctttaacagccactacggtgtcaaagtttttggcaacagccacggcatgttgcagggttactgctcaacgcgtcattcgctctccagctgtgtaattgccgaagaaaatggcgatatggagcgtgattacgcctacaccattgggcgcgcgatgagcgatctgcaaacgccagagtgggttggggccgactgtgctcgccgtactttatcgcgcctgttaccgcgtaaactctccaccatgaaagcgccagtcatttttgccaatgaagtggcaactgggctttttgggcatctggtgggggcgatagcgggtggatcggtttatcgtaaatctaccttcctgctggattcgctgggtaaacaaattctgccggactggctgaccattgaagagcatccgcatctgctgaaagggctggcgtcgacgccattcgacagcgaaggtgtgcgcaccgagcgtcgcgatattattaaagatggcatcctgactcagtggctgctgaccagctattcggcgcgaaaacttgggctgaaaagcaccggacatgcgggcggtattcacaactggcggattgccggacaagggctaagcttcgaacaaatgctcaaagagatgggcaccgggctggtggtgacggagctgatgggccagggcgtgagtgccattaccggtgattattcccgtggtgctgcgggcttctgggtagagaatggcgaaattcagtatccggtgagcgaaatcaccatcgcaggtaatttaaaagatatgtggcgcaatattgtcaccgtcggtaacgatattgaaacacgcagtaatatacagtgtggttctgtgctgttgccggagatgaaaatcgccggacagtaa

SEQ ID NO: 482450 - DNA, 387 bp, Shigella sonnei
atgcgtaaaagcctgttagctattcttgcagtctcctcgttggtattcagttcggcgtcgtttgccgctgatcttgaagacaatatggaaaccctcaacgacaatttaaaagtggtcgaaaaagccgataacgcgacgcaagtcaaagacgcgttaacgaagatgcgcgccgcagcgctggatgcgcaaaaagcaacgccgccgaagctcgaagataaatcaccggacagcccggaaatgaaagatttccgccacggtttcgacattctggtcggtcagattgacgacgcgctgaagctggcaaatgaaggtaaagtaaaagaagcgcaggctgctgcagagcaactgaaaacgacccgcaacgcctatcaccagaagtatcgttaa

SEQ ID NO: 482451 - DNA, 465 bp, Shigella sonnei; identical to SEQ ID NO: 472827

SEQ ID NO: 482452 - DNA, 2139 bp, Shigella sonnei
atgacaccgcatgtgatgaaacgagacggctgcaaagtgccgtttaaatcagagcgcatcaaagaagcgattctgcgtgcagctaaagcagcggaagtcgatgatgccgattattgcgccactgttgccgcggttgtcagcgagcagatgcagggccgcaaccaggtggatatcaacgagatccagaccgcagttgaaaaccagctgatgtcgggtccatacaaacaactggctcgtgcttacatcgagtaccgtcacgatcgcgacattgaacgtgaaaaacgcggtcgcctgaaccaggagatccgtggtctggtcgagcagaccaacgcctcgttactcaacgaaaacgccaacaaagacagcaaggtgattccaacccagcgcgacctgctggccgggatcgtggctaaacactatgcacgccagcacctgctgccgcgtgacgtggtgcaggcacatgagcgtggcgatattcactatcacgatctcgattactcgccgttcttcccgatgttcaactgcatgttgatcgacctgaaaggcatgctgacccagggctttaaaatggggaacgccgagattgaaccgccgaagtcgatctctacggcaaccgcggtaactgcgcagattattgctcaggtcgccagccatatttatggcggcaccaccattaaccgtatcgatgaagtgctggcgccgtttgttaccgccagctacaacaaacatcgcaagaccgcagaagagtggaacatcccggacgccgaaggctacgctaactctcgtaccatcaaagagtgctacgatgccttccagtcgctggagtacgaagtaaacaccctgcacaccgccaacggtcagacgccgtttgtaacctttggttttggtctgggcaccagcagggaatcgcgcctgattcaggaatcgatcctgcgtaaccgtatcgcaggcctcggtaaaaaccgtaaaactgcggtgttcccgaaactggtgtttgcgattcgcgatggcctgaaccataaaaaaggcgatccgaactacgacatcaaacagctggcgctggagtgcgcaagcaagcgcatgtatccggatatcctgaactacgatcaggtagtgaaagtcaccggttcgtttaaaaccccgatgggctgccgcagcttcctcggcgtgtgggaaaatgaaaacggcgagcagatccacgatggtcgtaacaacctcggcgtgatcagcctgaacctgccgcgtattgctctggaagcaaaaggcgatgaagccaccttctggaagctgctggatgaacgtctggtgctggcacgtaaggcactgatgacccgtatcgctcgtctcgaaggcgtgaaagcgcgcgtcgccccgatcctctatatggaaggtgcttgtggcgtacgtctgaatgctgacgatgatgtttctgaaatcttcaaaaacggtcgtgcgtctatttcgctgggttacatcggcatccacgaaaccattaacgcgctgttcggcggcgagcatgtttacgacaacgagcagcttcgcgcgaaaggtatcgccattgttgaacgtctgcgtcaggcagtggatcagtggaaagaagaaacgggttatggtttcagtctctacagcacgccgagtgaaaacctgtgcgaccgcttctgccgtctcgatactgctgagtttggcgtggtgccgggcgtgaccgataaaggttactacaccaacagtttccaccttgatgtggagaagaaggtgaacccgtacgacaagatcgactttgaagcgccttacccgccgctggcgaacggtggtttcatttgctacggcgagtatccaaacattcagcacaacctgaaagcgctggaagatgtctgggattacagctatcagcatgtaccgtattacggcaccaatacaccgattgatgagtgctacgagtgtggctttaccggtgagttcgagtgcaccagcaaaggcttcacttgcccgaaatgtggtaaccatgacgcctcccgtgtgtcggtaactcgccgcgtgtgcggatatttaggtagcccggatgcgcgtccgtttaacgccggtaagcaggaagaagttaagcgccgcgttaaacatttggggaatgggcagataggttaa

SEQ ID NO: 482453 - DNA, 1656 bp, Shigella sonnei
atgactaatcttccccactggtggcaaaacggcgttatctaccagatttatccaaagagttttcaggacaccacgggtagcggcaccggcgatttacgtggcgttatccaacgcctggactatctgcataaactgggcgttgatgccatctggctaacccccttttatgtctctccccaggtcgataacggttacgatgtagcgaactatacggcgattgatcccacctacggcacgctggacgattttgacgaactggtgacgcaggcaaaatcgcgcgggattcgtatcattctcgatatggtgtttaaccatacctctacccaacatgcctggtttcgcgaggcgctgaacaaagaaagcccttaccgccagttttatatctggcgcgatggcgaaccagaaacgccaccgaacaactggcgttcaaaatttggcggtagtgcgtggcgctggcatgcggaaagcgaacagtactatttgcatctctttgcaccagaacaggcggatctcaactgggagaatccagcggtacgcgcagagctgaaaaaagtctgtgaattctgggccgatcgtggggtcgacgggttgcgcctggatgtggtgaatctgatctccaaagacccgcgtttccctgaagacctggatggcgacgggcgtcgcttctacaccgacgggccacgagcacacgagtttttgcacgagatgaaccgcgatgtgtttacgccacgcgggttaatgaccgtaggtgaaatgtcctccaccagccttgagcattgccagcgatacgcggcactgacaggcagtgaattgtcgatgacctttaattttcatcacctgaaggtcgattatcccggtggtgaaaaatggacgctggctaaacctgactttgtggcgttgaaaacattgttccgccactggcaacaaggaatgcacaacgtggcatggaatgccttgttctggtgtaaccacgatcagccgcgcattgtttctcgctttggtgatgaaggtgaataccgcgtgcctgcggcaaaaatgctggcgatggtgctgcatggcatgcagggaacgccgtatatctaccagggcgaagagattggcatgaccaacccgcatttcacgcgcattactgactatcgcgacgtggagagcctcaatatgtttgccgagctgcgcaacgatggtcgtgatgccgacgagttattggcaatcctcgccagtaaatcccgtgacaacagccgcacgcccatgcaatggagcaacggcgataatgccgggtttacggctggcgaaccgtggattggcctgggcgataactatcaacaaatcaacgtagaagccgcgctggccgatgactcctcggtgttttacacctaccaaaagttaatcgcactgcgtaagcaagaagccatcctgacatggggcaattaccaggatctgctgccaaacagccctgtattgtggtgctatcgccgtgaatggaaggggcaaaccttgctggtcattgccaaccttagccgtgagatccaaccctggcagccagggcaaatgcgcggcaactggcagcttgtgatgcataactacgaagaagcctcaccacaaccctgtgccatgaatttacggccttttgaggctgtctggtggttacagaagtaa

SEQ ID NO: 482454 - DNA, 1422 bp, Shigella sonnei
atgatgagcaaaataaaccaaacggatatcgatcggttgattgaactggtcggcgggcgcggcaatattgcgacggtgagccactgtattactcgcctgcgctttgtcctcaaccaaccggccaatgccagaccgaaagaaattgagcaactccccatggtgaaaggctgtttcaccaatgccgggcaatttcaggtggtgattggcaccaacgtgggtgattactatcaagcactaatagcgtcaaccggacaggcgcaggttgataaagagcaggtaaaaaaagccgcccggcagaatatgaaatggcatgagcagttgatctctcatttcgcggagatcttcttcccgttgctgcccgcgttgattagcggcggtttgatcctcggttttcgcaatgtgatcggcgatttgcccatgagcaacggtcagacgctggcgcaaatgtacccttccctgcaaacgatctacgattttctgtggttgatcggtgaagcgattttcttctacctgccggtcgggatttgctggtcagcggtgaaaaaaatgggcggcacgccgatccttggtatcgtgcttggcgtgacactggtttccccccagctgatgaacgcttatctgctcgggcagcagctgccggaagtgtgggactttggcatgttcagcatcgccaaagtgggctatcaggcgcaggtgatcccggcactgttagccgggctggcgctgggcgttattgaaactcgccttaaacgcatcgtaccggattacctctatctggtggtggtgcccgtctgttcgctgatcctcgcggtgttcctcgcccatgcgctgattggtccgtttggtcgcatgattggcgatggcgttgcctttgcggtacgtcacctgatgaccggcagctttgctccgattggtgcggcattgtttggcttcctgtacgcgccgctggtgatcaccggcgtacaccagaccacccttgctattgatttgcagatgattcaaagcatgggtggcacgccagtgtggccgctgattgcgctgtcgaatatcgctcagggctccgccgtgataggcattatcatttccagccgcaagcacaatgaacgcgagatctccgtgcctgccgctatctccgcctggcttggggtcactgagcctgcaatgtacggcatcaacctgaaatatcgcttcccgatgctgtgcgcgatgattggttctggtctggcaggattgctatgcggcctgaacggcgttatggcgaatggtatcggcgtagggggcctgccgggaattctctcgattcaaccgagctactggcaggtatttgcgctggcaatggctatcgccatcatcatcccgattgtactcacctcgtttatctatcagcggaaataccgcttgggcacgctggacattgtttaa

SEQ ID NO: 482455 - DNA, 948 bp, Shigella sonnei
atgcaaaatcggctgactatcaaagacatcgcacgcttaagcggcgtggggaaatctacagtttcccgggtgctgaataacgaaagcggcgtgagccagcgcacccgcgagcgtgttgaagcagtgatgaatcagcatggattttccccttcccgctctgcgcgcgctatgcgtgggcaaagcgataaagtggtcgccatcattgttacccgtctggattcgttgtcagaaaatctcgccgttcaaaccatgctgccagcgttctatgaacaaggttacgacccaatcatgatggaaagccagttttccccgcaattagttgccgaacatttgggggtgctgaaacggcgtaatatcgacggcgtagtgctgttcggttttactggcataacagaagaaatgttagcccactggcagtcatcgctggttctgctggcgcgtgacgcaaaaggctttgcttcggtctgttatgacgacgaaggggcaatcaagatcctgatgcaacggctgtatgaccaggggcatcgtaatatcagttatctcggcgtgccgcatagtgacgtgacaaccggtaagcgacgtcacgaagcctacctggcgttctgcaaagcgcataaactgcatcccgttgccgctctgccagggcttgctatgaagcaaggctatgagaacgtggcaaaagtgattacgcctgaaactactgcgttactgtgcgcaaccgacacgctggcacttggcgcaagtaaatacctgcaagagcaacgcatcgacaccttgcaactggcgagcgtcggtaatacaccgttaatgaaattcctccatccggagatcgtcaccgtagatcccggttacgccgaagctggacgccaggcggcctgccaattgatcgcacaggtaaccgggcgcagcgaaccgcaacaaatcatcatccccgccaccctgtcctga

SEQ ID NO: 482456 - DNA, 2697 bp, Shigella sonnei
atgtttaaagaaatttttacccggctcattcgccatttaccttcccgtctggttcatcgcgatccattgcctggcgcgcagcagacagtgaatacggcggtcccgccgtccttaagtgcgcattgcctgaaaatggcggtgatgcccgaagaagaattgtggaaaacgttcgacacccatccggaagggttaaatcaggcggaagtggaatctgcccgcgaacaacatggtgaaaataaattacccgcacaacaaccgtcgccgtggtgggtacatttatgggtctgctatcgcaacccatttaatattttactcaccattctcggcgctatttcttacgccactgaagatttatttgccgcgggcgttatcgcgctaatggtcgctatttctacgttgctgaactttattcaggaagcacgttccactaaagcggcagatgccctgaaagcgatggtcagcaataccgcgacggtgctgcgcgtaattaacgacaaaggcgaaaatggctggctggagatcccgatcgaccagctggtgcccggcgatattataaaactggcggcgggggatatgatcccggcagatttacgtatcttgcaggcgcgggatctgttcgtcgctcaggcgtcgttaaccggtgagtctctgcccgtggaaaaagccgctaccactcgccagccggagcacagcaatccgctggagtgtgacaccctgtgttttatgggcaccaccgtggtgagcggcacggcacaagcaatggtgattgctacaggagccaacacctggtttggtcaactggcggggcgtgttagtgagcaggaaagcgagccgaatgcctttcagcaggggatcagccgcgtcagtatgctgctgattcgctttatgctggtgatggctccggtggtgttgcttatcaacggttacaccaaaggcgactggtgggaagcggcactgtttgcgctttcggtcgcggtaggcttaacgccggaaatgttgccgatgattgttacctcgacgctggcgcgcggcgcagtaaagctgtcgaaacagaaagtgatcgtcaaacatctggatgctattcagaactttggcgcaatggatattctgtgcactgataaaactggcaccctgacacaggacaaaattgtgctggagaatcataccgatatctccggtaaaaccagcgaacgcgtgctgcatagcgcgtggttgaacagtcattatcagaccggacttaaaaacctactcgatacagcggtgctcgaaggtacggatgaagagtcagcgcgctctctggccagccgttggcaaaaaattgatgagattccgtttgatttcgagcgtcgccggatgtcggtggtagtggcagaaaataccgagcaccatcagctggtttgcaaaggtgcattgcaggaaatcctcaatgtgtgttcgcaggtgcgtcacaatggcgagattgtgccgctcgatgacatcatgctgcgtaagattaagcgggttactgatacgctgaatcgtcaggggctgcgcgtggttgcggtggcgacgaaatacctgccagcgcgtgaaggagattaccagcgggcggatgaatccgacctgatcctcgaaggatatattgctttccttgatccgccaaaagagacaactgctccggcactgaaggcattaaaagcgagtggaattaccgtaaaaatccttactggcgacagtgagttagttgcagcgaaagtgtgccatgaagtggggctggacgcgggagaggtggtcattggtagtgatattgaaacgctatctgacgacgaactggcaaatctcgcacagcgcaccacgctgtttgctcgtctgacgccgatgcataaagaacgcattgtgaccttactgaagcgcgaagggcatgtggttggctttatgggcgatggtattaatgatgcgcccgccttacgcgctgcggatatcggcatttctgtggacggcgcggtagatattgcccgtgaagcggctgatatcatcctgctggaaaaaagcctgatggtgctggaagagggggttattgaaggacgtcgcactttcgccaacatgctgaaatacatcaaaatgacggcgagctccaacttcggtaatgtgttcagcgtgctggtggcgagtgctttcttgcccttcctgccgatgttgccgttacacttgcttattcagaacctgctgtatgatgtgtcacaggtggcgatcccgtttgataacgtcgacgacgagcaaattcaaaagccgcagcgttggaatccggcggatctggggcgctttatgatcttcttcggaccgatcagctcgatcttcgatattctgacgttttgcctgatgtggtgggtattccatgccaacacgccggaaacgcaaacgctgttccagtcgggatggtttgtggtgggcttgctgtcgcaaacgctgattgtgcatatgatccgcacccgccgtgtgccgtttattcagagctgtgcatcgtggccgttaatgatcatgaccgtgatcgtgatgattgtcgggatcgcattgccgttttcaccgctggccagttatctgcaactgcaggcgctgccgttaagctatttcccgtggctggttgcgattctggcagggtatatgacgttaacccaactggtgaaaggattttatagccgtcgttacggctggcaataa

SEQ ID NO: 482457 - DNA, 387 bp, Shigella sonnei
atgagcaaaactatcgcgacggaaaatgcaccggcagctatcggtccttacgtacagggcgttgatctgggcaatatgatcatcacctccggtcagatcccggtaaatccgaaaacgggcgaagtaccggcagacgtcgctgcacaggcacgtcagtcgctggataacgtaaaagcgatcgtcgaagccgctggcctgaaagtgggcgacatcgttaaaaccaccgtgtttgtgaaagatctgaacgacttcgcaaccgttaatgctacctacgaagccttcttcaccgaacacaatgccaccttcccggcacgttcttgcgttgaagttgcccgtctgccgaaagacgtgaaaattgagatcgaagcgatcgctgttcgtcgctaa

SEQ ID NO: 482458 - DNA, 462 bp, Shigella sonnei
atgacacacgataataaattgcaggttgaagctattaaacgcggcacggtaattgaccatatccccgcccagatcggttttaagctgttgagtctgttcaagctgaccgaaacggatcagcgcatcaccattggtctgaacctgccttctggcgagatgggccgcaaagatctgatcaaaatcgaaaatacctttttgagtgaagatcaggtagatcaactggcattgtatgcgccgcaagccacggttaaccgtatcgacaactatgaagtggtgggtaaatcacgccccagtctgccggagcgcatcgacaatgtgctggtctgcccgaacagcaactgtatcagccatgccgaaccggtttcttccagctttgccgtgcgaaaacgcgccaatgacatcgcgctcaaatgcaaatactgtgaaaaagagttttcccataatgtggtgctggccaattaa

SEQ ID NO: 482459 - DNA, 936 bp, Shigella sonnei
atggctaatccgctatatcagaaacatatcatttccataaacgaccttagtcgcgatgaccttaatctggtgctggcgacagcggcgaaactgaaagcaaacccgcaaccagagctgttgaagcacaaagtcattgccagctgtttcttcgaagcctctacccgtacccgcctctctttcgaaacttccatgcaccgcctgggtgccagcgtggtgggcttctccgacagcgccaatacatcactgggtaaaaagggcgaaacgctggccgataccatttcggttatcagcacttacgtcgatgcgatagtgatgcgtcatccgcaggaaggtgcggcgcgcctggccaccgagttttccggcaatgtaccggtactgaatgccggtgatggctccaaccaacatccgacgcaaaccttgctggacttattcactattcaggaaacccaggggcgtctggacaatctccacgtcgcaatggttggtgacctgaaatatggccgcaccgttcactccctgactcaggcgttagcgaagttcgacggcaaccgtttttacttcatcgcgccggacgcgctggcaatgccgcaatacattctggatatgcttgatgaaaaagggatcgcctggagtctgcacagctctattgaagaagtgatggcggaagtagacatcctgtacatgacccgcgtgcaaaaagagcgtctggacccgtccgagtacgccaacgtgaaagcgcagtttgttcttcgcgccagcgatctccacaacgccaaagccaatatgaaagtgctgcatccgctgccgcgtgttgatgagattgcgacggatgttgataaaacgccacacgcctggtacttccagcaggcaggcaacgggattttcgctcgccaggcgttactggcactggttctgaatcgcgatctggtactgtaa

SEQ ID NO: 482460 - DNA, 396 bp, Shigella sonnei
atggtagaaagaaccgctgttttccctgcaggccgacattcactgtatgctgaacatcgttattctgcggctattcgttccggcgatttgctgtttgtttccgggcaagtaggaagtcgagaggacggaacaccagaacccgattttcagcaacaagtcagactggcatttgataatttgcatgcgaccctggctgctgcgggatgcacttttgacgatatcattgatgttacgagcttccataccgatccagaaaaccaatttgaagacatcatgacggtgaaaaatgaaatatttagcgccccaccttatccaaactggacggcggtaggtgttacatggctggcaggctttgattttgaaattaaagtgatagcgcgcatccctgagcagtaa

SEQ ID NO: 482461 - DNA, 714 bp, Shigella sonnei
atgggcgcttttacaggtaagacagttctcatcctcggtggcagtcgtggtatcggtgccgctatcgtacgtcgtttcgtcaccgatggggccaatgtacgattcacctatgcggggtcgaaagatgccgctgaacacctggcacaaaagactggagcgacagcagtattcacagatagtgctgacagagacgctgtcattgatgtcgttcgtaagagcggcgcattggatatcctggtggtaaatgcaggtattggcgtctttggcgatgccctggaattgaatgccgacgatattgatcgccttttcaaaatcaatattcatgctccttatcatgcctctgttgaagccgcccggcagatgcccgaaggcgggcgcatcttaatcatcggctccgtgaatggcgatcgtatgcctgttgcaggcatggctgcttatgccgccagtaaatctgccctgcaaggcatggcgcgcgagctggcccgtgatttcggaccgcgtgggatcaccatcaacgtcgtccagccagggccaattgataccgacgctaatcccgccaacgggccaatgcgcgatatgttgcatagttttatggctatcaaaagacatgggcaaccggaagaggtcgctggtatggtcgcatggttagcagggccagaagccagttttgttaccggcgcgatgcataccattgatggcgcgtttggcgcataa

SEQ ID NO: 482462 - DNA, 594 bp, Shigella sonnei
atggtcactaaaaaacaatctcgcgttccaggtcgtcccagacgtttcgctcctgagcaggcagtctctgcggcaaaagtgctttttcaccaaaaaggtttcgatgctgtcagtgttgctgaagttactgattatcttggtattaaccccccgagcctctacgcggcttttggcagtaaggctgggttatttagccgtgtactcaatgaatatgtcggtacggaagctattccgcttgccgatattcttcgtgatgatcgtccggtaggggagtgcctggctgaggtattaaaagaagcggcgcgcagatatagccaaaacggcggctgcgctggctgtatggttcttgaaggcattcatagtcatgatccacaagcgcgtgatattgccgttcaatattatcacgccgcagaaacggccatttatgactatatcgccaggcggcatccacaaagcgcacaatgtgtgactgattttatgagtaccgtgatgtcagggctttctgcgaaggctcgggaggggcactccatcgaacaactctgtgcaacagctgcactggcgggggaagcgataaaaactattctcaaggagtga

SEQ ID NO: 482463 - DNA, 144 bp, Shigella sonnei
atgatcatcggaaatattcataatcttcagccgtggctaccccaggagttacgcctggcgattgagcatatcaaagcacacgttacggcagaaacgccaaagggcaagcacgatatcgaaggcaatcgtctgttttatcggtga

SEQ ID NO: 482464 - DNA, 129 bp, Shigella sonnei; identical to SEQ ID NO: 261840

SEQ ID NO: 482465 - DNA, 168 bp, Shigella sonnei; identical to SEQ ID NO: 261839

SEQ ID NO: 482466 - DNA, 2676 bp, Shigella sonnei
atgtcgtcaaccctacgagaagccagtaaggacacgttgcaggccaaagataaaacttaccactactacagcctgccgcttgctgctaaatcactgggcgatatcacccgtctacccaagtcactcaaagttttgctcgaaaacctgctgcgctggcaggatggtaactcggttaccgaagaggatatccacgcgctggcaggatggctgaaaaatgcccatgctgaccgtgaaattgcctaccgcccggcaagggtgttgatgcaggactttaccggcgtacctgccgttgttgatctggcggcaatgcgcgaagcggttaaacgcctcggcggcgatactgcaaaggttaacccgctctcaccggtcgacctggtcattgaccactcggtgaccgtcgatcgttttggtgatgatgaggcatttgaagaaaacgtacgcctggaaatggagcgcaaccacgaacgttatgtgttcctgaaatggggaaagcaagcgttcagtcggtttagcgtcgtgccgccaggcacaggcatttgccatcaggttaacctcgaatatctcggcaaagcagtgtggagtgaattgcaggacggtgaatggattgcttatccggatacactcgttggtactgactcgcacaccactatgatcaacggccttggcgtgctggggtggggcgtgggtgggatcgaagcagaagccgcaatgttaggccagccggtttccatgcttatcccggacgtagtgggctttaaacttaccggtaaattacgtgaaggtattaccgccacagacctggttctcactgttacccaaatgctgcgcaaacatggcgtggtggagaaattcgtcgaattttatggtgatggtctggattcactaccgctggcggatcgcgccaccattgccaatatgtcgccagaatatggtgccacctgtggcttcttcccaatcgatgctgtaaccctcgattacatgcgtttaagcgggcgcagcgaagatcaggttgagttggtcgaaaaatatgccaaagcgcagggcatgtggcgtaacccgggcgatgaaccgatttttaccagtacgttagaactggatatgaatgacgttgaagcgagcctggcagggccaaaacgcccacaggatcgcgttgcactgcccgatgtaccaaaagtatttgccgccagtaacgaactggaagtgaatgccacgcataaagatcgccagccggtcgattatgttatgaacggacatcagtatcagttacctgatggcgctgtggtcattgctgcgataacctcgtgcaccaacacctctaacccaagtgtgctgatggctgcaggcttgctggcgaaaaaagccgtaattcttggcctcaagcggcaaccgtgggtcaaagcgtcgctggcaccaggctcgaaagttgtttctgactatctggcaaaagcgaaactgacaccgtttctcgacgaactggggtttaaccttgtgggatacggttgtactacctgtattggtaactctgggccgctgcccgatcctatcgaaacggcaatcaaaaaaggcgatttaaccgtcggtgcagtgctgtccggcaaccgtaactttgaaggccgtatccatccgctggttaaaaccaactggctggcctcgccgccgctggtggttgcctatgcgctggcgggaaatatgaatatcaacctggcttctgagcctattggtcatgatcgtaaaggcgatccggtttatctgaaagatatctggccatcggcacaagaaattgcccgtgcggtagaacaagtctccacagaaatgttccgcaaagagtacgcagaagtttttgaaggcacagcagagtggaaggaaattaacgtcacacgatccgatacctacggttggcaggaggactcaacctatattcgcttatcgcctttctttgatgaaatgcaggcaacaccagcaccagtggaagatattcacggtgcgcggatcctcgcaatgctgggggattcagtcaccactgaccatatctctccggcgggcagtattaagcccgacagcccagcgggtcgatatctacaaggtcggggtgttgagcgaaaagactttaactcctacggttcgcggcgtggtaaccatgaagtgatgatgcgcggcaccttcgccaatattcgcatccgtaatgaaatggtgcctggcgttgaaggggggatgacgcggcatttacctgacagcgacgtagtctctatttatgatgctgcgatgcgctataagcaggaacaaacgccgctggcggtgattgccgggaaagagtatggttcaggctcaagccgtgactgggcggcaaaaggtcctcgtctgcttggaattcgtgtggtgattgccgaatcgtttgaacgaattcaccgttcgaatttaattggcatgggcatcctgccgctggaatttccgcaaggcgtaacgcgtaaaacgttaggactaaccggggaagagaagattgatattggcgatctgcaaaatctacaacccggtgcgacggttccggtgacgcttacgcgcgcggatggtagccaggaggtcgtaccctgccgttgtcgtatcgacaccgcgacggagttgacctactaccagaacgacggcattttgcattatgtcattcgtaatatgctgaagtaa

SEQ ID NO: 482467 - DNA, 591 bp, Shigella sonnei
atgcagcttaaacgtgtggcagaagccaaactgccaaccccatggggcgatttcctgatggtgggatttgaagaactggcaaccggacacgatcatgtcgcgctagtctatggcgatatttccgggcataccccggtacttgcgcgcgtccattccgaatgtctgaccggtgacgccctgttcagcttgcgctgcgattgtggcttccagctcgaagcggcattgacgcaaattgccgaggaaggccgtggtattttgctgtatcaccgtcaggaaggtcgtaacattggtctgctgaataaaatccgcgcttacgcactgcaggatcaaggttacgataccgtagaggctaaccatcagttaggcttcgccgctgatgagcgcgacttcactctttgcgctgatatgttcaaactccttggcgtcaatgaagtccgcttgttaaccaataacccgaaaaaagtcgaaattctgaccgaagcagggattaatattgttgaacgcgtaccattgattgtaggtcgtaaccccaataacgaacattatctcgataccaaagccgagaaaatgggtcatttgctgaacaaataa

SEQ ID NO: 482468 - DNA, 765 bp, Shigella sonnei
atgcgttcgattgccagacgtaccgcagtgggagctgcactattgcttgtcatgccagtagccgtatggatttctggctggcgttggcaacctggagaacaaagttggctactaaaagcggctttttgggttactgaaactgtcacccagccctggggcgtcattacacatttgattttattcggctggtttctctggtgtctgcgtttttgcattaaggctgcctttgtattatttgccattctggcggccgtaatcattgtgggacaaggcgttaaatcctggatcaaagacaaagtccaggaaccacgaccttttgttatctggctggaaaaaacacatcatattccggttgatgagttctacactttaaagcgagcagaacgcggaaatctagtgaaagaacagttggctgaagagaaaaatatcccacaatatttgcgttcacactggcagaaagagacggggtttgcctttccttccggtcacacgatgtttgctgccagttgggcactgctggccgttggtttgctgtggccgcgtcggcgaacgttaaccattgctatcttgctggtctgggcaacgggagtcatgggaagccgcctgctgctcgggatgcattggccacgcgatctggtagtagctacgttgatttcgtgggcgctggtggcggtggcaacgtggcttgcgcaacgaatttgtgggccattaacaccacctgcggaagaaaatcgcgaaatagcgcaacgagaacaagaaagttaa

SEQ ID NO: 482469 - DNA, 309 bp, Shigella sonnei
gtgaaatatttactcattttcttactggtgttagcgatcttcgtgatttcggtcacgttgggtgcgcagaacgatcaacaggtgacgtttaattatctgttagcgcaaggggagtaccgtatttccacattgctggcggtattgtttgctgcgggggttgctatcggttggttgatttgtggcctgttctggctgcgagttcgtgtttccctggcgcgcgctgaacgtaaaataaagcgactggaaaaccagctttcacccgcgactgacgtggctgtagtgccgcactcgtcagcggcgaaggaataa

SEQ ID NO: 482470 - DNA, 1170 bp, Shigella sonnei
atgctggagttgttgtttctgcttttgcctgtagccgctgcctatggctggtatatgggccgcagaagtgcgcaacaaaacaagcaagatgaagccaaccgcttgtcgcgtgattacgtagcgggggttaacttcctgcttagtaatcaacaggataaagcggtagacctgtttctcgatatgcttaaagaggatacaggcaccgttgaagcccaccttacgctcggaaacctgttccgttcgcgtggcgaagttgatcgcgctattcgcatccatcagaccctaatggaaagcgcctcactgacctatgaacagcgtctgttggcgattcaacaactggggcgtgattacatggccgccgggttatacgaccgcgcggaagacatgttcaatcagctgaccgatgaaactgacttccgcattggcgcgctgcaacagttgctacaaatctaccaggctaccagcgagtggcagaaagcaattgatgttgccgaacgcctggtgaagctgggtaaagataaacagcgcgtcgaaattgcccatttctactgtgagttagccctgcagcatatggccagcgacgatctcgatcgtgccatgaccttgctaaaaaaaggggcggcggcagataaaaacagcgcccgcgtatccatcatgatgggacgcgtgtttatggcgaaaggagaatacgccaaagccgtcgaaagtttgcaacgcgtgatatcccaggacagagaactggtcagcgaaacgctggaaatgttgcaaacctgctatcagcagttgggtaaaactgccgaatgggcagaattcctgcaacgcgcggtggaagagaacaccggtgccgatgctgaattgatgcttgctgatatcatcgaagcgcgcgacggtagtgaggccgcacaggtctatattacgcgccagcttcagcgtcatccgaccatgcgtgtgttccataagttaatggattaccacttaaatgaagcggaagaagggcgtgccaaagagagcctgatggtgctgcgtgacatggttggcgaaaaggtacgtagtaagcctcgttatcgctgccaaaaatgtggttttaccgcatacaccctctactggcattgtccgtcttgtcgggcctggtcaaccattaaaccgattcgcggtcttgatggcctgtaa

SEQ ID NO: 482471 - DNA, 798 bp, Shigella sonnei
atgctcgccgtttacctgtttcgcgccacttccggtgcccatcatcaagaaggtctggtcatgacgttaactgcttcatcttcttcccgcgctgttacgaattctcctgtggttgttgcccttgattatcataatcgtgatgacgcgctgtcctttgtcgacaagatcgacccacgcgattgtcgtctgaaggtcggcaaagagatgtttacattgtttgggccacagtttgtgcgcgaacttcaacagcgtggttttgatatctttcttgacctgaaattccacgatattcctaacactgcagcgcacgctgtcgctgctgcagctgacttaggcgtgtggatggtgaatgttcatgcctctggtggggcgcgtatgatgaccgcagcgcgtgaggcactggttccgtttggcaaagatgcaccgcttttgattgctgtgacagtgttgaccagcatggaagccagcgacctggtcgatcttggcatgacactgtcacctgcagattatgcagaacgtctggcggcactgacgcaaaaatgtggccttgatggtgtggtgtgttctgctcaggaagctgtgcgctttaaacaggtattcggtcaggagttcaaactggttacgccgggcattcgtccgcaggggagtgaagctggtgaccagcgccgcattatgacgccagaacaggcgttgtcggctggtgttgattatatggtgattggtcgcccggtaacgcaatcggtagatccagcgcagacgctgaaagcgatcaacgcctctttacagcggagtgcatga

SEQ ID NO: 482472 - DNA, 327 bp, Shigella sonnei
atgagtgattccaacagccgtctggtctactcaacggaaaccggacgtattgatgagcccaaagcggcccctgtacgccctaaaggcgacggtgtggtgcgtattcagcgtcagaccagtggacgtaaaggtaagggcgtttgcctgattaccggtgtcgatctcgatgatgccgaactgacaaaacttgcagcggaactgaagaaaaaatgcggctgcggcggagcagttaaagatggagttattgaaatccagggcgataagcgtgatttattaaaatcactacttgaagcgaaagggatgaaggtaaaactcgcaggcggttaa

SEQ ID NO: 482473 - DNA, 219 bp, Shigella sonnei; identical to SEQ ID NO: 461657

SEQ ID NO: 482474 - DNA, 750 bp, Shigella sonnei
atgaattcccgacaacaaactattctacagatggtcattgaccagggtcaggttagcgtaaccgatctggcaaaagccactggagtttctgaagttaccattcgccaggatctcaacaccctcgaaaaactgagttacctccgccgtgcacatggctttgcagtttcgcttgatagtgatgacgtcgaaacccgtatgatgagcaactatacgctgaagcgtgaactcgccgagtttgccgcgtcactggttcaaccgggcgaaaccatctttatcgaaaatggcagcagcaatgccctgctcgcccggactctgggggagcagaagaaaaatgtcactatcatcacggtcagcagctacatcgcgcatttgctgaaagacgcgccttgtgaagtcattttgctcggtggcgtgtaccagaaaaaaagcgaaagtatggttggcccgttgacacgccagtgcatccaacaggtgcatttcagcaaagcatttattggtattgatggctggcaacctgaaactggattcaccggtcgcgatatgatgcgtaccgatgtggtcaatgccgtgctggaaaaagagtgcgaagcgatagtcctgactgacagctcgaaatttggtgctgtacattcatactccatcggtcccgttgagcgattcaatcgcgtgattaccgattcgaaaatacgcgccagcgatctgatgcatcttgagcacagtaaactcaccgttcacgtcgttgacatttaa

SEQ ID NO: 482475 - DNA, 174 bp, Shigella sonnei; identical to SEQ ID NO: 261832

SEQ ID NO: 482476 - DNA, 1236 bp, Shigella sonnei
atgcaggagttaatcgatcacgctattaatcaggcagataacaataaagttggggttgtgtatcttgatttggataattttaaaaaggtcaacgacgcctatgggcatttgtttggtgaccagttattacgcgacgtgtcattggctattttaagctgtctcgaacatgaccaggtgttggcgcgtccaggtggcgatgagtttctggtactggcatccaatacctcacaaagcgcgctggaagcaatggcatcacgaattttgacccgcttacgcctcccctttcgtattggtttaattgaagtttataccagctgttcagtaggtatttcgctctctcccgaacatggttcggacagcgcgactattattcgtcacgccgacacagcaatgtacacagcgaaggaaggcggacgaggacaattttgcgtttttactccagaaatgaatcagcgggtatttgaatatctctggctggataccaacttgcgtaaagcactggaaaacgatcagttggttattcactatcaaccgaaaatcacctggcgtggcgaagtgcgcagtctggaagcactagtacgttggcagtcacctgaacgtgggttgattccaccgttggacttcatttcctacgccgaagagtcagggctaattgtgcctttaggccgttgggtgattctcgatgtcgtacgccaggtggcaaagtggcgggataaaggcataaacctgcgagtggcggtaaatatttctgcacgtcagctcgccgatcaaaccattttcaccgccctgaaacaggttctccaggaactcaattttgaatactgccctatagatgttgaactgacagagagttgtctgattgagaatgatgaactggcactgtctgttattcaacaatttagccaactaggtgcgcaagtgcatctggatgattttggtaccggctactcttcactttcgcaactggcgcgctttccgatcgatgccatcaaacttgaccaggtttttgttcgagatattcacaaacaacctgtctcgcagtcactggtccgggcgatcgtcgctgtggcccaggcattgaatcttcaggtgatcgccgaaggtgtagagagtgcaaaggaagatgcttttttaaccaagaacgggatcaatgagcggcaaggatttttgtttgccaaaccgatgcccgccgtcgccttcgaacgctggtataaacgctatctgaagcgcgcataa

SEQ ID NO: 482477 - DNA, 654 bp, Shigella sonnei
atgaaaaccgttagggagtccacaacgttgtacaactttctcggatcgcacaatccatactggcggttgacggaaagcagcgatgttttgcgcttttctaccaccgaaaccacagaacctgatcgtactttgcagttatctgccgaacaggctgctcgcatcagggaaatgacggtcatcacctccagcctgatgatgagtctgaccgtcgatgagagcgatctttctgtgcatctggtaggacgaaaaatcaataaacgggaatgggctggcaacgcgtctgcatggcatgacacaccggcagttgctcgtgatttatcacacgggctttcctttgctgagcaggtagtttctgaagcacattccgcaatagtgattctcgacagccgggggaatatccaacgcttcaatcggttatgtgaagattacactgggttgaaagaacacgacgtcattggccaaagcgtgtttaaactgtttatgagccgtcgtgaagctgcggcatccaggcgcaataaccgtgtattttttcgaagcggcaatgcatatgaagtcgaactgtggataccaacacgtaaaggccagcggctgtttctgtttcgcaataaaataaatttgtccacagcggcagtggcaaaaacgagatttttttaa

SEQ ID NO: 482478 - DNA, 1935 bp, Shigella sonnei
atgtttcaggacaacccgctgctagcgcagcttaaacagcaactgcattcccagacgccacgcgctgaaggggtggtaaaagccacagaaaaaggctttggcttcctggaagtcgacgcgaaaaaaagttatttcattccgccgccgcagatgaaaaaagtcatgcatggcgaccgaattatcgcggtgatccacagtgaaaaagaacgtgaatccgcagagccagaagaactggttgaaccgttcctgactcgtttcgtgggtaaagttcagggcaaaaatgaccgtctggccatcgttcctgatcatccactcttaaaagacgccattccttgccgcgcagcccgtggcctgaaccacgagtttaaagaaggcgactgggcggttgccgaaatgcgccgtcatccgctgaaaggcgatcgttctttctatgctgaactgacacaatacatcacttttggtgacgaccactttgtaccgtggtgggttacccttgcgcgccataatctggaaaaagaagcaccagacggcgtcgctaccgaaatgctcgatgaaggtctggttcgtgaagatctgaccgcgctggattttgtcaccatcgacagtgccagcacagaagatatggatgacgcccttttcgctaaggcgttgccggatgacaaacttcagctgattgtggcgattgccgatccaaccgcgtggattgctgaaggcagcaagctggacaaagccgcgaaaattcgcgcattcaccaactatctgcctggcttcaacatccctatgcttcctcgcgagctttctgacgatctctgctcactgcgcgccaatgaagtccgcccggtactggcatgccgcatgacgctctccgctgatggcaccattgaagataatatcgaattctttgccgccaccatcgaatccaaagcgaagctggtgtatgaccaggtttctgactggctggaaaataccggtgactggcagcctgaaagtgaagcaattgccgaacaagtccgtttgctagcgcaaatttgccaacgccgcggcgagtggcgtcataaccacgcactggtgtttaaagatcgcccggattaccgctttattctcggtgaaaaaggtgaagtgctggatatcgtcgccgagcctcgtcgcattgccaaccgtatcgtcgaagaagcgatgattgccgctaacatttgtgcggcccgcgttctgcgcgataagctcggttttggcatctataacgtgcatatgggctttgatccggcgaatgccgacgcgctggcagcgttgctgaaaacgcacggtctgcatgtcgatgccgaagaagtgctcacgctggacggtttctgcaaactgcgtcgtgaactggatgcgcaaccaactggtttcctcgacagccgcattcgtcgcttccagtcatttgctgaaattagcactgaacccggtcctcactttggcctcggtctggaagcatacgccacctggacttcgccgatccgtaaatatggcgacatgatcaaccaccgtctgctgaaagcggttatcaaaggcgaaactgcgacgcgtccgcaggatgaaatcactgtccaaatggccgaacgtcgccgtctcaaccggatggcagaacgtgatgttggcgactggttatacgcacgcttcctgaaagataaagccgggaccggcacccgtttcgcggcggaaattgtcgatatcagccgtggcggcatgcgtgtgcgtttggttgataacggcgctatcgcctttattccggcacctttcttacacgctgtgcgcgatgaactggtttgcagccaggaaaacggcactgtacaaattaaaggtgaaacggtttacaaagtaactgacgttattgacgtcaccattgccgaagtccgcatggaaacccgcggcattattgcgcgcccggtcgcgtaa

SEQ ID NO: 482479 - DNA, 978 bp, Shigella sonnei
atggaacaacgccacatcaccggcaaaagccactggtatcatgaaacgcaatccagtactgcggagtatgacgttctgcctctggtcccggaagccgcaaaggtcagcgatccctttctgctcgacgtgatccttgatgaagaaacgctggctcccttcctttcatggctggtccctgcgcgcgttcttgcagtggaattgttccctgaccagcttaccgtgacccgttcacagaccttcaccgcttatgaacgcttgtctacggccctgacggttgctcaggtttgcggcgtccagcggttatgtaactactattcggcgcgacttacgccgctccccgggcctgattcctccagggaaagcaatcataggttggcacaaatcacgcaatatgcccgccaactggctagctcgccttctattatcgacaaccgatcgcgccagcatctgaatgacgtcggtcttactgcctgggactgtgtgatcattaaccaaatcattggttttattggctttcaggcgcggaccattgcgacatttcaggcttatctcgggcacccggtacgctggttacccggtctggaaatacaaaactacgccgacgcgtcactgtttgctgatgaatcaatacgctggcgaagcagctatgaggtggaaaaactacctgaagagtacacaaaaagttcaacagcagaactttgccaactggccgaaacactctctctccaccctatttcactttcccttctcgaaaggttgttaaacagtacacgggttaatacacagccggataataagcttgcggcgttgttatgcgcgcggataaatggcagtcctgcttgttttgccgcctgtatggattcatcaaatgaatataaaaaatcagcccccttctgcgcaagggcgaaaatgaaattaaccaatgggctgaccgtcattctgttgagcacgctaccgttcaggcgatacaatggctga

SEQ ID NO: 482480 - DNA, 789 bp, Shigella sonnei
atgggttttctttccggtaagcgcattctggtaaccggtgttgccagcaaactatccatcgcctacggtatcgctcaggcgatgcaccgcgaaggagctgaactggcattcacctaccagaacgacaaactgaaaggccgcgtagaagaatttgccgctcaattgggttctgacatcgttctgcagtgcgatgttgcagaagatgccagcatcgacaccatgttcgctgaactggggaaagtttggccgaaatttgacggtttcgtacactctattggttttgcacctggcgatcagctggatggtgactatgttaacgccgttacccgtgaaggcttcaaaattgcccacgacatcagctcctacagcttcgttgcaatggcaaaagcttgccgctccatgctgaatccgggttctgccctgctgaccctttcctaccttggcgctgagcgcgctatcccgaactacaacgttatgggtctggcaaaagcgtctctggaagcgaacgtgcgctatatggcgaacgcgatgggtccggaaggtgtgcgtgttaacgccatctctgctggtccgatccgtactctggcggcttccggtatcaaagacttccgcaaaatgctggctcattgcgaagccgttaccccgattcgccgtaccgttactattgaagatgtgggtaactccgcggcattcctgtgctccgatctctctgccggtatctccggtgaagtggtccacgttgacggcggtttcagcatcgctgcaatgaacgaactcgaattgaaataa

SEQ ID NO: 482481 - DNA, 351 bp, Shigella sonnei
atggataaaataaaatcaaatgcgcgtgatttaagacgcaatctcactttgcaggaacgaaagctctggcgatatcttcgcagccgacgttttggtgatttcaaatttcgccgtcaacatccggtggggagctacattctcgattttgcttgctgctcggcgcgcgtagtcgttgagctggatggtgggcagcatgatttggcagttgcctatgataccaggcgcactagctggcttgagtcgcagggctggaccgtgctgcgtttctggaataacgagattgattgtaatgaggaggcggtgccggagattattctgcaggaactgaaccgccgatcaccctcaccctga

SEQ ID NO: 482482 - DNA, 807 bp, Shigella sonnei
atgatcgaaacgctgcttgaagtgcgtaatttaagtaaaacgttccgctaccggaccggctggtttcgtcgtcagaccgtagaagcggtaaaacccttgagctttacgctacgtgaaggccagacactggcgattattggcgagaatggttcgggtaaatccacgctggcaaaaatgctggcgggaatgatagagcctaccagcggcgagttattgattgacgatcatccactgcattttggcgattattccttccgcagtcagcgtattcgcatgatttttcaggatccttcgacctcgttgaatccccgtcaacgtatctcgcaaattctggattttccactgcgcctgaacaccgacctggaaccggaacagcgtcgcaaacagattattgaaacgatgcgtatggttgggctgctaccggatcacgtcagttactatccgcatatgttggcacccggacaaaaacagcgtctgggtctggcgcgcgcgctaatattgcgcccaaaagtcattattgccgatgaagccctcgcttcactggatatgtcgatgcgttcgcagttgattaatctgatgctggagttacaggaaaaacagggcatttcgtatatttatgttacccagcatatcggaatgatgaagcacattagcgaccaggtgctggtgatgcatcagggcgaggttgtcgagcgaggcagcaccgcggatgtgctggcatcgccgctgcatgaactcaccaaacggctgattgccgggcactttggcgaagcattgacagcggatgcgtggcgtaaagatcgctaa

SEQ ID NO: 482483 - DNA, 993 bp, Shigella sonnei
atgccattactcgatattcgtaacctgaccattgaatttaaaaccggtgatgagtgggttaaagccgtcgaccgggtaagtatgaccttaaccgaaggtgaaatccgcggtcttgttggtgaatccggttccggcaagagtttgattgcgaaagcgatttgtggggtgaataaagataactggcgtgttactgctgaccgtatgcgttttgatgatatcgatttgctgcgtctctccgcacgcgaacggcgcaaactggttggccataacgtgtcgatgattttccaggaaccgcagtcgtgtcttgacccttcagaacgtgtgggtcgccagttgatgcaaaacatcccagcctggacctataaaggccgttggtggcagcgttttggctggcgcaaacgccgtgccattgaactgctgcaccgcgtggggattaaagatcacaaagatgcgatgcgcagttttccctatgagttgaccgaaggtgaatgtcagaaagtgatgatagccattgcactggcgaatcaaccgcgtctgctgattgctgacgaaccgaccaactcaatggagccaacaacccaggcgcaaatctttcgcctgctgacgcgtctcaaccaaaacagcaataccactattttgcttatcagccatgacttacaaatgcttagccaatgggcggataaaattaacgtgctttactgcggtcaaacagtggaaaccgcgccgagtaaggagttggtgacgatgccacatcatccttatacccaggcgctgatccgcgcgataccagacttcggcagcgcgatgccgcataaaagtcgcctcaatacgctgcccggcgctatcccactgctggaacagttaccgattggttgtcgtctggggccacgttgcccgtatgcacaacgagaatgcattgtgacgccacgtttgacgggggcgaaaaatcatctctatgcctgtcatttcccgctgaacatggagaaagagtga

SEQ ID NO: 482484 - DNA, 891 bp, Shigella sonnei; identical to SEQ ID NO: 458926

SEQ ID NO: 482485 - DNA, 966 bp, Shigella sonnei; identical to SEQ ID NO: 458927

SEQ ID NO: 482486 - DNA, 1644 bp, Shigella sonnei
atgcgccaggtattatcgtctcttttggtgattgctggacttgtgagtggtcaggcaatcgccgcgcctgaatcccccccgcatgctgatatccgcgacagcggttttgtctattgcgtcagcgggcaagtcaacacctttaacccatccaaagcgagcagtgggttaattgtcgatacccttgccgcccagttttatgatcgactgctggatgtcgatccctatacctatcgcctgatgccggaacttgccgaaagctgggaagtactcgacaacggcgcgacctatcgcttccacctgcgtcgcgatgttccgtttcaaaaaaccgactggtttactcccactcgtaaaatgaatgccgacgatgtggtgtttaccttccagcgaatttttgaccgcaacaacccgtggcataacgtcaacggcagcaacttcccctacttcgacagcctgcaatttgccgataacgtgaaaagcgtccgcaaactggataatcataccgttgagttccgactcgcccagccggatgcttcttttttgtggcacctcgcaacccattatgcttcggtcatgtcggcagaatatgcccggaagttagagaaagaagatcgccaggagcaactcgaccgtcaaccggtcggcaccggtccgtatcagttgtcggaataccgcgccgggcaatttattcgcctacaacgtcatgatgacttctggcgcggtaaaccgttaatgccgcaggtagtggtggatttaggctccggcggcaccggacgtctgtcgaaactcctgaccggggaatgcgacgttctggcctggcctgctgccagccagctatccattttgcgtgacgacccgcgcttgcgtttaacgctgcgtcctgggatgaacgtcgcctatctggcatttaacaccgccaaaccgccgctaaataatcccgctgtccgccatgcactggcactggcgattaataaccagcgcctgatgcaatccatctattatggtacggctgaaacggcggcctctattttaccgcgcgcctcgtgggcctatgacaacgaggctaaaattactgaatacaatccggcgaaatcgcgcgaacagttgaaggcgttggggctggaaaacttaacgctgaaactgtgggtgcccacacgttcgcaggcgtggaaccccagtccactgaaaactgccgaactgattcaggcggatatggcgcaggttggcgtaaaagtggtgattgtgccggtagaaggtcgctttcaggaggcgcggttgatggatatgagccatgatctgacattatccggttgggcgacggacagtaacgacccggacagtttcttccgtcctttactgagctgcgcggcaattcattcacagaccaacctcgcccactggtgcgatccgaaattcgacagcgtgttgcgtaaggcgctctcctcgcagcagctggcggcgcgtattgaagcctatgacgaagcgcagagtattctggcgcaggaattacctattctgccgctggcgtcgtcattgcgtttgcaggcctatcggtacgatatcaaaggtctggtacttagcccgtttggtaacgcctcctttgctggggtgtatcgcgagaaacaggatgaggtgaaaaaaccatga

SEQ ID NO: 482487 - DNA, 246 bp, Shigella sonnei; identical to SEQ ID NO: 470883

SEQ ID NO: 482488 - DNA, 1386 bp, Shigella sonnei
atggctattaattcaccactgaatattgctgcgcaacccggcaaaacccgtctgcgaaaatcactgaaattgtggcaggtggtaatgatgggtctggcctatctcacgccgatgaccgtatttgatacttttggtattgtctccggcattagcgacggtcacgttccggcgtcctatttgctggcgctggcgggcgtgctgtttaccgctatcagctacggcaaactggttcgccagtttccggaggccggttcggcctatacctacgcgcaaaagtcgattaacccgcacgtcggatttatggtcggctggtcatcactgctggattatctctttttgccaatgatcaacgttttgttggcgaaaatctatctctccgccctcttcccggaagtgccgccgtgggtgtgggtggtaaccttcgtcgccattttaaccgccgcgaatctgaagagcgtcaacctggtcgctaacttcaataccctgtttgtactggtgcaaatctccatcatggtggtgtttatcttcctggtggttcagggactgcataaaggagaaggcgttggcaccgtctggtcacttcagccgtttatcagcgagaacgcgcacctgatcccgattattaccggtgcgacgattgtctgtttctcgttcctcggtttcgatgcggtgaccacgctttcggaagagacgccggacgccgcacgcgtgatcccgaaagccatcttcctgacggcggtatacggcggcgttatctttatcgcggcgtcgttctttatgcagctgttctttcccgatatcagccgctttaaagacccggacgccgcactgcctgaaattgcgctgtacgtcggcggcaagctctttcagtcgattttcctctgcaccacgtttgtgaacacattagcgtctggcctggcttcacatgccagcgtgtcgcgtctgctgtatgtgatggggcgtgacaatgtgtttccggagcgcgtgtttggctatgtgcacccaaaatggcggactccggcactcaacgtcattatggtcgggattgtcgcgctgtcggcgctgttctttgatttagtcaccgcgacagcactgattaacttcggtgctctggtggcgtttaccttcgtgaatctgtcggtgtttaatcatttctggcggcgtaaaggaatgaataaaagctggaaggatcacttccactatttgctgatgccgctggttggcgcgctgacggtgggtgtgctgtgggttaacctagagtcaacgtcactgacactcggtctggtatgggcttcgttaggcggcgcatatttgtggtatctgatccgccgctatcgcaaagtgccgctgtacgaaggtgacagaacgccggtgagcgaaacgtaa

SEQ ID NO: 482489 - DNA, 1362 bp, Shigella sonnei
atggaaaccaatatcgttgaagtagagaactttgttcagcagtcagaagagaggcggggtagcgcctttacgcaggaagtgaaacgctacctggagcgctacccgaatacgcaatatgttgatgttttacttactgatttgaatggttgcttccgtggaaaacgtatccctgtttcaagcctgaagaagctcgagaaagggtgttatttcccggcctcggtatttgcaatggatattctgggcaacgtagtagaagaagcaggtctgggtcaggaaatgggcgagccggatcgtacctgtgttcctgttctcggttccttaactccttctgccgccgatccagagtttatcggtcagatgctcctgaccatggtcgatgaagatggcgctccctttgacgttgagccgcggaacgttcttaaccgcctgtggcagcagctgcgccagcgcgacgctgaagggaatctgcaaccgccctgcgcgcctggcaccgatgaccgcaatacacaaagccaggtttactccgttgataacctcaaccacttcgccgacgtgctcaatgatattgatgaactggcgcagttgcagctgattccggcagatggcgcggtcgctgaggcctcgccgggtcagtttgaaatcaacctttaccatactgataacgtgctggaagcctgcgatgatgcgctggcactaaaacgcctggtgcgtctgatggcaggaaagcataagatgcacgccacttttatggcgaagccgtatgaagagcacgcgggcagcgggatgcatatccatatcagtatgcaaaataatcgtggcgagaatgtgctttctgacacagaaggcgaagattcgccgctgctgaaaaagatgctcgccgggatgattgacctgatgccgtcgtcgatggcgttgctggcaccaaacgtgaactcgtatcgccgcttccagccgggaatgtatgtgccgacgcaggcgtcgtggggccataacaaccgcaccgtcgccctgcgtattccgtgcggcgaccgtcataatcaccgcgtggaatatcgcgtggcgggtgccgatgccaacccatatctggtgatggcagcgatttttgccggtattttgcatggccttgataacgagctgccgttgcaggaagaagtcgaaggcaacgggctggaacaggaaggcttacccttcccgattcgccagagcgatgccctgggtgagtttatcgagaatgatcacctgcgccgctatttaggcaaacggttttgccatgtgtatcacgcctgtaaaaatgatgagctgttgcagtttgagcgcctcatcacagaaacagaaattgagtggatgttgaaaaacgcgtaa

SEQ ID NO: 482490 - DNA, 765 bp, Shigella sonnei
atggaaaatataatgaacaatccggttatcggtgtcgtaatgtgcaggaacaggcttaagggtcatgcgacccagactctgcaagaaaagtacctgaatgccatcatccacgcaggcggcttgccaattgcgctaccacatgcgctggcggaaccgtcgttacttgaacaacttttgccgaaactcgatggcatttatcttcctggtagtcccagcaatgtgcagccgcacctatatggtgaaaacggcgatgagcctgacgccgatcccgggcgtgatcttctgagcatggcgataattaatgccgcactcgaaaggcgcatccccattttcgccatctgccggggtttacaagaactggtggtggcaaccggtggttcgttgcatcgcaagctgtgcgaacagcctgaattgctggaacatcgggaagatcccgaactgccggtggaacagcaatatgcaccgtcgcatgaagttcaggttgaagaggggggattactgtctgcgttgttacctgaatgtagcaacttttgggtaaactctctacatggacaaggggcgaaggtcgttagcccacggttgcgtgttgaagctcgctcgccggatggcttagttgaggcggttagcgtcatcaatcatccttttgcgctgggcgtacagtggcacccggaatggaacagtagcgagtacgcgctttcgcgtatattgttcgagggctttatcaccgcttgtcagcaccatatcgctgaaaaacagcgactctga

SEQ ID NO: 482491 - DNA, 558 bp, Shigella sonnei; identical to SEQ ID NO: 470887

SEQ ID NO: 482492 - DNA, 135 bp, Shigella sonnei
atgaattttcatcatctggcttactggcaggataaagcgttaagtctcgccattgaaaaccgcttatttattaacggtgaatatactgctgcggcggaaaatgaaacctttgaaaccgttgatccggtcacctag

SEQ ID NO: 482493 - DNA, 1305 bp, Shigella sonnei
gtgagcgcagcacgcggcgtatttgaacgcggcgactggtcactctcttctccggctaaacgtaaagcggtactgaataaactcgccgatttaatggaagcccacgccgaagagctggcactgctggaaactctcgacaccggcaaaccgattcgtcacagtctgcgtgatgatattcccggcgcggcgcgcgccattcgctggtacgccgaagcgatcgacaaagtgtatggcgaagtggcgaccaccagtagccatgagctggcgatgatcgtgcgtgaaccggtcggcgtgattgccgccatcgtgccgtggaacttcccgctgctgctgacttgctggaaactcggcccggcgctggcggcgggaaacagcgtgattctaaaaccgtctgaaaaatcaccactcagtgcgattcgtctcgccgggctggcaaaagaagaagcggggctgccggatggcgtgctgaacgtagtgagcggttatggtcatgaagccgggcaggcgctttcgcgtcataacgatatcgatgccatcgcctttaccggctccacgcgtacgggtaaacaactgctgaaagacgcgggtgatagcaacatgaaacgcgtctggctggaagcgggcggcaaaagcgccaacatcgttttcgccgattgtccggatctgcaaaaagcggcaagcgccaccgccgcaggcatcttctacaaccagggccaggtgtgcatcgccggaacgcgtttgttactggaagagagcatcgccgatgaattcttagccctgttaaaacagcaggcgcaaaactggcagccgggccatccacttgataccgtaaccaccatgggcaccttaatcgattgcgcccacgccgactcggtccatagctttattcgtgaaggcgaaagcaaagggcaactgctgctggatggtcgtaacgctgaactggctgccgccatcggcccgaccatctttgtggatgttgacccgaatgcgtccttaagccgcgaagagattttcggtccggtgctggtggtcacgcgtttcacatcagaagaccaggcgctacagcttgccaacgacagccagtacggccttggcgcggcggtatggacgcgcgacctctcccgcgcgcaccgtatgagccgccgcctgaaagccggttccgtcttcgtcaataactacaacgacggcgatatgaccgtgccgtttggcggctataagcagagcggcaacggtcgcgacaaatccctgcatgcccttgaaaaattcactgaactgaaaaccatctggataagcctggaggcctga

SEQ ID NO: 482494 - DNA, 1281 bp, Shigella sonnei
atgaccgaacataccagcagttactacgccgccagtgcgaataaatatgcaccattcgacacactgaatgagtcaatcacctgcgacgtttgcgtggttggcggcggctataccgggctctcctccgcgctgcatctggcggaagcgggctttgacgtagtggttctcgaagcctcacgcatcggctttggcgcaagcgggcgcaatggcgggcagcttgtgaactcctacagccgcgacatcgacgtgatcgaaaaaagctacggcatggacaccgcccgtatgctcggcagcatgatgttcgagggtggcgagatcatccgcgaacgtatcaaacgctatcagattgactgcgactaccgccccggcggcctgtttgtggcgatgaatgataaacagctcgccacactcgaagagcagaaagagaactgggaacgctacggcaataaacagctggagctgctggacgctaacgccattcgccgcgaggtcgccagcgatcgctacactggcgcactgttggatcacagcggtgggcatattcacccgctaaacctcgccattggtgaagccgatgccatccgcctgaacggcgggcgcgtgtatgagctttctgccgtgacgcagatccagcacaccacgccagcggtggtgcgcactgccaaaggtcaggtgacggcgaagtatgtgattgtcgccgggaatgcgtatctgggcgataaagtagagccggaactggcgaaacgcagcatgccgtgcggcacgcaggtgatcaccactgaacggctgtcggaagatttagcccgttcgctgatcccgaaaaactactgtgtggaagactgtaattatctgcttgattactaccgtcttaccgccgacaaccgtttgctgtacggcggcggcgtggtctacggcgcgcgcgacccggatgacgttgagcgtcttgttgtgccgaaactgctgaaaaccttcccgcaactgaagggcgtcaaaatcgactaccgctggacgggcaacttcctgctgaccctgtcgcgcatgccgcagtttggtcgccttgataccaacatctattacatgcagggttacagcggccacggcgtcacctgtactcatctcgccggacgtttgattgccgaactgctgcgcggcgacgccgaacgtttcgatgccttcgccaatctgccgtattacccgttccccggcgggcgcacgctgcgagtaccgtttaccgcgatgggcgcagcctggtacagcctgcgcgatcgtctgggcgtttaa

SEQ ID NO: 482495 - DNA, 540 bp, Shigella sonnei
atgagcaacaatgaattccatcagcgtcgtctttctgctaccccacgcggggttggcgtgatgtgtaacttcttcgcccagtcggctgaaaacgctactctgaaggatgttgagggcaacgagtacatcgatttcgccgcaggcattgcggtgctgaataccggacatcgccaccctgatctggtcgcggcggtggagcagcaactgcaacagtttacccacaccgcgtatcagattgtgccgtatgaaagctacgtcaccctggcggagaaaatcaacgcccttgccccggtgagcgggcaggccaaaaccgcgttcttcactaccggtgcggaagcggtggaaaacgcggtgaaaattgctcgcgcccataccggacgccctggcgtgattgcgtttagcggtggcttccacggtcgtacatatatgaccatggcgctgaccggaaaagttgcgccgtacaaaatcggcttcggcccgttccctggttcggtgtatcacgtaccttatccgtcagatttacacggcatttcaacatag

SEQ ID NO: 482496 - DNA, 702 bp, Shigella sonnei
ttgtttaaatcagacatcgaagcgaagcaggtcgcggccattattttcgaaccggtgcagggcgagggcggtttcaacgttgcgccaaaagagctggttgccgccattcgccgcctgtgcgacgagcacggtattgtgatgattgccgatgaagtgcaaagcggctttgcgcgtaccggtaaactgtttgccatggatcattacgccgataagccggacttaatgacgatggcgaaaagcctcgcgggcgggatgccgctttcgggcgtggtcggtaacgcgaatattatggacgcgcccgcgccgggcgggttgggtggcacctacgccgggaacccgctggcggtggctgccgcgcacgcggtgctcaatattatcaacaaagaatcactctgcgaacgcgcgaatcaactgggccagcgtctcaaaaacacgttgattgatgccaaagaaagcgttccggccattgctgcggtacgcggcctggggtcgatgattgcggcagagtttaacgatccgcaaacgggcgagccgtcagcggcgattgcacagaaaatccagcaacgcgcgctggcgcaggggctgctcctgctgacctgtggcgcatacggcaacgtgattcgcttcctgtatccgctgaccatcccggatgcgcaattcgatgcggcaatgaaaattttgcaggatgcgctgagcgattaa

SEQ ID NO: 482497 - DNA, 978 bp, Shigella sonnei
atggccgaatacaaagataatttacttggtgaggcgaacagctttctcgaagtgctggaacaggtttcgcatctcgcaccgctggacaaaccggtgctcatcatcggcgaacgcggcaccggtaaagagctgattgccagccgcctgcattatctctcctcccgttggcaagggccgtttatttcccttaactgcgcggcgttaaatgaaaatctgctggattccgaactgtttggtcacgaagcgggggcgtttaccggtgcgcaaaaacgtcatccagggagatttgaacgtgccgacggcggtacgctatttcttgatgaactcgctacggcaccgatgatggtgcaggagaaattattgcgcgtgattgagtacggtgaactggagcgcgttggcggcagccagccattgcaggtgaatgtgcggttggtatgcgcgacgaatgccgatctcccggcgatggtcaatgaaggcacttttcgcgctgacctgctcgaccgactggcttttgatgttgtacaactgccaccactgcgcgagcgcgaaagcgacataatgttgatggcagaacactttgccatccagatgtgtcgggaaatcaagctgcctctgttcccggggtttacggagcgcgccagagaaacattgctgaattatcgttggccgggaaatattcgtgaattgaaaaacgcggtggaacgttcagtgtatcgccacggcaccagcgattatccgcttgatgacatcattattgatccctttaaacggcgtccgcctgaagacgctatcgccgtttcagaaaccacctcgcttccgacgctgccgctggatttacgtgagtttcaaatgcagcaggaaaaagagttgctgcaactcagtttgcaaaaggggaaatataaccagaagcgcgcagctgaattgctggggttaacctaccatcagttccgcgcgttgttgaaaaaacaccagatttag

SEQ ID NO: 482498 - DNA, 669 bp, Shigella sonnei
atgggtattttttctcgctttgccgacatcgtgaatgccaacatcaacgctctgttagagaaagcggaagatccacagaaactggtgcgtctgatgatccaggagatggaagatacactggttgaagtacgttctacttcggcgcgtgcgttggcagaaaagaaacagctgactcgccgtattgaacaagcgtcggcgcgtgaagttgaatggcaggaaaaagccgaactggcgctgctgaaagagagagaggatctggcacgtgcagcgttaattgaaaaacagaaactgaccgatctgattaagtccctggaacatgaagtgacgctggtggacgatacgctggcacgcatgaagaaagagattggcgagctggaaaacaaattgagcgaaacacgcgctcgccagcaggcattgatgttacgtcatcaggcggcaaactcgtcgcgcgatgtgcgtcgtcagctggacagtggcaaactggatgaagcaatggctcgtttcgaatctttcgaacgtcgaattgaccagatggaagcggaagcagaaagccacagcttcggtaaacaaaaatcgctggacgatcagtttgccgaactgaaagccgatgatgcaatcagcgaacaactggcacaattaaaagccaaaatgaagcaagacaatcaataa

SEQ ID NO: 482499 - DNA, 225 bp, Shigella sonnei
atgagcgcgctatttctggctattccgttaaccatttttgtgctgtttgttttaccgatctggttatggctgcattacagcaatcgttctggtcgcgatgaattgtcgcaaagtgagcagcagcgattagcgcaactggctgatgaagcaaaacggatgcgcgaacgtattcaggcgctggaatctattcttgatgcagaacatccgaactggagggatcgctaa

SEQ ID NO: 482500 - DNA, 360 bp, Shigella sonnei
atggcgggcattaatctcaataaaaaattatggcgtattccacagcagggcatggtccgcggcgtctgcgccgggattgccaactattttgatgtaccggtaaaactggtgcgtatcctggtggtgctgtcgattttcttcggtctggcgctgtttaccctggttgcttacatcattttgtcatttgcgcttgatccaatgccggacaacatggcctttggtgagcagctaccttccagcagcgaattgctggatgaagtcgaccgtgaactggcggcaagtgaaacgcgtttacgcgagatggaacgttatgtcacttccgatactttcacgttacgtagccgtttccgtcaactgtga

SEQ ID NO: 482501 - DNA, 222 bp, Shigella sonnei
atgaatactcgctggcaacaggccgggcaaaaggtaaagcctggtttcaaattagcaggcaagctggtacttcttaccgcactgcgctatggcccggcgggtgtagcgggctgggcgataaaatcagttgctcgccgaccgctgaaaatgttgctggctgtggcgctggaaccgctgttaagtcgggctgctaataaactggcacagcgttataaaaggtga

SEQ ID NO: 482502 - DNA, 315 bp, Shigella sonnei
atgtttaaaaaaggcttacttgctctggcactggtgttttcactgcccgttttcgccgctgaacactggatcgatgttcgtgttccagagcagtatcagcaagagcacgttcagggggccatcaatattcccctgaaggaagtgaaagagcgcattgccaccgccgttccggataaaaacgacaccgtgaaagtgtattgcaatgccggacgccagtcagggcaagcaaaagagatccttagcgagatgggatatacccacgttgagaacgccggtggcctgaaagacatcgcaatgccgaaggtcaaaggttaa

SEQ ID NO: 482503 - DNA, 1053 bp, Shigella sonnei
atgggaccgctaccacaaaaaggcaacatgaaacagaaaattacggattacctggacgaaatctacggtggaacatttaccgcaactcatttacagaaacttgtaacgcgtcttgagagtgcgaaacgattaattacacagcgacgtaaaaaacactgggatgaaagtgatgtcgtgttaattacctatgccgatcaatttcacagcaatgatttaaaaccattacccacatttaatcagttttaccatcaatggctgcaaagcattttttcacatgttcatttattacctttttatccatgttcatctgatgatgggttttcggtaattgattatcatcaggtcgccagtgaagcgggggagtggcaggatattcagcaactcggtgaatgcagtcatttaatgtttgattttgtctgcaaccatatgtcggcaaaaagtgaatggtttaaaaactatttacaacagcagccaggttttgaagatttttttattgcggttgatccgcaaaccgatctcagcgccgtcactcgcccgcgtgcgttaccgttattaacgccattccagatgcgcgatcattcaacgcgccatttatggaccacctttagtgacgatcaaattgacctgaattaccgtagccctgaagtgttgctggcgatggtggatgttttactctgttaccttgcgaaaggtgctgagtatgtccgcctggatgccgttggctttatgtggaaagagccgggaacaagctgcatccatctggaaaaaacacatctgattatcaaactgttacggtcgattattgataacgttgcgccaggtacagtgatcattaccgagaccaatgttccgcataaagacaacattgcttactttggcgcaggcgatgacgaagcacatatggtgtaccagttctcgctgccgccactggtgctgcatgcggtgcaaaaacagaacgttgaggcgctttgtgcgtgggcgcaaaacctgacactaccttccagcaacaccacctggtttaacttcctcgcctctcacatatggatgcgttaa

SEQ ID NO: 482504 - DNA, 498 bp, Shigella sonnei
atggatgcgttaagccgccgtgagagtagcgatgaagaacgttgcgccaggtttattctcgcccatgcgattttgttaagtttccccggtgtgccagcgatatatattcaaagtattcttggctcgcgtaatgattacgcaggtgtcgaaaaactcggatataaccgtgcgattaaccgtaaaaaatatcacagtaaagagataacccgagaactgaacgatgaagctacattaaggcatgcggtatatcatgagttgtcgcgtttaattacacttcgtcgcagccataacgagtttcatccggataataattttaccatcgatacgattaattcatccgtaatgcgtattcaaagaagtaacgctgatggtgattgtctgactggattgtttaatgtcagtaaaaatattcagcatgtaaatattactaatctgcatggtcgggatctgattagtgaagttgatctattgggtaatgaaataacgctgcgcccctaa

SEQ ID NO: 482505 - DNA, 1311 bp, Shigella sonnei
atgattaaatcaaaaatcgtgctgttatcagcactggtttcctgcgccctgatttcaggctgtaaagaagaaaataaaacccatgtatccatcgaatttatgcattcttcggtggagcaggagcgtcaggcagttatcagcaaattgattgcccgttttgaaaaagaaaacccaggtatcaccgttaaacaagtgcccgtggaagaggacgcttataacaccaaagtcatcaccctttcacgtagcggctcgctgccggaagtgatcgaaaccagccatgactacgccaaagttatggataaagagcagcttatcgatcgcaagacggttgccacggtcatcagcaacgttggtgaaggcgcgttttacgatggcgtactgcgtattgtgcgcaccgaagatgggagtgcctggaccggtgttcccgtcagcgcctggattggcggcatctggtatcgcaaagatgtgctggcaaaagcggggctggaggagccgaaaaactggcaacagctactggacgttgcacagaaactgaatgacccggcgaataaaaaatacggcattgcgctgcctacagcagaaagcgtgttgacggaacaatccttctcccagtttgcgttatccaaccaggctaatgtctttaacgccgaaggcaaaatcacccttgatacaccagagatgatgcaggcactgacctattaccgcgaccttgctgccaacactatgccgggttctaacgacatgccgggttctaacgacatcatggaagtgaaagacgcctttatgaacggcaccgcgccgatggcgatttactccacctatatccttccggctgtaattaaagaaggcgacccgaaaaacgtcggtttcgtggtgccaaccgagaaaaactctgcggtctacggcatgttgacctcgctgaccattaccgccgggcaaaaggccgaagagacggaagcagcagaaaaatttgtcacctttatggagcaggcagacaacattgccgactgggtgatgatgtcgccaggtgctgcgctgccggtgaataaagcggttgtcactaccgccacctggaaagacaacgacgttattaaggcgctgggtgaactaccgaatcagctaatcggtgaactgccaaatattcaggtctttggcgcagtaggggataaaaactttacccgcatgggtgatgtgacgggttctggcgtggtgagctccatggtgcataacgtcaccgtgggtaaagccgatctccctggcacgctgcaagcgagccagaaaaagctggatgaactgatcgaacagcactaa

SEQ ID NO: 482506 - DNA, 882 bp, Shigella sonnei
atgaacaggcttttttcaggtcgttccgatatgccctttgcgctgctgcttctcgcgcccagcttattactgctgggtggtctggtggcctggccaatggtgtcgaatatcgaaatcagttttttacgtctgccgctcaatcccaacatcgagtcaacctttgttggggtgagtaactatgtgcgtatcctctccgatcccggcttctggcactcgctgtggatgacggtctggtataccgcgctggtggtggcgggcagcaccgtgctcgggctggcagtggcgatgtttttcaaccgcgagttccgcctgcgcaaaaccgcgcgttcgctggtgatcctctcctacgtaacgccgtccatttcgctggtgtttgcctggaaatacatgttcaacaacggctacggcattgtgaactacctcggcgtcgatcttctgcatctctatgagcaggcaccgctgtggttcgataatccgggcagtagctttgtgctggtggtgctgttcgccatctggcgctacttcccgtatgcctttatctcgtttctggcgattttgcagaccatcgacaaatcgctgtacgaagcggcagagatggatggcgctaatgcctggcagcggtttcgcatcgtcacgctgcccgcaattatgccggtcctggcgacggtggtgaccctgcgcactatctggatgttctacatgtttgctgatgtttatctgctgaccaccaaggtcgatattctcggcgtctatctctacaaaaccgcctttgcctttaatgacttagggaaagcggcggcgatttcggtggtgctcttcatcattattttcgctgtcattctgctgaccaggaaacgggtgaacctcaatggcaacaaataa

SEQ ID NO: 482507 - DNA, 186 bp, Shigella sonnei
atggcaacaaataaacgcacactcagtcgcatcggtttttactgcgggctggcgctgtttctcatcatcacgctgtttccattttttgtgatgctgatgacctcgttcaagggcgcgaaagaggcgatctcactgcatcctacgctgctgccgcagcagtggacgctggagcattacgtcgactga

SEQ ID NO: 482508 - DNA, 417 bp, Shigella sonnei
atggcgctgatcatcaccatggtgacgcaaactctgcccaccgccgtgtttatgctgaaaagctacttcgacaccatccccgatgagatcgaagaagcggcgatgatggatggcctcaaccgtctgcaaattatcttccgcatcaccgtgccgttggcgatgtccgggctgatatccgtgttcgtctactgctttatggtggcgtggaacgactatctgtttgcgtcgattttcctctccagcgccggcaatttcaccttaccggtgggcctgaacgcgctgttcagtacgccagattacatctggggacggatgatggcggcctcactggtgaccgcattgccggtggtgattatgtatgcgctttcggaacgttttattaagagtggtttgaccgccggtggcgtgaagggctaa

SEQ ID NO: 482509 - DNA, 1053 bp, Shigella sonnei
atgaaaaagttagtagccacagcaccgcgtgttgctgcgctggttgagtatgaagatcgggcgattttagctaatgaagtgaaggtccgcgtgcgtttcggcgcaccgaaacacggaacggaagtggtcgacttccgcgccgccagcccgtttatcgatgaagactttaacggcgaatggcagatgttcactccgcgtccggcagatgcgccgcgcggcattgagtttggcaaattccagcttggaaacatggtggttggcgacattatcgagtgcggcagcgacgttaccgactacgcggtgggcgacagcgtatgcggctacggcccgctctccgagacggtcatcattaacgcggtgaataactacaagctgcgcaaaatgccggaaggcagctcgtggaaaaacgccgtttgttacgacccggcgcagtttgccatgagcggcgtgcgcgatgccaacgtgcgcgtgggtgattttgttgtggtggtagggcttggcgcgattggtcaaattgccattcaactggctaaacgtgctggcgcgtcggtcgtgattggcgtcgatcctatcgctcatcgctgtgatattgcccgtcgccacggcgcggatttctgccttaaccccattggtactgacgtaggcaaagagatcaaaacgctgaccggcaagcagggtgccgatgtgattatcgaaaccagcggctatgccgacgcgctgcaatcggcgttccgcggtctggcctacggtggcaccatctcctatgttgcgtttgccaaaccatttgctgaaggttttaacctcggacgcgaagcgcatttcaataacgccaaaattgttttctcccgcgcgtgcagcgaaccgaacccggattatccgcgctggagccgtaagcgtattgaagaaacctgctgggaactgctgatgaacggttatctcaattgcgaagatttaatcgacccggtagtgacctttgccaatagcccggaaagctacatgcagtatgtcgatcagcatccggaacagagcatcaaaatgggcgttacgttttaa

SEQ ID NO: 482510 - DNA, 789 bp, Shigella sonnei
atgaaaataggcacacagaatcaggcattctttccggaaaacattctggagaaatttcgttatatcaaagagatgggcttcgatggttttgagattgacggcaaactgctggtcaacaatctcgaagaagtcaaagcagcaatcaaagaaaccggtttaccggtgaccaccgcctgcggtggctatgacggttggattggcgactttatcgaagagcgtcgtcttaatggcttaaagcagatcgaacgcattctcgaagcgctggcagaagtgggggataaaggtatcgtcgttccggcagcgtggggcatgtttaccttccgcttaccgccgatgacctcgccgcgtagcctggacggcgaccgcaaaatggtgagtgattccctgcgcgtactggaacaggtcgccgcgcgtaccggaacagtggtgtatctcgaaccgttaaaccgctatcaggatcatatgatcaacaccctcgccgatgcccgccgttacatcgtcgaaaacgatcttaaacatgtacagattatcggcgatttctatcacatgaatatcgaagaagataacctggcgcaggcgctgcatgacaaccgcgacctgctcggtcatgtgcatattgcggataaccatcgctaccagccgggcagcggcaccctggatttccacgcgctgtttgaacagctgcgcgcggataactatcagggctatgtagtgtacgaagggcgtatccgggcggaagatcctgcccaggcgtaccgtgattcgttggcctggttgcgtacctgctaa

SEQ ID NO: 482511 - DNA, 1056 bp, Shigella sonnei
gtgaaaagtgcaatgacaagctctccgctgcgggtcgcgataataggcgcaggccaggtggcggataaggttcatgcttcgtactactgcacccgcaacgatctggaactggtggctgtctgtgacagccgcctttcccaggcgcaggcgctggcagaaaaatacgggaatgcatccgtgtgggacgatccgcaggccatgctgctggcggtgaaacctgatgtggttagcgtctgctcacctaaccgttttcattacgaacataccctgatggcactggaagcgggctgccatgtgatgtgcgaaaaaccgctcgccatgacgccagaacaggcgcgggaaatgtgcgataccgcgcgcaaactgggcaaggtgctggcctacgactttcaccatcgttttgcgctcgatacgcaacagctgcgtgaacaggtgaccaacggcgttttgggagagatttacgttaccaccgcccgcgccctgcgtcgctgcggcgttcccggctggggtgtctttaccaataaagaactgcagggtggtggcccgctgatcgacatcggcattcatatgctggatgctgcgatgtatgtgctgggctttccggcggtgaaaagcgtgaatgcgcatagctttcaaaagatcggcacgcaaaagagctgtggtcaatttggtgagtgggatccggcaacttacagcgtcgaagattcgctgtttggcaccattgaatttcataacggcggcattctgtggctggaaacgtcatttgcactcaacatccgcgaacagtcgattatgaacgtcagcttttgtggtgataaagctggtgcgacgctgtttccagcacatatctacaccgataacaacggtgaattaatgacgctgatgcaacggaaaatggcagacgacaaccgccatttgcgcagcatggaagcctttatcaatcacgtacagggcaagcccgtgatgatagccgacgccaagcaggggtacatcatccagcaactggtggcggcgttgtatcaatccgcagaaacagggacgcgtgtggaattatga

SEQ ID NO: 482512 - DNA, 2268 bp, Shigella sonnei
atgaccaggccagtaacgttatcagaaccccatttcagccagcataccctgaacaagtatgcatcgctgatggcgcaggggaacggctatcttgggcttcgcgccagccatgaagaagattacacgcgccagacgcgagggatgtatctggcggggctgtatcatcgggcgggaaaaggtgaaatcaacgaactggtgaacctgcctgatgtcgtggggatggagattgccataaatggtgaggttttctcgttatcccgcgaagcctggcagcgtgaacttgactttgccagtggagaattacgccgtagcgttgtctggcgtaccagcaacggcacaggttacaccatcgccagccgtcgctttgtttcggcagaccaactgccgctcattgtgctggaaatcactattacgccactggacgccgacgcgtcagtgctgatttcaacaggcattgacgccacgcagaccaaccacggtcgccagcatctcgacgaaacccaggtgcgggtgtttggtcagcatttgatgcaggggatctacaccacccaggatggacgcagtgatgtggccatcagctgttgctgtaaggtgagcggtgatgtgcagcaatgctataccgccaaagagcgccgtttactgcaacataccagtgcgcagcttcatgcaggcgagacagtgacgttgcaaaaactggtgtggatcgactggcgggatgacaggcaagccgttttagacgagtggggcagcgcgtcgcttcgccagcttgaaatgtgcgcgcagcagagttacgaccaacttcttgcagtatcaacagaaaactggcgtcaatggtggcagaaacgtcgtatcacggtaaatggcggcgaagtgcacgatcagcaagcgttagattatgcgctttatcatctgcgcatcatgacgcctgcccacgacgagcgcagcagcattgcggcaaaaggcttaaccggcgaaggctacaaaggccacgttttctgggatacagaagtatttttgttaccgtttcatctgtttagcgatccgacggttgcccgaagtttactgcgttatcgctggcacaacttgccaggcgcgcaggagaaagcgcgacgcaacggctggcagggcgcgctatttccgtgggaaagcgcgcgcagcggcgaagaagagacgccggaatttgccgccattaacattcgcaccgggctgcggcaaaaagtggcctcggcgcaggcggaacatcatctggtggccgatatcgcctgggcggttattcaatactggcagaccacgggggatgaaagtttcattgcgcatgaaggcatggcgctacttctggaaactgcaaagttctggattagccgcgcggtgagggttaacgaccgtctggaaattcatgatgttattgggcctgacgaatataccgaacatgtcaataataacgccttcaccagctatatggcgtattacaacgtccagcaggcgctgagtattgcccgccagtttggctgtagcgacgacgcgtttattcatcgtgccgaaatgttccttaaagaactgcggctgccagaaattcagcccgacggcgttttgccgcaggatgattcgtttatggctaagccggcgattaatcttgcgaaatacaaagcggcggcggggaagcaaaccattctgctggattattcacgcgcagaagtgaacgagatgcaaatcctcaaacaagctgatgtggtgatgctcaattacatgctgccggagcagttctcagcggcatcgtgtcttgccaatctgcaattttatgaaccgcgcactattcacgactcgtcattaagtaaagcaatccacggcattgttgccgcacgctgtggcctgctgacccaaagttatcagttctggcgcgaggggactgaaatcgatcttggtgctgatccgcatagttgtgatgatggtatccatgctgccgcaactggcgctatctggctgggggcgattcagggttttgccggggtgagcgtgcgtgacggtgaattgcatctcaatccggcgttacctgagcagtggcaacagttgtctttccctctgttctggcagggctgcgaattacaggtcactcttgacgcgcagcgtattgcgattcgaacttctgcccccgtttcactgcgtttgaacggtcagcttatatccgtggctgaagaatctgttttctgtttgggtgattttattttgcccttcaatgggaccgctgccacacatcaggaggatgaatga

SEQ ID NO: 482513 - DNA, 660 bp, Shigella sonnei
atgaaactgcaaggggtaattttcgatctggatggtgtaatcaccgataccgcgcatctgcatttccaggcgtggcagcagattgccgctgaaattggcatcagcattgatgcgcagtttaacgaatccctaaaagggatcagccgcgatgagtctctgcggtgcattctgcaacacgggggcaaagagggcgactttaactcgcaggagagggcgcaactggcgtatcgcaaaaatctgctctatgtccactcattgcgcgagttgacggtcaacgctgttctacccggcattcgctctttgctggcagatctccgcgcacaacagatctcggtagggctggcttctgtctccctcaatgcgccgacgattttagatgcactggagctgcgtgagtttttcaccttctgcgcggatgcttcccaacttaaaaactcgaaaccggatccggaaatctttctcgctgcctgtgccgggctgggcgtgccgccgcaggcatgtatcggcattgaagatgcgcaggcgggcattgacgccattaacgccagcggtatgcgctcggtggggatcggcgcgggcataaccggggcgcaattactattgccttcaacggactccctgacctggtcgcggttatcggccttctggcaaaacgtatag

SEQ ID NO: 482514 - DNA, 747 bp, Shigella sonnei
atggctcagctttcgttacaacatattcaaaaaatctacgataaccaggtgcatgtggtgaaggacttcaacctggaaattgctgataaagagttcatcgtgtttgtcggtccgtcaggctgcggtaagtcgaccaccctgcgcatgattgccgggcttgaggagatcagcggcggcgatctgttgatcgacggcaaacgaatgaatgacgttccagccaaagcacgcaatatagcgatggtgttccagaactacgcgttgtatccgcatatgacggtttacgacaacatggcgtttggcctgaagatgcaaaaaatcgccaaagaggtgattgatgagcgggtgaactgggcggcgcaaattctcggcctgcgtgagtacctgaaacgcaagccgggcgcgctttccggcgggcaacgccagcgtgtggcgctcgggcgggcgattgtgcgcgaagcgggcgtgtttttaatggatgaaccgctctctaaccttgatgccaagctgcgcgtgcaaatgcgcgcagagatcagcaagctgcaccagaagctgaataccaccatgatctacgtgacccacgatcagaccgaagcgatgaccatggcgacgcggattgtgattatgaaggatgggattgttcagcaagttggtgcgccgaaaacggtttataaccaaccagcgaatatgtttgttgccggatttattggatcatcggcgatgggtgatgctgccaacttactgatttag

SEQ ID NO: 482515 - DNA, 1338 bp, Shigella sonnei; identical to SEQ ID NO: 11227

SEQ ID NO: 482516 - DNA, 1023 bp, Shigella sonnei
atgttggatattgataaaagcaccgtggactttctggtcaccgaaaatatggttcaggaagtggaaaaagttctcagccatgacgttccgctggtgcacgccatcgtggaagagatggtgaagcgcgacattgatcgtatttatttcgttgcctgcggctcgccactcaacgcggcgcaaacggcgaaacatctggcggatcgcttttccgatcttcaggtctacgccatttccggctgggagttctgcgataacaccccgtatcgcctcgacgatcgttgcgcggtgattggcgtttctgactacggtaaaacggaagaggtaatcaaagcgctggagctgggccgggcctgcggcgcactcactgcggcgttcaccaaacgcgcggacagcccgattacctcggcggcggaatttagcattgattatcaggccgactgtatctgggaaattcacctgctgctctgctacagcgtggtgctggagatgatcacccgcctcgcgccgaacgcggaaatcggcaagatcaaaaacgatctcaagccgttgccgaatgcgctcggtcatctggtacgcacctgggaagaaaaaggccgccagcttggtgaactggccagccagtggccgatgatttataccgttgctgcgggtccgctgcgtccgctgggttacaaagaaggcattgtaacgctgatggaatttacctggacgcacggctgcgtgattgagagcggagagttccgccatggcccgctggagattgtcgaaccgggcgttccgttcctgttcctgctcggcaatgatgaaagtcgccacaccaccgaacgcgccattaactttgttaaacagcgtactgacaacgtgatcgtcatcgattacgccgaaatttcgcaagggctgcacccgtggctggcaccgttcctgatgttcgtgccaatggagtggctctgctactacctgtctatttacaaagatcacaacccggatgaacgccgctattacggtggtctggtggaatattaa

SEQ ID NO: 482517 - DNA, 711 bp, Shigella sonnei
atgaaaacaggtatgtttacctgcggccaccagcggctgcctattgaacacgcatttcgtgatgcaagcgagctgggttacgacggcatcgaaatttggggcggtcgcccgcacgcgttcgcgccggacttaaaagcgggcggcatcaaacaaatcaaggcgctggcgcagacgtatcagatgccgattatcggctatacgccagaaaccaacggctatccgtataacatgatgctgggcgatgaacatatgcgtcgcgaaagcctcgacatgatcaagctggcgatggatatggcaaaagagatgaacgcgggttatacgctgatttccgcggcccacgcaggctatctcacgccacctaatgttatctggggacggctggcagagaacctaagcgaactgtgtgagtacgcggaaaacatcggcatggatctaatcctcgaaccgttaacgccgtatgaatcgaacgtcgtgtgtaatgctaatgatgtgcttcatgcgctggcgctggtgccttcgccgcgcctgttcagcatggtcgacatttgcgcgccgtatgtccaggcggaaccggtgatgagttatttcgacaaactgggcgataaattatcgtcatctgcatattgtcgacagcgacggggccagcgacacgcattacattcctggagaaggcaaaatgccgctgcgggaactgatgcgcgatattattga

SEQ ID NO: 482518 - DNA, 156 bp, Shigella sonnei
atgccgctgcgggaactgatgcgcgatattattgagcggggctatgagggttactgtacggtggagctggtgacgatgtatatgaacgagcccagactctatgcccgccaggcgctggaacgctttcgcgcgctgctgccggaggatgagagatga

SEQ ID NO: 482519 - DNA, 786 bp, Shigella sonnei
atgaaaaccctggcgacaatcggcgataactgcgtcgatatctacccgcaactgaataaagcgttttctggcggtaatgcggtcaatgtggcggtgtactgcactcgctacggcatacagccgggatgcattaccttggtgggtgacgatgactacggcacaaagctgaagcaggatctcgcccgcatgggcgtcgatatcagccatgtccatacgaaacacggcgttaccgcacaaactcaggtggaactgcacgacaatgatcgcgtttttggcgactacaccgaaggcgtgatggccgactttgccctgagtgaagaggattacgcctggctggcgcagtatgacattgtgcacgcggcaatctggggacatgcggaagacgcattcccacagctgcacgctgcgggcaaacttaccgctttcgacttctccgacaagtgggacagcccgctctggcagacactggtgccgcatctcgattttgcctttgcctccgcaccgcaagaagacgaagcgctgcgtctgaagatgaaagcgattgttgcccgtggcgcaggaacagtgattgtcacgctgggtgaaaacggcagcattgcctgggatggcgcgcagttctggcgtcaggctcctgaaccggtgacggttatcgacaccatgggtgccggagattcgttcattgccggattcctttgcggctggtctgcggggatgacattaccgcaggcgatggcgcagggaacggcgtgcgcggcgaaaaccattcagtatcacggtgcctggtag

SEQ ID NO: 482520 - DNA, 732 bp, Shigella sonnei
atgtcagctacggaccgctactctcatcaactcctctacgctaccgtccgccagcggctgctggatgatatcgcgcagggggtttaccaggccgggcaacagatccctaccgaaaacgagctttgtacgcaatataacgtcagccgcattactattcgcaaagctatcagcgacttagtggcagacggcgtactgatccgctggcagggcaaaggcacctttgtacaaagccagaaagttgaaaacgccctgcttactgtcagtggttttaccgattttggcgtctcacaaggcaaggcgacgaaagagaaagtgatcgaacaggaacgggtcagcgccgcgccgttttgcgaaaagctgaacatccccggaaacagcgaagtgttccatctctgccgggtgatgtatctcgataaagagccgctgtttattgatagttcatggatcccgctgtcgcgttatcctgactttgatgagatttacgtcgaaggaagctccacctatcagttatttcaggagcgttttgacacgcgagtggtcagcgacaaaaagaccatcgatatctttgccgccacccgcccgcaggcaaaatggctgaaatgcgaactgggcgaaccgttgtttcgcatcagcaaaatcgcctttgatcagaatgacaaaccggtgcacgtctccgaactcttctgccgcgccaatcgcatcaccttaacgattgataataaaagacattaa

SEQ ID NO: 482521 - DNA, 1086 bp, Shigella sonnei
atgaagacgtttcctctgcaaagtctgacgattattgaggcgcagcaaaagcagtttgcgctggtggatagcatttgtcgccatttccccggcagcgagtttcttactggcggtgatttaggcttaacgccaggactgaatcaaccgcgcgttacccagcgtgtggaacaggtgctggctgatgcatttcacgcacaggctgcggcgctggtgcagggtgcgggtactggcgcgattcgtgcggcgttggcggctttgctcaaaccggggcagcgtcttctggtacatgatgcgcctgtttacccgacgacacaggtcattattgagcagatggggctgacgcttattactgctgatttcaatgacctgtcggcactgaagcaggtcgtcgacgagcaactaccggatgcggcgctggtgcagcatacgcgccagcagccgcaggacggctacattctggcagatgtgctggcaacattgcgctcggctggcgttcctgcattaaccgatgacaactatgcggtgatgaaagtggcgcgaattggctgcgaatgcggggcaaatgtctcgactttttcctgcttcaagctgtttgggccggagggtgttggcgcggtggtaggcgatgccgatgttattagtcggattcgctccacgctctattccggcggcagccagattcagggcgctcaggcgctggaagtcttgtgtgggctggtgtttgcgccagtgatgcacgcggtgcaggcgggggtatctgaacggttgctggctttgcttaacggtggtgcggtgccggaagtgaaaagcgcggtgattgctaatgcgcagtcgaaggtgttgattgtcgagtttcatcagccgattgccgccagagtgctggaagaggcgcaaaagcgcggtgccttgccttacccggtgggtgcagagtcgaaatatgaaatcccgccgctcttttatcgcctttccggaacgtttcgccaggcgaatccacaatcagaacattgtgcgattcgcattaacccgaatcgcaacggtgaagagacggtgctgcggattttgcgtgagagtattgccagtatttaa

SEQ ID NO: 482522 - DNA, 1305 bp, Shigella sonnei
atggatctgtatattcagattatcgtggtggcgtgcctgacgggtatgacatcgcttctggcgcatcgctcggcggctgtttttcatgacggtatccgcccgatcctgccgcaactgattgaaggctatatgaaccgtcgcgaggcggggagtatcgcttttggtctgagcattggttttgtggcctcggtggggatctcttttaccctgaaaaccgggctgctcaacgcatggttactctttcttcctaccgatatcctcggcgtactggcgataaacagcctgatggcgtttggtcttggcgctatctggggcgtgttgatccttacttgcctgttgccagtaaaccagctgctgaccgcgctgccggtggatgtattaggtagcctcggggaattaagctcgccggtggtttctgcttttgcactgttcccgctggtggcgattttctaccagtttggctggaagcaaagtctggtcgccgccgtggttgttctgatgacccgtgtggtagtcgtgcgctatttcccacatcttaaccctgaatccatcgaaatctttattggcatggtgatgctgctggggatcgcgataactcacgacctgcgtcatcgtgatgaaaatgatattgatgccagcgggctttcggtgtttgaagaacgcacgtcgcggattatcaaaaacttaccctatatcgccatcgtgggagcattgattgccgccgttgccagcatgaagattttcgccggcagtgaagtgtcgatcttcactctggagaaagcgtactccgcaggcgtaacgccggaacaatcgcaaacgctgatcaaccaagcggcactggcagaatttatgcgcgggctgggttttgtaccgttgattgccaccaccgccttagcaacgggtgtgtatgcagttgcgggctttacctttgtttatgcggtgggctatctctcgccgaatccgatagttgcagcggtattaggcgcagtggttatttcggcggaagtcttgctgcttcgttcgatcggcaaatggctgggacgctacccgtcggtgcgtaatgcgtcggataacatccgtaacgccatgaatatgctgatggaagtggcgctgctggtcggttcgattttcgcagcaattaagatggcgggttataccggattctctatcgcggttgccatttacttcctcaacgaatccctgggccgtccggtacagaaaatggcggcaccggtcgtggcagtaatgatcaccggtattctgctgaatgttctttactggcttggcctgttcgttccggcttaa

SEQ ID NO: 482523 - DNA, 354 bp, Shigella sonnei
atgaaaaagattggcgttgcaggcttacagcgtgagcagattaaaaaaaccattgaagcgacggctactggcagttttgaagttttcattcacaacgacatggaagcggcaatgaaagtgaaatccgggcaactggattactacatcggtgcgtgtaataccggtgcgggcgcggcattgtcgattgccatcgcggtgattggctataacaaaagttgcaccattgccaaaccaggcattaaagcgaaagacgagcatatcgccaaaatgatcgctgaaggaaaagtggcgtttggcctttccgttgagcacgtcgaacacgcgattccgatgctgattaaccatctgaaataa

SEQ ID NO: 482524 - DNA, 879 bp, Shigella sonnei
atgagttttgatccgacgggttacaccctggcccatgagcatctgcatattgatctctccggctttaaaaacaacgtggactgccgccttgatcagtatgcgttcatttgccaggagatgaacgacctgatgacccggggtgtacgtaatgtgattgagatgaccaaccgttacatggggcgcaatgcgcaatttatgctcggtgtaatgcgcgaaaccgggatcaacgtggtggcctgtactggttattaccaggatgcgtttttcccggaacatgtggtgacccgcagcgtgcaggaactggcgcaggagatggtcgatgaaattgaacagggtatcgatggcacggagctgaaagccgggatcatcgcggagatcggctccagcgaaggaaagattacgccgctggaagagaaggtatttattgccgctgcgctggcgcataaccagaccggacgcccgatctccacgcatacgtcgttcagcaccatggggctggaacaactggctctgttgcaagcccacggagttgatctttcgcgcgtcaccgttggtcactgcgatctgaaagacaacctcgacaacattttgaagatgatcgatctcggcgcgtacgtgcagttcgacaccattggtaagaacagttactacccggacgaaaagcgcattgcgatgctccacgcgctacgtgaccgtgggttgctgaaccgcgtcatgctgtcgatggatattacgcgccgctcccatttaaaagccaatggtggttatggctatgactatttattgaccacctttattccgcaattgcgccagtcaggattcagtcaggccgatgtggatgtgatgttacgtgaaactccctctcaatttttccaataa

SEQ ID NO: 482525 - DNA, 750 bp, Shigella sonnei
gtgatctcttttgacgacgcaatcaaaattggtcgtatcgtgcgtgagcaggtacaggtcggtcgggtcattacatttggtggcctgttaaccgacagtcaacgcattctcgatgccgcagaaagcaaagaagggcgctttattggtatcaatgcgccgcgttctggcgcttatgacaacggcttccaggtcgtgcatatgggctacggtgtcgataaaaaagtgcaggtgccgcaaaaactgtatgaggcgggcgtgccaaccgtgctggtgggtaaggtggcagatatcgtcagcaatccttatggcgtgagctggcaaaacctggtggatagccagcggattatggatatcaccctcgacgaatttaacacccatccgacggcgtttatttgcaccaatatccaggaaaccgacctcgctggtcatgcagaagacgtcgcacgttatgccgaacgtttgcaggtcgttgaccgtaaccttgcccggcttgttgatgcgatgcagccagatgattgcctggtcgtgatggcggatcacggcaacgatccgaccattggtcacagccaccatacccgcgaagtggtgccgctgctggtttatcagcaaggcctggctgctacgcagctcggtgtgcgcaccacgctttctgatgtgggagctaccgtgtgtgaatttttccgtgcgccaccgccacaaaatggtcgctcttttctttcctccctccggtttgcaggagacaccctatga

SEQ ID NO: 482526 - DNA, 390 bp, Shigella sonnei
atggcgcgatttgtggtgttagtgattgatagctttggcgtaggggcaatgaaagatgtcacgctggtgcgtccgcaagatgcgggagcgaatacatgtggtcacatcctgagccagttgccgcatttgcagctaccaacgctggagaagctggggctaatcaacgcattgggttatgcgccaggcgatatgcagccgtcagattccgcaacctggggcgtggcagagctgcaacatgaaggtggcgatacctttatggggcatcaggaaattttaggcacgcgcccgttaccgccgctgcggatgccttttcgcgatgtgattgaccgtgttgagcaggcattagtatccgccggttggcaggtggagcgccgtggcgatgaactgtaa

SEQ ID NO: 482527 - DNA, 417 bp, Shigella sonnei
gtgactcatgccgaacccggtcatgcgctgacgggcactattccggcaaaccagcagggcgatcagtctgaacgtatcgcgatgctctggttgagtgaaatctcccatcatttccgtggcgacagctactgctacggcggcggttactaccgtcgtggtcatgcgcaacatgcgttggtgtttacgccagaaaatcaaaagattactgaaaccaatctcaaaactgtggatgacagcagtatcgactacaccctgtcgctggcaggcgagtttccggtaagcagtgcagtggtgctctgtttccgcacgcagatttttgtcacccgtagcgatgtggtgctggtgtccggtattcaccgtggcgaaccgaaaatcgttggtcgttatgacagtcttggaaactctctgggggcgtaa

SEQ ID NO: 482528 - DNA, 741 bp, Shigella sonnei
atgtttgtagaagcattgaaacgccagaacccggcgctgatttccgccgcactaagtttgtggcagcagggcaagatcgccccggacagctgggtgatcgacgtggatcaggtactggaaaacggtaagcgactgattgagacggcgcggctttacggcattgaactgtatctgatgaccaagcagtttggccgtaacccatggctggcggaaaaattgctggcattaggttacagcggcattgtggcggtggattacaaagaggcgcgagtcatgcgccgcgctggtttgtcggtggcacatcaggggcatctggtacaaatcccttgtcatcaggttgctgacgccgttgaacagggcaccgacgtcatcaccgtgtttactctcgacaaagcgcgggaagtttctgcggcagcggtgaaggccggacgtgtgcagtttgtgctgctcaaagtttatagcgacgatgattttctttatccggggcaggagagcggttttgtacagcattcgctgcacgaggtggttgctgaaattaagaaactgccggggctgcatttagccggacttacccatttcccttgcctgctttgggatgaggctgccggaaaagttttgccgacaccgaatcttcacacgctgatacaggcacgggatcaactggcgaaatctggtattgcacttgagcaactgaacgcgccttcagcgaccagctgcacttcgctgccattactggcgtaa

SEQ ID NO: 482529 - DNA, 363 bp, Shigella sonnei
atggaaaccagactcaacctgctttgcgaggcaggcgttattgataaggacatctgcaaaggcatgatgcaggtcgtcaacgtactggaaacagagtgccatctgccggtgcgcagtgagcaaggaacgatggcgatgacacatatggcgagtgcactgatgcgcagtcgccgtggtgaagaaatagagccgctggataacgaattgctggcagagctggcgcaatccagccactggcaagccgttgtgcaattgcatcaggtgttgttgaaggaattcgcactggaagttaacccgtgtgaagaaggctatttgctggccaacctttatggattatggatggctgctaacgaagaggtttga

SEQ ID NO: 482530 - DNA, 906 bp, Shigella sonnei
atgcgtcgaacgtttatcaaaaaagaaggcgtcgtcatcacgacgctggcccgttatttgttgggtgaaaaatgcggtaatcgactgaaaaccatagatgagctggcaactgaatgccgttcatcggttggcctgacgcaggccgcgttgaaaacgttggaatcaagcggagcgatacggattgaacgccgtgggcgcaatggcagttatctggtcgagatggataacaaagcattgctgagtcatgtggatatcaacaacgtggtatgtgcgatgcctttgccctatacccgcttgtacgaaggtttagcgagcgggctgaaagctcagtttgatggcattcctttttactatgcgcatatgcgcggcgcggatattcgcgtggagtgtttacttaacggcgtgtatgacatggcggtggtttcccgactggcggcggaaagttatctcacgcaaaaagggttatgcctcgcgctggagttggggccgcacacctacgttggcgagcaccagttgatttgccgtaaaggcgagtccgcaaacgtgaagcgcgtggggctggataaccgttcggcggatcagaaaatcatgaccgatgtcttttttggcgatagtgatgtggaacgtgtcgatctctcttatcacgagagtttacaacgcattgttaaaggcgatgtcgatgcggttatctggaacgtggtggcggaaaacgaactgaccatgctgggattagaggcgacgccgctcacagacgatccgcgatttttacaggccaccgaagccgtggtcctgacgcgagtcgatgattacccaatgcaacaactgctgcgtgccgttgtagataaacacgccctgctcgcccatcaacaacgggtagtgagtggggaacaggaaccgagttattaa

SEQ ID NO: 482531 - DNA, 1005 bp, Shigella sonnei
atgactaagcccatcgtttttagtggcgcacagccctcaggtgaattgaccattggtaactacatgggtgcgctgcgtcagtgggtaaacatgcaggatgactaccattgcatttactgtatcgttgaccaacacgcgatcaccgtgcgccaggatgcacagaagctgcgtaaagcgacgctggatacgctggccttgtatctggcttgtggtatcgatcctgagaaaagcaccatttttgttcagtcccacgtaccagaacatgcgcagttaggctgggcactgaactgttatacctacttcggcgaactgagtcgcatgacgcagtttaaagataaatctgcgcgttatgccgagaacatcaacgctggtctgtttgactatccggtgctgatggctgcggacatcctgctgtatcaaactaatctggtaccggtgggtgaagaccagaaacagcacctggaactgagtcgcgatatcgcccagcgtttcaacgcgctgtatggcgagatctttaaggtgccggagccgtttattccgaaatctggcgcgcgcgtaatgtcgctgctggagccgaccaagaagatgtccaagtctgacgataaccgcaataacgttatcggcctgctggaagatccgaaatcggtagtgaagaaaatcaaacgcgcggtcactgactccgacgagccgccggtagttcgctacgatgtgcagaacaaagcgggcgtttccaacctgctggatatcctttctgcggtaacgggccagagcatcccagaactggaaaaacagttcgaaggcaagatgtatggtcatctgaaaggtgaagtggctgatgccgtttccggtatgctgactgaattgcaggaacgctatcaccgtttccgcaacgatgaagccttcctgcaacaggtgatgaaagacggcgcagaaaaagccagtgtacacgcttcccgtacgctgaaagcggtgtacgaagcgattggttttgtggcgaagccgtaa

SEQ ID NO: 482532 - DNA, 759 bp, Shigella sonnei
atgaataagtttgaagatattcgcggcgtcgcttttgatcttgatggtacgctggtcgacagtgctcccggtcttgctgctgcggtagatatggcgctgtatgcgctggagttgcccatcgcaggtgaagaacgcgttattacctggattggtaacggcgcagatgttctgatggagcgcgcattgacctgggcgcgtcaggaacgtgcgactcagcgtaaaacaatgggtaaaccgcccgttgatgacgacattccggcagaagaacaggtacgtattctgcgtaaactgttcgatcgctactatggcgaggttgccgaagaggggacgtttttgttcccgcacgttgccgatacgttgggcgcgttgcaggctaaaggcctgccgctaggcctggtcaccaacaaaccgacgccgttcgtcgcaccgctgctcgaagccttagatattgccaaatactttagcgtggttatcggcggcgatgatgtgcaaaacaaaaaaccgcatccggacccgctgttactggtggctgagcggatgggaattgccccacaacagatgctgtttgtcggcgactcacgcaatgatattcaggcggcaaaagcggcaggttgcccatcagttggcttaacctacggatataactacggcgaggctatcgatctcagccagcctgatgtaatttatcagtctataaatgaccttctgcccgcattagggcttccgcatagcgaaaatcaggaatcgaaaaatgactaa

SEQ ID NO: 482533 - DNA, 678 bp, Shigella sonnei
atgaaacagtatttgattgccccctcaattctgtcggctgattttgcccgcctgggtgaagataccgcaaaagccctggcagctggcgctgatgtcgtgcattttgacgtcatggataaccactatgttcccaatctgacgattgggccaatggtgctgaaatccttgcgtaactatggcattaccgcccctatcgacgtacatctgatggtgaaacccgtcgatcgcattgtgcctgatttcgctgccgctggtgccagcatcattacctttcatccagaagcctccgagcatgttgaccgcacgctgcaactgattaaagaaaatggctgtaaagcgggtctggtatttaacccggcgacacctctgagctatctggattacgtgatggataagctggatgtgatcctgctgatgtccgtcaatcctggtttcggcggtcagtctttcattcctcaaacactggataaactgcgcgaagtacgtcgccgtatcgacgagtctggctttgacattcgtctggaagtggacggtggcgtgaaggtgaacaacattggcgaaatcgctgcggcgggcgcggatatgttcgtcgccggttcggcaatcttcgaccagccagactacaaaaaagtcattgatgaaatgcgcagtgaactggcaaaggtaagtcatgaataa

SEQ ID NO: 482534 - DNA, 837 bp, Shigella sonnei
atgaagaaaaatcgcgcttttttgaagtgggcagggggcaagtatcccctgcttgatgatattaaacggcatttgcccaagggcgaatgtctggttgagccttttgtaggtgccgggtcggtgtttctcaacaccgacttttctcgttatatccttgccgatatcaatagcgacctgatcagtctctataacattgtgaagatgcgtactgatgagtacgtacaggccgcacgcgagctgtttgttcccgaaacaaattgcgccgaggtttactatcagttccgcgaagagttcaacaaaagccaggatccgttccgtcgggcggtactgtttttatatttgaaccgctacggttacaacggcctgtgtcgttacaatctgcgcggtgagtttaacgtgccgtttggccgctacaaaaaaacctatttcccggaagcagagttgtatcacttcgctgaaaaagcgcagaatgcctttttctattgtgagtcttacgccgatagcatggcgcgcgcagatgatgcatccgtcgtctattgcgatccgccttatgcaccgctgtctgcgaccgccaactttacggcgtatcacacaaacagttttacgcttgaacaacaagcgcatctggcggagatcgccgaaggtctggttgagcgccatattccagtgctgatctccaatcacgatacgatgttaacgcgtgagtggtatcagcgcgcaaaattgcatgtcgtcaaagttcgacgcagtataagcagcaacggcggcacacgtaaaaaggtggacgaactgctggctttgtacaaaccaggagtcgtttcacccgcgaaaaaataa

SEQ ID NO: 482535 - DNA, 1287 bp, Shigella sonnei
atggatgaattcaaaccagaagacgagctgaaacccgatcccagcgatcgtcgtactggtcgttctcgtcaatcttctgaacgttctgagcgtactgaacgtggcgaaccgcagatcaattttgatgatattgaacttgatgacactgacgatcgccgtccgactcgtgcgcaaaaagagcgcaatgaggaaccggaaatcgaagaagaaattgacgaatccgaagatgaaaccgtggatgaagagcgcgtagagcgtcgtccgcgtaagcgcaaaaaagcagccagtaaacccgcttctcgtcagtatatgatgatgggcgtcggcattctggttctactgctgttgatcatcggtatcggttctgcgctaaaagccccctcgacctcttccagcgatcaaaccgcgtctggcgagaagagtattgatcttgcaggcaatgcgaccgatcaggcgaatggggtgcagccagcgccgggaaccacgtctgcggaaaatactcagcaggatgtttctctgccaccgatctcttctacgccgactcaagggcaaaccccggcggcaacggatggtcaacaacgtgttgaagtgcagggtgacctgaacaatgcgctgacccagccacaaaatcagcaacagttgaacaatgtggcggtcaattccacattgccgaccgaacccgcgactgtcgcgcctgttcgcaatggcaatgcatcgcgtgacacggcgaaaacgcaaaccgctgaacgtccgtccactacgcgcccagctcgtcagcaggcggtgattgaaccgaaaaaaccgcaagcaaccgtgaaaacggagccgaagccggtagcacagacgccgaagcgtactgaaccagctgcccctgtggcgagcacgaaggcaccgactgcgacttctacgccagcaccaaaagagacggcgactacggctccagtacagacggcatccccggcgcaaaccacggcaacaccagccgctggagggaagaccgcaggtaatgttggttcgttgaaatcggcaccgtccagccattacactctgcagctgagcagttcctctaactacgacaacctgaacggttgggcgaagaaagagaatctgaaaaactacgttgtctatgaaacggcgcgtaatggtcagccgtggtatgtcctggtttctggcgtgtacgcttcgaaagaagaggcgaaaaaagcggtatctacattgccagcagatgttcaggccaaaaacccgtgggcgaaaccgctgcgtcaggtacaggccgatctgaagtaa

SEQ ID NO: 482536 - DNA, 1089 bp, Shigella sonnei
atggagaggattgttgttactctcggggaacgtagttacccaattaccatcgcatctggtttgtttaatgaaccagcttcattcttaccgctgaaatcgggcgagcaggtcatgttggtcaccaacgaaaccctggctcctctgtatctcgataaggtccgcggcgtacttgaacaggcgggtgttaatgtcgatagcgttatcctccctgacggcgagcagtataaaagcctggctgtactcgataccgtctttacggcgttgttacaaaagccgcatggtcgcgatactacgctggtggcgcttggcggcggcgtagtgggcgatctgaccggcttcgcggcggcgagttatcagcgcggtgttcgtttcattcaagtcccgacgacgttactgtcgcaggtcgattcctccgttggcggcaaaactgcggtcaaccatcccctcggtaaaaacatgattggcgcgttctaccagcctgcttcagtggtggtggatctcgactgtctgaaaacgcttcccccgcgtgagttagcgtcggggctggcagaagtcatcaaatacggcattattcttgacggtgcgttttttaactggctggaagagaatctggatgcgttgttgcgtctggacggtccggcaatggcgtactgtattcgccgttgttgtgaactgaaggcagaagttgtcgccgccgacgagcgcgaaaccgggttacgtgctttactgaatctgggacacacctttggtcatgccattgaagctgaaatggggtatggcaattggttacatggtgaagcggtcgctgcgggtatggtgatggcggcgcggacgtcggaacgtctcgggcagtttagttctgccgaaacgcagcgtattataaccctgctcaagcgggctgggttaccggtcaatgggccgcgcgaaatgtccgcgcaggcgtatttaccgcatatgctgcgtgacaagaaagtccttgcgggagagatacgcttaattcttccgttggcaattggtaagagtgaagttcgcagcggcgtttcgcacgagcttgttcttaacgccattgccgattgtcaatcagcgtaa

SEQ ID NO: 482537 - DNA, 522 bp, Shigella sonnei
atggcagagaaacgcaatatctttctggttgggcctatgggtgccggaaaaagcactattgggcgccagttagctcaacaactcaatatggaattttacgattccgatcaagagattgagaaacgaaccggagctgatgtgggctgggttttcgatttagaaggcgaagaaggcttccgcgatcgcgaagaaaaggtcatcaatgagttgaccgagaaacagggtattgtgctggctactggcggtggctctgtgaaatcccgtgaaacgcgtaaccgtctttccgctcgtggcgttgtcgtttatcttgaaacgaccatcgaaaagcaacttgcacgcacgcagcgtgataaaaaacgcccgttgctgcacgttgaaacaccgccacgtgaagttctggaagcgttggccaatgaacgcaatccgctgtatgaagagattgccgacgtgaccattcgtactgatgatcaaagcgctaaagtggttgcaaaccagattattcacatgctggaaagcaactaa

SEQ ID NO: 482538 - DNA, 1209 bp, Shigella sonnei
atgctgatacccggcgtacaggcggcaaagccgcaaaaagtgacgctgatggtggatgacgttccggtagctcaggtgttgcaggcgctggctgaacaggagaagttgaacctggtcgtgtcgccagacgtcagcggtacggtgtcgttacatctaacagatgttccctggaagcaggcactacaaactgtagtgaaaagcgccggactgataacgcggcaggaaggcaacattctctcagtgcattccattgcctggcagaataacaatatcgcccgccaggaggcggagcaggcgcgggcgcaggcaaatctgccgctggaaaatcgcagtataaccctgcaatacgccgacgcgggagaactggcgaaagcgggggagaagctactgagtgccaaagggagtatgaccgtcgataaacgcaccaatcgccttttgctacgagataacaaaacggcgttaagcgcgcttgaacagtgggtagcgcaaatggatctgccggtcgggcaggttgagctgtcggcgcatattgtcaccattaatgaaaaaagtttgcgtgagttaggcgtgaaatggacgctggccgatgcgcaacacgctggtggcgttgggcaagtcaccacgcttggtagcgacctctccgtagcgacggcgacaacgcatgtcggttttaacattgggcgcatcaacggacgcttgctggatcttgagctttccgcgctcgaacaaaaacagcagctggatattatcgccagtccgcgtctgctggcctcacatcttcagcctgccagcattaaacaggggagcgaaattccatatcaggtttccagcggggaaagtggcgcgacgtcggtggaatttaaagaggccgtcctggggatggaagttacgcccacagtgttacaaaaaggtcgcatccggctgaaattacacatcagccagaacgttccggggcaggtgctacagcaggccgatggcgaagtgctggcgattgataagcaggagatcgaaacgcaggtcgaggtcaaaagcggagaaacgttggcgctgggcggcatttttacccgtaaaaataaatcgggtcaggatagcgtaccgttgcttggcgacattccctggttcgggcaattatttcgtcatgacggaaaagaagatgaacgacgcgagttagtggtgtttatcacgccacgactggtttccagtgagtaa

SEQ ID NO: 482539 - DNA, 405 bp, Shigella sonnei
atgagggttaaacgctggttgttggcaggtattgtattgtgccttttaaccggtatgcgtgacccttttaaaccgccggaagatctatgccggattagcgaacttagccagtggcgctatcaggggatggtagggcgaggcgagcgcatcatcggtgtaataaaagacgggcaaaagaaatggcgacgggtgcagcaaaacgatgtgctggaaaacggctggacaattttacagctgacgccagacgtactaacgctgggtaccgggacaaactgcgaaccgccacaatggttgtggcaacggcaaggagatacaaatgaagcaatggatagccgcactactgttgatgctgatacccggcgtacaggcggcaaagccgcaaaaagtgacgctgatggtggatga

SEQ ID NO: 482540 - DNA, 441 bp, Shigella sonnei
atgaacatgttctttgactggtggttcgccacatcaccccgcctccgccagttttgctgggcattctggttgctgatgttagttacgctcatttttctgtcatcgacacaccatgaagagcgcgacgcattaattcgactacgggcaagtcatcaccagcagtgggccacactgtatcgcctggttgacaccactcccttcagcgaagaaaaaacgctgcccttttcgccactggattttcagttgcccggcgcgcaactggtttcctggcatccatccgcgcagggaggcgagttggcgttgaaaacgctgtgggaagcagtgccgtcggcatttacacggctggcagagcgcaacgtcagcgtgagccgtttttcattaagcgtggaaggtgatgatcttttgttcacgctacaactggagacgccgcatgagggttaa

SEQ ID NO: 482541 - DNA, 333 bp, Shigella sonnei
atgaacccgccaattaattttttgccctggcgacagcaacgccggaccgcttttcttcgtttctggttgctgatgttcgttgcgcctctgctgctggccgtcgggataacgctaatactgcgtctgacagacaacgccgaagcacgcgtaaacaccgttttgcttcaggcggaacaacaactcgcccgcagcttacagataacgaaaccacgtttgctggagcgccaacaaattcgtgagcagcgtttgcaacggcagcgccagcgacaatttacccgcgactggcaatctgcgctggaagcactggcggcgcttttacccgagcacgcctag

SEQ ID NO: 482542 - DNA, 780 bp, Shigella sonnei
atggcatttaagatctggcaaattggtttgcatttacaacagcaagaagcagtagcggttgcgatcgtgcggggcgcaaaagaatgctttttgcaacgctggtggcggttgccgctggagaacgacattatcaaagatgggcggattgttgatgcgcagcggctggctaaaacgttgttaccgtggagtcgcgaactgccgcagcgtcatcacattatgttggcgtttcccgccagtcgcacattacagcggtcatttccgcgcccgtcgatgtccctcggtgagcgggagcaaacggcctggctgtcagggacgatggcccgcgagctggatatggatccggactccctgcgtttcgattacagcgaagactcactcagtcccgcctataacgtgactgccgcgcaaagcaaagagctggcaacgctactcactctggcagaaaggttgcgtgttcatgtgagcgcgatcaccccggatgccagtgcattacagcgattcctgccttttttaccttctcatcagcaatgtctggcctggcgtgataacgaacagtggctgtgggcgacacgctgtcgctgggggcgcaaactggcggtggggatgactagcgcgaaggagctggcggcagcgttatccgttgatcccgaaagcgtcgcgatatgtggcgaaggcggatttgatccctgggaggccgtttctgttcgtcagccgccgctaccgccgccaggtggagactttgccatcgcgctggggctggcgcttgggaaggcgtactga

SEQ ID NO: 482543 - DNA, 2553 bp, Shigella sonnei
gtgaagttcgtaaagtattttttgatccttgcagtctgttgcattctgctgggagcaggctcgatttatggcctataccgctacatcgagccacaactgccggatgtggcgacattaaaagatgttcgcctgcaaattccgatgcagatttacagcgccgatggcgagctgattgctcaatacggtgagaaacgtcgtattccggttacgttggatcaaatcccgccggagatggtgaaagcctttatcgcgacggaagacagccgcttctacgagcatcacggcgttgacccggtggggatcttccgtgcggcaagtgtggcgctgttctccggccacgcgtcacaaggggcgagtaccattacccagcagctggcgagaaacttcttcctcagtccagaacgcacgctgatgcgtaagattaaggaagtcttcctcgcgattcgcattgaacagttgctgacgaaagacgagatcctcgagctttatctgaacaagatttacctcggttaccgcgcctatggtgtcggtgctgcggcacaagtctatttcggtaaaacggtcgaccaactgacgctgaacgaaatggctgtgatagccgggctgccgaaagcgccttccacctttaatccgctctactcaatggatcgtgccgtcgcgcggcgtaacgtcgtactgtcgcggatgctggatgaagggtatatcacccaacaacagttcgatcagacacgcactgaggcgattaacgctaactatcacgcgccggagattgctttctctgcgccgtacctgagcgaaatggtgcgccaggagatgtataaccgttatggcgaaagtgcctatgaagacggttatcgcatttacaccaccatcacccgcaaagtgcagcaggccgcacagcaggcggtacgtaataacgtgctggactacgacatgcgccacggctatcgcggcccggcaaatgtgctgtggaaagtgggcgagtcggcgtgggataacaacaagattaccgatacgctgaaggcgctgccgacctatggtccgctgctgcctgccgcagtcaccagcgccaatcctcaggaagcgacggcaatgctggcggacgggtcgactgtcgcattgagtatggacggcgttcgctgggcgcgtccttaccgttcggatactcagcagggaccgacgccgcgtaaagtgaccgatgttctgcaaacgggtcagcaaatctgggttcgtcaggttggcgatgcatggtggctggcacaagtgccggaagtgaactcggcgctggtgtcgatcaatccgcaaaatggtgccgttatggcgctggtcggtggctttgatttcaatcagagcaagtttaaccgcgccacccaggcactgcgtcaggtgggttccaacatcaaaccgttcctctacaccgcggcgatggataaaggtctgacgctggcaagtatgttgaacgatgtgccaatttctcgctgggatgcaggtgtcggttctgactggcagccgaagaactcaccaccgcagtatgctggtccaattcgcttacgtcaggggctgggtcagtcgaaaaacgtggtgatggtacgtgcaatgcgggcgatgggcgtcgactacgctgcagaatatctgcaacgcttcggcttcccggcgcaaaacattgtccacaccgaatcgctggcgctgggttcagcgtccttcaccccaatgcaggtggcgcgcggctacgcggtcatggcgaacggcggcttcctggtggacccgtggtttatcagcaaaattgaaaacgatcagggcggcgtgattttcgaagcgaaaccgaaagtagcctgcccggaatgcgatattccggtgatttacggtgatacgcagaaatcgaacgtgctggaaaataacgatgttgaagatgtcgctatctcccgcgagcagcagaatgtttctgtaccaatgccgcagctggagcaggcaaatcaggcgttagtggcgaagactggcgcgcaggagtacgcaccgcacgtcatcaacactccgctggcattcctgattaagagtgctttgaacaccaatatctttggtgaaccaggctggcagggtaccggctggcgtgcaggtcgtgatttgcagcgtcgcgatatcggcgggaaaaccggtaccactaacagttcgaaagatgcgtggttctcgggttacggtccgggcgttgtgacctcggtctggattggctttgatgatcaccgtcgtaatctcggtcatacaacggcttccggagcgattaaagatcagatctcaggttacgaaggcggtgccaagagtgcccagcctgcatgggacgcttatatgaaagccgttcttgaaggtgtgccggagcagccgctgacgccgcctccgggtattgtgacggtgaatatcgatcgcagcaccgggcagttagctaatggtggcaacagccgcgaagagtatttcatcgaaggtacgcagccgacacaacaggcggtgcacgaggtgggaacaaccattatcgataatggtgaggcacaggaattgttctga

SEQ ID NO: 482544 - DNA, 561 bp, Shigella sonnei
atgagcaaatcattacaaaaacccaccattctgaatgttgaaactgtagcccattcccgactgtttaccgtcgagagcgtggatctggagttcagcaatggcgtgcggcgtgtttatgaacgaatgcgtccaaccaaccgggaagcagtgatgattgtgccgattgtggacgatcacctgatcctgatccgcgaatacgcagtgggaactgaatcctacgaattaggtttttcgaaaggattaattgatccgggtgaaagcgtctacgaagccgctaaccgcgagctaaaagaagaggttggatttggtgcgaacgatctgacttttttgaagaagctcagcatggcaccgtcttacttttccagcaaaatgaatatcgtggtcgcgcaagatctctacccggaatcgctggaaggcgatgagccagagccgctaccacaggtgcgctggccgctggcgcatatgatggatttgctggaagaccctgacttcaacgaagcgcgtaatgtcagcgcgctgttcctcgtgcgcgaatggttgaaagggcaggggcgagtgtaa

SEQ ID NO: 482545 - DNA, 2136 bp, Shigella sonnei
atgagcaccattgtgatttttttagctgctttgctggcctgctcactacttgcgggatggctgataaaagtgcgatccagacggcgtcagctgccctggaccaacgccttcgcggatgcgcaaacgcgtaaactcacacctgaagaacgtagcgccgttgaaaattatcttgagagcctgacgcaggtattacaggtgcctggcccaacgggagctagcgcggcaccgatctctctggcgctgaatgccgaaagcaacaacgtcatgatgctgacacacgctatcacgcgttacggcatctctaccgacgatccgaataaatggcgttactacctcgattcggtagaagtccacctgccccctttctgggaacaatacatcaacgatgagaataccgttgaactgatttataccgattcgctgccgctggttatttcactcaacggtcatacgctgcaggagtacatgcaggaaacgcgcggctatgccttgcaacctgttccgtccacgcaggcgtcgattcgcggggaagagagtgagcaaatcgagctactcaatattcgcaaagaaacgcatgaagaatatgcgctgagtcgtccgcgcgggctgcgtgaagcgttgctgatcgtcgcctccttcctgatgttctttttctgcctgattaccccggatgtatttgttccgtggctggcaggcggcgcattactgctgctgggcgcaggtctgtgggggctattcgcgcccccggcaaaatcctccctgcgggaaattcattgtctgcgcggtacaccccgtcgttggggattgtttggcgaaaacgatcaggaacagatcaacaatatttcactcggtattatcgacctggtctatcccgcacactggcagccatacattgctcaggatctcggtcaacaaaccgatattgatatctatctcgaccgccacgtagtgcgtcaggggcgatatctttcgctgcatgatgaagtaaaaaactttccgttacagcactggctgcgcagtacgattatcgctgcgggctcgctgctggtgctgtttatgctgttattctggatcccgctggatatgccgctgaaattcactctctcatggatgaaaggcgcacagaccattgaagccaccagcgtaaaacaactggctgacgctggcgtgcgggtaggcgatacattgcgtatcagcggtacgggaatgtgtaatattcgcacttccggaacctggagcgcgaaaaccaattcaccttttttaccgtttgactgctcgcagatcatctggaacgacgcccgctcattgccattaccagaatctgaactggtcaacaaagcgacggcattgactgaagcagttaatcgccagctgcaccctaaaccggaagatggatctcgcgtcagtgcctcattacgttcagcaattcaaaaatccggcatggtattgcttgatgattttggcgacattgtactgaagacagcggatttatgttctgccaaagatgactgtgtgcgactgaaaaatgcgctggtcaatctcggcaacagtaaagactgggacgcgctggtaaaacgcgccaacgccgggaagctcgatggcgtgaatgtgttattacgcccggtgagtgcggaatcgctggataacctggtggcaacctccaccgcgccgtttatcacgcatgaaacggcgcgagcggcacaatcactaaacagtccggcccccggcggattcctgattgtcagcgacgaaggcagcgattttgttgatcagccctggccttcggcatcactttacgactacccgccgcaagaacagtggaacgctttccagaaactggcacaaatgctgatgcatacgccgtttaacgccgagggtatcgtcacaaaaatcttcactgacgccaatggtacgcagcatattggccttcatccaatcccggatcgttccggcctgtggcgctatctcagcaccacattgctgctactgacgatgctgggtagcgccatttacaatggcgtacaggcctggcgtcgttaccagcgtcatcgcactcgcatgatgaagattcaggcctattatgaaagctgcctgaacccgcaactgatcaccccttcagaaagccttatcgaataa

SEQ ID NO: 482546 - DNA, 669 bp, Shigella sonnei
atgcatatcaacattgcctggcaggacgtagataccgttctgctggatatggacggcacgttgctcgacctcgccttcgataactatttctggcaaaagctggtgcctgaaacatggggcgcgaaaaacggggttacgccacaggaagcgatggaatatatgcgccagcaatatcacgacgtacagcatacgctaaactggtactgtcttgattactggagtgagcaactgggtctggatatctgtgcgatgaccaccgagatgggaccgcgtgccgtactgcgtgaagataccattccgtttcttgaggcactgaaagccagcggtaagcagcgaattttgctcaccaatgcgcatccgcacaacctggcggtaaaacttgagcataccggtctggacgcacaccttgatttattactttccacccacacatttggttatccgaaagaggatcagcggttatggcatgcggtggccgaagctacgggtctgaaagctgaaagaacgctgtttattgatgacagcgaagcgattctcgatgctgccgcgcaatttggtattcgttactgcctcggcgtgactaatcctgattccgggattgccgagaaacagtatcaacgccatccgtcactgaatgactaccgccgcctgatcccctcgctaatgtga

SEQ ID NO: 482547 - DNA, 402 bp, Shigella sonnei; identical to SEQ ID NO: 260838

SEQ ID NO: 482548 - DNA, 879 bp, Shigella sonnei
atgccgcaacatgaccaattacatcgctatctgtttgaaaactttgccgtgcgcggcgaactggtaaccgtttcggaaaccctgcaacagatccttgagaatcacgattatccgcagcccgttaaaaacgtgctggcagaactgctggttgcgaccagcctgttaaccgctacgctgaagtttgatggtgatatcaccgtacagctgcaaggcgacggtccgatgaatctggcggttattaacggtaacaataaccagcaaatgcgcggtgtggcgcgcgtgcagggcgaaattccagaaaatgccgacctgaaaacgctggtcggcaatggttacgtggtgatcaccattaccccgagcgaaggcgaacgctatcagggcgtggttggtctggaaggtgataccctggcggcctgcctggaagattactttatgcgttctgaacagctgccgacgcgcctgtttattcgcaccggcgacgtagacggcaaaccggctgcaggcggtatgttgttgcaggtaatgcctgcgcaaaatgcccagcaggacgactttgaccacctggcgacgctaaccgaaaccatcaaaaccgaagaactgctgaccttaccggcaaacgaagtgttgtggcgtttgtatcacgaagaagaggtgacggtttacgatccgcaggatgtggagttcaaatgcacctgctcgcgtgaacgttgcgccgacgcgctgaaaacgctgcctgatgaagaagtcgatagcatcctggcggaagatggcgaaattgacatgcattgtgattactgcggtaaccactatctgttcaatgcgatggatattgctgaaatccgcaacaacgcgtctccggcagatccgcaagttcattaa

SEQ ID NO: 482549 - DNA, 1374 bp, Shigella sonnei
atggcaatgttgttgctaccgtggatacaacaaagccttcgtatccgcaatggcagtagccgctatagctacttttaccagtcagtatggcataacgtacttatattactggtgatttttctctccaatggcctgacgtggctggtgcttttactgtggggtgagttgtttaaacttgttggcatcacgtttttcaatacgctcttttttgcaaccgactggtttatgtatcttacatttggtctggttaccgcactggtggtgatcctcgcgcgtacacagtcacgtttaatcgactctattcaaaagttgttcacgctaatcgccacggggttgctgccgttagtatcattgctaaccctgatgtttatcatcaccctgccgtttacggacctgagcgcgatttctcgccacatctccgccgccgggttgctgttaacgctggcctttttgcaattgatcttaatggctattgtccgcgatccgcaaaaagcgtcacttccctggacggggccgttgcgttgcctgattaaaaccgctttgctggttgctccgctgtatgtgttcgtcgccgcctgggcgttatggctgcgggtcgctcagtacggctggactgtcgaccgcttgcagggcgcgctggcggtgctggtgttactggtgtggtcgctggggtattttgtcagtatcgtctggcgtaatgggcaaaatccccttgttcttcagggcaaagtgaaccttgcggtttcgttattggtgttggtgatactggtgcttcttaattcgccggtgctggacagtatgcgcattagcgtgaacagtcatatggcgcgttatcagagcggcaaaaacacgccagaccaggtaactatctacatgctcgaacagagcggtcgctatggacgtgcggcgcttgagtcgctgaaaagcgatgccgggtttatgaaagacccgaaacgcgcgcgggatctgctgatggcgttagatggagagcaacatcttcaggaacaggtatcggaaaaagtattagccgaaaatgtgttaattgctcctggttctgttaaaccggatgcgacattctggtcggccttaatccaggatcgctataacgtgatgacctgtattgaaaaagacgcctgcgtcctggtcgagcaagatctgaatagtgatggtcaggcggagcggatcctgtttgcttttaatgatgacagagtcattgtctatggctttgactcagacagaaaagaatgggacgcgcttgatatgagtttacttccgaacgaaataacgaaagaaaaattactcacagctgcgaaggatggaaaactggatctgacggtagatggtgaaacgctggaaataaacttaagtaagtga

SEQ ID NO: 482550 - DNA, 315 bp, Shigella sonnei
atggataacgttgaactttcaccggcaacacgctgggggatgattgctaccggattacttcaggggctggtttgctacctgcttatcgcctggcttgccggaaaaaatcacagttggattgtttatggcgtgcctgcgaccgtcgcgttttcatccgttttactcttctccgtgatctcttttaaacagaagcgcctttggggatggctggcgctggtgtttattgccacgacagggatgagcggttggctgaagtggcaaactgatggcatgaacccctggagagctgaaaaggcgatttgggattttggctga

SEQ ID NO: 482551 - DNA, 1623 bp, Shigella sonnei
atgcgcgttaacaatggtttgaccccgcaagaactcgaggcttatggtatcagtgacgtacatgatatcgtttacaacccaagctacgacctgctgtatcaggaagagctcgatccgagcctgacaggttatgagcgcggggtgttaactaatctgggtgccgttgccgtcgataccgggatcttcaccggtcgttcaccaaaagataagtatatcgtccgtgacgataccactcgcgatactttctggtgggcagacaaaggcaaaggtaagaacgacaacaaacctctctctccggaaacctggcagcatctgaaaggcctggtgaccaggcagctttccggcaaacgtctgttcgttgtcgacgctttctgtggtgcgaacccggatactcgtctttccgtccgtttcatcaccgaagtggcctggcaggcgcattttgtcaaaaacatgtttattcgcccgagcgatgaagagctggcaggtttcaaaccagactttatcgttatgaacggcgcgaagtgcactaacccgcagtggaaagaacagggtctgaactccgaaaacttcgtggcgtttaacctgaccgagcgcatgcagctgattggcggcacctggtacggcggcgaaatgaagaaagggatgttctcgatgatgaactacctgctgccgctgaaaggtatcgcttctatgcactgctccgccaacgttggcgagaaaggcgatgttgcggtgttcttcggcctttccggcaccggtaaaaccaccctttccaccgacccgaaacgccgcctgattggcgatgacgaacacggctgggacgatgacggcgtgtttaatttcgaaggcggctgctacgcaaaaactatcaagctgtcgaaagaagcggaacctgaaatctacaacgctatccgtcgtgatgcgctgctggaaaacgtcaccgtgcgtgaagatggcactatcgactttgatgatggttcaaaaaccgagaacacccgcgtttcttatccaatctatcacatcgataacatcgttaagccggtttccaaagcgggccacgcgactaaggttatcttcctgactgctgatgctttcggcgtgttgccgccggtttctcgcctgactgccgatcaaacccagtatcacttcctctctggcttcaccgccaaactggccggtactgagcgtggcatcaccgaaccgacgccaaccttctccgcttgcttcggcgcggcgttcctgtcgctgcacccgactcagtacgcagaagtgctggtgaaacgtatgcaggcggcgggcgcgcaggcttatctggttaacactggctggaacggcactggcaaacgtatctcgattaaagatacccgcgccattatcgacgccatcctcaacggttcgctggataatgcagaaaccttcactctgccgatgtttaacctggcgatcccaaccgaactgccgggcgtagacacgaagattctcgatccgcgtaacacctacgcttctccggaacagtggcaggaaaaagccgaaaccctggcgaaactgtttatcgacaacttcgataaatacaccgacacccctgcgggtgccgcgctggtagcggctggtccgaaactgtaa

SEQ ID NO: 482552 - DNA, 1353 bp, Shigella sonnei
atgaggcgattgcgcttctcgccacgaagttcatttgcccgtacgttattgctcatcgtcaccttgctgttcgccagcctggtgacgacttatctggtggtgctgaacttcgcgattttgccgagcctccagcagtttaataaagtcctcgcgtacgaagtgcgtatgttgatgaccgacaaactgcaactggaggacggcacgcagttggttgtgcctcccgctttccgtcgggagatctaccgtgagctggggatctctctctactccaacgaggctgccgaagaggcaggtctgcgttgggcgcaacactatgaattcttaagccatcagatggcacagcaactgggcggcccgacggaagtgcgcgttgaggtcaacaaaagttcgcctgtcgtctggctgaaaacctggctgtcgcccaatatctgggtacgcgtgccgctgaccgaaattcatcagggcgatttctctccgctgttccgctatacgctggcgattatgctattggcgataggcggggcgtggctgtttattcgtatccagaaccgaccgttggtcgatctcgaacatgctgctttgcaggtcggtaaagggattattccgccgccgctgcgtgagtatggcgcgtccgaggtgcgttccgttacccgcgcctttaaccatatggcggctggtgttaagcaactggcggatgaccgcacgctgctgatggcgggggtaagtcacgacttgcgcacgccgctgacgcgtattcgcctggcgactgagatgatgagcgagcaggatggctatctggcagaatcgatcaataaagatatcgaagagtgcaacgccatcattgagcagtttatcgactacctgcgcaccgggcaggagatgccgatggaaatggcggatcttaatgcagtgctcggtgaggtgattgctgccgaaagtggctatgagcgggaaattgaaaccgcgctttaccccggcagcattgaagtgaaaatgcacccgctgtcgatcaaacgcgcggtggcgaatatggtggtcaacgccgctcgttatggcaatggctggatcaaagtcagcagcggaacggagccgaatcgcgcctggttccaggtggaagatgacggtccgggaattgcgccggaacaacgtaagcacctgttccagccgtttgtccgcggcgacagtgcgcgcaccattagcggcacgggattagggctggcaattgtgcagcgtatcgtggataaccataacgggatgctggagcttggcaccagcgagcggggcgggctttccattcgcgcctggctgccagtgccggtaacgcgggcgcagggcacgacaaaagaagggtaa

SEQ ID NO: 482553 - DNA, 720 bp, Shigella sonnei; identical to SEQ ID NO: 470409

SEQ ID NO: 482554 - DNA, 477 bp, Shigella sonnei
atgaaaacgcccctggttacccgggaagggtatgaaaaactcaaacaagagcttaattatctctggcgtgaagaacgcccggaggtcacaaaaaaggtgacctgggccgcaagtctgggcgaccgcagcgaaaatgctgactatcagtataataaaaagcgtctgcgtgaaatcgaccgtcgcgtgcgctatctcactaaatgcatggaaaatctcaaaatcgtcaattactcccctcagcaggaaggcaaagtcttttttggcgcgtgggtggagattgaaaacgacgatggcgtgactcaccgtttccgtattgtcggctacgatgaaatttttggccgtaaagattacatctctatcgattccccgatggcccgcgcattgctgaaaaaagaagtcggcgatctggcggtggtgaatacccctgccggggaagcgagctggtatgttaatgctatcgaatacgtgaaaccgtaa

SEQ ID NO: 482555 - DNA, 2322 bp, Shigella sonnei
atgatgaatgattcgttctgccgcattattgcgggtgaaattcaggcgcgcccggaacaggttgacgctgccgttcgcctgcttgacgaagggaataccgtgccgtttatcgcacgttatcgtaaggaaatcaccggcggtctggatgacacgcagctgcgtaatctggaaacgcgtctgagctatctgcgcgagctggaagagagacgtcaggcgatcctcaagtccatttccgagcaaggcaaactcaccgatgatctggcgaaggccatcaacgccaccctaagcaaaaccgaactcgaagacctctacctgccctacaaacctaaacgccgcacccgcgggcaaatcgccattgaagcagggcttgagccgttggctgacctgctgtggagcgatccgtcacacacaccagaagtcgccgctgcgcaatatattgatgccgataaaggcgtggcagataccaaagccgcgctggacggcgcgcgctatatcctgatggaacggtttgccgaagatgccgcgctgctggcgaaagtgcgtgattatctgtggaagaacgcgcatttggtttctacggtggtgagcggtaaagaagaggaaggggcgaaattccgcgactatttcgatcatcacgaaccgttgtccacggtgccttctcaccgcgcgctggcgatgttccgtgggcgtaacgaaggcgtactccagctttcgctgaatgccgatccgcagttcgatgagccgcccaaagagagctattgcgagcaaatcatcatggatcaccttggcctgcgcctgaacaatgccccggcggatagctggcgcaaaggcgtagtgagctggacctggcgcatcaaggtgctgatgcatctggaaaccgaactgatgggtaccgtgcgcgaacgcgcggaagatgaagcaatcaacgtctttgcccgtaacctgcacgatctgctgatggcggcccctgccggactgcgtgcaacgatgggcctcgatccgggtctgcgtaccggggtaaaagtggcagtggtcgatgccactggcaaactggtggcgaccgataccatttacccgcacaccggacaagccgcaaaagtagcgatgaccgttgctgccttgtgtgaaaaacataacgttgaactggtggcgatcggcaacggtacagcttcccgcgaaactgaacgtttctatctcgacgtgcagaagcagttcccgaaagtgaccgcacagaaagtgatcgtcagcgaagctggcgcgtcggtttactcagcttccgagctggcagcgcaggagttcccggatctcgacgtttcgctgcgtggtgcggtatctatcgcccgccgtttgcaggatccgctggcggagctggtgaaaatcgatccgaaatctatcggcgtaggtcagtatcagcatgacgtcagccagacgcaactggcccgcaaactggatgcagtagtagaagactgcgtaaacgccgttggcgtcgatctcaacaccgcttctgttccgctattaactcgcgtggcgggcctgacgcgcatgatggcgcaaaacatcgtggcctggcgcgatgagaacggccagttcaagaaccgtcagcaactgctgaaagtcagccgtctggggccgaaagccttcgagcagtgcgcgggcttcctgcgcattaaccacggtgataacccgctggacgcctctaccgttcacccggaagcctatccggtggtggaacgcattctggcagcaacacagcaggcactgaaagatctgatgggtaacagcagcgaactgcgtaacctgaaagcgtctgactttactgatgaaaaattcggtgtgccgacagtaactgacatcatcaaagagctggaaaaaccgggtcgcgatccgcgtccggaatttaaaaccgctcagtttgccgatggcgtcgagacaatgaacgacctgcaaccgggtatgatcctcgaaggcgctgtcaccaacgtcaccaactttggcgcgtttgtcgatattggcgtgcatcaggacggcctggttcacatctcttcattgtcgaacaagtttgtggaagatccgcataccgtggtgaaagcgggcgacattgtgaaggtgaaagtgctggaagtggatcttcagcgtaaacgtatcgccctgaccatgcgtctggacgagcagcctggcgaaaccaacgcccgtcgcggcggcggtaatgaacgcccgcaaaacaaccgcccggcagccaaaccacgcggtcgtgaagcgcagcctgccggtaatagcgcgatgatggatgcgctggcggcggcaatgggcaaaaaacgttaa

SEQ ID NO: 482556 - DNA, 228 bp, Shigella sonnei; identical to SEQ ID NO: 459352

SEQ ID NO: 482557 - DNA, 2322 bp, Shigella sonnei
atgaaaaaattaaccattggcttaattggtaatccaaattctggcaagacaaccttatttaaccagctcactagcgcacgtcagcgtgtaggtaactgggctggcgttaccgtcgaacgtaaagaagggcaattctccaccaccgatcatcaggtcacgctggtggacctgcccggcacctattctctgaccaccatctcatcgcagacctcgctcgatgagcaaatcgcctgtcactacattttgagtggcgacgccgacctgctgattaacgtggtggatgcgtctaaccttgagcgtaacctgtacctgacgctacaactgctggaactcggcattccctgcatcgtggcactgaacatgctcgacattgccgagaagcaaaatattcgtattgaaattgatgctctgtcggcgcgtcttggctgcccagtgatcccgctggtttcaacccgtggtcgcggtattgaagcgctcaagctggcgattgatcgctataaagctaacgagaatgtggaactggtgcattacgcacagccgctactcaacgaagcagattcactggcaaaagtgatgccttccgacatcccgctgaaacaacgtcgctggctgggcctgcaaatgctggaaggcgatatctacagccgcgcctacgccggtgaagcgtcgcagcatctggatgccgcccttgcccgtctgcgtaatgaaatggatgatccggcgctgcacattgccgatgcgcgttaccagtgcatagctgccatctgtgatgtggtaagcaacaccctgacggcagaacccagccgtttcaccactgcggtagataaaatcgtgctcaaccgtttcctcggtctgccgattttcctctttgtgatgtacctgatgttcctgctggctatcaacatcggcggggcgttacagccgctgtttgacgtcggctccgtggcgctatttgtgcatggtattcaatggattggctacacgctccacttcccggactggctgactatcttcctcgcccagggcctgggtggcggtattaacaccgtgctgccactggtgccgcagatcggcatgatgtacctgttcctctccttccttgaggactccggctatatggcgcgtgcagcgtttgtgatggaccgcctgatgcaggcgctgggcttgccggggaaatcctttgtgccgctgatcgtcggtttcggttgtaacgtaccgtcggtaatgggcgcacgtacgcttgatgcaccgcgtgaacgtctgatgaccatcatgatggcaccgtttatgtcctgcggcgcgcgtctggctatcttcgcagtattcgcggctgccttcttcgggcagaacggtgccctggcggttttctcgctgtatatgctcggtatcgtgatggcggtgctgactggcctgatgctcaagtacaccatcatgcgcggtgaagcgacgccgtttgtcatggagctgccggtctaccatgtaccacacgttaaaagcctgattatccagacctggcagcgtctgaagggcttcgttctgcgtgctggtaaagtgattatcatcgtcagcattttcctgagcgctttcaacagcttctcgttgagcgggaaaatcgtcgataacatcaacgactcggcgctggcgtccgtcagccgggtgataacccctgtcttcaagccgattggcgtacatgaagataactggcaggcaacggttggcctgtttacgggcgcaatggcaaaagaagtggtggtgggtacgctcaacaccctctacaccgcagaaaatattcaggacgaagagttcaatccggcggaattcaacctcggtgaagagctgttcagtgcggtagatgaaacctggcagagcctgaaagacaccttcagccttagcgtactgatgaaccccattgaagctagcaaaggcgacggtgaaatgggtaccggggcgatgggcgtgatggatcagaaattcggtagcgcagctgccgcatacagctacctgattttcgtcctgctgtatgtaccatgtatctcggtgatgggagccatcgcccgtgaatcaagccgtggctggatgggcttctccatcctgtgggggctgaatatcgcttactcactggcaacattgttctatcaggtcgccagctacagtcagcacccaacttacagcctggtgtgcattctggcggtaatcctgtttaacatcgtagttatcggtctgctgcgccgcgcgcgtagccgggtggatatcgaactgctggcaacccgcaagtcggtaagcagttgctgcgcagccagcaccaccggtgattgccattaa

SEQ ID NO: 482558 - DNA, 237 bp, Shigella sonnei
atggcttcacttattcaggtacgtgatttgctggcgttacggggccgtatggaagcgacccagataagccagacattgaacactccgcagccaatgattaacgccatgctgcaacaactggaaagtatgggcaaagccgtgcggattcaggaagaacctgacggctgcctctctggcagttgtaaaagctgcccggaaggaaaagcctgtctgcgcgagtggtgggcgctgcgttaa

SEQ ID NO: 482559 - DNA, 645 bp, Shigella sonnei
atgagcaaaaagcagagttccaccccacacgatgcgctgttcaaactctttttacgccaaccggacacggctcgtgattttcttgcgtttcatttaccggcacccattcacgcgctttgtgatatgaaaaccctcaagctggagtcgagcagctttattgatgacgatctgcgtgaaagctattccgatgtgctgtggtcggtgaaaacggaacaaggaccaggatacatctattgtctgattgaacatcaaagcacctcaaacaaactgatcgcatttcgcatgatgcgttacgctattgccgcaatgcaaaatcaccttgatgctggatacaaaacgttgccgatggtggtgctattgttgttttaccacggtattgaaagcccctatccctattcgctgtgttggctggattgtttcgccgatcccaaactggcaaggcagctttatgcctccgcatttccgctgattgatgtcaccgtcatgcctgatgatgaaatcatgcagcaccgacgtatggcgctgctggagttaattcaaaaacatattcgtcaacgcgacctgggtaatgactccaacttattgatagtgttttatgttcagataatgcccgatgactttgtcatgcagctccaccgattttga

SEQ ID NO: 482560 - DNA, 966 bp, Shigella sonnei
atgagtaaacccattgtgatggaacgcggtgttaaataccgcgatgccgataagatggcccttatcccggttaaaaacgtggcaacagagcgcgaagccctgctgcgcaagccggaatggatgaaaatcaagcttccagcggactctacacgtatccagggcatcaaagccgcaatgcgcaaaaatggcctgcattctgtctgcgaggaagcctcctgccctaacctggcggaatgcttcaaccacggcacagcaacgtttatgatcctcggcgctatttgtacccgccgttgtccgttctgtgatgttgcccacggtcgcccggtagctcctgatgccaatgaaccagtgaaactggcgcagaccattgccgatatggcgctgcgttatgtggttatcacctccgttgaccgtgatgacctgcgcgatggcggtgcccagcactttgcggattgcattactgccattcgggaaaaaagcccgcaaatcaaaattgaaactctggtgccggatttccgtggtcgtatggatcgtgctctggatattctgactgcaacgccaccagatgtgttcaaccataacctggaaaacgtaccgcgtatttaccgtcaggtacggcctggtgcagattacaactggtcgctgaagctgctggaacgctttaaagaagcgcatccggaaatcccgaccaagtctggtctgatggtgggactgggtgaaaccaatgaagaaattattgaggtaatgcgcgacctgcgccgtcatggtgtgacgatgttaacgctggggcaatatttgcagccaagccgccatcacctgccggttcaacgttacgttagcccggatgagttcgacgaaatgaaagccgaagcgctggcgatgggctttacccatgctgcatgcggtccgtttgtccgctcttcttaccacgccgatttgcaggcgaaagggatggaagttaagtaa

SEQ ID NO: 482561 - DNA, 954 bp, Shigella sonnei
gtggatagtaataatcaaattgaaccctgtttaagcagaaagtcgtcagaaggtaaaccacaaatatttacaaccttacgaaatattgatcttaaccttctgactatttttgaagctgtatatgtacataaagggatcgttaatgcagcgaaagtgcttaatctgaccccctcggcaatcagtcagtctattcagaaactgcgcgttatattccctgacccattgtttattcgcaaaggccagggtgtcactcctaccgcatttgcgatgcatctacatgagtatatcagtcagggccttgagtccattcttggcgcgctggatatcgaaggaagctatgataagcaacgaacgataactattgcgaccactccctcggtcggagccctggtccttcctgtcatctatcgggcgattaaaactcactatccgcagcttttactgcgcaacccgcccatcagcgacgcggaaaaccaactcagtcagtttcaaaccgatctcatcatcgataacatgttttgcaccaatcgtacggtgcaacatcatgttctgttcaccgacaatatggtgttaatttgccgcgagggaaatccactactctctttagaagatgacagagagactatcgacaacgctgcgcatgtactcctgttaccggaagggcaaaatttcagcggtctgcggcagagagttcaagagatgtttccggaccggcaaatcaatttcaccagctacaacattttgacaatcgctgcactggttgccaacagtgacatgttagcgattattcccagccgtttttataacctgtttagtcgttgctggccgctggaaaaactgccttttccgtccttaaatgaggagcaaatagatttctctatccactacaacaaattcagcctgcgtgatcccatcctgcacggggtaatagatgttatccgtaatgcattttga

SEQ ID NO: 482562 - DNA, 642 bp, Shigella sonnei
ttgtatcaggataaaattcttgtccgccagctcggtcttcagccttacgagccaatctcccaggctatgcatgaattcaccgatacccgcgatgatagtacccttgatgaaatctggctggtcgagcactatccggtattcacccaaggtcaggcaggaaaagcggagcacattttaatgccgggtgatattccggtgatccagagcgatcgcggtgggcaggtgacttatcacgggccggggcaacaggtgatgtatgtgttgcttaacctgaaacgccgtaaactcggtgtgcgtgaactggtgaccttgcttgagcaaacagtggtgaataccctggctgaactgggtatagaagcgcatcctcgggctgacgcgcctggtgtctatgtcggggaaaagaaaatttgctcactgggtttacgtattcgacgcggttgttcattccacggtctggcattaaacgtcaatatggatctttcaccatttttacgtattaatccttgtgggtatgccggaatggaaatggctaaaatatcacaatggaaacccgaagcgacgactaataatattgcaccacgtttactggaaaatattttagcgctactaaacaatcctgacttcgaatatattaccgcttaa

SEQ ID NO: 482563 - DNA, 264 bp, Shigella sonnei
atgaaaaccaaacttaacgaactgcttgaattccctactccttttacttacaaagttatggggcaggcgttacctgagctggttgatcaggtggttgaagtggtacagcgccatgcgccaggtgactacaccccaacggtaaaaccaagcagcaaaggcaactaccactcggtatctatcactatcaacgccactcatatcgagcaggttgaaacactgtatgaagaactaggcaaaatcgatattgtccgcatggttctgtaa

SEQ ID NO: 482564 - DNA, 1284 bp, Shigella sonnei
atgcctgccggtagtgcatttgctatagtagggcacttttttaattccatcacggatgtcgtagttcagaccatgaataccattttttccgctcgtatcatgaagcgcctggcgctcaccacggctctttgcacagcctttatctctgctgcacatgccgatgacctgaatatcaaaactatgatcccgggtgtaccgcagatcgatgcggagtcctacatcctgattgactataactccggcaaagtgctcgccgaacagaacgcagatgtccgccgcgatcctgccagcctgaccaaaatgatgaccagttacgttatcggccaggcaatgaaagccggtaaatttaaagaaactgatttagtcactatcggcaacgacgcatgggccaccggtaacccggtgtttaaaggttcttcgctgatgttcctcaaaccgggcatgcaggttccggtttctcagctgatccgcggtattaacctgcaatcgggtaacgatgcttgtgtcgccatggccgattttgccgctggtagccaggacgcttttgttggcttgatgaacagctacgttaacgcactgggcctgaaaaatacccacttccagacggtacatggtctggatgctgatggtcagtacagctccgcgcgagatatggcgctgatcggccaggcattgatccgtgacgtaccgaatgaatactcgatctataaagaaaaagaatttacgtttaacggtattcgccagctgaaccgtaacggcctgttatgggataacagcctgaatgtcgacggcatcaaaaccggacacactgacaaagcaggttacaaccttgttgcttctgcgactgaaggccagatgcgcttgatttctgcggtgatgggcggacgtacttttaaaggccgtgaagccgaaagtaaaaaactgctaacctggggcttccgtttcttcgaaaccgttaacccactgaaagtaggtaaagagttcgcctctgaaccggtttggtttggtgattctgatcgcgcttcgttaggggttgataaagacgtgtacctgaccattccacgtggtcgcatgaaagatctgaaagccagctatgtgctgaacagcagtgaattgcatgcgccgctgcaaaagaatcaggtcgtcggaactatcaacttccagcttgatggcaaaacgatcgagcaacgcccgctggttgtgttgcaagaaatcccggaaggtaacttcttcggcaaaatcattgattacattaaattaatgttccatcactggtttggttaa

SEQ ID NO: 482565 - DNA, 1089 bp, Shigella sonnei
atgcgtaagcagtggctcgggatctgcatcgcggcaggaatgctcgcggcatgtacaagcgatgatggtcagcaacagacggtaagtgtaccgcagcctgcggtatgtaacggccccatagttgaaattagcggggcggacccgcgtttcgaaccactgaacgcgacggcaaatcaggattaccagcgcgacggtaaaagctacaaaatcgtgcaggatccgtctcgatttagccaggcgggactggcggcaatctatgatgccgaacccggcagtaacctgacggcctctggcgaagctttcgatccgacacagctgacggcggcccatccaacgcttccgatccccagctacgccagaatcactaacctggctaacgggcgaatgatcgtggtgcgcattaatgatcgcggcccttacggcaacgaccgcgttatttcactttctcgcgcggcagctgaccgtcttaacacgtcaaacaacaccaaagttcgtatcgatccgattattgtcgcccaggatggttcgctttctggtcctggtatggcttgtaccacagtcgccaaacagacttacgccctgccagcacctcccgatttaagcggtggcgcgggaacaagttcagtgtctggcccgcagggtgacattcttccggtcagtaattcgacgctaaaaagcgaagatccgaccggcgcgccggtaaccagtagcggtttcctcggcgctccaacgaccttagcgcctggtgtactggaaggcagcgaaccgacgcctgcgccacagcccgttgttacagctccgtcgacaacgcctgcaacctcgcctgcaatggtgacaccgcaagccgcctcgcaaagcgccagcggcaactttatggtgcaagtcggggccgtaagcgatcaggctcgtgcgcaacagtaccaacagcaactgggacagaagttcggcgtccccggtcgcgtaactcaaaatggcgcggtctggcggatccagcttggcccattcgccagcaaagccgaagccagtaccttgcagcaacgtttgcaaaccgaagcccaattacagtcatttattactaccgcgcagtag

SEQ ID NO: 482566 - DNA, 1113 bp, Shigella sonnei
atgacggataatccgaataaaaaaacattctgggataaagtccatctcgatcccacaatgctgctgatcttactggcattgctggtttacagcgccctggttatctggagcgccagcggtcaggatattggcatgatggagcgtaaaatcggccaaatcgcgatgggtctagtcatcatggtggtgatggcgcaaattcctccacgcgtttatgaaggctgggccccctatctctatatcatctgtattattttgctggtggcggtagatgctttcggtgccatctctaaaggtgctcaacgctggctggacctcggtattgttcgttttcagccgtcggaaattgccaaaatagccgtaccactgatggttgcgcgctttatcaaccgcgacgtttgcccgccatcgttgaagaacactggcatcgcgctggtgctgatatttatgcccacgctgctggtggctgcacagcctgacctgggaacatcaatcctcgttgcgctttccggtctgtttgtactgttcctctctggccttagctggcgtctgattggcgtcgcagtagtgctggtggcggcgttcattccgattctgtggttcttcctgatgcatgattaccagcgccagcgcgtaatgatgctcctagacccggaatcagacccactcggcgcgggctatcacattattcagtctaaaattgctattggctccggcggattacgcggcaaaggctggctgcacggcactcagtcacagcttgaatttctccccgaacgccataccgactttatcttcgcggtactggcggaagagctgggattagtgggcattctgattctgctcgctctctacattctgctgatcatgcgcgggctgtggatagccgccagagcgcaaaccacctttggtcgcgtcatggctggtggcttaatgctgatattattcgtttatgtcttcgtaaatattggtatggtaagcggtattctgccggttgtaggggttccgctcccactggtcagttatggaggatcggcgctaattgtgctgatggctgggttcgggattgtaatgtcaatccacacccacaggaaaatgttgtcgaaaagcgtgtaa

SEQ ID NO: 482567 - DNA, 1902 bp, Shigella sonnei
atgaaactacagaactcttttcgcgactatacggcagagtccgcgctgtttgtgcgccgggcgctggtcgcctttttggggattttgctgctgaccggcgtgcttatcgccaacctgtataatctgcaaattgttcgctttaccgactaccagactcgctctaatgaaaaccgcattaagctggtgcctatcgcgcccagccgcggcattatctacgaccgtaatggtatccctctggccctcaaccgcactatctaccagatagaaatgatgccagagaaagtcgataacgtgcagcaaacgctggacgctttgcgcagcgtggttgatctgaccgatgacgatattgctgcattccgaaaagagcgcgcacgttcacaccgtttcacctctattccggtgaaaactaacctgaccgaagtacaagtagctcgctttgccgtcaatcagtaccgttttccgggtgtcgaagttaaaggctataaacgtcgttactatccttacggttcggcgttgacccacgtcatcggctatgtgtcgaaaatcaacgataaagacgtcgaacgcctgaataatgacggcaaactggccaactatgcggcaacgcatgatatcggtaagctgggcattgagcgttactatgaagacgtgctgcacggtcagaccggttatgaagaggttgaagttaacaaccgtgggcgtgttatccgccagttaaaagaagtaccaccgcaagccggacacgatatttacctgacgctggatctcaaactccagcaatatattgaaacgctgctggcgggtagccgcgcagctgtggttgtcaccgatccgcgtacaggtggggtgctggcgctggtttccacgcctagttatgacccaaacctgtttgttgacggtatctccagcaaagattattccgccttgttgaacgccccgaatacaccgctggtgaaccgcgccacacagggggtttatcctcccgcgtctacagttaaaccctatgtggcggtttcggcattgagcgccggggtgatcacgcgcaatacgacgctgtttgacccaggctggtggcaactgccaggttcggaaaaacgttatcgtgactggaaaaaatggggccacgggcgtctgaatgtcacaagatcgctggaagaatctgcggataccttcttctatcaggtggcctacgatatggggatcgatcgcctctccgaatggatgggtaaattcggttatggtcattacaccggtatcgacctggcggaagaacgttccggcaacatgcctacccgcgaatggaaacagaaacgctttaaaaaaccgtggtatcagggtgacaccattccggttggtatcggtcagggttactggacagcgaccccaatccagatgagtaaggcactgatgatcctgattaatgacggtatcgtgaaggttcctcatttgctgatgagcaccgccgaagacggcaaacaggtgccatgggtacagccgcatgaaccgcccgtcggcgatattcattccggttactgggagctggcgaaagacggtatgtacggtgttgctaaccgccctaacggtacggcgcataaatactttgccagcgcaccgtacaaaattgcggcgaaatccggtaccgctcaggtcttcggtctgaaagcgaacgaaacctataatgcgcacaaaattgccgagcgtttacgtgaccacaaactgatgaccgcctttgcgccatacaacaatccgcaagtggctgtcgccatgattctggagaacggtggtgcgggtccggcggttggtacactgatgcgccagatcctcgaccacattatgctgggtgataacaacaccgatctgcctgcggaaaatccagcggttgccgcagcggaggaccattaa

SEQ ID NO: 482568 - DNA, 468 bp, Shigella sonnei; identical to SEQ ID NO: 26948

SEQ ID NO: 482569 - DNA, 318 bp, Shigella sonnei; identical to SEQ ID NO: 459634

SEQ ID NO: 482570 - DNA, 477 bp, Shigella sonnei
atggtctttacagcggtcatgcgcccccccctgaccgcgcgcggtattgagcaagcgcaaaatctgcatacgctgctacatggtgtttcctttgatctggttttatgcagtgaactggaacgggcacagcataccgcacgactggttctcagtgaccgccagctccccgtgcaaatcatccctgaactcaacgaaatgttttttggcgactgggagatgcgacatcatcgcgacctcatgcaagaagatgccgaaaactatagcgcgtggtgcaatgactggcagcatgcaatccccacgaacggtgaaggatttcaggcattttcgcaacgtgtggaacgctttatcgcaaggcttagtgaatttcagcactatcagaatattttagtcgtcagccatcagggtgtactgagtctgttaatcgcccgtttaattggcatgcctgccgaggctatgtggcattttcgcgttgactag

SEQ ID NO: 482571 - DNA, 642 bp, Shigella sonnei
atgaaatctttacaggctctgtttggcggcacctttgatccggtgcactatggtcatctaaaacccgtggaaacgctggcgaatttgattggtctgacgcgggtcacaatcatccctaataatgttcctccgcatcgtccccagccggaagcgaacagcgtgcagcgtaaacacatgcttgaactggcgattgccgacaagccattatttactcttgatgaacgcgagctaaagcgcaatgccccctcttacactgcgcaaacactgaaagagtggcggcaggaacaaggaccggacgtgccgctggcgtttattattggtcaggattcactgctgacctttccgacctggtacgaatacgaaacgatactcgacaatgcacatttgatcgtctgtcggcgtccaggttacccacttgaaatggcgcaaccgcaataccagcaatggctggaagatcatttgacacataacccggaagatcttcaccttcagcctgccggtaaaatttatctggctgaaacgccgtggtttaacatctcggcgaccatcatccgcgaacgtttgcaaaacggtgaatcgtgtgaggatttattgccggaaccggtactgacttacattaaccaacaaggcttgtatcgctga

SEQ ID NO: 482572 - DNA, 1032 bp, Shigella sonnei
atgattcggttgtacccggaacaactccgcgcgcagctcaatgaagggctgcgcgcggcgtatcttttacttggtaacgatcctctgttattgcaggaaagccaggacgctgttcgtcaggtagctgcggcacaaggattcgaagaacaccacactttttccattgatcccaacactgactggaatgcgatcttttcgttatgccaggctatgagtctgtttgccagtcgacaaacgctattgctgttgttaccagaaaacggaccgaatgcggcgatcaatgaacaacttctcacactcaccggacttctgcatgacgacctgctgttgatcgtccgcggtaataaattaagcaaagcgcaagaaaatgccgcctggtttactgctcttgcgaatcgcagcgtgcaggtgacctgtcagacaccggagcaggctcagcttccccgctgggttactgcgcgcgcaaaacagctcaacttagaactggatgacgcggcaaatcaggtgctctgctactgttatgaaggtaacctgctggcgctggctcaggcactggagcgtttatcgctgctctggccagacggcaaattgacattaccgcgcgttgaacaggcggtgaatgatgccgcgcatttcaccccttttcattgggttgatgctttgttgatgggaaaaagtaagcgcgcattgcatattcttcagcaactgcgtctggaaggcagcgaaccggttattttgttgcgcacattacaacgtgaactgttgttactggttaacctgaaacgccagtctgcccatacgccactgcgtgcgttgtttgataagcatcgggtatggcagaaccgccggggcatgatgggcgaggcgttaaatcgcttaagtcagacgcagttacgtcaggccgtgcaactcctgacacgaacggaactcaccctcaaacaagattacggtcagtcagtgtgggcagagctgaaagggttatctcttctgttgtgccataaacccctggcggacgtatttatcgacggttga

SEQ ID NO: 482573 - DNA, 582 bp, Shigella sonnei
gtgcgatatctggcaacattgttgttatctctggcggtgttaatcaccgccgggtgtggctggcatctgcgtgataccacgcaggttccttccactatgaaggtcatgatcctggactcaggcgatccgaacgggccattaagccgtgcagtgcgtaaccagttacgtctgaatggtgtcgagttgcttgataaagaaaccacgcgtaaggacgttccatccctgcgtttgggtaaagtgagcatcgcgaaagataccgcatcggtattccgtaacggtcaaacagcagagtatcagatgatcatgacggtgaatgcgaccgtgttgatccccggccgtgatatctacccgattagcgccaaagtcttccgttcgttctttgataacccgcaaatggcgttagcgaaagataacgaacaagacatgatcgtaaaagagatgtacgaccgtgctgccgaacagctgattcgtaagctgccaagcatccgtgctgcggatattcgttccgacgaagaacagacgtcgaccacaacggatactccggcaacgcctgcacacgtctccaccacgctgggtaactga

SEQ ID NO: 482574 - DNA, 2583 bp, Shigella sonnei
atgcaagagcaataccgcccggaagagatagaatccaaagtacagcttcattgggatgagaagcgcacatttgaagtaaccgaagacgagagcaaagagaagtattactgcctgtctatgcttccctatccttctggtcgactacacatgggccacgtacgtaactacaccatcggtgacgtgatcgcccgctaccagcgtatgctgggcaaaaacgtcctgcagccgatcggctgggacgcgtttggtctgcctgcggaaggcgcggcggtgaaaaacaacaccgctccggcaccgtggacgtacgacaacatcgcgtatatgaaaaaccagctcaaaatgctgggctttggttatgactggagccgcgagctggcaacctgtacgccggaatactaccgttgggaacagaaattcttcaccgagctgtataaaaaaggcctggtatataagaagacttctgcggtcaactggtgcccgaacgaccagaccgtactggcgaacgaacaagttatcgacggctgctgctggcgctgcgataccaaagttgaacgtaaagagatcccgcagtggtttatcaaaatcactgcttacgctgacgagctgctcaacgatctggataaactggatcactggccagacaccgttaaaaccatgcagcgtaactggatcggtcgttccgaaggcgtggagatcaccttcaacgttaacgactatgacaacatgctgaccgtttacactacccgcccggacacctttatgggttgtacctacctggcggtagctgcgggtcatccgctggcgcagaaagcggcggaaaataatcctgaactggcggcctttattgacgaatgccgtaacaccaaagttgccgaagctgaaatggcgacgatggagaaaaaaggcgtcgatactggctttaaagctgttcacccattaacgggcgaagaaattcccgtttgggcagcaaacttcgtattgatggagtacggcacgggcgcagttatggcggttccgggtcacgaccagcgcgactacgagtttgcctctaaatacggcctgaacatcaaaccagttatcctggctgctgacggctctgagccagatctttctcagcaagccctgactgaaaaaggcgtgctgttcaactctggcgaattcaacggtcttgaccatgaagcggccttcaacgccatcgccgataaactgactgcgatgggcgttggcgagcgtaaagtgaactaccgcctgcgcgactggggtgtttctcgtcagcgttactggggcgcgccgattccgatggtgacgctggaagacggtaccgtaatgccgaccccggacgaccagctgccggtgatcctgccggaagatgtggtgatggacggcattaccagcccgattaaagcagatccggagtgggcaaaaactaccgttaacggtatgccagcgctgcgtgaaaccgacactttcgacacctttatggagtcctcctggtactatgcgcgctacacttgcccagagtacaaagaaggtatgctggattccgaagcggctaactactggctgccggtggatatctacattggtggtatcgaacacgccattatgcacctgctctacttccgcttcttccacaaactgatgcgtgatgcaggcatggtgaactctgacgaaccagcgaaacagttgctgtgtcagggtatggtgctggcagatgccttctactatgttggcgaaaacggcgaacgtaactgggtttccccggttgatgctatcgttgaacgtgacgagaaaggccgtatcgtgaaagcgaaagatgcggcaggccatgaactggtttataccggcatgagcaaaatgtccaagtcgaagaacaacggtatcgacccgcaggtgatggttgaacgttacggcgcggacaccgttcgtctgtttatgatgtttgcttctccggctgatatgactctcgaatggcaggaatccggtgtggaaggggctaaccgcttcctgaaacgtgtctggaaactggtttacgagcacacagcaaaaggtgatgttgcggcactgaacgttgatgcgctgactgaagatcagaaagcgctgcgtcgcgatgtgcataaaacgatcgctaaagtgaccgatgatatcggccgtcgtcagaccttcaacaccgcaattgcggcgattatggagctgatgaacaaactggcgaaagcaccaaccgatggcgagcaggatcgcgctctgatgcaggaagcgctgctggccgttgtccgtatgcttaacccgttcaccccgcacatctgcttcacgctgtggcaggaactgaaaggcgaaggcgatatcgacaacgcgccgtggccggttgctgacgaaaaagcgatggtggaagactccacgctggtcgtggtgcaggttaacggtaaagtccgtgccaaaatcaccgttctggtggacgcaacggaagaacaggttcgcgaacgtgctggccaggaacatctggtagcaaaatatcttgatggcgttaccgtgcgtaaagtgatttacgtaccaggtaaactcctcaatctggtcgttggctaa

SEQ ID NO: 482575 - DNA, 483 bp, Shigella sonnei
atgaacaaggttgctcaatattaccgtgaactggtcgcgtcactgagcgaacgcctgcgcaatggcgaacgtgatatcgacgcactggtggaacaggcgcgcgagcgcgtaataaaaacaggggagttaacgcgaaccgaggtcgatgagctgacgcgagctgtaagacgtgacctggaagagttcgccatgagctatgaagagagcctgaaagaagaatctgacagcgtctttatgcgggtgattaaagaaagcttatggcaggagctggcagatatcaccgataaaacgcagcttgaatggcgcgaagttttccaggacctcaatcatcatggggtttatcacagcggagaagtggtcgggctgggaaatctggtctgcgagaaatgtcacttccatctcccgatctacacaccggaagtgctgacgctatgcccgaaatgtggtcatgaccagttccagagacgcccgtttgagccgtaa

SEQ ID NO: 482576 - DNA, 978 bp, Shigella sonnei
atggtttttacgtcaagttgctgcgataatttatcaatagatgagattatcgaacgtgctgaaaaaggcgattgcgaggctcaatatattgttgggttttattataatcgcgatagcgcaattgactctccggacgacgaaaaggccttttactggctgaagctggccgctgagcaaggtcattgtgaagcacagtattccttagggcaaaagtataccgaggataaaagccgtcataaagataatgagcaagccatcttctggctgaaaaaagctgccctacaaggccatactttcgcttccaacgcccttggctggacactggatcgtggagaagcccccaattataaagaagcggttgtctggtatcagatagccgcggagagcggaatgtcttatgcgcaaaataatcttgggtggatgtacagaaatggcaacggagtcgcaaaagactatgcgctggcatttttctggtacaaacaagctgcattacaaggccatagtgacgcgcaaaacaatctggccgatctttatgaagacggaaaaggcgttgctcaaaacaagacactcgccgcattctggtatttgaaaagcgcacagcagggtaatcggcacgcccagtttcaaattgcatgggattataacgctggcgaaggggtggaccaggactataagcaagcgatgtactggtatctgaaggctgccgctcaggaaagcgtcggcgcttacgtcaacatcggttatatgtataaacacggacaaggcgttgagaaagattatcaggctgcctttgaatggtttacgaaagccgctgaatgcaatgacgccactgcctggtataacctggccattatgtatcactacggagaaggaagacctgtcgatctccgacaggctctcgacctgtatcgtaaagttcagtcatccggaaccagagatgtcagtcaggaaattcgtgagactgaagatttactgtag

SEQ ID NO: 482577 - DNA, 708 bp, Shigella sonnei
atggacatggggtcgcaaaaaatattgtttgcactttccactccgatggaaatacgcaatgaatgctgtttaccttcgcattcatcccccaaaatgtatttaggtacatgcttttttgacctttcttcctcatggggaattgatgaccgtgatgacctgctgcgcacaattcaccgaatgatcgataacggtcatgccgctcggttggcagggttttatcaccgctggtttcgttattcgccatgtgaatggcgtgactatcttgctgaactaaatgagcaaggtcaggcttatgcgcaatttgtcgccagcacagccgaatgctgtggtgagggaggaattaaagcatgggattatgtccggatgggttttttaagtcgaatgggcgtacttaataactggttgagtgaagaagaaagtctatggatccagtcgcgtattcatctacgggctctacgttattatagtaactggcggcaatactttgccggttatacctttggtcggcaatattggcagtctcccgaagatgatcatctgcctttattacgcgaattcttagctcgtaaagaatacgacgattccggcaatgatatgttttatcaattatttgccagtgatgatgcgtattaccctgccttgtcctggcaaccactggctgactaccccacatgcccggaaacgcttaaggatatgagcgacctatga

SEQ ID NO: 482578 - DNA, 1428 bp, Shigella sonnei
atgaaaaattgctggaagatcctcgaaatagaggaaacgactgacgtcgatattatccgccgcgcttatctggcgctgttactgtcctttcatccagaaaccgatccgcagggttttaaacaacttcgtcaggcgtatgaggaggcgctccggattgcgcagtcgcctgctaaatctgtttggcaaccagaagaatatgaggtagcagaacatgaaattctgctcgcctttcgcgcgttacttgcctctgatagcgaacgttttctgccctccgcctggcagcgattcattcagcaattaaattattgctcgatggaagagattgatgaattacgctggtcgctgtgcacaatcgccatgaacactgcccatttatccttcgagtgcgtggtgttattagcagaaagattgcggtggttgcaggaggaaaacgtcggggaaatagacgaagaagaactggaatcctttttatatgccattgcgaaggggaatgtttttaacttccagaccattctgcatctgcccgttgccgtgcaaaatgacaccatcgatttttaccaaatgttcgctcggatttggtcatcgcatccagaatggctgacattgtatttagcgcaacatcgcgcagtgatcatccccgatgatgcaaaactgcacagaaatttactccgctggtatagcgcaggtcgcctggatatccccgaacttctggattacgcccggtcgtggcgggaagctgaacctgataatgaagatgcgcgttattatgaatacgcgcaacgcgtctattgtggagaaggcgaaagcttgctggcagaactttgtgactactggcgcgagtatccctccacccaggcggatgctttaatattgcaatggtgccgtcagcatcgggtcgattattacccgttagtggtgatgatgattgaagctcgtgaactggttaacgatcagggtaaacagctactttatgtccccggcgacagcgcccgtacgcgttttcatttatacgaaatactcagcgatgaaaaactctctgcgctggggcgttcactggtcgagatggttttgcacaaaggacgtaagccgcggatctcactcacgcgtgatacagaacatcccttatggccattatatttagttgccaaacaattagtgcaggccagccaaccgacagaagaatcattaatgccgattgtgagccgccttgatgcagaagatcgttgtccactggaagcattaattattcgtcgattattaattcaggcggcgaattttaccggtcaggaaaccgtcgagccggagccgcaaccgcagccaatgcccgttgacgatggcgggctgggctgtctgggcgtcatcaaaattattttctacatttttatctttgccggtttgataggaaaaatactccatctcttcgggtga

SEQ ID NO: 482579 - DNA, 555 bp, Shigella sonnei
atgaataaaaaatcaatgtatatattcgcaatttttatagttgcagcaattacctgtattagccaacccaagaaaacgacgttgcgtgataaagccatggtgaattatgcctttgattatttaagatcaccaggcagtctaccgttaaccacggcagccacggagctttccgcgattcatggtcactcaacatcgcaatatcgccttggcgaattttatcttcatggtagcgacggtaaaccactggattatacacaggcgagatactggtatgagcaatcagcagaacaggaaaatccgcgcgcacaaagcaaactggggtggatctacctgaaaggcctgggagtcaaacccgatacccgtaaagcaattctctggtataaggaagcagctgaacaagggtatgctcatgctcaatatactttgggtttgatctacagaaatggcactggtattaatgttaaccattatgaatctcaaaaatggttaaaactggccgccaaacaacattacaaaaatgcggaaagattacttgccggacttcccgcacattaa

SEQ ID NO: 482580 - DNA, 708 bp, Shigella sonnei
atgaataaggaagaacaatatcttctttttgcgctttctgcgcccatggaaatacttaatcagagttgcaaacccgcgcatgactcgccaaaaatgtatactgggataaaagaattcgatctctcatcatcctggggaataaataatcgtgatgatttaattcagactatttatcagatgactgatgatggtcatgccaatgatttagctggcttatatctgacatggcaacgctcttcccctgaagagtggaaagcattaattgctggtggctcggagagagggttgatttatacccaattcgttgcccaaaccgctatgtgctgtggagaagggggaatcaaagcctgggattatgttcgaatggggtttctgtcacgggtcggtgtgctcaacaactggctgacggaagaagagagtttatggctgcaatcgcgcgtctatgcacgagctcaccattactatcacagctggatgcactatttttctgcctattcactagggcgtctctactggcaatcttctcagtgcgaagacaacgcttcgctacgcgaggcgctaaccctgtacaaatacgatagcgccgggagtcggatgttcgaagagctggcagcgggaagcgaccgtttctatgccacgcttccctggcaaccattaactgtccagcctgaatgcccggtaacgcttaaggatgtgagcgacctatga

SEQ ID NO: 482581 - DNA, 1452 bp, Shigella sonnei
atgaaaacatgttggcaaatcctcgaaattgaaagcacgacgcaaatagacattatccgccaggcttatcttgctcgcttaccgttgtgtcatcccgaaaccgatccgcaggggtttaaagcattacgccaggcctatgaagaggcgctgcgactggcggtaaatcctgtcgaggaagcagatgatgaagaaaaagatgccaccgctgaacatgaaatactacgtgcattcaggacattactggattcagaaagtgatcgttttcagccctccgcctggcagaaatttattcagcaattaaatacctggaacatggaggatgtcgatcaattacgctggccgctgtgtgcaatcgctatagaagcgcgatatctttcattaaattgtgcttctttgttggcagagcgtttgaactggcattcgtttaatgacagcgaaggaatggatgaggaagaaagggaggcttttcttgaggccattcaggctggtgattgtttcgatttccttagccttctggaatatcccgtcgcgttacagaaccagactgttgaatattacttcgcgctggaacgttgctgccgttaccatcctgactatgtcactgcgtttttggcgatggaaggaccgtggttcattcctgatgatgcaaagttacatcgcaaactgttgcgctggtacagctcggtgcaaacaggtatggcggaactcattcctgtagccaaacagtggcaagcggaagaaccagaaagcgaagatgcccggtattaccagtgtgcacaacgtttgtactgcggcgagggggaaagcctgcttgccgatctctgcgcgtactgggaaagttacccatctacacaagctgataatttgttgttgcagtggagcaagcgtcattgcccggattatttcgcgttattagtgatggttatcgaagcgcgaagcatggtagatgcgcaaggtaaaccgttgaaatatgttcctggtgagagcgcccggacgcggctgttatgggcggagattttacatagcggaaaattatcgccgttaggtcaatcgtttattgagtcgttattcttcaagcgcaaagcatgggcgtggtggaaatcgagagtcggtagcgagacagagcaagattcaccgttactggatttgtatcgggtagcggaacaggttgtgctggaagcgttcccgaaacaagagatgctggcccgtcttaatacaaggctggaaggtggagatgctcatccattagaggccattatcacccagatgctgttgacgaaagtgaaactcgagccggaggatgaagatgtcgatgagccaacacctgaaaaccatgaagaaaaaaatgatgaggatgaaaaaccacagagcattaccagtattatcaaaatcagcttaacggtgctgatgataggttatgcgctcggaaaaatcgcgatgttgtttagctga

SEQ ID NO: 482582 - DNA, 1671 bp, Shigella sonnei
atggataatgcagaactcgccattggtatcgatctcggcactaccaatagtttaattgccgtctggaaagacggtgccgcgcaattaattccaaataagttcggtgaatatttaacaccatccataattagcatggatgaaaataatcatattttagtcggaaaaccggctgtatcacggcgtacttcgcatccggataaaacggcagcgttatttaaacgtgcaatgggcagtaataccaactggcggttaggcagcgacacatttaacgcgccagaactgtcctctttggtattacgctcattaaaagaagatgccgaagaatttctgcaacgtccgattaaagatgtggtgatctccgttccggcttatttcagcgatgaacaacgcaagcatacccgtttagcagcggagttagccgggttaaatgcggtacgcttaattaatgaacccacagcagctgcgatggcatatggcctgcatacgcaacaaaatacccgctcgctggtttttgatctcggtggcggcacgtttgacgtcacggtgctcgaatacgccacgccggtgattgaagttcacgcctccgctggcgataacttcctcggtggcgaagattttacccatatgttggtcgatgacgttttaaagcgcgcggatgtcgccaggaccacgcttaacgagagtgaactggcagccttgtacgcctgtgtggaagcggcaaaatgtagcaatcaatcgccattgcacattcgctggcagtaccaggatgaaacgcgggagtgcgaattttacgagaacgaactggaagatttgtggttgccgctgctcaatcgcttgcgagtgccgattgaacaggcgttgcgcgatgcacgtctgaagccgagtcaaatcgacagtctggtgctggttggcggcgcgtcacaaatgccgctggtgcagcgaatcgccgtgcgtctgtttggcaaattaccgtatcaaagttacgacccgagcaccattgtcgcgctgggcgcagcaatccaggccgcctgccgcttacgcagtgaagatattgaagaggtgatcctcactgatatttgcccttactcgttgggcgttgaagttaaccgccagggcgtttccggcattttctcgccaattattgaacgaaacaccacagtacccgtgtcgcgtgtagaaacttactcgaccatgcacccggaacaggattctattacggttaacgtctatcagggagaaaaccacaaagttaaaaataacattctggttgaatccttcgatgtgccgttgaagaaaaccggggcttatcagtcgattgatattcgctttagttatgatatcaacggcttgcttgaagttgacgtgcttctggaagatggcagcgttaagtccagagtcattaatcatagcccggtaacattgagcgcgcagcagattgaagagagtcggacgcggttatccgcattgaaaatttatccgcgcgatatgctaatcaaccgcacctttaaggccaaactggaagagttgtgggcgcgggcgctgggtgacgagcgagaagagattggccgggtgatcaccgattttgatgcggcgttgcagtcaaacgatatggcccgcgtcgatgaagttcgtcgacgggcgagcgattatttggctattgagatcccttaa

SEQ ID NO: 482583 - DNA, 936 bp, Shigella sonnei
atggcactgccaattctgttagattgcgacccaggtcatgacgacgctatcgcaatagttctcgccctcgcctcaccagagcttgatgtcaaagcaattacgtcttccgccggaaaccagacaccagaaaaaaccttacgcaatgttctgcgtatgctgaccttgcttaatcgcaccgatattccggtagcaggcggcgcggtaaaaccgttaatgcgtgagttgattatcgcggacaatgtgcacggcgaaagcggtctggatggcccggcattaccggaaccgacgttcgcaccgcaaaactgtacggcggtagagctgatggcgaaaacgctgcgcgaaagtgcggaacctgtcacgattgtgtctaccggaccgcaaactaacgttgccttgctgctcaatagccatccggaactgcatagcaaaattgcccgtatcgtgattatgggcggcgcaatggggcttggtaactggacgcctgcggctgaatttaatatttacgttgacccggaagcggcagaaattgtcttccagtcagggatcccagtggtgatggccggtctggatgttactcacaaagcacaaatccacgttgaagacaccgagcgtttccgcgcgattggcaaccctgtttcaaccattgttgccgaactgctggatttcttcctcgaatatcataaagacgaaaaatggggctttgtcggtgcaccgctgcatgacccatgcaccatcgcctggctgttgaaacccgagttgtttaccactgttgagcgctgggttggcgtggaaacacaggggaaatatagccagggtatgacggttgttgattattattatctgactggcaataaaccgaatgccactgtaatggtcgatgttgatcgtcagggctttgttgatttactggctgatcgtctgaaattttacgcttaa

SEQ ID NO: 482584 - DNA, 726 bp, Shigella sonnei
atgattaccctgaaaaatgtttcaaaatggtatggtcactttcaggtgctgaccgactgctcaaccgaagtgaaaaaaggcgaagtggtggtggtttgcggcccgtctggttccggcaaatcaacgctgattaaaaccgtcaacggcctcgaaccagtgcagcaaggtgaaatcaccgtcgatggtatcgtggttaatgacaagaaaaccgatctggcaaagctgcgttcccgcgtcgggatggtattccagcatttcgagctgttccctcatctgtcgattatcgaaaacctgaccctggcgcaggtgaaagtgcttaaacgcgataaagcgcccgctcgtgaaaaagcattgaaattgctggagcgcgtgggactttccgcacatgccaataaatttccggcgcagctttccggcggtcagcagcagcgtgtggcaatcgctcgcgcattgtgtatggatcctattgcgatgctgttcgacgaaccgacatcggcgctggatccggagatgatcaacgaagtgctggacgtgatggtggaactggcgaacgaaggaatgaccatgatggtggtgacccacgaaatgggctttgcccgcaaagtggcgaatcgggtgatctttatggacgagggtaaaattgtcgaagactcgccgaaagacgctttcttcgatgatccgaaatcggaccgcgcgaaagacttcctcgcgaaaatcctgcattaa

SEQ ID NO: 482585 - DNA, 675 bp, Shigella sonnei
atgtacgagtttgactggagttccattgtcccttccctgccatatctgctcgacgggctggtgatcacgctgaaaatcaccgtcacggcagtcgtgattggtattttgtggggcaccatgctggcggtgatgcgcttgtccagctttgcgcccgtagcgtggtttgccaaagcctacgttaacgtattccgctcgattcctttagttatggttttgctgtggttttacctgatcgtgccaggttttctgcaaaacgtgctgggattatcaccaaaaaatgatatccgtttaatttcggcgatggtggcgttttcgatgtttgaagcggcctactattcagagattatccgtgctggtattcaaagtatttctcgtggtcagtcgagcgccgcgctggcgttgggaatgactcactggcagtcgatgaaactgattattctgccgcaggcgttccgcgcgatggtgccgcttctgctcactcagggcatcgtactgttcctggatacctcactggtgtatgtgttatctctggccgatttcttccgtaccgcctcaaccattggtgagcgtgatggtacgcaggttgagatgatcctgtttgccggatttgtttatttcgttattagtcttagcgcgtcgttgttggtcagctacttgaaaagaaggacagcataa

SEQ ID NO: 482586 - DNA, 741 bp, Shigella sonnei
atgtctatagactggaactggggtatttttttacaacaagccccgttcggcaacaccacctatcttggttggatctggagtggttttcaggtgacgatcgctttgtcgatctgcgcctggattatcgctttcctcgtcggttcatttttcggcattttacgtaccgttccaaaccgttttctctccggtctgggtacgttgtatgtcgaactgttccgcaacgtgccgttgattgtgcaattctttacctggtatctggtgatcccggagctgttgccggagaaaatcggcatgtggtttaaggccgagctggatcccaatattcagtttttcctttcatccatgctctgcctggggctgtttaccgccgcccgtgtttgcgaacaggtacgcgccgccattcagtcgttgccgcgtgggcaaaaaaatgccgcgctggcgatgggcctgacgctaccgcaggcttatcgatacgtactgctgcctaatgcttatcgcgttatcgtcccgccgatgacttccgagatgatgaacctggtgaaaaactccgccatcgcctcgactattggtctggtggatatggcggcgcaggcgggtaaattgcttgattactcagcccacgcctgggagtcgtttaccgctattacgctggcgtatgtgttgattaacgcggttatcatgctggtaatgacgctggttgaacgtaaagttcgcctgcctggcaacatggggggcaaataa

SEQ ID NO: 482587 - DNA, 909 bp, Shigella sonnei
atgcaattacgtaaacctgccacagcaatcctcgccctggcgctttccgcaggactggcacaggcagatgacgccgccccggcagcaggcagtacgctggacaaaatcgccaaaaacggtgtgattgtcgtcggtcaccgtgaatcttcagtacctttctcttattacgacaatcagcaaaaagtggtgggttactcgcaggattactccaacgccattgttgaagcagtgaaaaagaaactcaacaaaccggacttgcaggtaaaactgattccgattacctcacaaaaccgtattccactgctgcaaaacggcactttcgattttgaatgtggttctaccaccaacaacgtcgaacgccaaaaacaggcggctttctctgatactattttcgtggtcggtacgcgcctgctgaccaaaaagggcggcgatatcaaagattttgccgacctgaaagacaaagccgtagtcgtcacttccggcactacctctgaagttttgctcaacaaactgaatgaagagcaaaaaatgaatatgcgcatcatcagcgccaaagatcacagtgactctttccgcaccctggaaagcggtcgtgccgttgcctttatgatggatgatgccctgctggccggtgaacgtgcgaaagcgaagaaaccagacaactgggaaatcgtcggcaagccgcagtctcaggaagcctacggttgcatgttgcgtaaagacgatccgcagttcaaaaagctgatggatgacaccaccgcgcaggtgcagacctccggtgaagcggaaaaatggtttgataaatggttcaaaaatcccattccgccgaaaaacctgaacatgaatttcgaactgtcagacgaaatgaaagcactgttcaaagaaccgaatgacaaggcactgaactaa

SEQ ID NO: 482588 - DNA, 1878 bp, Shigella sonnei
atgtctgcatcttcggttaagccgttaaatgttcaattacccgcaataacccttatcctttttgcactctgtattgggatattttgttatctcgcacaatggatgagttatgaagaggtcgatcaatccgcacttatccatctcggcgcaaacgttgcgcctcttactttgtcgggtgaaccctggcgcttattgagcagtatctttctgcacagtagtgtttctcatctgctgatgaatatgtttgcattcctggtcgtgggaggcgtggcggaacagattctggggaaatggcgactcctgattacctggttattctccggcgtctttggtgggctcatcagcgcctgttatgcgttacgcgaaagtgagcagatagtcatcagcgttggggcatccggggcgattctgggaatagctggtgcagcgatagcaacacagtttgcttcaggtacgggcacataccataaaaaccagcggcgagtatttcctctgttgggtatggtggcgctgacactgttgtacggtgcccggcaaacaggaatagataacgcttgccacattggcggcctgattgcgggtggcgcgttgggttggctgagcgcgcgtttatctgggcaaaaccgactcgttacggaaggcgggattattgttgcgggcagtcttcttctgaccggggctatctggcttgcgcagcagcagatggatgagtcagttttacaggtcaggcaaagcctgcgtgaagcgttttatccacaggagattgaacaagagcgacggcaaaaaaagcagcagttagcggaggaacgcaacgccctcagggaaacattatccgctccggtaagtcgtgaacaggccagtggtgatttgctcgctgagattgccgatatccatgatatggcgatcagtcgggatggtaatatgttgtatgccgcaattgaaaacacgaacagcattgttgttttcgacctcggacaaaagaaaatcctgcatacctttacagcgcccatagcgaaagaaaagtcagtcaaacattgtggtggctgtaaagatcagggcgtcagatcgctggcattaagcccggatgaaaagttgatttatgcgacttcatttgaagcgaatgcgttatcggtcattaacgtggcgacaggggagattattcagtcgattaccaccggtgcacatcctgacagccttatcctctcgcgtgatggcacaaaagcctgggtgatgaatcgcaccagtaatagtgtgccagcgattgatctggtgacttatcagcatgtggcggatatcccgctggagaaatacgacgggacggggacgagcggtaaaccaggcgcctgggttatggcactttccccggatgaaagaacattactggttccgggagcaggcagaggtaacatcgtgcggatcaataccatcacgcatcagaaagaagactttcccgcaggtgatgcgcgtggaacgatatcggcgatgcgttttcgacctgaaaacggcgaggttatttttgccgatagtcaggggatttcacgtataagcgtaggggatcaacaagccagcattatgacgcaatggtgtagcaggagcgtttattccgttgagggtattagcccggacggtcaatatttagcgttggtgtcatatggcctgcaaggttatgtcatcctgctcaatattaatgccgggcagattattggcgtttatcctgccagctacgttaatcaccttcgtttttcagcggatggtagaaaaatatttgtcatggcgaagaacgggttgatccaaatggacaggacgcgctcgcttgatccgcaggcaattattcgtcatccccaatatggcaatgtggcttgtatccctgaaccgtaa

SEQ ID NO: 482589 - DNA, 1539 bp, Shigella sonnei
atggcttttgcctcattaattgaacgccagcgcattcgcctgctgctggcgttattattcggtgcctgcggaacgctggccttctctccttacgacgtctggcctgcggcgattatttcgttgatggggcttcaggcgttgacctttaaccgccgtccactccagtctgccgctattggcttttgctggggatttggcctctttggcagcggtattaactgggtctatgtcagcatcgcgacctttggcggaatgcctggcccggttaacatcttcctggtggtgctgctggcggcgtatttgtcgctgtataccggactgtttgctggcgtgctgtcgcgtctgtggccgaaaaccacctggctgcgcgtggcgattgccgcccctgctctctggcaagtgaccgagtttctgcgcggttgggtactgacaggcttcccgtggttacagttcggctatagccagattgatggcccgttaaaagggctggcaccgataatgggcgtggaagccattaacttcctgctgatgatggttagtggcctgctggcactggcgttggtcaaacgcaactggcgtccgctggtggtggccgtcgtgctgtttgccctacccttcccgctgcgttacatccaatggtttaccccgcaaccggagaaaaccattcaggtttcgatggttcagggcgatattccgcaatcactgaaatgggatggagatcagcttcttaatacgctgaagatttactacaacgcaacggctccgctgatgggcaaatcatcgttgattatctggccggagtcggcgataaccgatctggaaattaatcagcaaccgttcctcaaagcactggacggtgagttgcgcgataaaggtagctcgctggtaaccgggattgtcgacgcgcgtctcaataagcagaaccgctacgatacctacaacaccatcatcacactgggtaaaggtgcaccatacagctacgaatcagccgatcgctataacaaaaaccatctagtgccgtttggcgagtttgtcccgctggagtcgattctgcgtccgttagcaccgttctttgatctgccgatgtcgtcgttcagccgtgggccatatatccagccgccgctgtcggtaaatggtattgagcttactgcggctatttgctacgagatcattctcggcgagcaagtgcgcgataacttccgcccggataccgactatctgctgactatctccaacgatgcgtggtttggtaagtctattggtccatggcagcacttccagatggcgcgaatgcgtgcgctggagctggcgcgcccactgttgcgcagcaccaacaacggcattacggcggtgattggcccgcagggggaggttcaggcgatgatcccgcagttcacccgcgaggtgttgaccactaatgtgacaccgaccaccggactcacaccgtatgcacgtaccggcaactggccactgtgggtgctgacggcgctgtttggttttgccgctgtgttgatgagtctgcgagcacgtaaacgttga

SEQ ID NO: 482590 - DNA, 879 bp, Shigella sonnei
atgagcgacgacaattcacacagtagtgacacgataagcaacaagaagggatttttctccctgttactcagccaacttttccacggtgaaccgaaaaaccgtgacgaactgctggcgctgatccgtgattccgggcagaacgaccttatcgacgaagatacgcgcgatatgctcgaaggggtgatggacatcgcagaccaacgcgttcgcgacatcatgatcccccgctcccagatgattaccctgaaacgcaaccagacgctggacgaatgccttgatgtcatcatcgagtccgcccactcacgtttcccggtgattagcgaagacaaagatcacattgaagggattctgatggcgaaagacttgctgccgtttatgcgcagcgatgctgaagccttcagcatggacaaagtgttacgtcaggcggttgtcgttcctgaaagtaagcgcgtagaccggatgctgaaagagtttcgctctcagcgttaccacatggcgatcgtcattgacgaattcggtggggtttccggtctggtgaccattgaagacatcctggaactgattgttggtgagattgaagacgagtatgacgaagaagatgatatcgacttccgtcagctgagtcgtcatacctggaccgtgcgtgcactggcttccattgaagacttcaacgaagcgttcggcacccactttagcgatgaagaggttgacactatcggtggtctggtgatgcaggcatttgggcatcttccggcgcgtggcgaaactatcgacatcgacggttaccagttcaaagtggcgatggccgacagtcggcgtattattcaggttcatgtcaaaatcccggatgactcaccccagccgaagctggatgaataa

SEQ ID NO: 482591 - DNA, 468 bp, Shigella sonnei
atgagtcaggtgatcctcgatttacaactggcatgtgaagataattccgggttaccggaagagagccagtttcaaacatggctgaatgcggtgatcccgcagtttcaggaagaatcggaagtgactattcgcgtggtcgataccgccgaaagccacagtctgaatctgacctatcgcggtaaggataagccgaccaacgtgctctccttcccgtttgaagtgccgcctggcatggaaatgtcgctactgggcgatctggttatctgccgtcaggtggttgagaaggaagctcaggagcaaggcaaaccactggaggcgcactgggcgcatatggtggtgcacggcagtctgcatttgttaggttacgatcacatcgaagatgacgaagcagaagaaatggaagccctcgaaacagagattatgcttgctctgggctatgaggatccgtacattgccgagaaagaataa

SEQ ID NO: 482592 - DNA, 1080 bp, Shigella sonnei
atgttcagcttccggcggcatacagataagaggaacggtttgaacatagacactcgcgaaatcaccctggagccagcagacaacgcgcgtctgttgagcctgtgcggcccgtttgatgacaacatcaagcagctcgaacgccgtctcggcatcgagatcaatcgccgcgacaaccactttaaactgaccggccgtccgatttgcgtcaccgctgcggcagacattctgcgtagcctgtatgtcgatacagccccgatgcgcggtcagattcaggatatcgaaccggaacagatccaccttgcgattaaagaagcgcgagtactggagcaaagtgcggagagcgtgccggagtacggcaaagcggtcaatatcaaaaccaaacgcggcgtaattaagccgcgcacgccaaaccaggcgcagtacatcgccaatattctcgaccatgacattaccttcggcgttggcccggcgggtacgggtaaaacctacctggcagtggctgcggcagttgatgccctggagcgtcaggagattcgccgtattctgctgactcgtccggcggtcgaagccggtgagaaactgggcttcctgcctggcgatttaagccagaaagtagacccgtatctgcgcccactgtacgacgcgctgtttgaaatgctgggctttgagaaagttgagaaactgattgagcgcaacgttattgaagtcgcgccgctggcctatatgcgtggtcgtacgctgaacgacgcgtttatcattctcgatgagagccagaacaccaccatcgaacagatgaagatgttcctgacccgtatcggttttaactcaaaagcggttatcaccggcgacgtcacacagatcgacctgccgcgtaatactaaatcaggcttacgtcacgccatcgaagtgctggccgatgtcgaagagatcagctttaacttcttccacagcgaagacgtggttcgtcaccctgtggtggcgcgtatcgttaacgcctatgaagcctgggaagaagccgaacaaaaacgaaaagcggcgctggcggcagaacgcaagcgcgaagaacaggaacaaaaatga

SEQ ID NO: 482593 - DNA, 1425 bp, Shigella sonnei
atgaccaaaaaactccatattaaaacctggggctgtcagatgaacgagtacgattcatcgaagatggccgatctgctggatgccacccacggctatcaactgaccgacgtggcggaagaagcggatgtgctgctgctgaacacctgctcaatccgcgagaaggctcaggaaaaagtcttccatcagttgggtcgctggaaactgttaaaagagaagaatccagacctgattatcggcgtcggtggctgcgtggcatcgcaagaaggcgagcacattcgccagcgcgcccactatgtcgatattatttttgggccgcaaacgctgcaccgtctgccggagatgatcaactccgtgcgcggcgaccgcagcccggttgtagatatcagcttcccggaaatcgagaagtttgaccgtctaccggaaccgcgcgccgaagggccgaccgcgtttgtctccatcatggaaggctgcaataaatattgcacctactgcgtggtgccttacacccgtggtgaagaggtaagccgtccgtctgacgatattctgtttgagattgcccagcttgcggctcagggcgtgcgtgaagtcaacctgctcggtcagaacgtgaacgcctggcgtggtgaaaactacgacggctccaccggatcgtttgccgatctgctgcgtctggttgctgcgatcgacgggatcgatcgtattcgctttaccaccagccatccgatcgaattcaccgacgatatcatcgaagtgtatcgcgacacgccggagctggtgagcttcctgcatctgccagtacaaagcggttccgatcgcattctgaacctgatgggccgtactcacacggcgctggagtacaaagcgatcatccgtaaactgcgtgcggcgcgtccggatattcagatcagttctgacttcattgttggcttccctggcgaaaccaccgaagacttcgagaaaacgatgaagctgattgccgacgtcaatttcgacatgagctacagctttatcttctctgcacgtccgggtacaccagccgccgatatggttgatgatgttccggaagaagagaagaagcaacgtctgtatattctgcaagaacgtatcaatcagcaagcgatggcatggagccgccggatgctcggcaccacccagcgtattctggtagaagggacttcgcgtaagagcatcatggagctttccgggcgtaccgaaaataaccgcgtggtcaacttcgagggcacaccggatatgatcggtaaattcgtcgatgtagaaattaccgacgtctacccgaactctctgcgcggtaaagtggtgcgtactgaagatgaaatgggtctgcgcgtggcagaaacaccggaatcggtgattgcccgtacccgcaaagaaaacgaccttggcgtgggttattatcagccgtaa

SEQ ID NO: 482594 - DNA, 1176 bp, Shigella sonnei
atgacaaatcaaccaacggaaattgccattgtcggcggaggaatggtcggcggcgcgctggcgctggggctggcacagcacggattttcggtaacggtgatcgagcacgcagaacctgcaccgtttgtcgctgatagccaaccggacgtgcggatctcggcgatcagcgccgcatcggtatcattgcttaaagggttaggggtctgggatgcagtacaggctatgcgttgccatccttaccgcagactggaaacgtgggagtgggaaacggcgcatgtggtgtttgacgccgctgaacttaagctaccgttgcttggctatatggtggaaaacaccgtcctgcaacaggcgctgtggcaggcgctggaagcgcatccgaaagtaacgttacgtgtgccaggctcgctgattgcattacatcgagataatgatcttcaggagctggaactgaagggcggtgaaacgatccgcgcgaaactggtgattggtgccgacggcgcaaattctcaggtgcggcagatggcgggaattggcgttcatgcctggcagtatgcgcagtcgtgcatgttgattagcgtacagtgtgagaacgatcccggcgacagcacctggcagcaatttaccccggacggaccgcgtgcgtttctgccgttgtttgataactgggcatcgctggtgtggtatgactctccggcgcgtattcgccagttgcagaatatgaatatggcgcaattccaggcggaaatcgcgaagcatttcccgtcgcgtctgggttacgttacaccgcttgccgctggtgcgtttccgctgacgcgccgacatgcgttgcagtatgtgcagccggggcttgcgctggtgggcgatgccgcgcataccatccatccgctggcggggcagggggtgaatcttggttatcgtgatgtcgatgccctgattgatgttctggtgaatgcccgcagctacggtgaagcgtgggccagttatcctgtcctcaagcgttaccagatgcggcgcatggcggataacttcattatgcaaagtggtatggatctgttttatgccggattcagtaataatctgccgccgctgcgttttgtgcgtaatctcgggttaatggcggcagagcgtgctggcgtgttgaaacgtcaggcgctgaaatatgcgttagggttgtag

SEQ ID NO: 482595 - DNA, 1665 bp, Shigella sonnei
atgtgttcaatttttggcgtattcgatatcaaaacagacgcagttgagcagcgtaagaaagcactcgagctgtcacgcctgatgcgtcatcgtggcccggactggtccggtatttatgccagcgataacgccattctcgctcacgaacgtctgtcaattgttgacgttaacgcgggggcgcaacctctctacaaccaacaaaaaacccacgtactggcggtaaacggtgaaatctacaaccaccaggcattgcgcgctgaatatggcgatcgttatcagttccagacagggtctgactgtgaagtgatcctcgcgctgtatcaggaaaaagggccggaatttctcgacgacttgcagggcatgtttgcctttgccctgtacgacagcgaaaaagatgcctacctgattggtcgcgaccatctggggatcatcccactgtatatggggtatgacgaacacggtcagctgtatgtggcctcagaaatgaaatcgctggtgccagtttgccgcacgattaaagagttcccggcggggagctatttgtggagccaggacggcgaaatccgttcttattatcatcgcgactggttcgactttgatgcagtgaaagataacgtgaccgacaaaaacgagctgcgtcaggctctggaagattccgttaaaagccatctgatgtctgatgtgccttacggtgtgctgctttctggtggtctggattcctcaattatttccgctatcaccaagaaatacgcagcccgtcgcgtggaagatcaggaacgctctgaagcctggtggccccagttacactcctttgctgtaggtctgccgggttcaccggatcttaaagcagcccaggaagtggcaaaccatctgggcacggtgcatcacgaaattcacttcactgtacaggaaggtctggatgccatccgcgacgtgatttaccacatcgaaacttatgatgtgaccactattcgcgcttcaacaccgatgtatttaatgtcgcgtaagatcaaggcgatgggcattaaaatggtgctgtccggtgaaggttctgatgaagtgtttggcggttatctttacttccataaagcgcccaacgctaaagaactgcatgaagagacggtgcgtaaactgctggccctgcatatgtatgactgcgcgcgcgccaacaaagcgatgtcagcctggggcgtggaagcacgcgttccgttcctcgacaaaaaattccttgatgtggcgatgcgcattaacccgcaggataaaatgtgcggtaacggcaaaatggaaaaacacatcctgcgtgaatgttttgagtcatacctgcccgcaagcgtggcctggcggcagaaagagcagttctccgatggcgtcggttacagttggatcgacaccctgaaagaagtggcggcgcagcaggtttctgatcagcaactggaaactgcccgcttccgcttcccgtacaacacgccaacctcaaaagaagcgtatctgtaccgggagatctttgaagaactgttcccgcttccgagcgccgctgagtgcgtgccgggcggcccgtccgtcgcgtgttcttccgctaaagcgattgagtgggatgaggcgttcaagaaaatggacgatccgtctggtcgtgcggttggcgttcaccagtcggcgtataagtaa

SEQ ID NO: 482596 - DNA, 858 bp, Shigella sonnei
atggctaccaaactgcaggacgggaatacaccttgtctggcagctacaccttctgaaccacgtcccaccgtgctggtgtttgactccggcgtcggtgggttgtcggtctatgacgagatccggcatctcttaccggatctccattacatttatgctttcgataacgtcgctttcccgtatggcgaaaaaagcgaagcgtttattgttgagcgagtggtggcaattgtcaccgcggtgcaagaacgttatccccttgcgctggctgtggtcgcttgcaacactgccagtaccgtttcacttcctgcattacgcgaaaagttcgacttcccggttgttggtgtcgtgccggcgattaaacctgctgcacgtctgacggcaaatggcattgtcggattactggcaacccgcggaacagttaaacgttcttatactcatgagctgatcgcgcgtttcgctaatgaatgccagatagaaatgctgggctcggcagagatggttgagttggctgaagcgaagctacatggcgaagatgtttctctggatgcactaaaacgtatcctacgcccgtggttaagaatgaaagagccgccagataccgttgtattgggttgcacccatttccctctactacaagaagaactgttacaagtgctgccagagggaacccggctggtggattctggcgcagcgattgctcgccgaacggcctggttgttagaacatgaagccccggatgcaaaatctgccgatgcgaatattgccttttgtatggcaatgacgccagaagctgaacaattattgcccgttttacagcgttacggcttcgaaacgctcgaaaaactggcagttttaggctga

SEQ ID NO: 482597 - DNA, 1845 bp, Shigella sonnei
atgattaaaaaagcttcgctgctgacggcgtgttctgtcacagccttttccgcttgggcacaggataccagcccggatactctcgtcgttactgctaaccgttttgaacagccgcgcagcactgtgcttgcaccaaccaccgttgtgacccgtcaggatatcgaccgctggcagtcgacctcggtcaatgatgtgctgcgccgtcttccgggcgtcgatatcacccaaaacggcggttcaggtcagctctcatctatttttattcgcggtacaaatgccagtcatgtgttggtgttaattgatggcgtacgcctgaatctggcgggggtgagtggttctgccgaccttagccagttccctattgcgcttgtccagcgtgttgaatatatccgtgggccgcgctccgctgtttatggttccgatgcaataggcggggtggtgaatatcatcacgacgcgcgatgaacccggaacggaaatttcagcagggtggggaagcaatagttatcagaactatgatgtctctacgcagcaacaactgggggataagacacggggaacgctgttgggcgattatgcccatactcatggttatgatgttgttgcctatggtaatacaggaacgcaagcgcagacagataacgatggttttttaagtaaaacgctttatggcgcgctggagcataactttactgatgcctggagcggctttgtgcgcggctatggctatgataaccgtaccaattatgacgcgtattattctcccggttcaccgttgctcgatacccgtaaactctatagccaaagttgggacgccgggctgcgctataacggcgaactgattaaatcacaactcattaccagctatagccatagcaaagattacaactacgatccccattatggtcgttatgattcgtcggcgacgctcgatgagatgaagcaatacaccgtccagtgggcaaacaatgtcatcgttggtcacggtagtattggtgcgggtgtcgactggcagaaacagactacgacgccgggtacaggttatgttgaggatggatatgatcaacgtaataccggcatctatctgaccgggctgcaacaagtcggcgattttacctttgaaggcgcagcacgcagtgacgataactcacagtttggtcgtcatggaacctggcaaaccagcgccggttgggaattcatcgaaggttatcgcttcattgcttcctacgggacatcttataaggcaccaaatctggggcaactgtatggcttctacggaaatccgaatctggacccggagaaaagcaaacagtgggaaggcgcgtttgaaggcttaaccgctggggtgaactggcgtatttccggatatcgtaacgatgtcagtgacttgatcgattatgatgatcacaccctgaaatattacaacgaagggaaagcgcggattaagggcgtcgaggcgaccgccaattttgataccggaccactgacgcatactgtgagttatgattatgtcgatgcgcgcaatgcgattaccgacacgccgttgttacgccgtgctaaacagcaggtgaaataccagctcgactggcagttgtatgacttcgactggggtattacttatcagtatttaggcactcgctatgataaggattactcatcttatccttatcaaaccgttaaaatgggcggtgtgagcttgtgggatcttgcggttgcgtatccggtcacctctcacctgacagttcgtggtaaaatagccaacctgttcgacaaagattatgagacagtctatggctaccaaactgcaggacgggaatacaccttgtctggcagctacaccttctga

SEQ ID NO: 482598 - DNA, 1101 bp, Shigella sonnei
atgacccccgaacaccttccaacagaacagtatgaagcgcagttagccgaaaaagtggtacgtttgcaaagtatgatggcaccgttttctgacctggttccggaagtgtttcgctcgccggtcagtcattaccggatgcgtgcggagttccgcatctggcacgatggcgatgacctgtatcacatcattttcgatcaacaaaccaaaagccgtatccgcgtggatagcttccccgccgccagtgaacttatcaaccagttgatgacgacgatgattgcgggtgtgcgtaataatcccgttctgcgccacaagttgttccagattgattacctcaccacgctgagtaatcaggcggtggtttccctgctataccataagaagctggatgatgagtggcgtcaggaagcggaggccctgcgcgatgcactgcgcgcgcagaatctgaatgtgcatctgattggtcgggcaacgaaaaccaaaatcgagctggatcaagattacatcgacgagcgtctgccggtcgcagggaaagagatgatctaccgtcaggtagaaaacagctttacccagccgaacgcggcgatgaatattcagatgctggaatgggcgctggacgtaaccaaaggctcaaaaggcgatttactggagctgtactgcggcaacggtaacttttcattagcgctggcgcgcaattttgatcgggtattagccaccgaaatcgctaagccgtcggttgctgctgcgcaatacaacatcgcagctaaccatattgataacgtacaaattattcgtatggcggcagaagaatttactcaggcgatgaatggtgtgcgcgagtttaaccgcctgcaagggatcgacttaaagagttatcagtgcgaaaccatttttgtcgacccaccgcgcagcggtctggacagtgaaaccgagaaaatggtgcaggcgtatccgtgtattttgtacatctcctgtaacccggaaacgttatgcaagaatctggaaacattaagccagacgcacaaggtcgaacgtctggctctgtttgatcagttcccctacacgcaccatatggagtgcggcgtattactgaccgcgaagtaa

SEQ ID NO: 482599 - DNA, 360 bp, Shigella sonnei; identical to SEQ ID NO: 457978

SEQ ID NO: 482600 - DNA, 705 bp, Shigella sonnei
atgttcattctctggtatagtgccagcagtacttttggcaaggattcagacatcgtgatgggcataagagcgcaacaaaaagaaaaaacccgccgttcgctggtggaagccgcatttagccaattaagtgctgaacgcagcttcgccagcctgagtttgcgtgaagtggcgcgtgaagcgggcattgctcccacctctttttatcggcatttccgcgacgtagacgaactgggtctgaccatggttgatgagagcggtttaatgctacgccaactcatgcgccaggcgcgtcagcgtatcgccaaaggcgggagtgtgatccgcacctcggtctccacatttatggagttcatcggtaataatcctaacgccttccggttattattgcgggaacgctccggcacctccgctgcgtttcgtgccgccgttgcgcgtgaaattcagcacttcattgcggaacttgcggactatctggaactcgaaaaccatatgccgcgtgcgtttactgaagcgcaagccgaagcaatggtgacaattgtcttcagtgcgggtgccgaggcgttggacgtcggcgtcgaacaacgtcggcaattagaagagcgactggtactgcaactgcgaatgatttcgaaaggggcttattactggtatcgccgtgaacaagagaaaaccgcaattattccgggaaatgtgaaggacgagtaa

SEQ ID NO: 482601 - DNA, 1401 bp, Shigella sonnei
atgccacattcctacgattacgatgccatagtaataggttccggccccggcggcgaaggcgctgcaatgggcctggttaagcaaggtgtgcgcgtcgcagttatcgagcgttatcaaaatgttggcggcggttgcacccactggggcaccatcccgtcgaaagctctccgtcacgccgtcagccgcattatagaattcaatcaaaacccactatacagcgaccattcgcgactgctccgctcttcttttgccgatatccttaaccatgccgataacgtgattaatcaacaaacgcgcatgcgtcagggattttacgaacgtaatcactgtgaaatattgcaggggaacgctcgctttgttgacgagcatacgttggcgctggattgcccggacggcagcgtcgaaacactaaccgctgaaaaatttgttattgcctgcggctctcgtccatatcatccaacagatgttgatttcacccatccacgcatttacgacagcgactcaattcttagcatgcaccacgaaccgcgccatgtacttatctatggtgctggagtgatcggctgtgaatatgcgtcgatcttccgcggtatggatgtaaaagtggatctgatcaacacccgcgatcgcctgctggcatttctcgatcaagagatgtcagattctctctcctatcacttctggaacagtggcgtagtgattcgtcacaacgaagagtacgagaagatcgaaggctgtgacgacggtgtgatcatgcatctgaagtcgggtaaaaaactgaaagctgactgcctgctctatgccaacggtcgtaccggtaataccgattcgctggcgttacagaacattgggctggaaactgacagtcgcggacagctgaaggtcaacagcatgtatcagaccgcacagccgcacgtttacgcggtgggcgacgtgattggttatccgagcctggcatcagcggcctatgaccaggggcgcattgccgcgcaggcgctggtaaaaggcgaagccaccgcgcatctgattgaagatatccctaccggcatttacaccatcccggaaatcagctctgtgggcaaaaccgaacagcagctgaccgcgatgaaagtgccatatgaagtgggccgcgcccagtttaaacatctggcacgcgcacaaatcgtcggcatgaacgtgggcacgctgaaaattttgttccatcgggaaacaaaagagattctgggtattcactgctttggcgagcgcgctgccgaaattattcatatcggtcaggcgattatggaacagaaaggtggcggcaacactattgagtacttcgtcaacaccacctttaactacccgaccatggcggaagcctatcgggtagctgcgttaaacggtttaaaccgcctgttttaa

SEQ ID NO: 482602 - DNA, 918 bp, Shigella sonnei
atgaatattcgtgatcttgagtacctggtggcattggctgaacaccgccattttcggcgtgcggcagattcctgccacgttagccagccgacgcttagcgggcaaattcgtaagctggaagatgagctgggcgtgatgttgctggagcggaccagccgtaaagtgttgttcacccaggcgggaatgctgctggtggatcaggcgcgtaccgtgctgcgtgaggtgaaagtccttaaagagatggcaagccagcagggcgagacgatgtccggaccgctgcatattggtttgattcccacggttggaccgtacctgctaccgcatattatcccgatgctgcaccagacctttccaaagctggaaatgtatctgcatgaagcacagacccaccagttactggcgcaactggacagtggcaaactcgattgcgtgatcctcgcgctggtgaaagagagcgaagcattcattgaagtgccgttgtttgatgagccaatgttgctggctatctatgaagatcacccgtgggcgaaccgcgaatgcgtaccgatggccgatctggcaggggaaaaactgctgatgctggaagatggtcactgtttgcgcgatcaggcaatgggtttctgttttgaagccggggcggatgaagatacacacttccgcgcgaccagcctggagacgctgcgcaacatggtggcggcaggtagcgggatcactttactgccagcgctggctgtgccgccggagcgcaaacgcgatggggttgtttatctgccgtgcattaagccggaaccacgccgcactattggcctggtttatcgtcctggctcaccgctgcgcagccgctatgagcagctggcagaggccatccgagcaagaatggatggctatttcgataaagtgttaaaacaggcggtttaa

SEQ ID NO: 482603 - DNA, 1374 bp, Shigella sonnei
atggcactttggggcgggcgttttacccaggcagcagatcaacggttcaaacaattcaacgactcactgcgctttgattaccgtctggcggagcaggatattgttggctctgtggcctggtccaaagccctggtcacggtaggcgtgttaaccgcagaagagcaggcgcaactggaagaggcgctgaacgtgctgctggaagatgttcgcgccaggccacaacaaatccttgaaagcgacgccgaagatatccatagctgggtggaaggcaaactgatcgacaaagtgggccagttaggcaaaaagctgcataccgggcgtagtcgtaacgatcaggtagcgactgacctgaaactgtggtgcaaagataccgttagcgagttactgacggctaaccgacagctgcaatcggcgctggtggaaaccgcacaaaacaatcaggacgcggtcatgccaggttacactcacctgcaacgcgcccagccggtgacgttcgcgcactggtgcctggcctatgttgagatgctggcgcgtgatgaaagccgtttgcaggatgcgcttaagcgtctggatgtcagcccattaggctgtggcgcgctggcgggaacggcctatgaaatcgaccgtgaacagttagcaggctggctgggctttgcttcggcgacccgtaacagtctggacagcgtttctgaccgtgaccatgtgttggaactgctgtcggctgccgctatcggcatggtgcatctgtcgcgttttgctgaagatctgattttctttaacaccggcgaagcggggtttgtggagctttctgaccgcgtgacttccggttcatcattaatgccgcagaagaaaaacccggatgcgctggagctgattcgcggtaaatgcggtcgggtgcagggtgcgttaaccggcatgatgatgacgctgaaaggtttgccgctggcttacaacaaagatatgcaggaagacaaagaaggtctgttcgacgcgctcgatacctggctggactgcctgcatatggcggcgctggtgctggacggcattcaggtgaaacgtccacgttgccaggaagcggctcagcagggttacgccaacgccaccgaactggcggattacctggtggcgaaaggcgtacctttccgcgaggcgcaccatatcgtgggtgaagcggtggtggaagccattcgtcagggcaaaccgctggaagatctgccgctcgacgagttgcagaaattcagcccggtgattggcgaagatgtctatccgattttgtcgctgcaatcgtgcctcgacaagcgtgcggcaaaaggcggcgtctcaccgcagcaggtggcccaagcgattgcttttgcgcaggcgcggttggggtaa

SEQ ID NO: 482604 - DNA, 777 bp, Shigella sonnei
atgatgaatccattaattatcaaactgggcggcgtactgctggatagtgaagaggcgctggaacgtctgtttagcacactggtgaattatcgtgagtcacatcagcgtccgctggtgattgtgcacggcggcggttgcgtggtggatgagctgatgaaagggctgaatctgccggtgaaaaagaaaaacggcctgcgggtgacgcctgctgatcagatagacattatcaccggagcactggcgggaacggcaaataaaaccctgttggcatgggcgaagaaacatcagattgcggccgtaggtttgtttctcggtgacggcgacagcgtcaaagtgacccagcttgatgaagagttaggtcatgttggactggcgcagccaggttcgcctaagcttatcaactccttgctggagaacggttatctgccggtggtcagctccattggcgtaacagacgaagggcaactgatgaacgtcaatgccgaccaggcggcaacggcgctggcggcaacgctgggcgcggatctgattttgctctccgacgtcagcggcattctcgacggcaaagggcaacgcattgccgaaatgaccgccgcgaaagcagaacaactgattgagcagggcattattactgacggcatgatagtgaaagtgaacgcggcgctggatgcggcccgcacgctgggccgtccggtagatatcgcctcctggcgtcatgcggagcagcttccggcactgtttaacggtatgccgatgggtacgcggattttagcttaa

SEQ ID NO: 482605 - DNA, 1005 bp, Shigella sonnei
atgttgaatacgctgattgtgggtgccagcggctacgctggcgcagagctagtgacctatgtaaatcgccatccgcatatgaacataaccgctttgactgtttcagcgcaaagcaatgatgcgggaaagttaatctccgatttgcatccgcagctaaaaggcatcgttgagctgccgttgcagccgatgtcggatatcagcgagtttagcccaggggtggacgtagtgtttctcgccaccgcccatgaagttagccacgatttagcgccgcagtttcttgaagcgggctgcgtggtgttcgacctttccggtgcgtttcgtgttaacgacgccaccttctatgaaaaatattacggctttacccatcaatacccggaactgctggaacaggcagcctacggtctggcggagtggtgcggtaataaattaaaagaagcgaatttgattgcggtgccaggctgttatccgacggcggcacagctggcgctgaaaccgttgattgatgccgatcttcttgacctcaatcagtggccggtgatcaacgccaccagcggcgtgagcggtgcaggacgtaaggcagcgatttcaaatagtttttgtgaagttagcctgcaaccgtatggcgtctttactcatcgccatcaaccagagatcgccacacacctcggtgctgacgttatcttcaccccacatctgggcaatttcccgcgcggcattctcgaaaccattacctgccgcctgaaatcgggtgtgacccaggcgcaagtcgcgcaagtgttacagcaggcgtatgcccataaaccgctggtgcggctgtatgacaaaggcgttccggcgctgaaaaatgtcgttgggctgccattttgcgatatcgggtttgccgttcagggcgagcatctgattattgtggcgaccgaagacaacttactgaaaggcgcggcggcacaagcggtacagtgcgccaatattcgtttcggctatgcggaaacgcagtctcttatttaa

SEQ ID NO: 482606 - DNA, 1152 bp, Shigella sonnei
atgaaaaacaaattaccgccatttatcgagatttaccgtgctctgattgccacaccttcaataagcgccacggaagaggcactcgatcaaagcaatgcagatttaatcactctgctggcggactggtttaaagatttaggcttcaatgtggaagtgcagcctgtgccaggaactcgcaacaaattcaatatgctggcaagtatcggacagggggctggcggcttgttgctggcggggcataccgatacggtgccatttgatgacggtcgctggacgcgcgatccgtttacactgacggagcatgacggcaagctttacggcttaggcaccgccgacatgaaaggcttttttgcgtttatccttgatacgctacgcgatgtcgacgtcacgaaactgaaaaaaccgctctacattctggcgactgctgatgaagaaaccagtatggccggagcgcgttattttgccgaaactaccgccctgcgcccggattgcgccatcattggcgaaccgacgtcactacaaccggtacgcgcacataaaggtcatatctctaacgccatccgtattcagggccagtcggggcactccagcgatccagcacgcggagttaacgctatcgaactaatgcacgacgccatcgggcatattttgcaattgcgcgataacctgaaagaacgttatcactacgaagcatttaccgtgccataccctacgctcaacctcgggcatattcacggtggcgacgcttctaaccgtatttgcgcttgctgtgagttgcatatggatattcgtccgctgcctagcatgacactcaatgaacttaatggtttgctcaacgatgcattggctccggtgagcgaacgctggccgggtcgtctgacggtcgacgagctgcatccgccgatccctggctatgaatgcccaccgaatcatcaactggttgaagtggttgagaaattgctcggagcaaaaaccgaagtggtgaattactgtaccgaagcgccgtttattcaaacgttatgcccgacgctggtgctcggtccgggttccatcaatcaagctcatcagcctgatgaatatctggagacgcggtttattaaacccacccgtgagttgattatccaggtaattcaccatttttgctggcattaa

SEQ ID NO: 482607 - DNA, 2652 bp, Shigella sonnei
atgaacgaacaatattccgcattgcgtagtaatgtcagtatgctcggcaaagtgctgggagaaaccatcaaggatgcgttgggagaacacattcttgaacgcgtagaaactatccgtaagttgtcgaaatcttcacgcgctggcaatgatgctaaccgccaggagttgctcaccaccttacaaaatttgtcgaacgacgagctgctgcccgttgcgcgtgcgtttagtcagttcctgaacctggccaacaccgccgagcaataccacagcatttcgccgaaaggcgaagctgccagcaacccggaagtgatcgcccgcaccctgcgcaaactgaaaaaccagccggaactgagcgaagacaccatcaaaaaagcagtggaatcgctgtcgctggaactggtcctcacggctcacccaaccgaaattacccgtcgtacactgatccacaaaatggtggaagtgaacgcctgcttaaaacagctcgataacaaagatatcgctgactacgaacacaaccagctgatgcgtcgcctgcgccagttaatcgcccagtcatggcatactgatgaaatccgtaagctgcgtccaagcccggtagatgaagccaaatggggctttgccgtagtagaaaacagcctgtggcaaggcgtaccgaattacttgcgcgaactgaacgaacaactggaagagaacctcggctacaaactgcccgtcgaatttgttccggtccgttttacttcgtggatgggcggtgaccgcgacggcaacccgaacgtcactgccgatatcacccgccacgtcctgctactcagtcgctggaaagccaccgatctgttcctgaaagatattcaggttctggtttctgaactgtcgatggttgaagcgacccctgaactgctggcgctggttggcgaagaaggtgccgcagaaccgtatcgctatctgatgaaaaacctgcgttctcgcctgatggcgacacaggcatggctggaagcgcgcctgaaaggcgaagaactgccaaaaccagaagggctgctgacacaaaacgaagaactgtgggaaccgctctacgcttgctaccagtcacttcaggcgtgtggcatgggtattatcgccaacggcgatctgctcgacaccctgcgccgcgtgaaatgtttcggcgtaccgctggtccgtattgatatccgtcaggagagcacccgccataccgaagcgctgggcgagctgacccgctacctcggtatcggcgactacgaaagctggtcagaggccgacaaacaggcgttcctgatccgcgaactgaactccaaacgtccgcttctgccgcgcaactggcaaccaagcgccgaaacgcgcgaagtgctcgatacctgccaggtgattgccgaagcgccgcaaggctccattgccgcctacgtgatctcgatggcgaaaacgccgtccgacgtactggctgtccacctgctgctgaaagaagcgggtatcgggtttgcgatgccggttgctccgctgtttgaaaccctcgatgacctgaacaacgccaacgatgtcatgacccagctgctcaatatcgactggtatcgcggcctgattcagggcaaacagatggtgatgattggctattccgactcagcaaaagatgcgggcgtgatggcagcttcctgggcgcaatatcaggcacaggatgcattaatcaaaacctgcgaaaaagcgggtattgagctgacgttgttccacggtcgcggcggttccattggtcgcggcggcgcacctgcccatgcggcgctgctgtcacaaccgccaggaagcctgaaaggtggcctgcgcgtgactgaacagggcgagatgatccgctttaaatatggtctgccagaaatcaccgtcagcagcctgtcgctttacaccggggcgattctggaagccaacctgctgccaccacctgagccgaaagagagctggcgtcgcattatggatgaactgtcagtcatctcctgcgatctctaccgtggctacgtacgtgaaaacaaagattttgtgccttacttccgctccgctacgccggaacaagaattgggcaaactgccgttgggttcacgtccggcgaaacgtcgcccaaccggcggcgtcgagtcgctgcgcgccataccgtggatttttgcctggacgcaaaaccgcctgatgctccccgcctggctgggtgcaggtacggcgctgcaaaaagtggtcgaagatggcaaacagagcgagctggaagccatgtgccgcgattggccattcttctcgacgcgtctcggcatgctggagatggtcttcgccaaagcagacctgtggttggcggaatactatgatcaacgtctggtagacaaagcactgtggccgttaggtaaagagttacgcaacctgcaagaagaagacatcaaagtggtgctggcgattgccaacgattcccatctgatggccgatctgccgtggattgcagagtctattcagctacggaatatttacaccgacccgctgaacgtattgcaggccgagttgctgcaccgctcccgccaggcagaaaaagaaggccaggaaccggatcctcgcgtcgaacaagcgttaatggtcactattgccgggattgcggcaggtatgcgtaataccggctaa

SEQ ID NO: 482608 - DNA, 1734 bp, Shigella sonnei
atgcattccacagaagtccaggctaaacccctttttagctggaaagccctgggttgggcactgctctacttttggtttttctctactctgctacaggccattatttacatcagtggttatagtggcaccaacggcattcgcgactcgctgttattcagctcgctgtggttgatcccggtattcctctttccgaagcggattaaaattattgccgcagtaatcggcgtggtgctatgggcggcctctctggcggcgctatgctactacgtcatctacgggcaggagttctcgcagagcgttctgtttgtgatgttcgaaaccaacaccaacgaagccagcgagtatttaagccagtatttcagcctgaaaattgtgcttatcgcgctggcctatacggcggtggcagttctgctgtggacacgcctgcgcccggtctatattccaaagccgtggcgttatgttgtctcttttgccctgctttatggcttgattctgcatccgatcgccatgaatacgtttatcaaaaacaagccgtttgagaaaacgttggataacctggcctcgcgtatggagcctgccgcaccgtggcaattcctgaccggctattatcagtatcgtcagcaactaaactcgctaacaaagttactgaatgaaaataatgccttgccgccactggctaatttcaaagatgaatcgggtaacgaaccgcgcactttagtgctggtgattggcgagtcgacccagcgcggacgcatgagtctgtacggttatccgcgtgaaaccacgccggagctggatgcgctgcataaaaccgatccgaatctgaccgtgtttaataacgtagttacgtctcgtccgtacaccattgaaatcctgcaacaggcgctgacctttgccaatgaaaagaacccggatctgtatctgacgcagccgtcgctgatgaacatgatgaaacaggcgggttataaaaccttctggatcaccaaccagcagacgatgaccgcccgcaataccatgctgacggtattttcgcgccagaccgacaagcagtactacatgaaccagcaacgtacgcagagtgcgcgtgaatacgacaccaacgtgctgaagccgttccaggatgtgctgaatgaccctgcgccgaagaaactgatcatcgttcatctgctgggtacgcatatcaaatacaaataccgctacccggaaaatcagggcaagtttgatggcaataccgatcatgttccgccaggattaagcgcagaagagctggaatcatataacgattatgacaacgctaacctgtataacgatcatgtggttgccagcctgattaaagactttaaagcggcagacccgaacggattcctggtttacttctctgaccacggtgaagaggtttacgacacgccgccgcacaaaactcaggggcgtaacgaagacaacccgacgcgccacatgtacaccattccgttcctgctgtggacgtcggaaaaatggcaagcgactcatccccgtgatttctcacaggatgtcgatcgtaaatacagcctggcggaactgatccacacctggtcagatttggcgggcttatcttacgacggttacgatccaacccgttcagtggtgaatccgcagttcaaagaaactacccgctggattggtaacccgtacaagaaaaacgcgctgatcgattacgacactctgccgtatggcgaccaggtaggtaatcagtaa

SEQ ID NO: 482609 - DNA, 852 bp, Shigella sonnei
atgtatcacggcgtcagctatctgctctcccgcctgatcaacggcccgctgtccctgcgccagatttactttgccagcagtaacggcccggtgcccgatcttgcgtatcaggtcgattttccacggctggaaattgtgctggaaggtgagtttgttgataccggcgctggagcaacgttagttcccggcgatgtgctgtacgttgccgctggtggctggaatttcccacaatggaaaacacccgctaccacctttagcgtgctgtttggcaaacagcaactcggcttcagcgtcgtgcaatgggatggcaaacaatatcaaaatctggcgaagcaacacgtcgcccgacgcggcccacgtataggttcttttctgctacaaacgctcaatgaaatgcaaatgcagccgcaggagcagcaaacggcaaggcttatcgtagccagcctgcttagccactgccgcgatttgctcggcagccaaatccagaccgcctcacgcagccaggcactatttgaagctattcgcgattatatcgacgaacgctatgcctccgcgcttacccgcgaatctgtcgcacaggcattctatatttcaccaaactatctctcgcacctgtttcaaaaaacgggggccattggttttaacgaatacctgaatcacacgcgactggagcacgctaagacgttattgaaaggctatgacctgaaggtaaaagaagtggcgcacgcctgcggctttgtcgacagcaactacttctgccgtctgtttcgtaaaaacaccgaacgctcgccgtcggaatatcgccggcagtaccacagccaactgacagaaaaaccgactactccagaataa

SEQ ID NO: 482610 - DNA, 342 bp, Shigella sonnei; identical to SEQ ID NO: 457966

SEQ ID NO: 482611 - DNA, 879 bp, Shigella sonnei
atgacatcatccgccggacagcgcatcagctgtaacgttgtggaaacgcgccgcgatgatgtggcgcgcattttcaacattcagcgttattcactgaatgacggcgagggcattcgtacggtggtcttttttaaaggctgtccgcatctttgcccgtggtgtgctaatccggagtcgatctccggcaaaatccagacggtacgcagagaggcgaaatgtctgcactgtgcgaaatgtttgcgtgatgcggatgaatgcccctccggggcgtttgaacggattggtcgcgatatcagccttgacgctctggaacgggaagtgatgaaagatgacattttctttcgcacgtccggcggcggcgtcacgctttctggcggcgaagtgttaatgcaggcggagtttgctacccgttttttacagcgactgcggctgtggggtgtgtcatgcgccattgaaactgccggagacgcgccagcaagcaagctgttaccgctggcgaaattgtgcgatgaagtgctgttcgatttaaaaattatggacgcgactcaggcgcgggatgtggtgaagatgaacctgccacgcgtgctggagaatctgcgtttgctggtgagtgagggtgtcaacgtgatcccgcgtttaccgttgatccctggtttcacgctcagcagggagaatatgcagcaggcgctggatgtactgatcccgctgaaaatcaggcagatccatctgttaccgtttcatcagtacggcgaaccgaaataccgcctgctggggaaaacatggtcgatgaaagaggtgcctgcgccgtcgtcagccgatgtgacaacgatgcgcgaaatggcagaacgggccggatttcaggttaccgtgggaggttaa

SEQ ID NO: 482612 - DNA, 351 bp, Shigella sonnei
atgctgggccaggacgcacaagggccaacagcggtactgaagtcagtcagtaagctcgataatacgctgctgtctaacggtacgttgctgaacgtgaaattcactccggcgaccctggaaggtgaagcgggattacgcaaactggccgacttcttacgggcgtttacccagcttaagttgcagcatattcagtttaacgtggtgaacgccgacacgttgcgggaagcgcaacagcgcccacaagattatgccgggctggtggtgcgcgttgccggatacagcgccttctttgtcgaactgtcgaaggagatccaggatgacatcatccgccggacagcgcatcagctgtaa

SEQ ID NO: 482613 - DNA, 1986 bp, Shigella sonnei
atgacgaatcgtatctctcgcctcaaaactgcactgtttgccaatacccgtgaaatctcgctggagcgggcgctgctttataccgccagccatcggcaaaccgaaggcgaaccggtgatattgcgccgggcgaaagcaacagcgtatatccttgaacatgttgaaatttcgattcgtgatgaagaactgattgccggtaaccgcaccgtaaaaccgcgcgctgggattatgtcgccggaaatggacccttactggctgctgaaagagctggatcaattcccgacgcgtccgcaggaccgctttgctatcagcgaagaagataaacgtatctaccgtgaagagttgttcccgtactgggaaaaacgttcgatgaaagatttcatcaacgggcagatgacagatgaagtaaaagccgcgaccaacacgcagattttcagcatcaaccagacggataaaggccaggggcacattattattgattacccacgcctgttgaatcacggtctgggtgagctggtggcacagatgcagcaacattgtcagcaacagccggagaatcacttttatcaggccgcgttgttactgctggaagcctcgcagaaacacattttgcgttacgccgaactggcggaaacgatggcggcaaactgcacagatgcacagcgtcgcgaagaactgctgactattgcggagatctctcgccataacgccgaacataagccgcagacgttctggcaggcgtgccagttattctggtacatgaacatcattctgcaatacgaatccaacgccagttcgctgtctttagggcgcttcgaccagtatatgttgccgttctatcaggcatctttaacccagggcgaagatccggcgttcctgaaagaactgctcgaatctttatgggtgaaatgcaacgacatcgtgctgttgcgctccaccagcagcgcgcgttatttcgcaggtttcccgaccggctataccgcactgctcggcgggttaaccgagaacggacgtagcgcggtgaacgtgctttcgttcctttgccttgacgcctatcaaagcgtgcaattaccgcaaccgaacctcggcgtgcgcactaacgccttgatcgacacgccgttcctgatgaaaaccgccgaaaccattcgcctcggcaccggtattccgcaaatctttaacgatgaagtggtggtaccagcgttcctcaaccgtggcgtttcgctggaagatgcgcgcgactattccgtagtgggctgtgtggaattatctattcccggcagaacctacggcttgcatgacatcgcgatgtttaatctgctgaaagtgatggaaatctgcctgcatgaaaatgaaggcaatgctgcgctgacttatgaaggtttactggagcagatccgcgccaagatcagccactacatcaccctgatggttgagggcagcaatatttgtgatatcggccatcgcgactgggcacctgtaccgctgctctcgtcttttatcagcgattgtctggaaaaaggtcgcgatattaccgatggcggcgcgcgttataacttctccggcgtacaggggatcggtatcgccaacctgagcgattctctccatgcgttgaaagggatggtttttgagcaacagcgtttaagttttgacgaattgctgtcggtattaaaagccaactttgcaacgccagaaggcgaaaaagtccgtgctcgcttaattaaccgcttcgagaaatacggtaacgatatcgacgaggtggataacatcagcgccgaactgttacgccactactgcaaagaagtggaaaaataccagaacccgcgcgcggttacttcacgccgggatcgtataccgtttctgctcacgtcccgttgggatcggtggttggcgcgacgccagacggtcgttttgccggggaacaactggcagacggcggcttgtcacctatgctgggccaggacgcacaagggccaacagcggtactga

SEQ ID NO: 482614 - DNA, 147 bp, Shigella sonnei
atggtgattctgaccaaagatatcggcatcaagtttgaagagcgttttgctggcaagaccatcgtgcgcgtcaacatcagcgatgcagtaaaacgtgctgacgccattatgagcaaaattgaagctcacctggcgcaaaccgcttaa

SEQ ID NO: 482615 - DNA, 1080 bp, Shigella sonnei
atgaatgagttggtgcagatcctgaaaaatacccgtcagcatttaatgacgggcgtttcacacatgattcccttcgtggtatcgggcggtattttgctggcggtttccgtcatgttgtatggcaaaggcgcagtgccggatgccgtagccgatccaaatctgaaaaaactgtttgatatcggcgttgcgggcttgacgctgatggtgcctttcctcgccgcttacattggttattccattgcagaacgttctgcgctggctccatgcgctatcggtacctgggttggtaacagctttggtgcgggcttctttggtgcactgatcgccgggattatcggcggcatcgtggtgcattacctgaagaaaattccggtgcataaagttctgcgctcggtgatgcctatcttcattattcctatcgtcggcacactgattaccgcaggcatcatgatgtggggcttgggcgagcctgtaggggcgttgaccaacagcctgactcagtggcttcaggggatgcagcagggcagcattgttatgctggcggtgatcatgggtctgatgctggcgttcgatatgggcggtccggttaacaaagtggcctatgccttcatgctgatttgcgttgctcagggtgtttataccgtggtggccatcgctgccgtgggtatttgtatcccgccgctggggatggggctggcgacgctgattggtcgtaaaaatttctccgcagaagagcgcgaaaccggcaaagcggcactggtgatgggctgtgttggcgttactgaaggggcgattcctttcgccgctgccgatccgctgcgtgtcattccttccatcatggtcggttcagtttgtggtgcagtaactgcggcgctggtcggtgcgcagtgctatgcaggctggggtggtctgattgtgctgccggtggttgaaggcaagctgggttatatcgcagcagtggctgtcggagcagtggtgacggctgtttgtgtgaacgtgctgaaaagtctggcgcgtaaaaatgggtcttcgactgatgaaaaagaagacgacctggatttggattttgaaattaattaa

SEQ ID NO: 482616 - DNA, 2502 bp, Shigella sonnei
atggccctgattgtggaatttatttgtgagctacctaacggcgtacatgcgcgtccggcaagccacgttgaaacgctgtgtaatactttttcatcacaaattgagtggcataacctgcacactgaccgcaagggcaacgccaaaagcgcccttgcgctgattggcaccgatacgctggcgggcgataactgccagttactgatttccggggccgacgaacaggaagcgcaccagcgtttaagccaatggctgcgcgatgaattcccccactgcgatgcgccgctggcggaagttaaatctgacgaactggaaccactgccggtttcactgaccaatctgaatccgcaaattatccgcgcccgcaccgtgtgcagcggtagtgcaggcggcattctgacgccgatctcttctttagatctcaatgcgctgagtaatcttcccgcagccaaagacgttgacgccgagcaatccacactggaaaacggcctgacgctggtactgaaaaacattgagtttcgtctgctggatagcgacggtgctaccagcgcgatactggaagctcaccgatccctggctggcgatacatctttacgtcagcacttactggcaggcgtcagcgagggattaagctgcgccgaagcgattgtcgccagtgcgaatcacttttgcgaagagttcgcccgttccagcagcagctacctgcaagaacgtgccctggacgtacgcgacgtctgcttccagttactccagcaaatctacggtgagcaacgcttcccggcaccgggcaaactgacgcagtccgccatttgtatggctgatgaactgacccccagccagttcctcgaactggataaaaatcacctcaaaggtctgttgctgaaaagtggcggcaccacctcacatacggtgatccttgcccgttcgttcaacattccgacgctggttggtgtggatattgatgccctcactccgtggcagcatcaaacgatttatatcgacggcaacgccggggcgattgtggttgagccaggagaagccgtagctcgttattatcagcaagaagcccgcgtacaggacgccctgcgtgagcaacagcgtgtctggctgacccaacaagcccgtaccgctgacggtatccgcattgaaattgccgctaacatcgctcactccgtggaagcgcaggccgcattcggcaatggtgcggaaggcgttggtttgttccgcactgaaatgctctatatggatcgcaccagtgcaccgggcgaaagcgagctgtacaacattttttgtcaggcgctggagtctgccaacggacgcagcattattgtgcgcactatggacattggcggcgacaaacccgttgattatctaaacattcccgcagaggcaaacccgttcctcggttatcgcgccgtgcgtatttatgaagaatacgcgtcgttatttaccacacaactacgctcgatcctgcgcgcctccgctcacggcagcctgaaaatcatgatcccgatgatctcctcaatggaagagatcttatgggtgaaagaaaaactggcagaagccaaacagcaactacgtaacgaacacattccgtttgatgagaagatccagctcggcattatgctggaagtgccgtcggtgatgttcatcatcgatcaatgctgcgaagagattgatttctttagtattggtagtaatgacctgacgcaatatctgctggcagtggatcgcgataacgctaaggttactcgtcactacaacagcctgaatccggcattcttgcgggcgctcgattacgccgtgcaggcggtgcatcgccagggtaaatggattggtctgtgcggtgagctgggagcgaaaggttccgtgctgccgttgctggtcggcttagggctggatgaactcagcatgagcgcaccatcaattccggcggcgaaagcgcggatggcgcaacttgatagccgtgagtgccgcaagttgctcaaccaggcaatggcctgccgtacttcgctggaagtggagcacctgctggcgcaattccgcatgacccaacaagacgcaccgctggtcaccgccgagtgcatcacactggaaagcgactggcgcagcaaagaagaagtgctcaaaggcatgaccgataacctgctgctggcagggcgctgccgctatccgcgtaaactggaagccgacttgtgggcgcgcgaggccgttttctctaccggtctgggctttagttttgccattccacacagcaaatcagaacacattgagcaatccaccatcagcgttgcgcgtctgcaagcgccggtgcgctggggtgatgatgaagcgcaattcatcatcatgttaaccctgaacaaacacgctgcgggcgatcagcacatgcgcattttctcgcgcctcgctcgccgcatcatgcacgaagaattccgtaacgcgctggttaacgccgcctctgccgacgctatcgccagcctgctgcaacatgaactggaactgtaa

SEQ ID NO: 482617 - DNA, 663 bp, Shigella sonnei
atggaactgtatctggacaccgctaacgtcgcagaagtcgaacgtctggcacgcatattccccattgccggggtgacaactaacccgagcattatcgctgccagcaaggagtccatatgggaagtgctgccgcgtctgcaaaaagcgattggtgatgagggcattctgtttgctcagaccatgagccgcgacgcgcaggggatggtggaagaagcgaagcgcctgcgcgacgctattccgggtattgtggtgaaaatcccggtgacttccgaaggtctggcagcaattaaaatactgaaaaaagagggtattactacgcttggcaccgcagtgtacagtgctgcacaagggttactggccgcgctggcaggggcaaaatacgttgctccgtatgttaaccgcgtagatgcccagggcggagacggcattcgtacggttcaggagctgcaagcgctgttagaaatgcacgcgccagaaagcatggtgctggcagccagctttaaaacgccgcgtcaggcgctggactgtttactggcaggatgtgaatccatcaccctgcccttagatgtagcgcaacaaatgctcaacacccctgcggtagagtcagctatagagaagttcgaacacgactggaatgccgcatttggcactactcatctctaa

SEQ ID NO: 482618 - DNA, 1104 bp, Shigella sonnei
atggaccgcattattcaatcaccgggtaaatacatccagggcgctgatgtgattaatcgtctgggcgaatacctgaagccgctggcagaacgctggttagtggtgggtgacaaatttgttttaggttttgctcaatccactgtcgagaaaagctttaaagatgctggactggtagtagaaattgcgccgtttggcggtggatgttcgcaaaatgagatcgaccgtctgcgtggcatcgcggagactgcgcagtgtggcgcaattctcggtatcggtggcggaaaaaccctcgatacagccaaagcactggcacatttcatgggtgttccggtagcgatcgcaccgactatcgcctctaccgatgcaccgtgcagcgcattgtctgttatctacaccgatgagggtgagtttgaccgctatctgctgttgccaaataacccgaatatggtcattgtcgacaccaaaatcgtcgctggcgcacctgcacgtctgttagcggcgggtatcggcgatgcgctggcaacctggtttgaagcgcgtgcctgctctcgtagcggcgcgaccaccatggcgggcggcaagtgcacccaggctgcgctggcactggctgaactgtgctacaacaccctgctggaagaaggcgaaaaagcgatgcttgctgccgaacagcatgtagtgactccggcgctggagcgcgtgattgaagcgaacacctatttgagcggtgttggttttgaaagtggtggtctggctgcggcgcacgcagtgcataacggcctgaccgctatcccggacgcgcatcactattatcacggtgaaaaagtggcatttggtacgctgacgcagctggttctggaaaacgcaccggttgaggaaatcgaaaccgtagctgcacttagccatgcggtaggtttgccaataactctcgctcaactggatattaaagaagatgtcccggcgaaaatgcgaattgtggctgaagcggcatgtgcagaatgtgaaaccatccacaacatgcctggcggcgcgacgccagatcaggtttacgccgctctgctggtagccgaccagtacggtcagcgtttcctgcaagagtgggaataa

SEQ ID NO: 482619 - DNA, 618 bp, Shigella sonnei
atgaaagcttcactggcgctgctcagcctgctaacggcatttaccagccactccttaaaatctcccgccgttccaccaaccgtggtacaaatccaggccaataccaaccttgccatcgcagacggtgccagacagcaaatcggcagcacgctattttacgatccggcgtatatgcagcttacctatcctggcggtgatgtcccgcaaaaacgcggggtatgttccgatgtggtgatccgtgcattgcgcagccagaaggtcgatttgcagaaactggtgcacgaagatatggcgaagaattttgccgagtacccgcaaaaatggcagttaaagcgcccggacagcaacatcgatcaccgtcgggtgcctaatctggaaacctggtttacccaccacgataaaacacgccccatcagcaagaaccccagtgactatcaagcgggcgatattgtctcctggcgattagataacgggctggcacatattggggtggtttcagatggcttcgcccgcgacggtacgccgctggtgatacataacattggcgcaggtgcgcaggaagaagatgtgctgtttagctggcgcatggtggggcattatcgttattttgttaaataa

SEQ ID NO: 482620 - DNA, 906 bp, Shigella sonnei
atgtctgccgcaggaaagagcaacccactggcaatcagtggcctggttgtgctcacacttatctggagttatagctggattttcatgaagcaagtcaccagctacatcggtgccttcgactttaccgccttacgctgcattttcggcgctctcgttttattcatcgtccttttattacgtggtcgcggaatgcgcccgacaccgtttaaatacaccttagccattgccctgttacaaacctgcgggatggttggcctggcgcagtgggcgctggtcagcggcggagcggggaaggtggcgatcctaagctataccatgccgttctgggtggtgattttcgccgcgttgtttctcggtgaacgcctgcgacgtgggcaatatttcgcgatactgattgccgctttcggcttatttttggtgttgcagccgtggcaactcgatttctcttcgatgaaaagtgccatgctggcaatcctctccggcgtcagttggggggcgagcgcgattgttgctaaacgtctgtatgcccgtcatccgcgcgtggatttattgtcgttaacatcctggcagatgctctatgcggcgctggtgatgagtgtggtcgctttactggtgccgcaacgtgaaattgactggcagcccaccgtgttctgggcgctggcctacagtgcgattctggcgacggcactggcgtggagcttatggttgtttgtattgaaaaacttgcctgccagtattgccagcttaagcacactggccgttcccgtttgcggcgtactcttttcctggtggctgctcggcgagaatccgggggccgttgaaggtagcggtattgtgctgattgtgatggcactggcgctggtgagccgtaagaaaaaagaagccgttagtgtaaaaaggatctga

SEQ ID NO: 482621 - DNA, 2181 bp, Shigella sonnei
atgagcacgtcagacgatatccataacacgacagccactggcaaatgcccgttccatcagggcggtcacgaccagagcgcgggggcgggcacaaccactcgcgactggtggccaaatcaactccgtgttgacctgttaaaccaacattctaatcgttctaacccgctgggtgaggactttgactaccgcaaagaattcagcaaattagattactacggcctgaaaaaagatctgaaagccctgctgacagaatctcagccgtggtggccagccgactggggcagctacgccggtctgtttattcgtatggcctggcacggcgcaggtacttaccgttcaatcgatggacgcggcggcgcgggtcgtggtcagcaacgttttgcaccgctgaactcctggccggataacgtaagcctcgataaagcgcgtcgcctgttgtggccaatcaaacagaaatatggtcagaaaatctcctgggccgacctgtttatcctcgcaggtaacgtggcgctggaaaactccggcttccgtaccttcggttttggtgccggtcgtgaagacgtctgggaaccggatctggatgttaactggggtgatgaaaaagcctggctgactcaccgtcatccggaagcgctggcgaaagcaccgctgggtgcaaccgagatgggcctgatttacgttaacccggaaggcccggatcacagcggcgaaccgctttctgcggcagcagctatccgcgcgaccttcggcaacatgggcatgaacgacgaagaaaccgtggcgctgattgcgggtggtcatacgctgggtaaaacccacggtgccggtccgacatcaaacgtaggtcctgatccagaagctgcaccgattgaagaacaaggtttaggctgggcgagcacttacggcagcggcgttggcgcagatgccattacctctggtctggaagttgtctggacccagacgccgacccagtggagcaactatttcttcgaaaacctgttcaaatatgagtgggtacagacccgcagtccggctggcgcaatccagttcgaagcggtagacgcaccggaaattatcccggatccattcgatccgtcgaagaaacgtaaaccgacgatgctggtgaccgacctgacgctgcgttttgatcctgagttcgagaagatctctcgtcgtttcctcaacgatccgcaggcgttcaacgaagcctttgcccgtgcctggttcaaactgacgcacagggatatggggccgaaatctcgctacatcgggccggaagtgccgaaagaagatctgatctggcaagatccgctgccgcagccgatctacaacccgaccgagcaggacattatcgatctgaaattcgcgattgcggattctggtctgtctgttagtgagcgggtatcggtggcctgggcatctgcttctaccttccgtggtggcgacaaacgcggtggtgccaacggtgcgcgtctggcattaatgccgcagcgcgactgggatgtgaacgccgcagccgttcgtgctctgcctgttctggagaaaatccagaaagagtctggtaaagcctcgctggcggatatcatcgtgctggctggtgtggttggtgttgagaaagccgcaagcgccgcaggtttgagcattcatgtaccgtttgcgccgggccgcgttgatgcgcgtcaggatcagactgacattgagatgttcgagctgctggagccaattgctgacggtttccgtaactatcgcgctcgtctggatgtttccaccaccgagtcactgctgatcgacaaagcccagcaactgaccctgaccgcgccggaaatgaccgcgctggtgggcgggatgcgcgtactgggtgccaacttcgatggcagcaaaaacggcgtcttcactgaccgcgttggcgtattgagcaatgacttcttcgtgaacttgctggatatgcgttacgagtggaaagcgaccgacgaatcgaaagagctgtttgaaggccgtgaccgcgaaaccggcgaagtgaaatacactgccagccgtgcggatctggtatttggttctaactctgtcctgcgtgcggtggctgaagtttacgccagcagcgatgctcacgagaagtttgttaaagacttcgtggcggcatgggtgaaagtgatgaacctcgaccgtttcgacctgctgtaa

SEQ ID NO: 482622 - DNA, 891 bp, Shigella sonnei
atgagcttttttcacgccagccagcgggatgccctgaatcagagcctggcagaagtccaggggcagattaacgtttcgttcgagtttttcccgccgcgtaccagtgaaatggagcagaccctgtggaactccatcgatcgccttagcagcctgaaaccgaagtttgtatcggtgacctatggcgcgaactccggcgagcgcgaccgtacgcacagcattattaaaggcattaaagatcgcactggtctggaagcggcaccgcatcttacttgcattgatgcgacgcccgacgagttgcgcaccattgcacgcgactactggaataacggtattcgtcatatcgtggcgctgcgtggcgatctgccgccgggaagtggtaagccagaaatgtatgcttctgacctggtgacgctattaaaagaagtggcagatttcgatatctccgtggcggcgtatccggaagttcacccggaagcaaaaagcgctcaggcggatttgcttaatctgaaacgcaaagtcgatgccggagccaaccgcgcgattactcagttcttcttcgatgtcgaaagctacctgcgttttcgtgaccgctgtgtatcggcgggcattgatgtggaaattattccgggaattttgccggtatctaactttaaacaggcgaagaaatttgccgatatgaccaacgtgcgtattccggcgtggatggcgcaaatgttcgacggcctggatgatgatgccgaaacccgcaaactggtgggcgcgaatattgccatggatatggtgaagattttaagccgtgaaggagtgaaagatttccacttctatacgcttaaccgcgctgaaatgagttacgcgatttgccatacgctgggtgttcgacctggtttataa

SEQ ID NO: 482623 - DNA, 2433 bp, Shigella sonnei
atgagtgtgattgcgcaggcaggggcgaaaggtcgtcagctgcataaatttggtggcagtagtctggctgatgtgaagtgttatttgcgtgtcgcgggcattatggcggagtactctcagcctgacgatatgatggtggtttccgccgccggtagcaccactaaccagttgattaactggttgaaactaagccagaccgatcgtctctctgcgcatcaggttcaacaaacgctgcgtcgctatcagtgcgatctgattagcggtctgctacccgctgaagaagccgatagcctcattagcgcttttgtcagcgatctggaacgcctggcggcgctgctcgacagcggtattaacgacgcagtgtatgcggaagtggtgggccacggggaagtatggtcggcacgcctgatgtctgcggtacttaatcaacaagggctgccagcggcctggcttgatgcccgcgagtttttacgcgctgaacgcgccgcacaaccgcaggttgatgaagggctttcttacccgttgctgcaacagctactggtgcaacatccgggcaaacgtctggtggtgaccgggtttatcagccgtaacaacgccggtgaaacggtgctgctggggcgtaacggttccgactattccgcgacacaaatcggtgcgctggcgggtgtttctcgtgtaaccatctggagcgacgtcgccggggtatacagtgccgacccgcgtaaagtgaaagatgcctgtctgctgccgttgctgcgtctggatgaagccagcgaactggctcgtctggcggctcccgttcttcacgcccgtactttacagccggtttctggcagcgaaatcgacctgcaactgcgctgtagctacacgccggatcaaggttccacgcgcattgaacgcgtgctggcctccggtactggtgcgcgtattgtcaccagccacgatgatgtctgtttgattgagtttcaggtgcccgccagtcaggatttcaaactggcgcataaagagatcgaccaaatcctgaaacgcgcgcaggtacgcccgctggcggttggcgtacataacgatcgccagttgctgcaattttgctacacctcagaagtggccgacagtgcgctgaaaatcctcgacgaagcgggattacctggcgaactgcgcctgcgtcaggggctggcgctggtggcgatggtcggtgcaggcgtcacccgtaacccgctgcattgccaccgcttctggcagcaactgaaaggccagccggtcgaatttacctggcagtccgatgacggcatcagcctggtggcagtactgcgcaccggcccgaccgaaagcctgattcaggggctgcatcagtccgtcttccgcgcagaaaaacgcatcggcctggtattgttcggtaagggcaatatcggttcccgttggctggaactgttcgcccgtgagcagagcacgctttcggcacgtaccgactttgaatttgtgctggcaggcgtggtggacagccgccgcagtctgttgagctatgacgggctggacgccagccgcgcgttagccttcttcaacgatgaagcggttgagcaggatgaagagtcgttgttcctgtggatgcgcgcccatccgtatgatgatttagtggtgctggacgttaccgccagccagcagcttgctgatcagtatcttgatttcgccagccacggtttccacgtcatcagcgccaacaaactggcgggagccagcgacagcaataaatatcgccagatccacgacgccttcgaaaaaaccgggcgtcactggctgtacaatgccaccgtcggtgcgggcttaccgatcaaccacaccgtgcgcgatctgatcgacagcggcgatactattttgtcgatcagcgggatcttctccggcacgctctcctggttgttcctgcaattcgacggtagcgtgccgtttaccgagctggtggatcaggcgtggcagcagggcttaaccgaacctgacccgcgtgacgatctctctggcaaagacgtgatgcgcaagctggtgattctggcgcgtgaagcaggttacaacatcgaaccggatcaggtacgcgtggagtcgctggtgcctgcccattgcgaaggcggcagcatcgaccatttctttgaaaatggcgatgaacttaacgagcagatggtgcaacggctggaagcggcccgcgaaatggggctggtgctgcgctacgtggcgcgtttcgatgccaatggcaaagcgcgtgtgggcgtggaagcggtgcgtgaagaccatccgctggcatcactgctgccgtgcgataacgtctttgccatcgaaagccgctggtatcgcgataatccgctggtgatccgtgggcctggcgctgggcgcgacgtcaccgccggggcgattcagtcggatatcaaccggctggcacagttgttgtaa

SEQ ID NO: 482624 - DNA, 1161 bp, Shigella sonnei
atgacgcgtaaacaggccaccatcgcagtgcgtagcgggttaaatgacgacgaacagtatggttgcgttgtccctcccatccatctttccagcacctataactttaccggatttaatgaaccgcgcgcgcatgattactcgcgtcgcggcaacccaacgcgcgatgtggttcagcgtgcgctggcagaactggaaggcggtgctggcgcagtacttactaataccggcatgtccgcgattcacctggtaacgaccgtctttttgaaacctggcgatctgctggttgcgccgcacgactgctacggcggtagctatcgcctgttcgacagtctggcgaaacgcggttgctatcgcgtgttgtttgttgatcaaggcgatgaacaggcattacgggcagcgctggcagaaaaacccaaactggtactggtagaaagcccaagtaatccattgttacgcgtcgtggatattgcgaaaatctgccatctggcaagggaagtcggggcggtgagcgtggtggataacaccttcttaagcccggcattacaaaatccgctggcattaggtgccgatctggtgttgcattcatgcacgaaatatctgaacggtcactctgacgtggtggctggcgtggtgattgctaaagacccggacgttgtcactgaacttgcctggtgggcaaacaatattggcgtgacgggcggcgcgtttgacagctatctgctgctacgcgggttgcgaacgctggtgccgcgtatggagctggcgcagcgcaacgcgcaggcgattgtgaaatatctgcaaacccagccgttggtgaaaaaactgtatcacccgtcgctgccggaaaatcaggggcatgaaattgccgcgcgtcagcaaaaaggctttggcgcaatgttgagttttgaactggatggcgatgagcagacgctgcgtcgtttcctgagcgggctgtcgttgtttacgctggcggaatcattagggggagtggaaagtttaatctctcacgccgcaaccatgacacatgcaggcatggcaccagaagcgcgtgctgccgccgggatctccgagacgctgctgcgtatctccaccggtattgaagatggcgaagatttaattgccgacctggaaaatggcttccgggctgcaaacaaggggtaa

SEQ ID NO: 482625 - DNA, 318 bp, Shigella sonnei; identical to SEQ ID NO: 261467

SEQ ID NO: 482626 - DNA, 609 bp, Shigella sonnei
atgaaaaacaggctgctgatcctcagcctgctggtttctgtacctgcctttgcctggcagccacaaaccggcgacatcatctttcagatctctcgctcatcgcaaagtaaagcgatccaactggcgacccattccgattatagccacaccggtatgctggtgatacgcaacaaaaagccctacgtttttgaagcggtcggcccggtgaaataccccccgctcaagcagtggatcgcccatggtgaaaagggcaaatacgttgttcgccgcgttgaaggcggactgagtgttgaacaacagcaaaaactggcgcaaacggcaaaacgttatctcggtaaaccgtatgatttcagcttctcatggagcgacgatcgccagtactgttcggaagtggtgtggaaggtttaccagaacgcgctgggaatgcgcgtgggcgagcagcagaagttgaaagagttcgatctcagcaacccgctggtccaggctaagctcaaagaacgctacggcaaaaatattccgcttgaggaaacggtagtttcaccacaagccgttttcgacgcgccacaactcaccacagtcgccaaagagtggccgctgttttcgtggtaa

SEQ ID NO: 482627 - DNA, 273 bp, Shigella sonnei
atggtcacagttaaccttcattgcccccgttgccagtccgttcaggtttaccgtcacgggcagaacccaaaaagacatgagcgattccgcggccgtgactgtcaccgggtatttcagctcagttactgttacgagccccgtaaaccgggagttaaagaccaaatcgctgaaatgactttcaacggtgccggggttcgcgatactgcccgtacgctgaaaatcggcattaatacagtcatccgaactttaaaaaactctcgccacgaagaataa

SEQ ID NO: 482628 - DNA, 279 bp, Shigella sonnei
atgacatttgagaaaaaagagcagaatgaggtaaaaatctttggctgtgtattcagtctggtaatcatccaaggaaagcttatcagaagggtgatgactccaattagtagaacatatattttcgataaaagcaccgatgactttttcatgaagttctacagaacgcgagaaacagatggttctgcgggccagacgtttgattcgggttctcagggtcagattgttacgctcaatgtgctgagtaaaaatcttaccagtcagatgcttctccttcggtaa

SEQ ID NO: 482629 - DNA, 237 bp, Shigella sonnei
atgaaggcaatacaatgttgttatttccttgctttagtctccagtcatttaatggctggagttatgggtgatgataatatatttttaagtaattcggattcagctgctttatattgtgtggctaaaatatttccagatggagaaaatattttaatatataaagtaaatataattaatgctagttcaaaaaaagatgttttttttatgaaagcccaacatcaacccacaatgacataa

SEQ ID NO: 482630 - DNA, 915 bp, Shigella sonnei
gtggtgaaaaaggaacacgcggacggcagcgtcacgcagagtcagtttgacgccgtgggcaggctcaggacacagacggatgccgcaggccggacaacagaatacagcccggatgtggtgacgggtctcatcacgcgcatcaccacgccggatggcagggcatcggcgttttactataaccaccacagccagttaacgtcagccaccgggcctgacgggctggaaatacgccgggaatatgatgaatggggcaacctgctgaatgaagagaacccgcatcagctgcagcagcttattcgtttgccggggcagcagtatgatgaggagtccggcctgtattataaccgccaccgctattatgacccgctgcaggggcggtatatcactcaggatccgattgggctgaaggggggatggaacctgtatacatatccgctgagcccggtgaatagcatggatccattaggattatatgaatttaaatcaaaaaatattgatgatattggaatatttgcattggcaatgtgtaatggagaatcaattaacgagaataaagaatatggtggactaatatgtaagaagcaaggtgaatatttccccatgaatccgataagttcaaatgataatgatagtgtagacttgcgaaatataaaatgccctgaaggttcagagagagtaggcgattatcacactcacggtttttactctgacgataaaggaaataaagtaacaaaagaaaatgatgtttatgatagtctaaatttttcaagcaaagatttaacgaattcttatatgaatggaatgggaaaaaaagaatacagtagttacttgggaacaccaaataacacctatctaaaatataatcccaaagctaaagggaatggagttacaattatcaggcaagggagtaattaa

SEQ ID NO: 482631 - DNA, 159 bp, Shigella sonnei
gtggcgattaatttcagtcctaaggttggtgaaatactggattgcaactttggtaactatcctgttagccagaatggacagttcagcaccacgtattacgatggccgcattcctcctgaaatgataaaaaacaggttagttgttagactggccccctga

SEQ ID NO: 482632 - DNA, 2022 bp, Shigella sonnei
atgcgtctaaaccccggccaacaacaagctgtcgaattcgttaccggcccctgcctggtgctggcgggcgcgggttccggtaaaactcgtgtgatcaccaataaaatcgcccatctgatccgcggttgcggttatcaggcgcgacatatcgcggcggtgacctttaccaataaggcggcgcgcgagatgaaagagcgtgtcggacagacgctgggtcgcaaagaggcgcgtgggctgatgatctcaaccttccacacgctggggctggatatcatcaagcgtgagtatgcggcgctggggatgaaggcgaacttttcgctgtttgacgataccgatcagctggcgttgctcaaagagttgaccgaagggctgattgaagatgacaaagttctcctgcaacagttgatttcgaccatctctaactggaagaacgatctcaaaacaccgtcccaggcggcagccagtgcgattggcgagcgggaccgtatttttgcccattgttatgggctgtatgatgcacacctgaaagcgtgcaatgttctcgacttcgatgatctgattttattgccgacgttgctgctgcaacgcaatgaagaagtccgcgagcgctggcagaacaaaattcgctatctgctggtggatgagtatcaggacaccaacaccagccagtatgaactggtgaaactgctggtgggcagccgcgcgcgctttaccgtggtgggcgatgacgaccagtcgatctactcctggcgcggcgcacgtccacaaaacctggtgctgctgagtcaggattttccggcgctgaaggtgattaagcttgagcagaactaccgctcttccggacgtattttgaaagcggcgaacatcctgatcgccaataacccgcacgtctttgagaagcgtctgttctccgaactgggttacggcacagagcttaaagttttaagcgcgaataacgaagaacatgaagccgagcgcgtcactggtgaactgattgcgcatcacttcgtcaataaaacgcagtacaaagattacgctattctttatcgcggtaaccatcagtcgcgagtgtttgaaaaattcctgatgcaaaaccgcatcccgtacaaaatttctggtggtacgtcgtttttctctcgtcctgaaatcaaggacttgctggcttatctgcgcgtgctgactaacccggacgatgacagcgcatttctgcgtatcgttaacacgccgaagagagagattggcccggcgacgctgaaaaagctgggtgagtgggcgatgacgcgcaataaaagcatgtttaccgccagctttgatatgggcctgagtcagacgcttagcggacgtggttatgaagcattgacccgctttactcactggttggcagaaatccagcgtctggcggagcgggagccgattgccgcggtgcgcgatctgatccacggcatggattatgaatcctggctgtacgaaacatcgcccagcccgaaagccgccgaaatgcgcatgaagaacgtcaaccaactgtttagctggatgacggagatgctggaaggcagcgaactggatgagccgatgacgctcacccaggtggtgacgcgctttactttgcgcgacatgatggagcgtggtgagagtgaagaagagctggatcaggtgcaactgatgactctgcacgcgtcaaaagggctggagtttccttatgtctacatggtcggtatggaagaagggtttttgccgcaccagagcagcatcgatgaagataatatcgatgaggagcggcggctggcctatgtcggcattacccgcgcccagaaggaattgacctttacgctgtgtaaagaacgccgtcagtacggcgagctggtgcgcccggagccgagccgctttttgctggagctgccgcaggatgatctgatttgggaacaggagcgcaaagtggtcagcgccgaagaacggatgcagaaagggcaaagccatctggcgaatctgaaagcgatgatggcggcaaaacgagggaaataa

SEQ ID NO: 482633 - DNA, 1485 bp, Shigella sonnei
atgggttccacctcgtcgctgtatgcagccattgatctcggttcgaatagttttcatatgctggttgtgcgcgaggtggctggaagcatccagacgctgacgcgaataaaacgcaaagtgcgtctggctgctggcctgaatagcgaaaatgccctgtctaatgaagcaatggagcgcggttggcaatgtctgcgcctgtttgctgaacgtctgcaagatatccctccctcgcaaattcgcgttgtcgctacggcgacattacgtcttgccgtcaatacgggtgattttattgccaatgcgcaggaaatcctcggttgtccggtacaggtgatcagcggtgaagaggaagcacgtctgatttatcagggcgttgctcacacaactggcggtgccgatcagcgcctggtggtggatataggcggtgccagtactgaactggtaaccggcacgggtgcacaaaccacctcgttgttcagcctgtcgatgggctgcgtcacctggctggaacgctattttgccgatcgtaatctggggcaggaaaattttgatgctgcagaaaaagcggcacgcgaagtgttacgtccggttgccgatgaattacggtatcacggctggaaagtgtgcgttggtgcttccggcaccgtgcaggcgttacaggaaatcatgatggcacaggggatggatgaacgcattaccctggaaaagttgcagcaattgaaacagcgagccattcattgcggtcggctggaggaactggagattgacgggctgacgctggaacgtgcgttagtgttcccgagtggtctggcgatcctgatcgccatttttaccgaactgaatattcagtgtatgaccctggcgggcggtgcgctgcgtgaaggcctggtctacggcatgttgcatctggccgtcgagcaggatattcgcagccgtacgctgcgtaatattcagcgccgctttatgatcgatattgatcaggcgcagcgcgtagccaaagttgcggctaacttcttcgatcaggtggaaaaggaatggcatcttgaagcaataagccgcgatttgctcatcagcgcctgtcagcttcatgaaatcggcctgagcgttgactttaaacaagcgccgcaacacgctgcttatctggtgcgtaatctggatcttcccggttttacccccgcacagaaaaaattgctggcgacgctactgctcaaccagactaatccggtcgatctctcatcgctgcatcagcaaaatgccgtaccgccgcgcgtcgcagaacaactctgccgtttactccgcctggccatcatttttgccagccgtcgccgtgacgatctcgtgccagagatgacattacaggctaaccatgaactgttgaccttgacgcttccgcaaggttggctaacccaacatccgctgggtaaagagattattgctcaggaaagccagtggcagagctatgtccactggccgctggaagtgcattaa

SEQ ID NO: 482634 - DNA, 1266 bp, Shigella sonnei
atgagcaaaacacatttaacagaacagaagttttccgacttcgccctgcatccgaaggttgtagaagcccttgaaaaaaaagggtttcataactgtacgcccattcaggcactggcccttccgctgacgctggcgggtcgtgacgtagccgggcaggcgcaaaccggtaccgggaaaacgatggcgtttcttacgtcaacgtttcattatcttctctctcatcctgcgattgccgatcgcaaggtgaatcaaccgcgtgccttaattatggcaccgacgcgtgaacttgccgtgcagatccatgccgacgcagaaccgctggcggaagctactggcctgaagctgggtctggcttacggtggtgatggctacgacaaacagctgaaagtgctggaaagcggcgttgacattctgattggcaccacgggtcgtttaattgactacgccaagcagaaccacattaacctcggcgccattcaggtagtggttctggatgaagccgatcgcatgtacgatctgggctttattaaagatatccgctggctgttccgccgtatgccgcctgcaaaccagcgcctcaacatgctgttctccgccacgctttcgtaccgggtacgtgaactggcgttcgagcagatgaacaatgccgaatatattgaagtggaaccggaacagaaaacgggccaccgtattaaagaagagcttttctacccttctaacgaagaaaaaatgcgtttgctgcaaacgctgatcgaagaagagtggccagacagagcgattattttcgccaataccaaacaccgttgtgaagagatctggggccacctggcggcagatggtcatcgtgtcggtttgttgacaggcgatgtcgcgcagaaaaaacgtctgcgtattcttgatgaatttacccgtggcgatctggatattctggttgccaccgacgttgccgcgcgtggtttgcatattccggcagtgacgcacgtctttaactacgatttacccgatgactgtgaagattacgttcaccgtattggtcgtacaggtcgcgcaggcgcaagcggtcactctatcagcctggcgtgtgaagagtatgcattgaatttgcctgctattgaaacctatattggtcactcaattccggtaagcaaatacaatccggacgcattgatgaccgatctgccaaaaccgctgcgcctcacgcgcccacgtacaggcaatggtccgcgtcgtactggcgctccgcgtaatcgtcgtcgttcaggttaa

SEQ ID NO: 482635 - DNA, 330 bp, Shigella sonnei; identical to SEQ ID NO: 3901

SEQ ID NO: 482636 - DNA, 1260 bp, Shigella sonnei
atgaatcttaccgaattaaagaatacgccggtttctgagctgatcactctcggcgaaaatatggggctggaaaacctggctcgcatgcgtaagcaggacattatttttgccatcctgaagcagcacgcaaagagtggcgaagatatctttggtgatggcgtactggagatattgcaggatggatttggtttcctccgttccgcagacagctcctacctcgccggtcctgatgacatctacgtttcccctagccaaatccgccgtttcaacctccgcactggtgataccatctctggtaagattcgcccgccgaaagaaggtgaacgctattttgcgctgctgaaagttaacgaagttaacttcgacaaacctgaaaacgcccgcaacaaaatcctctttgagaacttaaccccgctgcacgcaaattctcgtctgcgtatggaacgtggtaacggttctactgaagatttaactgctcgcgtactggatctggcatcacctatcggtcgtggtcagcgtggtctgattgtggcaccgccgaaagccggtaaaaccatgctgctgcagaacattgcccagagcattgcttacaaccacccggattgtgtgctgatggttctgctgatcgacgaacgtccggaagaagtaaccgagatgcagcgtctggtaaaaggtgaagttgttgcttctacctttgacgaacccgcatctcgccacgttcaggttgcggaaatggtgatcgagaaggccaaacgcctggttgagcacaagaaagacgttatcattctgctcgactccatcactcgtctggcgcgcgcttacaacaccgttgttccggcgtcaggtaaagtgttgaccggtggtgtggatgccaacgccctgcatcgtccgaaacgcttctttggtgcggcgcgtaacgtggaagagggcggcagcctgactattatcgcgacggcgcttatcgataccggttctaaaatggacgaagttatctacgaagagtttaaaggtacaggcaacatggaactgcacctctctcgtaagatcgctgaaaaacgcgtcttcccggctatcgactacaaccgttccggtacccgtaaagaagaactgctcactactcaggaagaactgcagaaaatgtggatcctgcgcaaaatcattcacccgatgggcgaaatcgatgcaatggaattcctcattaataaactggccatgaccaagaccaatgacgatttcttcgaaatgatgaaacgctcataa

SEQ ID NO: 482637 - DNA, 219 bp, Shigella sonnei
atgccaaaaacgccacgtgtttacgtggcgttttgcttttatatctgtaatcttaatgccgcgctggcgatgttaggaaaattcctggaatttgctggcgtgttatgcaatttgcatatcaaatggttaatttttgcacaggactggtgggttcggaacggactttcccttctgaataaaggtcttcgtggttatacttctgctaataattttctctga

SEQ ID NO: 482638 - DNA, 1104 bp, Shigella sonnei
gtgaatttactgacagtgagtactgatctcatcagtatttttttattcacgacactgtttctgttttttgcccgtaaggtggcaaaaaaagtcggtttagtggataaaccaaacttccgcaaacgtcaccagggattgatacctctcgttggggggatttcggtttacgcagggatttgcttgacgttcggaattgtcgattactatattccgcatgcatctctctatctcgcttgtgccggtgtgcttgttttcattggcgcgctggatgaccgttttgatatcagcgtaaaaatccgtgccaccatacaggccgctgttggcattgttatgatggtgttcggcaaactttatctcagtagcctgggttatatctttggctcctgggagatggtgctcggaccgtttggttacttcctgacgctatttgccgtctgggcggccattaatgcgttcaacatggttgatggcattgatggcttgctgggcgggttgtcctgcgtctcgtttgcagcaatcggtatgattttgtggttcgacgggcaaaccagcctcgcaatctggtgctttgcgatgatcgccgccatcctgccatacatcatgcttaaccttggtatcctgggtcgccgctacaaagtctttatgggtgatgcgggcagtacgctgattggttttaccgttatctggatcctgctcgaaacgacccagggcaaaacccatcccatcagcccggttaccgctttgtggataatcgccattccgctaatggatatggtggcgattatgtaccgtcgcctgcgtaaaggcatgagcccattctctcctgaccgtcagcatattcaccatttgatcatgcgtgccgggtttacttcccgtcaggcgtttgtgctgattacccttgctgcggcactgctcgcttccattggcgtgctggcagaatattctcattttgtcccggagtgggtcatgctggtgctctttttgctagcattcttcctctatggatattgcattaagcgtgcctggaaagttgctcgctttattaagcgcgtaaaacgcagactgcgtagaaatcgtggtggcagccccaatttaaccaaataa

SEQ ID NO: 482639 - DNA, 1047 bp, Shigella sonnei
atgacacaaccaatgcctgggaaaccggccgaagacgctgaaaatgaactggatattcgtgggttgtttcgtaccttgtgggctgggaagctatggattattggcatggggctggcatttgcgttaatcgcgctggcgtatactttttttgctcgtcaggagtggagctcgacggcgattaccgatcgtccaacggtgaatatgctggggggatattactcgcagcagcaatttttgcgtaacctggatgtccgttcaaacatggcttctgccgaccaaccatcggtcatggacgaagcctataaagagtttgttatgcaactggcctcgtgggatacccgcagagagttctggctgcaaaccgactattacaaacagcggatggtgggcaacagcaaagccgatgcggcgttgctggatgaaatgattaacaacatccagtttatccccggagactttacccgcgcggtcaatgacagcgtgaagcttattgctgaaaccgcgcctgacgctaataacctgttacgtcagtatgttgcttttgccagccagcgtgcagccagccatctgaatgatgagctgaaaggcgcatgggcggcgcgtaccatccagatgaaagcacaggtgaagcgtcaggaagaggtggcgaaagccatctacgaccgccggatgaacagtattgaacaggcgctgaaaattgctgagcagcataatatttcgcgcagtgcgacagatgtgcctgccgaggaattacctgattcagaaatgttcctgcttgggcgtccaatgctccaggctcgactggaaaatttacaggccgtcggtccggcctttgatctcgactatgatcagaatcgggccatgttaaacaccctgaatgttggtccaaccctggatccgcgttttcagacctatcgctatttgcgtacgccggaagaaccggtaaaacgcgatagcccacgtcgtgccttcctgatgattatgtggggcattgtcggggggctgatcggggctggtgtcgcattaacccgccgttgctcgaaatag

SEQ ID NO: 482640 - DNA, 1131 bp, Shigella sonnei
gtgaaagtactgactgtatttggtacgcgcccggaagccatcaagatggcgccgttggtgcatgcgttggcaaaagatcctttttttgaggctaaagtttgcgtcactgcgcagcatcgggagatgctcgatcaggtgctgaaactcttttccattgtacctgactacgatctcaacataatgcagccaggacagggcctgacagagataacctgtcggattctggaagggctaaaacctattcttgccgagttcaaaccagacgtcgtgctggttcacggcgacacaacgacgacgctggcaaccagcctggcggcgttttatcagcgtattcctgttggtcacgttgaggctggtctgcgcacgggcgatctttattcgccgtggccggaagaggctaaccgtacattgaccgggcatctggcgatgtatcacttctctccaaccgaaacttcccggcaaaacttgctgcgtgaaaacgttgcggatagccgaatcttcattactggtaatacagttattgatgcactgttatgggtgcgtgaccaggtgatgagcagcgatacgctgcgttcagaactggcggcaaattacccgtttatcgaccccgataaaaagatgattctggtgaccggtcacaggcgtgaaagtttcggtcgtggctttgaagaaatctgccacgcgttggcagacattgccaccacgcaccaggacatccagattgtctatccggtgcatctcaacccgaacgtcagagagccggtcaatcgcattctggggcatgtgaaaaatgtcattctgatcgatccccaggagtatttaccgtttgtctggctgatgaaccacgcctggctgattttgaccgactcaggcggcattcaggaagaagcgccttcgctggggaaaccggtgctggtgatgcgcgataccactgagcgtccggaagcggtgacggcgggtacggtgcgtctggtaggcacggataagcagcgaattgtcgaggaagtgacgcgtcttttaaaagacgaaaacgaatatcaaactatgagccgcgcccataacccgtatggtgatggtcaggcatgctctcgcattctggaagcgttaaaaaataatcggatatcactatga

SEQ ID NO: 482641 - DNA, 1263 bp, Shigella sonnei
atgagttttgcgaccatttctgttatcggactgggttacatcgggctgcctacagcagcagcgtttgcctcacggcaaaaacaggtgattggtgtcgatatcaaccaacacgcggttgataccatcaatcgtggcgaaatccatatcgtcgagcctgatttggcgagcgtagtaaaaactgccgtagaaggcggttttttacgagcgagcacgacgccagttgaagcggatgcctggctgattgctgtacccacgccgtttaaaggcgatcatgagccagatatgacctacgttgaatcggctgctcgctccattgcgccagtgctgaaaaaaggcgcgctggtgatccttgaatccacctcgccggtggggtcaaccgagaagatggcagaatggttagcagagatgcgtccggatctcactttcccacagcaggtgggcgagcaggcggacgtcaacattgcttactgcccggaacgcgtgttaccgggccaggttatggtcgagctgattaaaaacgatcgcgtgattggtggtatgacgccggtttgttcgacccgcgccagcgaactgtacaaaattttcctcgaaggtgagtgtgtcgtcactaactcgcggacggcggaaatgtgtaagctcaccgaaaacagcttccgcgatgtgaatatcgcttttgctaatgaattgtcgctgatttgtgccgatcaggggattaacgtctgggaactgattcgcctggcgaatcgtcaccctcgcgttaatattcttcagcctggccctggcgtgggcggtcactgcattgctgttgatccgtggtttatcgtggcacagaacccccagcaggcgcggcttatccgtaccgcgcgcgaagtgaacgatcacaaaccgttctgggttatcgatcaggtgaaagcggcggtggctgattgcctggcggctaccgataaacgcgccagtgaactgaaaatcgcctgctttggtctggcgtttaaaccgaatattgatgacctgcgcgaaagcccggcgatggaaatcgctgaactgatcgcccagtggcatagcggcgaaactctggttgttgagcctaacatccaccagttgccgaaaaaactgaccgggctttgtactctggcgcagcttgacgaggcgctggcaacggcagacgtgctggtgatgctggtcgatcatagtcagtttaaagttatcaatggcgacaatgtccatcagcagtatgtcgtcgatgccaaaggagtctggcgctga

SEQ ID NO: 482642 - DNA, 1068 bp, Shigella sonnei
atgagaaaaattctgataacaggtggtgccgggtttattggctcggcgctggtgcgttatatcatcaacgaaacgagcgacgcggtggtagtggtcgataagctgacctacgccggaaacctgatgtcgctggcaccggtcgcgcaaagcgagcgctttgcctttgagaaagttgatatctgcgatcgggcagaactggcacgcgtattcactgagcatcagccagactgtgtcatgcatctggcagccgaaagccatgttgaccgttctattgacggcccggcagcgtttattgaaaccaacattgtcgggacttatacattgcttgaagcggcgcgggcttactggaatacgctgacggaagataaaaaatcagcgttccgttttcatcatatctccaccgacgaagtatatggtgacctgcactcgacggatgatttcttcaccgaaaccacgccgtatgcgccgagcagcccttattccgcgtcaaaagccagcagcgaccatctggtgcgcgcctggctgcggacctacggtctgccgacgcttatcaccaactgctcgaataactacggtccttaccactttccggaaaaactgatcccgctgatgatcctcaacgcgctggcgggtaaaccgctgccggtatatggcaacgggcagcaaatccgtgactggctgtatgtggaagatcacgcccgcgcgctgtattgcgtggcgaccaccgggaaagtcggtgaaacctataatattggtggtcacaacgagcgtaagaatctcgatgttgtggaaaccatttgcgagctgctggaagaactggctccgaacaagccgcacggcgtggtgcactatcgtgacttgatcacctttgtcgctgaccgtccggggcatgatctgcgttatgccattgatgcttcgaaaattgcccgtgaacttggctggctgccacaggaaacctttgaaagtggaatgcgtaaaacggtgcagtggtatctggctaatgaaagctggtggaagcaggtgcaggacggcagctatcagggcgagcgtttaggtctgaaaggctaa

SEQ ID NO: 482643 - DNA, 882 bp, Shigella sonnei
atgaaaggtattatcctggcgggcggttccggcacccgattgcatccgattacgcgcggcgtatcgaagcaactgttgccgatttacgataagccaatgatttactatccgctgtcggtgctgatgttggccgatatccgcgaaattctcatcatcactacgccggaagataaaggttatttccagcgcctgctgggcgatggtagtgagttcggtatccagctggaatacgccgaacagcccagcccggacggtctggcgcaggcctttatcatcggtgaaaccttcctcaacggtgaaccttcttgtctggtgctgggcgataacatcttcttcggtcagggcttcagtccgaagctgcgtcatgttgcggcgcgcacggaaggggcgacggtatttggctatcaggtgatggacccggaacgctttggcgtggtggagtttgacgacaatttccgcgctatctcgctggaagaaaagccaaaacagccgaagtcaaactgggcggtgaccgggctttatttctacgacagtaaagtcgtggagtacgcaaagcaggtgaagccgtcggagcgtggtgaactggagattacctccatcaaccagatgtacctcgaggcgggcaacctgaccgttgaactgctcgggcgcggatttgcctggctggacactggcactcacgacagcctgattgaagccagtacctttgtgcagacagtagaaaaacgccagggctttaagattgcctgcctggaagagatcgcctggcgtaacggctggctcgatgacgagggtgtgaagcgtgctgccagttcattagcgaaaactggctacggccaatatctgctggagttacttcgtgcccgtccgcgccagtattga

SEQ ID NO: 482644 - DNA, 675 bp, Shigella sonnei
gtgcccgtccgcgccagtattgagccactaacctgggaaaacgccttctttggtgttaacagcgccatcgtgcgcattacgtctgaagcacagctcctgacgccagacgtgttagcgccgtggtcacgggtgcaggccaaaattgcggcatcaaatacgggtgaactggatgccctgcaacagctgggattctccctggtagaaggtgaagttgatttggcactacccgtgaacaatgtcagtgatagtggtgctgtagtggcacaagagaccgatattcccgcattacgtcagttagccagcgccgcatttgcgcaaagccgttttcgtgcgccgtggtatgcgcctgacgccagcggacgcttttatgcacagtggattgaaaatgccgtgcgcggcacctttgatcatcaatgtctgattttacgtgcggcgtccggcggtattcgcggttatgtctctttacgggaactcaatgcgacagatgcgcgaattggcctgctggctggacgcggtgcaggtgctgagctgatgcaaacggcgctaaactgggcgtatgctcgcggtaaaacaactttgcgggtggcgacccaaatgggcaacaccgccgcgcttaaacgatacatacaaagtggtgcgaatgtagaaagcaccgcgtactggttatacaggtga

SEQ ID NO: 482645 - DNA, 1131 bp, Shigella sonnei
atgattccatttaacgcaccgccggtggtgggaaccgaactcgactatatgcagtcggcaatgggtagcggcaaactgtgtggcgatggcggttttacccgtcgctgccagcagtggctggagcaacgttttggcagcgccaaagtgttactgacgccgtcctgcaccgcttcgctggagatggcggcgctgctgctcgatatccagcctggcgatgaagtgatcatgccgagctacacctttgtctccaccgccaatgcctttgtgctgcgtggcgcaaaaatcgtttttgtggatgttcgcccggacaccatgaacatcgacgaaacgctgattgaagcggcgatcaccgacaaaacgcgcgttatcgtgccggtccattacgcgggtgtggcctgcgaaatggacaccattatggcgttggcgaaaaagcataatctgtttgtggtagaagatgccgctcagggcgtgatgtccacttacaaagggcgtgcactgggaaccattggtcatattggctgctttagcttccatgaaaccaaaaactatacggcgggtggtgaaggcggcgcgacgctgattaacgataaagcgttaatcgaacgagccgagatcatccgtgaaaagggcactaaccgcagccagttcttccgtggtcaggtcgataaatatacctggcgcgatattggctccagctatttgatgtccgatctgcaagctgcgtacctgtgggcgcaactggaagcagcggatcgtatcaaccagcaacgtctggcgctgtggcaaaactactacgatgcgttagcgcctctggcgaaagccgggcgtatcgagctgccgtcgattcccgatggctgcgtgcagaacgcgcatatgttctacattaaactgcgggatattgatgaccggagcgcgttgattaactttctgaaagaagcggaaatcatggcggtgttccattacattccgctgcacggttgccctgcgggggaacgctttggtgagttccacggtgaagatcgctacaccaccaaagagagcgagcgcctgctgcgcctgccgctgttctacaacctgtcgcccgtcaatcagcgtacggtaattgcgactttgttgaactacttctcctga

SEQ ID NO: 482646 - DNA, 1251 bp, Shigella sonnei
atgtcgttggcaaaagcgtccttgtggacggcggccagtacactggtcaagattggtgccgggttactggtcggtaagttgctggctgtgtcatttggtccggcggggcttgggctggcggcaaatttccgccagttgattaccgtgctcggcgtgcttgccggagctggcatctttaacggtgtaaccaaatacgttgcccagtaccatgataatccgcaacagctgcgccgcgtggtcggcacttcatcagcgatggtacttggtttctctacgctgatggcgctggtttttgtgctggcagctgcgccaatcagccagggactgtttggtaataccgactatcaggggctggtgcgtttagtggcgctggtgcaaatggggatcgcctggggcaacctgttactggcgctgatgaaaggctttcgcgatgccgcaggtaatgcgttatcgctgattgtcggcagcttgattggcgttctcgcgtactacgtcagttaccgtttgggcggttatgaaggggcgttgctgggtctggcgctgattcccgcgctggtggtgattcctgccgccatcatgttgatcaaacgtggtgtcatcccgttaagctatctgaaacccagctgggataacggtctggcagggcagttgagcaaatttacgctcatggcgttgattacgtcggtgaccttgcctgttgcttacatcatgatgcgtaaactgctggcggcgcagtatagctgggatgaagtggggatctggcaaggggtgagcagtatttccgatgcctacctgcaatttattacggcatcgttcagcgtatatttgctgcccacgttgtcgcggctaacggaaaagcgcgatatcacccgggaagtggttaaatcgctgaaattcgtcttaccggcagtggcggcggcgagttttaccgtctggttgctgcgtgattttgctatctggttgctgttgtcgaataaatttaccgctatgcgcgatctctttgcctggcagttagtgggtgatgtgttaaaagtgggcgcttatgtctttggttatctggtgatcgccaaagcgtcactgcggttttatattctggcggaagtcagccagttcactttattgatggtatttgcccactggctaatccctgcgcatggtgcactgggcgcggcgcaggcatatatggcaacttatatcgtctatttttctctttgttgtggcgtgtttttactctggcgtaggcgggcatga

SEQ ID NO: 482647 - DNA, 1080 bp, Shigella sonnei
atgactgtactgattcacgtactgggatcggatatccctcaccataaccgaaccgttttgcggtttttcaatgacgcgctggccgcgacgagcgagcacgcgcgcgagtttatggttgttggcaaggacgacggcttaagtgatagctgtccggcgctttctgtgcaatttttccctgggaaaaaatcgctggcggaagcggtcatcgcgaaagcaaaagctaaccgtcagcagcgattttttttccacggtcagttcaatcccacactgtggctggctctgctgagtggtggcattaagcccagccagtttttctggcatatctggggggcagacctgtatgagctttccagtggcttgagatataagcttttttacccgctacgtcgcctggcgcaaaagcgagtcggctgtgtatttgccacccgcggtgatttgagcttttttgccaaaacgcatccaaaggtgcggggcgaactgctgtacttcccgacgcggatggacccttctctcaatacgatggcgaatgatcggcaacgtgaagggaaaatgaccattctggtggggaactccggtgaccgcagcaatgaccatattgctgccttgcgcgccgttcatcagcaatttggcgatacggtaaaagtggtggtgccgatgggatatccgcctaataacgaagcgtacattgaggaagttcgtcaggcggggctggagttattcagcgaagaaaatctgcaaattttgagcgaaaaactggaatttgacgcctatctggcgctacttcgtcagtgcgatcttggttactttatttttgcccgccagcagggcattggtacgctttgcttactgattcaggcgggcattccttgtgtgcttaaccgggaaaatccgttctggcaggatatgacggaacagcatttgccggtgctgtttactaccgacgatctcaacgaggatattgtgcgtgaagcgcagcgccagttggcgtcggtggataaaaacaccattgccttctttagccctaactatctacaaggctggcagcgggcgttggctattgccgccggggaggtcgcatga

SEQ ID NO: 482648 - DNA, 1353 bp, Shigella sonnei
atgagtctgctgcaattcagtggcctgtttgtggtctggctgctctgcacgctgtttattgccacgctgacctggtttgagtttcgccgtgtgcgctttaacttcaatgtcttcttttcattgctgtttttgctcacctttttcttcggcttcccgctgaccagcgtgctggtatttcgctttgatgttggtgtcgcgccgccagaaatcttgttgcaggcgttgctttctgcgggctgcttctacgcggtttactatgtcacctacaaaacccgcctacgcaaacgcgttgctgatgtaccgcgccgtccgctgtttaccatgaaccgcgtggagaccaatcttacgtgggtgatcctgatgggtatcgcgctggtaagcgtcggcatcttcttcatgcacaacggctttttgctgttccggcttaactcctacagtcagatcttctccagtgaagtctccggcgtggcgttaaaacgcttcttttactttttcatcccggcgatgctggtggtctactttctgcgccaggacagcaaagcgtggctgtttttcctcgtcagcacggtcgcctttggcttgctgacttatatgattgtcggcggcactcgcgccaatatcatcatcgcattcgctatcttcctgtttattggcattattcgcggctggatttcgttgtggatgctggcggcggcgggcgtgctggggattgttggcatgttctggctggcgctaaaacgctatggaatgaatgtgagcggcgatgaagcgttctatacgtttctctatctcactcgcgacaccttctccccgtgggagaatctggcgttgctgttgcagaactacgacaacatcgacttccagggcctggctccaattgtccgcgatttctatgtctttatcccttcctggctgtggccgggtcgcccgagtatggtgctgaactcagccaactactttacctgggaagtgctgaataaccactccggactggcgatctcgcctacgcttataggctcactggtggtgatgggcggcgcgttgttcatcccgctcggggcgatcgtggttggtctgatcatcaaatggttcgactggctgtatgagctgggcaaccgcgagcctaatcgctataaggctgcgatattgcacagtttctgctttggggcgatcttcaatatgatcgtgctggcgcgtgaagggctggattcgtttgtctcacgcgtagtcttttttatcgtggtcttcggcgcatgtctgatgatcgcaaaactgctgtactggctttttgaaagcgccggactcattcataaacgtacaaaatcatcgctccggacgcaggttgaaggataa

SEQ ID NO: 482649 - DNA, 741 bp, Shigella sonnei
atgaataacaacaccacggcaccgacctatacgctgcgtggcttacagttgattggttggcgtgatatgcagcacgccctcgattatctgtttgctgacgggcagcttaagcagggaacgctggttgccattaatgctgaaaaaatgctgaccattgaagataacgccgaggtcagggagttaattaacgctgccgaatttaaatatgcggatggcatcagcgttgtacgttcagtacgtaaaaagtacccgcaggcgcaggtttcccgcgttgccggtgccgatctctgggaagagctgatggcgcgcgcaggcaaagaagggacgccggtatttcttgtgggcggtaaacctgaagtgctggcgcaaactgaagctaaactgcgcaaccaatggaatgtgaatatcgttggcagtcaggatggttattttaaacccgagcagcgtcaggcgctgtttgaacgcattcatgccagcggagcgcaaatcgtcaccgttgcgatgggatcgccaaagcaggagatcttcatgcgcgactgccgtctggtgcatccagatgcgctgtatatgggcgttggcgggacttacgatgttttcaccggtcacgtaaaacgcgcaccgaaaatctggcaaacgctgggactggagtggctctaccgcctgctttcgcagccgagccgcattaagcgtcagcttcgtttgctgcgttatttacgctggcactacaccggcaacctctga

SEQ ID NO: 482650 - DNA, 1386 bp, Shigella sonnei
atggcagataacaaaccagagctacagcgtgggctggaagctcgacatatcgaactcatcgccctggggggcactattggcgtcggcctgtttatgggggccgccagtaccctgaaatgggccgggccatccgtattgttggcctatatcatcgccgggctgttcgtctttttcatcatgcgttcaatgggcgaaatgttgttccttgaacctgttaccggttcgttcgccgtttatgcgcatcgttatatgagcccgttttttggttatctcaccgcctggtcttactggtttatgtggatggcggtggggatctcagaaatcaccgccattggcgtttatgtccagttctggttcccggagatggcgcagtggatacctgcattgatcgcggtggcgctggtggcgttggcgaatctggcggcggtgcggttgtacggcgaaatcgagttctggttcgcgatgatcaaagtcaccacgattatcgtgatgattgtcattggcctgggcgtgattttctttggctttggcaatggcgggcagtcgattggttttagcaatctcacagagcatggcggtttctttgcgggtggctggaaagggttcctgaccgcgctgtgtattgtggtggcgtcctaccagggcgtggagctgattggcattactgccggtgaagcgaagaatccgcaggtgacgctgcgcagtgctgtaggcaaagtgctgtggcggatcctgattttctacgtaggcgcgattttcgttatcgtcaccatcttcccgtggaatgaaattggcagcaacggcagcccgttcgtactgacttttgccaaaatcggtattaccgcagcggcgggcattatcaactttgtggtgctgacggctgcgctctctggctgtaacagcggcatgtacagttgcggacgtatgctctacgcactggcgaaaaaccgtcagttaccggcggcgatggcgaaagtttcccgtcacggcgtaccagttgcgggtgtggcagtatctattgctattctgctaattggctcatgcctgaactacatcattcccaatccgcagcgtgtgtttgtctacgtctacagtgccagcgtgcttccggggatggtgccatggtttgtgatattgataagccagctgcgttttcggcgtgcacataaagcggcgattgccagccatccgttccgctcaatcctgttcccgtgggccaactacgtaacaatggcattcctgatttgcgttttgatcggcatgtactttaatgaagatacgcgtatgtcgctgtttgttggcatcatctttatgctggcggtgacggcgatttataaagtttttggccttaatcgccacgggaaagcgcataaactggaggaataa

SEQ ID NO: 482651 - DNA, 1236 bp, Shigella sonnei
atgctgcaacaggttccaacgcgtgcttttcatgtgatggcgaaaccgagtggttccgattgtaatctgaactgtgactactgtttttatctcgaaaaacaatccctttaccgcgaaaagccagtcacgcatatggacgatgacacgctggaagcgtatgtccgtcactatatcgctgccagcgaaccgcaaaacgaagtggcttttacctggcagggcggcgaaccaacgttactcgggctggatttttaccgccgtgccgtaaagttacaggcgaaatacggtgctggcaggaagataagtaacagcttccagactaacggcgtgctgctcgatgataaatggtgtgcatttctggcagaaaatcattttcttgttgggttatcgctggacggtccggctgagatccacaatcaatatcgcgtgaccaaaggtggcagaccaacgcataagctggtgatgcgtgccctgacgctgctgcaaaaacatcatgtcgactataacgtgctggtctgcgtcaaccgcaccagcgcgcagcaaccgttgcaggtttatgattttttgtgcgatgcgggagtcgaattcatccagtttattccggtggtcgagcgtctggctgatgaaacagctgcccgcgatggactgaaattgcatgcgcctggtgatattcagggggaactgacggaatggtcggtgcgccccgatgaatttggtgaatttctggtggcgatattcgaccactggatcaaacgcgacgtcggcaagattttcgtgatgaatatcgaatgggcgtttgccaattttgtcggtgcgccgggtgcggtttgccatcatcagccaacctgtgggcgctcggtgattgttgagcacaacggcgacgtttacgcctgcgatcactatgtttatccgcaatatcggctggggaatatgcatcagcaaacaattgcagaaatgatcgattccccgcaacagcaggtgtttggtgaagataaatttaagcaattaccggcgcagtgtcgcagttgtaacgtgttaaaagcgtgctggggaggctgcccgaaacaccgcttcatgctcgatgccagcggcaaaccggggctgaattatttgtgtgccgggtatcagcgttatttccgccatctaccgccatatcttaaagcaatggctgatttgctggcgcacggtcgcccggccagtgacattatgcaggcacatttgctggtggtgaataagtaa

SEQ ID NO: 482652 - DNA, 162 bp, Shigella sonnei
atggaattttcgttttcacccaaacttcttgttgttgctgtcgccgccgctcttcctctcatggccagcgcagcagataccccgtcaactgccaccgcacgcaaaggctttgccggatacgatcacccaaaccagtatccacagaacgctgcaatttattga

SEQ ID NO: 482653 - DNA, 1197 bp, Shigella sonnei
atgctaaaagtgttattactctttgttttgctgattgcggggatagtggttggcccgatgattgccggtcatcagggttacgtgctgatccagactgacaactacaatatcgaaaccagcgtcacgggcctggcgattattttgattctggcgatggtagtgctgtttgccattgagtggctactgcggcggatcttccgcacaggcgcacacacccgtgggtggtttgtcggacgtaagcgtcgccgtgcccgtaagcagaccgaacaggcgctgctgaaactggcggaaggcgattatcagcaagttgaaaagctgatggcgaaaaatgccgatcacgcggaacaaccggtggtgaactatctactggctgccgaagccgcgcaacaacgtggtgatgaagcacgcgccaaccaacatctggaacgcgcagcagagctggccggcaatgacaccattccggtagaaatcacccgtgtacgtctgcaactggcccgtaatgaaaaccatgctgcacgccacggcgtggataagctgctggaagttacgccacgccatccggaagtattacgtctggcggaacaggcgtatatccgcacaggtgcatggagttctctgctggatatcatcccatcaatggcgaaagcccatgttggtgatgaagaacatcgtgcaatgctggaacaacaggcatggattggcctgatggatcaggcgcgtgccgataacggtagtgaaggtttgcgtaactggtggaaaaaccaaagccggaaaacgcgtcatcaggtagcgttgcaggtggcaatggcggaacatcttattgaatgtgacgatcatgatactgcccagcaaattatcatcgatggcctgaaacgccagtacgacgatcgcctactgctgccgattcctcgactgaaaaccaacaatccggaacagctggaaaaagtgctgcgccagcagatcaaaaacgtcggcgatcgcccgctgttgtggagcacactgggccagtcactgatgaagcacggagaatggcaggaagcatcgctcgccttccgcgcagcgctgaaacaacgtccggacgcctacgattacgcatggcttgccgacgcgctggacagactgcacaagccggaagaagctgcagcgatgcgtcgcgacggtttgatgttaacgttgcagaacaacccaccacagtag

SEQ ID NO: 482654 - DNA, 1230 bp, Shigella sonnei
atgacggaacaagaaaaaacctccgccgtggttgaagagactagggaggccgtggacaccacgtcacaacctgtcgcaacagaaaaaaagagtaagaacaataccgcattgattctcagcgcggcggctatcgctattgctctggcggcgggcgtcggtttgtatggctggggtaaacaacaggccgtcaatcagaccgccaccagcgatgccctggctaaccaactgacggcattgcaaaaagcccaggagagccaaaaagccgaactggaaggcattattaagcaacaggctacgcagcttgaacaggcgaatcgtcagcaagaaacgctggcaaaacagctggatgaagtccagcaaaaggtcgccaccatttccggcagcgatgctaaaacctggctgctggcccaggccgattttctggtgaaactcgccggacggaagctgtggagcgatcaggacgtcacgaccgctgcagcgttgctgaaaagtgcagacgccagcctggcggatatgaatgacccgagtctgattaccgttcgtcgggcaattaccgatgatatcgccagcctttctgcagtatcgcaggtggattatgacggcatcatccttaagcttaatcagctttcaaatcaggtagataacctgcgtctggccgataatgacagcgatggttcgccgatggattcagacggtgaagagctttccagttccatcagcgaatggcgtatcaatctgcaaaaaagctggcagaactttatggacaacttcattacgattcgccgtcgtgatgacaccgccgtaccgctgttagcgccaaatcaggatatctatctgcgcgaaaatattcgctctcgcctgctggtcgcagcacaagctgtaccgcgtcatcaggaagagacttatcgccaggcgctggagaacgtctccacctgggtacgtgcttactacgatactgatgatgccaccaccaaagcgttcctcgacgaggtggaccagttaagccagcaaaatatctcgatggatcttccggaaaccctgcaaagccaggcgatgctggaaaaactgatgcagacccgcgtgcgtaacctgctggcacaaccggcagcggggacaacggaagctaaacctgcacctgcacctgcacctgcacctgcacctgcacctgcacctgcacctgcacctgcaccgcaaggtgatactccggcagccgcgccgcaaggagaataa

SEQ ID NO: 482655 - DNA, 741 bp, Shigella sonnei
atgagtatccttgtcacccgcccgtctcccgctggagaagagttagtgagccgtctgcgcacactggggcaggtggcctggcattttccgctgattgagttttctccgggtcaacaattaccgcaacttgctgatcaactggcagcgctgggggagagcgatctgttgtttgccctctcgcaacacgcggttgcttttgcccaatcacagctacatcagcaagatcgtaaatggccccgactacctaattatttcgccattggacgcaccaccgcactggcactacataccgtaagcggacagaagattctctacccgcaggatcgggaaatcagcgaagtcttgctacaattacctgaattacaaaatattgcgggcaaacgtgcgctgatattacgtggcaatggcggtcgtgagctaattggggataccctgacggcgcgcggtgctgaggtcactttttgtgaatgttatcaacgatgcgcaatccattacgatggtgcagaagaagcgatgcgctggcaatcccgcgaggtgacgacggtcgttgttaccagcggtgaaatgttgcagcaactctggtcgctgatcccacaatggtatcgtgagcactggttactacactgtcgactattggtcgtcagtgagcgtttggcgaaactcgcccgggaactgggctggcaagacattaaggtcgccgataacgctgccaacgatgcgcttttacgggcattacaataa

SEQ ID NO: 482656 - DNA, 963 bp, Shigella sonnei
atgataatgacggtaacaagcatgttagacaatgttttaagaattgccacacgccaaagcccacttgcactctggcaggcacactatgtcaaagacaagttgatggcgagccatccgggcctggtcgttgaactggtaccgatggtgacgcgcggcgatgtgattcttgatacgccgctggcgaaagtaggcggaaaaggcttatttgtaaaagagctggaagtcgcgctcctcgaaaatcgcgccgatatcgccgtacattcaatgaaagatgtgccggttgaattcccgcaaggtctgggactggtcactatttgtgagcgtgaagatcctcgcgatgcctttgtgtccaataactatgacagtctggatgcgttaccagcaggcagtatcgtcgggacgtccagtttacgtcgccagtgccaactggctgaacgccgcccggatctgattatccgctccctgcgcggcaacgtcggcactcgcctgagcaaactagataacggcgaatacgatgccatcattcttgccgtagccggactaaaacgtttaggtctggagtcccgcattcgcgccgcgttaccacccgagatttctcttccggcggtaggacaaggtgcagtcggtattgaatgccgccttgatgatacgcgcactcgcgagctgcttgccgcgctgaatcaccacgaaactgcactgcgcgttaccgcagaacgcgccatgaatacccgtctcgaaggcggatgtcaggtgccaattggtagctacgccgagcttattgatggcgaaatctggctgcgtgcgctggtcggcgcgccggacggttcgcagattattcgcggtgaacgccgcggtgcgccgcaaaatgccaaacaaatggggatttcgctggcagaagagctactgaataacggcgcgcgcgagatcctcgctgaagtctataacggagacgccccggcatga

SEQ ID NO: 482657 - DNA, 2547 bp, Shigella sonnei
ttgtacctctatattgagactctgaaacagagactggatgccataaatcaattgcgtgtggatcgcgcgcttgctgctatggggcctgcattccaacaggtctacagtctactgccgacattgttgcactatcaccatccgctaatgccgggttaccttgatggtaacgttcccaaaggcatttgcctttacacgcctgatgaaactcaacgccactacctgaacgagcttgaactgtatcgtggaatgtcagtacaggatccaccgaaaggtgagcttccaattactggtgtatacaccatgggcagcacctcgtccgtagggcaaagttgttcctctgacctggatatctgggtctgtcatcaatcctggctcgatagcgaagagcgccagttactacaacgtaaatgcagcctgctggaaagctgggccgcctcgctgggtgtggaagtcagcttcttcctgattgatgaaaaccgctttcgtcataatgaaagcggcagcctggggggcgaagattgtggctccacccagcatatactgctgcttgacgaattttatcgtaccgccgtgcgtctcgccggtaagcgtattctgtggaatatggtgccgtgcgacgaagaagagcattacgacgactatgtgatgacgctttacgcgcagggcgtgctgacgccaaatgaatggctggatctcggtggcttaagctcgctttctgctgaagagtactttggtgccagcctttggcagctctacaagagtatcgattccccatacaaagcggtgctgaaaacactgctgctggaagcctattcctgggaatacccgaacccacgtctgctggcgaaagatatcaaacagcgtttgcacgacggcgagattgtatcgtttggcctcgatccatactgcatgatgctggagcgtgttactgaatacctgacggcgattgaagatttcacccgtctggatttagtacgtcgctgcttctatttaaaagtgtgcgaaaaactcagccgtgaacgcgcctgtgtaggctggcgtcgcgcagtgttgagccagttagtgagcgagtggggttgggacgaagctcgtctggcaatgctcgataaccgtgctaactggaagattgatcaggtgcgtgaggcgcacaacgagttgctcgacgcgatgatgcagagctaccgtaatctgatccgctttgcgcgtcgcaataaccttagcgtctccgccagtccgcaggatatcggcgtgctgacgcgtaagctgtatgccgcgtttgaagcattaccaggtaaagtgacgctggtaaacccgcagatttcacccgatctctcggaaccgaatctgacctttatttatgtgccgccgggccgggctaaccgttcaggttggtatctgtataaccgcgcgccaaatattgagtcgatcatcagccatcagccgctggaatataaccgttacctgaataaactggtggcgtgggcatggtttaacggtctgctgacctcgcgcacccgtttgtatattaaaggtaacggcattgtcgatttgcctaagttgcaggagatggtcgccgacgtgtcgcaccatttcccgctgcgcttacctgcaccgacaccgaaggcgctctacagcccgtgtgagatccgccatctggcgattatcgttaacctggaatatgacccgacagcggcgttccgcaatcaggtggtgcattttgatttccgtaagctggatgtcttcagctttggcgagaatcaaaattgcctggtaggtagcgttgacctgctgtaccgcaactcgtggaacgaagtgcgtacgctgcacttcaacggcgagcaatcgatgatcgaagccctgaaaactattctcggcaaaatgcatcaggacgccgcaccgccagatagcgtggaagtcttctgttatagccagcatctgcgcgggttaatccgtactcgcgtgcagcaactggtttctgagtgtattgaactgcgcctttccagcacccgccaggaaaccgggcgtttcaaggcgctgcgcgtttctggtcaaacctggggcttgttcttcgaacgcctgaatgtatcggtacagaagctggagaacgccatcgagttttatggcgctatttcgcataacaaactgcacggcctgtcagtgcaggttgaaaccaatcacgtcaaattaccggcggtggtggacggctttgctagtgaagggatcatccagttcttcttcgaagaaacgcaagacgagaatggctttaatatctacattcttgacgaaagcaaccgggttgaggtgtatcaccactgcgaaggcagcaaagaggaactggtgcgtgacgtcagtcgcttctactcgtcatcgcacgaccgcttcacctacggctcaagcttcatcaacttcaacctgccgcagttctatcagattgtgaaggttgatggtcgtgaacaggtgattccgttccgcacaaaatctatcggtaacatgccgcctgccaatcaggatcacgatacgccgctattacagcaatatttttcgtga

SEQ ID NO: 482658 - DNA, 321 bp, Shigella sonnei
atgaacgacagtgaatttcatcgcctggctgatcaactctggctgaccattgaagaacgcctggacgactgggatggcgacagcgatatcgactgcgaaatcaacggcggcgtgctgaccattacctttgaaaacggcagcaaaatcattatcaaccgccaggaaccgctgcaccaggtatggctggcaaccaaacaaggcggctaccattttgatctgaaaggcgatgagtggatttgcgatcgcagcggcgaaaccttctgggatttgctggaacaggcggcgacgcagcaggcgggtgaaacagtcagtttccgctaa

SEQ ID NO: 482659 - DNA, 204 bp, Shigella sonnei; identical to SEQ ID NO: 473952

SEQ ID NO: 482660 - DNA, 825 bp, Shigella sonnei
atgcagttctcgaaaatgcatggccttggcaacgattttatggtcgtcgacgcggtaacgcagaatgtctttttttcaccggagctgattcgtcgcctggctgatcggcacctgggggtagggtttgaccaactgctggtggttgagccgccgtatgatcctgaactggattttcactatcgcattttcaatgctgatggcagtgaagtggcgcagtgcggcaacggtgcgcgctgctttgcccgttttgtgcgtctgaaaggactgaccaataagcgtgatatccgcgtcagcaccgccaacgggcggatggttctgaccgtcaccgatgatgatctggtccgcgtaaatatgggcgaacccaacttcgaaccttccgccgtgccgtttcgcgctaacaaagcggaaaagacctatattatgcgcgccgccgagcagacaatcttatgcggcgtggtgtcgatgggaaatccgcattgcgtgattcaggtcgatgatgtcgataccgcggcggtagaaacgcttggtcctgttctggaaagccacgagcgttttccggagcgcgccaatatcggttttatgcaagtggttaagcgcgagcatattcgtttacgcgtttatgagcgtggggcaggagaaacccaggcctgcggcagcggcgcgtgtgcggcggttgcagtagggattcagcaaggtttgctggccgaagaagtacgcgtggaactccccggcggtcgtcttgatatcgcctggaaaggtccgggtcacccgttatatatgactggcccggcggtacatgtctacgacggatttattcatctatga

SEQ ID NO: 482661 - DNA, 708 bp, Shigella sonnei
atgaagcaaccaggggaagaactgcaggaaacactcacggagcttgatgaccgggcggttgtcgattatctgattaaaaatcctgagttttttatccgtaatgcgcgcgcagtagaagcgatacgtgtgccgcatccggtacgcggcaccgtttcgttggtcgagtggcacatggcccgcgcacgtaatcatattcatgttctggaagagaacatggcgctgttgatggaacaggctatcgccaacgaaggcctgttttatcgcctactctacctgcagcgcagtctcaccgccgccagcagtctcgacgatatgctgatgcgctttcaccgctgggcgcgcgatctcggcctggcaggtgcgagtctgcgcctgtttccggatcgctggcgcttaggtgcgccgtcgaaccacactcatctggcattaagccgtcagtctttcgaaccgctgcgtattcagcgtttggggcaggaacagcactatcttgggccgcttaacggaccagagctgctggtggtgctaccggaagcgaaagcggtgggatcggtggcgatgtcgatgctgggaagcgatgctgatttgggtgtcgtgctgtttaccagtcgcgatgccagtcactatcaacaagggcagggaacgcagttacttcatgaaattgcgctgatgttgccggagcttctggagcgttggattgaacgcgtatga

SEQ ID NO: 482662 - DNA, 897 bp, Shigella sonnei
atgaccgatttacacaccgatgtagaacgctacctacgttatctgagcgtggagcgccagcttagcccgataaccctgcttaactaccagcgtcagcttgaggcgatcatcaattttgccagcgaaaacggcctgcaaagctggcagcaatgtgatgtgacgatggtgcgcaattttgctgtacgcagtcgccgtaaagggctgggagcagcaagcctcgcgttacggctttctgcgctacgtagcttttttgactggctggtcagccagaacgaactcaaagctaacccggcgaaaggtgtttcggcaccgaaagcgccgcgtcatctgccgaaaaatatcgacgtcgacgatatgaatcggctgctggacattgatatcaacgatcccctcgctgtacgcgaccgtgcaatgctggaagtgatgtacggcgcgggtctgcgtctttccgagctggtggggctggatatcaaacacctcgacctggagtctggtgaagtgtgggtaatggggaaaggcagcaaagagcgccgcctgccgattggtcgcaacgctgtggcgtggattgagcactggcttgatttgcgcgacctgtttggtagcgaagacgacgcgctttttctgtcgaaactgggcaagcgtatctccgcgcgtaatgtgcagaaacgctttgccgaatggggcataaaacaagggctgaataatcacgttcatccgcataaattacgtcactcgttcgccacgcatatgctggagtcgagcggcgatcttcgtggtgtgcaggagctgctgggtcatgccaacctctccaccacgcaaatctatactcatcttgattttcaacaccttgcctcggtgtacgatgcggcgcatccacgcgccaaacgggggaaataa

SEQ ID NO: 482663 - DNA, 717 bp, Shigella sonnei
atgcgtttttaccggcctttggggcgcatctcggcgctcacctttgacctggatgataccctttacgataaccgtccggtgattttgcgcaccgagcgagaggcgcttacctttgtgcaaaattatcatccggcgctgcgcagcttccagaatgaagatctgcaacgcctgcgccaggcggtacgggaagcggaacccgagatttatcacgacgtgacgcgttggcgttttcgttcgattgaacaagcgatgctcgacgccgggctgagtgccgaagaagccagtgcaggcgcacacgcagcaatgattaactttgccaaatggcgcagccgaatcgacgtcccgcagcaaactcacgacaccttaaaacagctggcgaagaaatggccgctggtggcgatcaccaacggtaacgcccagccggaactgtttggtttgggggattattttgagtttgtgctgcgcgctggcccgcatgggcgctcaaaaccgttcagcgatatgtactttttggctgcggaaaaactcaacgtgccgatcggcgagatcttacatgttggggacgatctcaccactgacgtgggtggggcaattcgcagcggaatgcaggcttgttggatcagaccggaaaatggcgatctgatgcaaacctgggacagccgtttactgccgcatctggaaatttcccggttggcatctctgacctcgctgatataa

SEQ ID NO: 482664 - DNA, 2163 bp, Shigella sonnei
atggacgtttcttacctgctcgacagccttaatgacaaacagcgcgaagcggtggccgcgccacgcagcaaccttctggtgctggcgggcgcgggcagtggtaagacgcgcgtactggtgcatcgtatcgcctggctgatgagcgtggaaaactgctcgccatactcgattatggctgtgacgtttaccaacaaagcggcggcggagatgcgtcatcgtatcgggcaactgatgggcaccagccagggcggcatgtgggtcggcaccttccacgggctggcgcaccgtttgctgcgtgcgcaccatatggacgccaatctaccgcaggatttccagatcctcgacagtgaagaccagctacgcctgcttaagcgtctgatcaaagccatgaacctcgacgagaagcagtggccgccgcgccaggcaatgtggtacatcaacagccagaaagatgaaggcctgcgtccgcatcatattcaaagctacggtaatccggtggagcagacctggcagaaggtgtatcaggcgtatcaggaagcgtgcgatcgtgcgggcctggtggacttcgccgagctgctgctgcgcgctcacgagttgtggcttaacaagccgcatatcctgcaacactaccgcgaacgttttaccaacatcctggtggacgaattccaggataccaacaacattcagtacgcgtggatccgcctgctggcgggcgataccggcaaagtgatgatcgttggcgatgacgaccagtcaatctacggctggcgcggggcgcaggtagagaatattcagcgtttcctcaatgatttccccggtgctgaaactatccgtctggagcagaactaccgctctaccagcaatattctgagcgccgcgaacgccctgattgaaaacaacaacgggcgtctgggtaaaaaactgtggaccgatggcgcggacggtgagcctatttccctctattgcgcttttaacgaactcgacgaagcgcgttttgtggttaaccgcatcaaaacttggcaggacaacggcggggcgcttgccgagtgcgccattctctaccgcagtaacgcccagtcgcgtgtactggaagaagcactgttgcaggccagtatgccgtaccgtatttacggcgggatgcgcttcttcgaacgccaggaaatcaaagacgcgctctcgtatctgcgtctgattgccaaccgtaacgacgacgcggcgtttgagcgcgtggtgaatacgccaacgcggggtattggtgaccggacgctggacgtggtacgtcagacatcgcgcgatcgccagttaacactctggcaggcatgtcgtgaactgttgcaggaaaaagccctcgccgggcgagctgccagcgccttgcagcgatttatggaattaatcgatgccttagcgcaagaaactgccgatatgccgctgcatgtacagactgaccgggtaattaaagactccggcctgcgtaccatgtacgagcaggagaagggcgaaaaaggtcagacgcgtatcgaaaacttagaggaactggtgacggcaacgcgccagttcagctacaacgaagaagacgaagatttaatgccgctgcaggcgttcctctcccatgcggcactggaagcaggtgaagggcaggcggatacttggcaggatgcggtgcagttgatgacgctacactcggcgaaagggctggagttcccgcaggtgtttatcgtcggtatggaagagggcatgttcccaagccagatgtcgctggatgaaggcggacgtctggaagaagaacgccgtctggcctacgttggcgtaacccgtgcgatgcagaaactgacgctgacctacgcggaaactcgccgtctgtatggcaaagaggtttaccatcgcccgtcgcgctttatcggcgagctgccggaagagtgtgtggaagaggtgcgcctgcgcgccacggtaagccgcccggttagccatcagcggatgggtacgccgatggtcgagaacgacagcggctacaaactcggccagcgcgtgcgccacgctaagtttggtgaaggcaccatcgtcaatatggaaggcagcggtgaacatagccgtttgcaggtggcattccagggccagggaatcaaatggctggtggcggcttacgcccggctggagacggtgtaa

SEQ ID NO: 482665 - DNA, 903 bp, Shigella sonnei
atgaaaaaaacgctcgcaacgttatttttattaacgtgtctgggatcatcatccgcttatgcggataacgctttgattttacaaactgattttagcctgaaagatggtgccgtctcggcgatgaaaggggtcgcattcggtgttgaccataatcttaaaatatttgatttaacacacgaaattccaccgtataacatctgggaaggcgcttaccgcctgtatcagaccgccagttactggccgcaaggttcggtatttgtcagtgtggtcgatcctggtgttggtacagaccgtaaatcggtagtgctaaaaaccaaaaacggtcaatacttcgtttcaccagataacggtacgctcactttggtggcggaatcgctgggtattgagagcgtccggcaaatcgatgaaaaaaccaaccgcctgaaaggttccgaaaagtcatataccttccacggtcgtgacgtgtatgcctacaccggtgcacgcctggcttccggagcgatcacgttcgaacaggtggggccagagcttcctgcaaaagttgtcgaactttcttatcagaaagccaaagcaacaaaaggtgaagtgaagggcaatatcccgattctcgatattcagtacggcaacgtctggagcaatatcagcgacgagttgctgaatcaggcaggaatcaaactcaacgacacgttgtgtgtaaccatttccgaaggttcccagcaaaaatacgcagggaaaatgccgtatgtcgcaagcttcggcgatgtgccggaaggccagccgatggtgtatctaaacagcttattgaatgtttccgtggcgctcaatatggataatttcgcgcagaaacatcaagttgcgtctggtgctgactggaatattgatgtgaagaagtgcgctaagtaa

SEQ ID NO: 482666 - DNA, 432 bp, Shigella sonnei
gtggcgttaaatctcgcttcaggtgaagggaatttctttatccgtcctggcggcgtgttttatgtcgcgggagataaagtcgacatcgttcgtctggatgccttcaaaaccagtaaagagattcagtttgcggtgcagtcagggccaatgttgatggaaaacagtgtaattaatccgcgtattcatcccaacgtcgcctcacgtaaaattcgtaacggtgttgggattaataaacatgggaatgccgtgtttttgttgagccagcaggcgacaaatttttatgattttgcctgttatgccaaagcgaaactgaacgttgagcagctgctttatcttgatggcacgatttcacatatgtatatgaaaggcggggcaatcccgtggcaacgctatccttttgtcaccatgatttccgtcgagaggaaaggttaa

SEQ ID NO: 482667 - DNA, 774 bp, Shigella sonnei
atgtccgagaataaattaaacgttatcgatttgcacaaacgctacggcgaacatgaagtgctgaaaggggtctcactgcaagcgaatgccggagatgtaataagcatcatcggatcgtcgggatcggggaaaagtacctttctgcgctgcattaacttcctcgaaaaaccgagtgaagggtcgatcgtggtcaatggccagacgatcaatctggtgcgcgacaaagacggtcaactcaaagtcgccgataaaaatcaactgcgcttactgcgcacacgcctgacgatggtattccagcacttcaatctctggagccatatgacggtgctggaaaacgtcatggaagcgccgattcaggtgttgggcctgagcaagcaggaagcgcgcgagcgggcggtgaagtatctggcgaaagtcgggatagacgaacgtgcgcaggggaaatatccggtgcatctttccggcggtcagcaacagcgtgtttctatcgcgcgggcgctggcgatggaaccggaagttttactgtttgatgaacctacctcggcgctcgatcctgaactggtaggcgaagtgttacgtattatgcagcaactggcagaagaggggaaaaccatggtggtagtgactcacgaaatgggctttgctcgccatgtttctactcacgtcattttcctccatcaggggaaaatagaagaagagggcgcgccggagcagttatttggcaacccgcaaagccctcgtctgcaacagttccttaagggatcgctgaaataa

SEQ ID NO: 482668 - DNA, 717 bp, Shigella sonnei; identical to SEQ ID NO: 458747

SEQ ID NO: 482669 - DNA, 687 bp, Shigella sonnei
atgttgtatgggttttcaggtgttattttacagggtgcgctcgtcacgctggagctggctatcagctctgtagtgctcgctgtaatcatcggtttaattggcgctggcggtaagctctcgcaaaatcggctttcggggctgattttcgaagggtacaccacgctgattcgtggcgtgccggacttagtgttgatgctgctgattttctacggtttgcagattgcgctaaacacggtgacggaggcgatgggcgtcgggcagattgatatcgatccgatggtcgctggtattatcactctcggttttatctacggtgcttattttaccgaaacgttccgtggtgcttttatggcagtgccgaaaggacatatagaggcggcgacggcgttcggttttactcgtgggcaagtgtttcggcggatcatgtttccggcgatgatgcgttacgccctgccaggcattggcaacaactggcaggtgatcctcaaatctaccgcactggtttcgttactcggcctggaagatgtggtcaaagccacccaactggcaggcaaaagtacctgggaaccgttctatttcgccatcgtctgtggcgtgatttacctggttttcaccactgtttccaatggtgtgctgctgttccttgagcgccgctactccgtgggtgtgaagagggctgacctgtga

SEQ ID NO: 482670 - DNA, 783 bp, Shigella sonnei; identical to SEQ ID NO: 458749

SEQ ID NO: 482671 - DNA, 783 bp, Shigella sonnei
atgaagaagtcgattctcgctctgtctttgttagtcggtctctccgcagcggcttccagctatgcggcgctaccggagacggtacgtatcggaaccgataccacctatgcgccgttctcgtcgaaagatgctaaaggtgattttgttggctttgatatcgatctcggtaacgagatgtgcaaacggatgcaggtgaaatgtacctgggttgccagtgactttgacgcgctgatcccctcactgaaagcgaaaaaaatcgacgccattatttcgtcgctttccattaccgataaacgtcagcaggagattgccttctccgacaagctgtacgccgcagattctcgtttgattgctgccaaaggttcaccgattcagccaacgctggattcactgaaaggtaaacatgttggtgtgctgcagggatcaacccaggaagcttacgctaacgagacctggcgtagcaaaggcgtggatgtggtggcctatgccaaccaggatttggtctattccgatctggctgcaggacgtctggatgctgcgttacaagatgaagttgctgccagcgaaggattcctcaagcaacctgctggtaaagctttcgcctttgctggctcatcagtaaaagacaaaaaatacttcggtgatggcaccggtgtagggctacgtaaagatgatgctgaactgacggctgccttcaataaggcgcttggcgagctgcgtcaggacggcacctacgacaagatggcgaaaaagtatttcgactttaatgtctacggtgactga

SEQ ID NO: 482672 - DNA, 570 bp, Shigella sonnei
atgaaacgactcattgtaggcatcagcggtgccagcggcgcgatttatggcgtgcgcttattacaggttctgcgcgatgtcacagatatcgaaacgcatctggtgatgagccaggcggcgcgccagaccttatccctcgaaacggatttttccctgcgcgaagtgcaggcattagctgatgtcacgcacgatgcgcgcgatatttccgccagcatctcttccggttctttccagacgctggggatggtgattttaccctgttcaatcaaaaccctttccggcattgtccatagctatactgatggcttactgacccgtgcggcagatgtggtgctgaaagagcgtcgcccgttggtgctctgcgtgcgtgaaacaccattgcacttaggccatctgcgtttaatgactcaggcggcagaaatcggtgcggtgattatgcctcccgttccggcgttttatcatcgcccgcaatcccttgatgatgtgataaatcagacggttaatcgtgttcttgaccagtttgcaataacccttcctgaagatctctttgcccgctggcagggcgcataa

SEQ ID NO: 482673 - DNA, 1518 bp, Shigella sonnei
atgtgcggtattgtcggtatcgccggtgttatgccggttaaccagtcgatttatgatgccttaacggtgcttcagcatcgcggtcaggatgccgccggcatcatcaccatagatgccaataactgcttccgtttgcgtaaagcgaacgggctggtgagcgatgtatttgaagctcgccatatgcagcgtttgcagggcaatatgggcattggtcatgtgcgttaccctacggctggcagctccagcgcctctgaagcgcagccgttttacgttaactccccgtatggcattacgcttgcccacaacggcaatctgaccaacgctcacgagttgcgtaaaaaactgtttgaagaaaaacgccgccacatcaacaccacttccgactcggaaattctgcttaatatcttcgctagcgagctggacaacttccgccactacccgctggaagccgacaatattttcgctgccattgctgccacaaaccgcttaatccgcggcgcatatgcctgtgtggcgatgattatcggccacggtatggttgctttccgcgatccaaacgggattcgtccgctggtactgggaaaacgtgatattgacgagaaccgtacagaatatatggtcgcttccgaaagcgtagcgctcgatacgctgggctttgatttcctgcgtgacgtcgcgccgggcgaagcgatttacatcactgaagaagggcagttgtttacccgtcaatgtgctgacaatccggtcagcaatccgtgcctgtttgagtatgtatactttgctcgcccggactcgttcatcgacaaaatttccgtttacagcgcgcgtgtgaatatgggcacgaaactgggcgagaaaattgcccgcgaatgggaagatctggatatcgacgtggtgatcccgatcccagaaacctcgtgtgatatcgcgctggaaattgctcgtattctgggcaaaccgtaccgccagggcttcgttaaaaaccgctatgttggccgcacctttatcatgccgggccagcagctgcgtcgtaagtccgtgcgccgtaaactgaatgccaaccgcgccgagttccgcgataaaaacgtcctgctggtcgacgactccatcgtccgtggcaccacttctgagcagattatcgagatggcacgcgaagccggagcgaagaaagtgtacctcgcttctgcggcaccggaaattcgcttcccgaacgtttatggtattgatatgccgagcgccacggaactgatcgctcacggtcgcgaagttgatgaaattcgccagatcatcggtgctgacgggttgattttccaggatctgaacgatctgatcgacgccgttcgcgctgaaaatccggatatccagcagtttgaatgctcggtgttcaacggcgtctacgtcaccaaagatgttgatcagggctacctcgatttcctcgatacgttacgtaatgatgacgccaaagcagtgcaacgtcagaacgaagtggaaaatctcgaaatgcataacgaaggatga

SEQ ID NO: 482674 - DNA, 489 bp, Shigella sonnei
atggtctggattgattacgccataatcgcggtgattgctttttcctctctggttagcctgatccgcggctttgttcgtgaagcgttatcgctggtgacatggggttgtgctttctttgttgccagtcattactacacttacctgtcagtctggtttacgggctttgaagacgaactggttcgaaatggaattgccatcgcggtactgtttatcgctaccctgattgttggtgctatcgtgaacttcgtgataggccagttggtggagaaaacggggttgtcaggcaccgatcgggtgctgggcgtctgtttcggtgcgttgcgcggtgtgttgattgttgccgccattctcttctttctcgactcctttaccggggtgtcgaaaagcgaagactggagcaaatcacagctgatcccgcagttcagttttatcatcagatggttttttgattatctgcaaagctcgtcaagtttcttgcccagagcgtaa

SEQ ID NO: 482675 - DNA, 663 bp, Shigella sonnei
gtggcaagtaagtttcagaatcggttagtgggcacgatcgtgctggtggcgctgggggtgattgtacttccagggctgctggacgggcagaaaaaacattatcaggatgagtttgcggctatcccgctggttccaaaagcgggcgatcgcgatgagcctgatatgatgccagccgccacccaggcgttgccgacgcagccgccggaaggcgcagcggaagaggtgcgggcaggtgatgccgcagcaccgtcgctcgatccggccactattgcagccaataacaccgagtttgaaccggaacctgcaccggtcgccccaccgaagccgaaaccggtggagccgcctaaaccgaaggttgaagcaccacctgcgccgaagccagaaccgaagccggtcgtggaagaaaaagcagcgccaacgggtaaagcctatgttgtgcaactgggtgcgctgaaaaatgccgataaagtgaatgagattgtcggtaagctgcgcggtgccggttatcgggtttatacgtcgccatccacgccagtgcagggtaaaattacccgtattctggttgggccggatgcctcgaaagataagctgaaaggttcgctgggtgagttgaagcaactttctggcttaagtggcgtggtaatgggctatacgccgaattaa

SEQ ID NO: 482676 - DNA, 1269 bp, Shigella sonnei
atgattatcaaacgcactcctcaagccgcgtcgcctctggcttcgtggctttcttatctggaaaacctgcacagtaaaactatcgatctcggccttgagcgcgtgagccaggtcgcggcgcgtcttggcgtcctgaaaccagcgccatttgtgtttaccgttgcgggtacgaatggcaaaggcaccacctgccgtacgctggagtcgattctgatggcggcagggtacaaagtgggcgtctacagttcaccgcatctggtgcgttataccgagcgcgtacgtgtgcaggggcaggaattgccggaatcggcccacaccgcctcttttgcggagattgaatcggcacgcggtgatatttccctgacctatttcgagtacggtacgctgtcggcgttgtggctgttcaaacaggcacaacttgacgtagtgattctggaagtagggctgggcggtcgtctggacgcaaccaatattgtcgatgccgatgtggctgtagtaaccagcattgcgctggatcataccgactggctgggaccagatcgcgaaagtattggtcgcgagaaagcaggcatctttcgcagcgcaaaaccggcaattgtcggtgagccggaaatgccttctaccattgctgatgtggcgcaggaaaaaggtgcactgttacaacgtcggggcgttgagtggaactattccgtcaccgatcatgactgggcgtttagcgatgctcacggcacgctggaaaatctgccgttgccgcttgtcccgcaaccgaatgccgcaacagcgctggcggcactgcgtgccagcgggctggaagtcagtgaaaatgccattcgcgacgggattgccagcgcaattttgccgggacgtttccagattgtgagcgagtcgccacgcgttatttttgatgtcgcgcataatccacatgcggcggaatatctcaccgggcgtatgaaagcgctaccgaaaaacgggcgcgtgctggcggttatcggtatgctacatgataaagatattgccggaactctggcctggttgaaaagcgtggttgatgactggtattgtgcgccactggaagggccgcgcggtgccacggcagaacaactgcttgagcatttgggtaacggcaaatcatttgatagcgttgcgcaggcatgggatgccgcaatggcggacgctaaagcggaagacaccgtgctggtgtgtggttctttccacacggtcgcacatgtcatggaagtgattgacgcgaggagaagcggtggcaagtaa

SEQ ID NO: 482677 - DNA, 915 bp, Shigella sonnei
atgagctggattgaacgaattaaaagcaacattactcccacccgcaaggcgagcattcctgaaggggtgtggactaagtgtgatagctgcggtcaggttttataccgcgctgagctggaacgtaatcttgaggtctgtccgaagtgtgaccatcacatgcgtatgacagcgcgtaatcgcctgcatagcctgttagatgaaggaagccttgtggagctgggtagcgagcttgagccgaaagatgtgctgaagtttcgtgactccaagaagtataaagaccgtctggcttctgcgcagaaagaaaccggcgaaaaagatgcgctggtggtgatgaaaggcactctgtatggaatgccggttgtcgctgcggcattcgagttcgcctttatgggcggttcaatggggtctgttgtgggtgcacgtttcgtgcgtgccgttgagcaggcgctggaagataactgcccgctgatctgcttctccgcctctggtggcgcacgtatgcaggaagcactgatgtcgctgatgcagatggcgaaaacctctgcggcactggcaaaaatgcaggagcgcggcttgccgtacatctccgtgctgaccgacccgacgatgggcggtgtttctgcaagtttcgccatgctgggcgatctcaacatcgctgaaccgaaagcgttaattggctttgccggtccgcgtgttatcgaacagaccgttcgcgaaaaactgccgccaggattccagcgcagtgaattcctgatcgagaaaggcgccatcgacatgatcgtccatcgtccggaaatgcgcctgaaactggcgagcattctggcgaagttgatgaatctgccagcgccgaatcctgaagcgccgcgtgaaggcgtagtggtacccccggtaccggatcaggaacctgaggcctga

SEQ ID NO: 482678 - DNA, 660 bp, Shigella sonnei
atggacctgatttatttcctcatcgattttatcctgcacattgacgtgcatctggcagagctggtcgcggagtacggcgtctgggtttatgccattctgtttttgattctgttctgcgaaacggggctggtggtaacgccattcctgcctggtgattcgctgctgtttgttgctggtgcattggcgtcgctggaaactaacgatctcaatgtccatatgatggtggtgcttatgttgattgccgctattgtcggtgatgcagtgaactataccattggacggttatttggtgacaaactgttcagtaacccggattcgaaaatctttcgtcgcagttatcttgataagactcatcagttttacgagagacatggcggcaaaacgattattctcgcccgttttgtaccgatcgtcagaacgttcgcgccgtttgttgcgggaatgggccacatgtcgtaccgtcatttcgccgcttataacgtgatcggcgcactgttgtgggtactgatttttacctacgcgggttatttcttcggcacgctccccttcattcagagcaaccttaagctgatgattgttggcattatttttgtttcaatattgcctggggttttcgaatttattcgtcacaaacgcgctgcggcacgcgccgcaaaataa

SEQ ID NO: 482679 - DNA, 813 bp, Shigella sonnei
atgtccgaccagcaacaactgccagtttataaaattgcgctgggcattgagtacgacggcagtaagtattacggctggcaacggcagaatgaagtccgcagtgtgcaggagaagctggaaaaggcgctctcccaggtggcgaacgaacccatcaccgtcttctgcgccgggcgtactgacgcaggggtacacggtaccgggcaggtggtgcatttcgaaacaaccgcgcagcgcaaagacgcggcgtggaccttgggcgtaaatgcgaatttacctggtgacatcgccgtgcgttgggttaaagctgtacctgatgattttcatgcccgatttagcgccacggctcgccgttatcgctacatcatctacaatcatcggctgcgcccggcggtattgagtaaaggggtaacccatttttacgaaccgctggacgctgaacggatgcatcgggctgcgcaatgcttgctgggcgagaatgatttcacctcgttccgtgcggtgcagtgccagtcccgaaccccgtggcgcaacgttatgcatattaatgtcacgcgtcacggtccttatgtggtggtagatatcaaagcgaatgcctttgtacatcatatggtcaggaatattgtcggcagcctgatggaagtcggtgcccacaaccagccggagagatggatagcagagttgctggcggcaaaggacagaacgctggcggcagcaacggcaaaagcggaagggctgtatctggtcgcggtggattaccctgaccggtatgatcttccaaaaccgccaatgggcccgctatttctggcggactaa

SEQ ID NO: 482680 - DNA, 1014 bp, Shigella sonnei
atgtctgaaggctggaacattgccgtcctgggcgcaactggcgctgtgggcgaagccctgcttgaaacgctggctgaacgtcagttcccggttggggaaatttatgcactggcacgtaacgaaagcgcaggcgaacaactgcgctttggtggtaaaacaatcactgtgcaggatgccgctgaattcgactggacgcaggcgcagctggcattttttgtcgcaggcaaagaagctaccgctgcctgggttgaagaagcgaccaactcaggttgcctggtgatcgacagcagcggactgtttgctctcgaacccgacgtaccgctggtggtgccggaagtaaacccgtttgtactgaccgattaccgcaaccggaatgtcatcgccgtaccagacagtctgaccagccagctgctggcggcactgaaaccgttaatcgatcagggcggtttgtcgcgtatcagtgttaccagcctgatttcagcctccgcccagggcaaaaaagcggtcgatgcgttagcggggcagagtgcgaaattgctcaacggcattccgattgacgaagaagatttcttcggtcgtcaactggcgttcaatatgctgccgttgttgccggatagcgaaggtagcgtgcgtgaagaacgtcgtatcgttgacgaagtacgcaaaatcctgcaggacgaagggctgatgatttcggcaagcgtcgtccaggcaccggtattctacggtcatgcccagatggtcaactttgaagcactgcgtccgctggcggcagaagaagcgcgtgatgcgtttgctcagggcgaagatattgtgctctctgaagagaacgaattcccgactcaggtaggggatgcttcgggtacgccgcatctttctgttggctgcgtgcgtaatgactacggtatgccggagcaagtccagttctggtcggtggccgataacgttcgctttggcggcgcgctgatggcagtaaaaatcgccgagaaactggtgcaggagtatctgtactaa

SEQ ID NO: 482681 - DNA, 1137 bp, Shigella sonnei
gtgaaaatccttgttgatgaaaatatgccttatgcccgcgacttatttagccgtttgggtgaggtgaccgcggttcccgggcgtccaatccccgtcgctcaactggcagacgcggatgcgctgatggtgcgttcggtcacgaaagtgaatgaatctttgctggcaggaaaacccattaaatttgttggcactgccactgcggggaccgaccatgtcgatgaagcatggttgaagcaggcgggaattggtttttccgctgcacctggctgtaatgcgattgcggtggtggaatatgttttctcctcactactgatgcttgccgaacgcgatggattttcactgcacgaccgtacggtggggatcgtgggcgttggtaacgttggacgtcgattgcaggcgcgactggaagcgttagggattaaaacattgctttgcgatccgcctcgcgctgaccgtggggatgagggtgatttccgctcgctggatgaattagttcagcatgcggatattctgactttccatacgccactcttcaaagatgggccgtacaaaacgctgcatctggcggatgaaaaactgatccgtagcctgaagccgggagcgattctgattaacgcctgccgtggcgcagtcgtcgataatactgcgttgctgacctgcctgaatgaaggccagaagttaagcgtagtgctggatgtctgggaaggcgaaccggaacttaacgtggagttgctgacaaaagtggatatcggcacgccgcatatcgcaggttataccctggaaggtaaagcacgcggtactacgcaagtgtttgaagcctatagcaagtttattgggcatgaacagcacgttgcgctggatacattactgcccgcgccagagtttggtcgcattacgctgcatggcccgctcgatcaaccgacgctgaaaaggctggtgcatttggtgtatgatgtgcgccgcgatgacgcaccgctgcgtaaagtcgccgggataccgggtgagttcgataaactgcgcaaaaactatcttgagcgccgtgaatggtcatctctgtatgtaatttgtgatgacgccagtgcggcatcattgctgtgtaaactgggttttaacgccgttcatcatccggcacgttaa

SEQ ID NO: 482682 - DNA, 996 bp, Shigella sonnei
atgatacaacctatttccggccctcctcctgggcaaccaccaggtcagggagataacctgccgtctggcgcgggcaatcagcctttatccagtcagcaacgtacttcgctggaaagcttaatgacgaaagtgacctcactgacgcaacaacaaagagcagaactgtgggcgggtatcaggcacgatattggtctgtcgggagattcaccgctgctttcgcgtcacttccctgccgctgagcataatctggcgcaacgtctgctggccgcgcaaaaaagccattctgcccgccagcttttagcgcaattaggggagtatttacgtctggggaataatcgtcaggcggtcacggattatatccgtcataactttggtcagacgccgctgaatcagctctcaccggagcaattaaaaaccattctcaccctgttgcaggaagggaagatggttattccgcaaccacagcagcgcgaggcgaccgaccgtcctttattaccggcggagcacaatgcgctaaaacagctggtgaccaaacttgcggcggcaacgggggaacccagcaaacagatctggcaatcgatgctggaactttccggggtgaacgatggcgagttaattccagcgaaactgtttaaccatctggtgacctggttgcaggcgcgccagacgttaagccagcaaaatacgccgacgctggaatcactacagatggcgctaaaacaacctttagatgccagtgaactggcagcgttatcggcgtatatccagcaaaaatatggtctttctgcgcaatcatcgctttcttctgcccaggccgaggatattcttaatcagctttatcaacggcgggttaaagggattgatccgcgtgatatgcaaccgctgcttaatccttttccaccgatgatggacacgttgcaaaatatggcaacgcgtcccgcgctgtggatactgttagtcgcgattatcctgatgctggtctggctggttcgttag

SEQ ID NO: 482683 - DNA, 1179 bp, Shigella sonnei
atgactgctgtaagccaaaccgaaacacgatcttctgccaatttttcgctcttccgcatcgcttttgcggtttttctcacctacatgaccgtagggctgccgttgccggttatcccgctgtttgttcatcatgaactgggctatggcaataccatggtcggcattgccgtcgggattcagtttctggctacggtgctgacgcgtggctatgccgggcgactggccgatcaatatggcgcaaaacgttcggcgcttcaggggatgttagcttgtggtctggctggcggcgcgttgctgctggcggcgattttgcctgtctccgcaccgttcaaatttgccctgttggtcatcgggcgtttgattcttgggtttggtgaaagccagttactgacaggcgctctgacctgggggttaggcatcgtagggccaaaacactctggcaaagtgatgtcatggaatggaatggcgatttacggtgccctcgctgttggtgctccgcttggcctgttgattcatagccattacggttttgccgcactggcgatcaccacaatggtattacccttactggcgtgggcctgtaacggcacagtgcgcaaagtaccggccctggcgggagaacgtccatcgctgtggagcgttgtcgggtttatctggaaaccagggttagggctggcactacaaggcgttggttttgcggttatcgggactttcgtttcgctctactttgccagcaaaggatgggcgatggcgggctttactcttaccgagtttggcggcgcatttgtcgtgatgcgcgtcatgtttggctggatgccggaccgttttggcggcgtgaaagtggcgattgtctctctgcttgtagaaacggtgggcttgttgctgctctggcaagccccaggtgcgtgggtcgcattagcgggcgcggcgttaaccggagccggatgttcgcttatctttcctgcgctgggcgtggaggtggttaaacgcgtcccctcacaagttcgcggcaccgcactgggcggttacgccgcgtttcaggatatcgccctcggcgtctccgggccgctggcgggaatgctggcgaccacgtttggttactcttcggtatttcttgccggggcgatctctgcggtgctgggaattattgtcacgatactgtcatttcgtcggggctaa

SEQ ID NO: 482684 - DNA, 1221 bp, Shigella sonnei
atgaaacgtgcagtgattactggcctgggcattgtttccagcatcggtaataaccagcaggaagtcctggcatctctgcgtgaaggacgttcagggatcactttctctcaggagctgaaggattccggcatgcgtagccacgtctggggcaacgtaaaactggataccactggcctcattgaccgcaaagttgtgcgctttatgagcgacgcatccatttatgcattcctttctatggagcaggcaatcgcagatgcgggcctttctccggaagcttaccagaataacccgcgcgttggcctgattgcaggttctggcggcggttccccgcgtttccaggtattcggcgctgacgcaatgcgcggcccgcgcggcctgaaagcggttggcccgtatgtggtcaccaaagcgatggcatccggcgtttctgcctgcctcgccacgccgtttaaaattcatggcgttaactactccatcagctccgcgtgtgcgacttccgcacactgtatcggtaacgcagtagagcagatccaactgggcaaacaggacatcgtgtttgctggcggcggcgaagagctgtgctgggaaatggcctgcgaattcgacgcgatgggtgcgctgtctactaaatacaacgacaccccggaaaaagcctcccgtacttacgacgctcaccgtgacggtttcgttatcgctggcggcggcggtatggtagtggttgaagagctggaacacgcgctggcgcgtggtgctcacatctatgctgaaatcgttggctacggcgcaacctctgatggtgcagacatggttgctccgtctggcgaaggcgcagtacgttgtatgcagatggcgatgcatggcgttgataccccaatcgattacctgaactctcacggtacttcgactccggttggcgacgtgaaagagctggcagctatccgtgaagtgttcggcgataagagcccggcgatttctgcaaccaaagccatgaccggtcactcactgggcgctgcgggtgtgcaggaagctatctactctctgctgatgctggaacacggctttatcgccccgagcatcaacattgaagagctggacgagcaggctgcgggtctgaacatcgtgaccgaaacgaccgatcgcgaactgaccactgttatgtctaacagcttcggcttcggcggcaccaacgccacgctggtaatgcgcaagctgaaagattaa

SEQ ID NO: 482685 - DNA, 2007 bp, Shigella sonnei
gtgaaacactactccatacaacctgccaacctcgaatttaatgctgagggtacacctgtttcccgagattttgacgatgtctatttttccaacgataacgggctggaagagacgcgttatgtttttctgggaggcaaccaattagaggtacgctttcctgagcatccacatcctctgtttgtggtagcagagagcggcttcggcaccggattaaacttcctgacgctatggcaggcatttgatcagtttcgcgaagcgcatccgcaagcgcaattacaacgcttacatttcattagttttgagaaatttcccctcacccgtgcggatttagccttagcgcatcaacactggccggaactggctccgtgggcagaacaacttcaggcgcagtggccaatgcccttgcccggttgccatcgtttattgctcaatgaaggccgcgtgacgctggatttatggtttggcgatattaacgaactgaccagccaactggacgattcgctaaatcaaaaagtagatgcctggtttctggacggctttgcgccagctaaaaacccggatatgtggacgcaaaatctgtttaacgccatggcaaggttggcgcgtccaggcggcacgctggcgacatttacgtctgccggttttgtccgccgcggtttgcaggaagccggattcacgatgcaaaaacgtaagggctttgggcgcaaacgggaaatgctttgtggggtgatggaacagacattaccactcccctgctccacgccgtggtttaatcgtacgggcagcagcaaacgggaagtagcgattatcggcggtggtattgccagcgcgttgttgtcgctggcgttattacggcgcggctggcaggtagcgctttattgcgcggatgaagcccccgcgctgggtgcttccggcaatcgccagggggcgctgtatccgttattaagcaaacacgatgaggcgctaaaccgctttttctctaatgcgtttacttttgctcgtcggttttacgaccaattacccgttaaatttgatcatgactggtgcggcgtcacgcagttaggctgggatgagaaaagccagcataaaatcgcacagatgttgtcaatggatttacccgcagaactggctgtagccgttgaggcaaatgcggttgaacaaattacgggcgttgcgacaaattgcagcggcattacttatccgcaaggtggttggctgtgcccagcagaactgacccgtaatgtgctggaactggcgcaacagcagggtttgcagatttattatcaatatcagttacagaatttatcccgtaaggatgactgttggttgttgaattttgcaggagatcagcaagcaacacacagcgtagtggtactggcgaacgggcatcaaatcagccgtttcagccaaacgtcgactctcccggtgtattcggttgccgggcaggtcagccatattccgacaacgccggaactggcagagctgaagcaggtgctgtgctatgacggttatctcacgccacaaaatccggcgaatcaacatcattgtattggtgccagttatcatcgcggcagcgaagatacggcgtacagtgaggacgatcagcagcagaatcgccagcggttgattgattgtttcccgcaggcacagtgggcaaaagaggttgatgtcagtgataaagaggcgcgctgcggtgtgcgttgtgccacccgcgatcatctgccaatggtaggcaatgttcccgattatgaggcaacactcgtggaatatgcgtcgttggcggagcagaaagatgaggcggtaagcgcgccggtttttgacgatctctttatgtttgcggctttaggttctcgcggtttgtgttctgccccgctgtgtgccgagattctggcggcgcagatgagcgacgaaccgattccgatggatgccagtacgctgacggcgttaaacccgaatcggttatgggtgcggaaattgttgaagggtaaagcggttaaggcggggtaa

SEQ ID NO: 482686 - DNA, 279 bp, Shigella sonnei
atgatcgcggagtttgaatcacgcattctggcattaatcgacggcatggttgaccatgccagtgatgatgagttgtttgccagtgggtatttgcgtggccacctgacattagccatcgcagaactggaaagtggtgatgaccactccgctcaggcggtgcatacgaccgttagccagagtctggaaaaagccattggtgccggtgaattgtcgccgcgtgaccaggcgctggtgaccgatatgtgggaaaacctgtttcagcaggcgtcacagcagtaa

SEQ ID NO: 482687 - DNA, 549 bp, Shigella sonnei
atgaacagtacacaccactatgagcagttgattgaaatttttaatagctgctttgccgatgaatttaatacccgtctgattaaaggcgacgacgaaccgatctatcttcctgctgatgcggaagtaccgtataaccgaattgtctttgcccacggcttttatgccagcgcaattcatgagatttcgcactggtgtattgccggaaaagcgcgccgtgagctggttgatttcggctactggtattgcccggatgggcgtgatgcccaaacgcaaagccagtttgaagatgttgaagtgaagccgcaggcactcgactggttgttctgtgtggcggcgggatatccgtttaacgtcagttgcgacaatctggaaggcgacttcgaaccggatcgtgttgtgtttcaacggcgggtacatgcgcaggtgatggattatctgacaaatggcattcccgagcgtccggcacgcttcattaaagcactacaaaattattatcacacgccggaacttacggcggaacagttcccgtggccggaagcgctcaactga

SEQ ID NO: 482688 - DNA, 810 bp, Shigella sonnei
atggaaacgtttaatagcctgtttatggtttccccgctgttgctgggagttctcttttttgtcgccatgctggcgggatttatcgactcgattgccggtggcggtgggttactcaccattccggcattgatggctgcgggaatgtctcccgctaacgcgctggcaaccaataaactgcaagcctgcggcggctctatttccgccactatctactttattcgccgcaaagtggttagtttaagcgatcagaaactcaatattgccatgacctttgtcggctcaatgagcggcgcactgttggtacagtacgttcaggctgatgtcttacggcagattttgcccattctggtgatttgtatcggcctctatttcttgctgatgccaaagctgggtgaagaagatcgcctgcgccggatgtacggtttacccttcgcgttaattgccggtggctgcgtcggtttttatgacggattctttggcccggctgccggatcgttttacgcgctggccttcgttacgctgtgcggattcaacctcgccaaagccacggctcacgccaaattactcaacgcaacgtcaaacattggcggtctgctgctgtttattctcggcggcaaagtgatttgggcgacgggctttgtcatgctggtggggcagttcctcggcgcgcgcatgggttcacggctggtgttgagcaaaggacaaaagctgatccgcccgatgattgttatcgtctcggcggtgatgagtgccaaattactttacgatagccacggacaggagatcctccactggttggggatgaactaa

SEQ ID NO: 482689 - DNA, 825 bp, Shigella sonnei
atgaacaaaaccgcgattgcgctgctggctctgcttgccagtagcgctagcctggcagcgacgccgtggcaaaaaataacccaacctgtgccgggtagcgcacaatcgataggcagtttttctaatggctgtattgtcggcgctgacacgttgccgatacagtccgaacattatcaggtcatgcgtaccgatcagcgtcgctatttcggtcacccggatctggtgatgtttatccagcgtctgagtagccaggtgagcaatctgggcatgggtacggtgctgattggcgatatggggatgcccgctggtgggcgtttcaacggcggtcatgccagccaccagaccggactggatgtcgatatctttctgcaactgccgaaaactcgctggacctccgcgcagctcttgcgcccgcaagcactggacttagtttcccgcgacggtaaacacgttgtctccacgctgtggaagccagaaattttcagcttgatcaaactcgctgcccaggacaaagacgtcacgcgcatttttgttaatccggcgattaaacaacaactttgccttgatgcgggcaccgatcgcgactggttgcgcaaagtgcgaccctggttccagcatcgcgcgcatatgcatgtacgattacgttgccctgccgatagtctggagtgtgaagatcaacctttaccgccatcaggcgatggttgcggggcagaactgcaaagctggtttgcacctctaaaaccgggaacaacaaagcctgagaagaagacaccgcctccgttgccgccttcctgccaggcgctactggatgagcacgtgatctaa

SEQ ID NO: 482690 - DNA, 1086 bp, Shigella sonnei
atggctggaaacacaattggacaactctttcgcgtaaccaccttcggcgaatcgcatgggctggcgctcggctgcatcgtcgatggtgttccgccaggcattccgctgacggaagcggacctgcaacatgacctcgaccgtcgtcgccctgggacatcgcgctataccacccagcgccgcgagccggatcaggtcaaaattctctccggtgtttttgaaggcgttactactggcaccagcattggcttgttgatcgaaaacactgaccagcgctctcaggattacagcgcaattaaagacgttttccgcccaggccatgctgattacacctacgaacaaaaatacggtctgcgcgattatcgcggcggtggacgttcttccgcccgcgaaaccgccatgcgcgtggcggcaggggcgattgccaaaaaatatctcgccgagaaatttggtattgaaatccgcggctgcttgacccagatgggcgacattccgctggaaatcaaagactggtcgctggttgaacaaaatccgttcttctgcccggacccggacaaaatcgacgcgttagatgaactgatgcgcgcgctgaaaaaagagggcgactccatcggcgcgaaagtcaccgttgttgccagtggtgtccccgccggacttggcgagccggtctttgaccgcctggatgccgacatcgcccatgcgctgatgagcatcaacgcggtgaaaggcgtggaaattggcgacggttttgacgtagtggcgctgcgcggcagccagaaccgcgacgaaatcaccaaagacggtttccagagcaaccatgcgggcggcattctcggcggtatcagcagcgggcagcaaatcattgctcatatggcgctgaaaccgacctccagcattaccgtgccggggcgcactattaaccgctttggcgaagaagttgagatgatcaccaaaggccgtcacgatccctgtgtcgggatccgtgcagtgccgatcgctgaagcgatgctggcgatcgttttaatggatcacctgttacggcagcgggcgcaaaatgccgatgtgaagactgatattccacgctggtaa

SEQ ID NO: 482691 - DNA, 933 bp, Shigella sonnei
gtggataaaattttcgttgatgaagcagtaaatgagctgcaaaccattcaggacatgttgcgctggtcggtaagccgcttcagcgcggcaaatatctggtacggtcacggcaccgataacccgtgggatgaagccgtacagctggtgttaccatcgctctacctgccgctggatatcccggaagatatgcgcaccgcgcgtctgacctccagcgaaaaacaccgtattgttgaacgcgtgatccgccgcgtcaacgagcgcattccggtggcttacctgaccaacaaagcctggttctgcggtcatgaattttacgtcgatgaacgcgtgctggtgccgcgctcgccgattggtgaactgatcaacaataaatttgccggactcattagcaagcaaccgcagcatattttagatatgtgtaccggtagcggctgcatcgccattgcctgtgcttatgccttcccggaagcggaagtcgacgcggtagatatctctcccgacgcgctggcggttgccgaacagaacatcgaagaacacggtctgatccacaacgtcattccgattcgttccgatctgttccgtgatttgccgaaagtgcagtacgatctgattgtcactaacccgccgtatgtcgacgcggaagatatgtccgacctgccaaacgaataccgtcacgagccggaactgggcctggcatctggcaccgacggccttaaactgacgcgtcgcattcttggaaacgcggcagattaccttgctgatgatggcgtgttgatttgtgaagtcggcaacagcatggtacatcttatggaacaatatccggatgttccgttcacctggctggagtttgataacggcggcgatggtgtgtttatgctcaccaaagagcagctgctggcggcccgtgaatatttcgcgatttataaagattaa

SEQ ID NO: 482692 - DNA, 552 bp, Shigella sonnei
atgaaaaagaaaacaacacttagcgaggaggaccaggctctgtttcgccagttgatggcggggactcgcaagattaagcaggacacgattgtccaccgaccgcagcgtaaaaaaatcagcgaagtgccggtgaaacgcttgatcccggagcaggctgatgccagccattatttctccgatgagtttcagccgttattaaataccgaaggtccggtgaaatatgttcgcccggatgtcagccattttgaggcgaagaaactgcgccgcggcgattattcaccggaattgtttttggatttacacggtctgacgcagctgcaggccaagcaggaactgggcgcgttgattgccgcctgtcgccgcgaacatgtgttttgtgcctgcgtgatgcatgggcacgggaagcatattttgaagcaacaaacaccgctgtggctggcacaacatccgcatgtgatggcatttcaccaggcaccgaaagagtacggcggtgatgcggctttgttggtgttgattgaagtggaagagtggttgccgccggagttgccctga

SEQ ID NO: 482693 - DNA, 768 bp, Shigella sonnei
atgagtgcgagttttgacagtgtgagagtttattatgccatggacaaggtaaccggtgctgtagcgagcagtgttttcaatgttacggtgataacgccaaaggaggttacatatgggaaatatgattcttttgcgtataaaggcgatacgttgcgggttatttcctggtctgggtcgggttcagctccaactttggtactgactgactttgatacaattaataactcaaattgccctggcatagatacgaaaatttttcgttgtgcatatatgacgtttaaaattaccgttgcatctgatgattatggttgcccttggatcgcatccttttattcctatacagatttacccggatttggaagctatacggcccctacagtgcataacacaatatgcccaacgataccggtcacttcatacgatatctcctggagtgaaaattatgtcagccataataaggcgttacgaattcagtccacggggtcaacagtgaccaccacgctttcgacctacctgatggaaggcggcagactctgtgatggcagtaatttttctgataatgatggcagaggagcatactgccgcgcggtatcagaattgttaacctttacctcttacggttgtgataaatcaacggtaacggttacgccaactcgtcatccggtaacggataaagtactacacgatattgtggtgaatgtgaataccagtagtgggcaaccgattgattcgacgtgtcgttttcagtatgtattgaatgaactgtag

SEQ ID NO: 482694 - DNA, 525 bp, Shigella sonnei
atgaagaaaaagcgtacgttgttttttattagtagcctgatgttgctgggcagtggaaccacaatagcaggagataatttgcactttaccggcaatttaatcagtaaatcgtgtacgccagtgattaatggtagccagttggcagaagtacattttcctgccattgccgccagcgatttaatgaaccttgggcagtcagagcgagtgccattggtgtttcaattgaaagattgtcatagttctacattgtttaatgtcaaagtaacgttgacaggaacagaagatagtgctctacccggctttctggcctttgactcctcgtcatcagcatccggcgctgggattggtattgaaactgcggcaggcacatcggtgccaatcaacaatacaacaggcgtcacgctcccgctgaatcagggaaataacagcctaaattttaatacctggttacaggcaaagagcgggcgagatgtaacgtccggagactttagtgccacagtgacggcaacctttgagtatttctga

SEQ ID NO: 482695 - DNA, 471 bp, Shigella sonnei
atgaaacggatctcgcttattttgctgtggggcttttgctcgatggcactctcaaacgtctcttttcacggttatttagtgcagccgcctaactgcacgattagcaacgctcaaaccattgaaataacttttcaggatgtgcttattgatgacattaatggcagcaattatgagcaaaccgtgccgtattccattacctgcgatacggcggttcgcgacccattaatggaaatgaccttgagctggagtggcacactaagcgattttgataatgctgcagtaagcagcaatatcactggtttaggcattcagctcaaacaggcagggcagagttttacgatcaatacgccacttatggtgaatgaaaccgatttaccggtgttaacggctgtgccagtaaaaaagagtggtgtcgttctgccagaggcggactttgaggcctgggccacgttacaggtagattaccaatga

SEQ ID NO: 482696 - DNA, 507 bp, Shigella sonnei
atgaaaggatcttgttctgtctgggcggtaactgggttactgatatgttgtgttggtagcggctttgcagttgcagcgagtaagtcagtaagtatgaatttacgggtgcttgtcgatgcccctcctccttgtacggtaaatggtgcggcagttgagtttggtaatgtattcattaataagatcaatggggttgattataaacgtcccattgactactcgcttgtttgtaacaatctggcaatggatgacctgcgtctacagatgcaggcgacaacggtcgtgattaacggtgaaacagttatcagcacgggtattcctgggtttggtattcgggttcagaaaagtagtgatcacacaatactcgacttaacctctggctcatggttgccatttaatttttcctcgggagttcccgttctggaagctgtgccggtgaaacagagtggtacaacgttagcggcagctgaatttaacgccagtgccacaattgtggtggattaccaatga

SEQ ID NO: 482697 - DNA, 612 bp, Shigella sonnei
gtgacgttgcgcaataacgatccgaaactgccttatctggcccaaagctggatcgaagatgaaaagggtaacaagatcagttcaccgttaactgttctgccaccggtgcaacgcatcgattcaatgatgaacgggcaggtaaaagtgcagggaatgccggatatcaacaaattgcctgccgatcgtgaaagcctgttctacttcaacgtgcgtgagatcccgccaaaatcaaacaaagccaacacgctgcaaatagcactacaaacgcgtattaagttgttctggcgaccgaaggcgctggagaacgtcagcatgaaaaacccctggcaatataaggttactttaacccgcaacggtcaggaatttaccgtcaataacccgacgccgtattacgtcattttcagtaatgccagcacacagaaaaatggcaatcctgcagccggtttctcgccaatagtgatgtcgccgaaaacctctgcaccgctgaatgtgaagatgggtagcgtgccggtactgacctatgtcaacgactatggcgctcggatgccgctctttttcacttgcaacggtaacagttgccaggtcgatgaagagcagagccgcaaaggctga

SEQ ID NO: 482698 - DNA, 2643 bp, Shigella sonnei
atgcctgaccattctctttttcgattacggattcttccgtggtgcattgcgctggcaatgtcagggagttatagcagtgtctgggctgaagacgacattcagtttgattcccgttttctggaattaaaaggcgacacaaaaattgatctgaagcgtttttccagccagggatatgttgagcccggaaaatacaatttacaggttcaactaaataaacagccattggcggaagagtacgatatttactggtatgctggtgaagatgacgcgagcaaaagctatgcttgtctgacaccggaactggtagcgcagtttggtttaaaagaagacgtggcgaaaaatctgcaatggagccacgatgctaaatgcctgaaatccggtcaactggaaggcatggaaattaaggctgatttaagccagtccgcattagtcatttcactgccacaggcttacctcgaatatacttatcccgactgggatccgccttcacgttgggatgacggcatctccgggatcgtcgcggactacagcatcaacgcacaaacccggcacgaagaaaatggcggtgatgatagtaacgagatcagcggcaacgggacggtcggggttaacctggggccgtggcgtatgcgtgctgactggcagactaactatcaacatactcgcagtaatgatgacgatgaattcagcggcgatgaaactcaaaaaaaatgggagtggagtcgctactatgcctggcgggcgttaccatcattaaaagccaaactggcgctgggcgaggattacctccgatccgatatttttgatggttttaactatgttggtggcagtgtcagtactgacgatcaaatgttgcctcccaatctgcgcggctacgcgccagacatttccggcgtggcacacaccacagcaaaagtgaccgtcagccagatggggcgtgtgatttacgaaacgcaggttccggctggaccgtttcgtattcaggatcttggtgattctgtctccggtacgttgcatattcgcattgaagaacagaacggccaggtgcaggaatatgacatcagcaccgcctcgatgccatacctcactcgtccaggtcaggttcgctataagatcatgatgggccgtccgcaagagtggggacaccatgtcgagggtgaatttttttctggtgctgaagcttcctgggggatcgctaacggctggtcgttatatggcggcgcactgggagatgaaaactatcagtctgcggcgcttggcgtcggtcgcgatttgtctacattcggcgcggtcgcgtttgatgttactcactcgcacaccaaactggataaagacaccgcttatggcaaaggttcgctggacggtaactccttccgtgtgagttattccaaagactttgaccagctcaacagccgcgttacttttgctggatatcgcttctcggaagagaactttatgaccatgagcgagtatctggatgccagtgacagcggaatggtacgcacgggcaacgacaaagagatgtacactgccacttataaccagaacttccgcgatgcgggtgtttcggtttatctcaactatacccgccatacctactgggatcgcgaggagcagacaaactacaacatcatgctctcgcactatttcaatataggcagtattcgtaatgtcagcatctcgatgactggctaccgttacgagtatgacaaccaggccgacaaaggcatgtacatttcgctcagtatgccgtggggtgacaacagtaccgttagctataacggtaactatggcagtgggacggacagcagtcaggtcggttatttcagccgtgtcgatgacgcgactcactatcagttgaacgtcggcaccagtgacaaacacaccagcgttgacggctattacagccatgatggttcgctggcgcaggttgacctcagtgcgaactaccatgaagggcaatacacctctgcgggcttgtcgttacagggcggcgcaacgcttactgcccacggtggcgcacttcaccgtacccagaatatgggcgggacacgcttgttgattgatgccgatggcgttgccgatgttccggtagaaggtaacggtgctgctgtttataccaatatgtttggtaaagccgtcgtttctgacgtcaataactattaccgcaatcaggcgtatatcgacctcaacaaactgccggaaaacgccgaagcaacccagtcggtggtacaagccacgctaactgaaggggcgattggctaccgcaaatttgccgtcatcagtggtcaaaaagcgatggcggtgctgcgtttacaagacggcagccatcctccgtttggcgcagaagtaaaaaatgataacgagcagacagtgggccttgtcgatgatgacggcaatgtttatctggctggggtgaaacctggcgaacacatgagtgtgttctggagtggtgttgcgcattgcgatatcaacctgccggacccgctgcctgccgatctgtttaacggcttgttactgccatgccagcataaaggcaacgtcgcgccggttgttcctgatgacataaagcctgtcattcaggagcagacgcaacaggtgacacccaccaatccccctgtttctgtttcagctaaccaataa

SEQ ID NO: 482699 - DNA, 564 bp, Shigella sonnei
atgagtaagtttgttaaaacagctattgctgcggcaatggtgatgggcgtgttcacctctacggcaacaatcgctgcgggtaacaacggtactgcacgtttttacggcaccattgaagactcagtgtgttctatcgttccggacgatcacaaactggaagttgatatgggtgatatcggtgccgaaaaactgaaaaataacggcaccaccacgccgaaaagtttccagattcgtctgcaagattgcgtatttgatactcaggaaacaatgaccactacctttactggtaccgtttcttctgcaaatagcggcaattattacaccattttcaataccgatacctgtgcggcatttaacaatgttagcctggcgatcggtgactctctgggtacctcttacaaaagcggcatgggtattgaccagaaaatagtgaaagacacttctaccaataaaggcaaagcgaagcagacactgaactttaaagcctggctggtcggcgcagctgatgcgccagatctgggtaatttcgaagcaaataccaccttccagattacttacctgtaa

SEQ ID NO: 482700 - DNA, 486 bp, Shigella sonnei
atgcaagtttttatcatgcgtcacggcgacgcagcccttgatgccgccagtgattcggttcgtcctctgaccactaatggttgtgacgaatctcgcctgatggcgaactggctgaaaggtcaaaaagtggaaatcgaacgcgttctggtgagcccgttcctgcgagccgagcaaacactggaagaagtaggggattgtctgaacctgccttccagtgcagaagttctgccggagttaacgccctgcggcgatgttggtctggtcagtgcctatttgcaggcgttgaccaatgaaggtgttgcttcggtactggtgatctctcacttaccgttagtcgggtatctggttgccgagttatgtccgggcgaaacgccgcctatgtttaccacctcggccattgccagcgtaacgcttgatgaaagcggaaacggcacattcaactggcagatgagcccgtgtaatctgaagatggcaaaagctatctga

SEQ ID NO: 482701 - DNA, 2145 bp, Shigella sonnei
atggaaatggcatcagcgtttactcttaatgttcgtctggacaacattgctatcatcaccatcgatgtaccggatgagaaaatgaataccctgaaggcggaatttgcctcgcaggtgcgcgccattattaagcaactccgtgaaaacaaagagttgcgcggcgtggtgtttatctccgcgaaaccggacaattttatcgccggagcagacatcaacatgattggcaactgcaaaacggcgcaagaagcggaagcactggcgcggcagggccaacagttgatggcggagattcatgctttgcccattccggttatcgcggctattcatggcgcttgcctgggcggtgggctggagctggcgctggcgtgccacggtcgcgtttgtactgacgatcctaaaacggtgctcggtttgcctgaagtacaacttggattgttacccggttcaggcggcacccagcgtttaccgcgtctgataggcgtcagtacagcattagagatgattctcaccggaaaacaacttcgggcgaaacaggcattaaagctggggctggtggatgacgttgttccgcactccattttgctggaagccgctgttgagctggcgaagaaggatcgcccatcttcccgccctctacctgtacgcgagcgtattctggcggggccgttaggtcgtgcgctgctgttcaaaatggtcggcaagaaaacagaacacaaaactcaaggcaattatccggcgacagaacgcatcctggaggttgttgaaacgggattagcgcagggcaccagcagcggctatgacgctgaagctcgcgcctttggcgaactggcgatgacgccgcaatcgcaagctttgcgtagtatcttttttgccagtacggacgtgaagaaagatcccggtagtgatgcaccgcctgcgccattaaacagcgtgggaattttaggtggtggcttgatgggcggcggtattgcttatgtcactgcttgtaaagcggggcttccggtcagaattaaagatatcaacccgcagggcataaatcatgcgctgaagtacagttgggatcagctggagggcaaagttcgccgtcgtcatctcaaagccagcgaacgtgacaaacagctggcattaatctccggaacgacggactatcgcggctttgcccatcgcgatctgattattgaagcggtgtttgaaaatctcgaattaaaacaacagatggtggcggaagtggagcaaaattgcgccgctcataccatttttgcttcgaacacgtcatctttaccgattggtgatatcgccgctcacgccgcgcgacctgagcaagttattggcctgcatttcttcagtcctgtggaaaaaatgccgctggtagagattattcctcatgcgggtacatcggcgcaaaccatcgccactacggtaaaactggcgaaaaaacagggcaaaacgcccattgtcgtgcgtgacaaagccgggttttacgtcaatcgcatcttagcgccttacattaatgaagctatccgcatgctgaccgaaggtgaacgggtagagcacattgatgccgcgctagtgaaatttggttttccggtaggcccaatccaacttttggatgaggtaggaatcgacaccgggactaaaattattcctgtactggaagccgcttatggagaacgttttagcgcgcctgcaaatgttgtttcttcaattttgaacgacgatcgcaaaggcagaaaaaatggtcggggtttctatctttatggtcagaaagggcgtaaaagcaaaaaacaggtcgatcccgccatttacccgctcattggcgcacaagggcaggggcgactctccgcaccgcaggttgctgaacggtgtgtgatgttgatgctgaatgaagcagtacgttgtgttgatgagcaggttatccgtagcgtgcgtgacggggatattggcgcggtatttggcattggttttccgccatttctcggtggaccgttccgctatatcgattctctcggcgcgggcgaagtggttgcaataatgcaacgactggccacgcagtatggttcccgttttaccccttgcgagcgtttggtcgagatgggcgcgcgtggggaaagtttttggaaaacaactgcaactgaccttcaataa

SEQ ID NO: 482702 - DNA, 1311 bp, Shigella sonnei
atgggtcaggttttaccgctggttacccgccagggcgatcgtatcgccattgttagcggtttacgtacgccttttgcccgccaggcgacggcttttcatggcattcccgcggttgatttagggaagatggtggtaggcgaactgctggcacgcagcgagatccccgctgaagtgattgaacagctggtctttggtcaggtcgtacaaatgcctgaagcccccaacattgcgcgtgaaattgttctcggtaccggaatgaatgtgcataccgatgcttacagcgtcagccgcgcttgcgctaccagtttccaggcggttgcaaacgtcgcagaaagcctgatggcgggaactatccgagcggggattgccggtggggcagattcctcttccgtattgccaattggcgtcagtaaaaaactggcgcgcgtgctggttgatgtcaacaaagctcgaaccatgagccagcgcctgaaactcttctctcgcctgcgtttgtgcgacttaatgcccgtaccgcctgcggtagcagaatattctactggcttgcggatgggcgacaccgccgaacaaatggcgaaaacctacggcatcacccgagaacagcaagatgcattagcgcaccgttcgcatcagcgtgccgctcaggcatggtcagacggaaaactcaaagaagaggtgatgactgcctttatccctccttataaacaaccgcttgtcgaagacaacaatattcgcggtaattcctcgcttgccgattacgcaaagctgcgcccggcgtttgatcgcaaacacggaacggtaacggcggcaaacagtacgccgctgaccgatggcgcggcagcggtgatcctgatgactgaatcccgggcgaaagaattagggctggtgccgctggggtatctgcgcagctacgcatttactgcgattgatgtctggcaggacatgttgctcggtccagcctggtcaacaccgctggcgctggaacgtgccggtttgacgatgagcgaactgacattgatcgatatgcacgaagcctttgcagctcagacactggcgaatattcagttgctgggtagtgaacgttttgctcgtgaagtactggggcgtgcacatgccactggcgaagtggacgatagcaaatttaacgtgcttggcggttcgattgcttacgggcatcccttcgcggcgaccggcgcgcggatgattacccagacattgcatgaacttcgccgtcgcggcggtggatttggtttagttaccgcctgtgctgccggtgggcttggcgcggcaatggttctggaggcggaataa

SEQ ID NO: 482703 - DNA, 285 bp, Shigella sonnei
atgagtaaatgtagtgctgatgaaaccccggtttgctgctgtatggatgttggcaccattatggacaactccgactgcaccgcgtcttacagccgcgtgtttgcaaaccgcgcagaagcagaacaaacgctggcggcgctgactgaaaaagcccgtagcgtggaatccgaaccgtgcaaaatctccccgactttcactgaagagtctgacggtgtgcgcctggatatcgatttcacttttgcctgcgaagctgaaatgctgatcttccagctgggtctgcgttaa

SEQ ID NO: 482704 - DNA, 1341 bp, Shigella sonnei
atgagccagaaaaccctgtttacaaagtctgctctcgcagtcgcagtggcacttatctccacccaggcctggtcggcaggctttcagttaaacgaattttcttcctctggcctgggccgggcttattcaggggaaggcgcaattgccgatgatgcaggtaacgttagccgtaaccccgcattgattaccatgtttgaccgcccgacattttctgcgggtgcggtttatattgacccggatgtgaatatcagcggaacgtctccgtctggtcgtagcctgaaagccgataacatcgcgcctacggcatgggttccgaacatgcactttgttgcaccgattaacgaccaatttggttggggcgcttctattacctctaactatggtctggcaacagagtttaatgatacttatgcaggcggctctgtcgggggtacaactgaccttgaaaccatgaacctgaacttaagcggtgcgtatcgcttaaataatgcatggagctttggtcttggtttcaacgccgtctacgctcgcgcgaaaattgaacgtttcgcaggcgatctggggcagttggttgctggtcagattatgcaatctcctgccgggcaaactcctcaagggcaagcattggcagctaccgccaacggtatcgacagtaataccaaaatcgctcatctgaacggtaaccagtggggctttggctggaacgccggaatcctgtatgaactggataaaaataaccgctatgcactgacctaccgttctgaagtgaaaattgacttcaaaggtaactacagcagcgatcttaatcgtgcgtttaataactacggtttgccaattcctaccgcgacaggtggcgcaacgcaatcgggttatctgacgctgaacctgcctgaaatgtgggaagtgtcaggttataaccgtgttgatccacagtgggcaattcactatagcctggcttacaccagctggagtcagttccagcagctgaaagcgacctcaaccagtggcgacacgctgttccagaaacatgaaggctttaaagatgcttaccgcatcgcgttgggtaccacttattactacgatgataactggaccttccgtaccggtatcgcctttgatgacagcccagttccggctcagaatcgttctatctccattccggaccaggaccgtttctggctgagtgcaggtacgacttacgcatttaataaagatgcttcagtcgacgttggtgtttcttatatgcacggtcagagcgtgaaaattaacgaaggcccataccagttcgagtctgaaggtaaagcctggctgttcggtactaactttaactacgcgttctga

SEQ ID NO: 482705 - DNA, 270 bp, Shigella sonnei
atgaagaaagtctctgaactggaaacgctggtagcgcaggccaaagaagcggataaaggcggtatgaatttctcgttcattaattcggcagaccagtatcaactcgagactaaaaaatatgttcgccgcgtcagagataaagtcccgtactctgactgggataaagagcatcttcaggatgcaaacacaagctggatggtcgaagactcatttccacgagcgttacgcgagtacaacgaaatggttgatgactataatagcctgcgttaa

SEQ ID NO: 482706 - DNA, 1749 bp, Shigella sonnei
atgctaaacgaacgccagttaaagattgtcgatctgctggagcaacagccgcgcacgcctggtgagctggcgcaacagactggcgtttcaggcaggaccatcctgcgtgatattgactatctcaactttacccttaacggcaaagcccgcattttcgccagtggcagtgcgggctatcagctggaaatcttcgagcgccgcagcttttttcagttgctgcaaaagcacgataacgacgatcggctgctggcgctgttattactgaatacctttactccccgtgcgcaactcgcctcggcgcttaatttgccagaaacctgggtagcagagcgtctgccccggttaaaacagcgttatgaacgcacttgttgcctggccagtcgccccggtttgggccatttcattgatgagacagaagagaaacgcgttatcttgctggcgaacttgctgcgcaaagatccgtttttaattccgctggcgggcgtaacacgagacaattttcagcatttatccacggcctgcgacaaccaacaccgctggccgctcatgcagggtgattatctctccagcctgattctggcgatttacgccctgcgtaatcaactgaccgatgagtggccgcaatatcccggtaacgagataaaacaaatcgttgaacagagcggcatgtttcttggtgataacgctgtaagaaccctgacaggtttgatagagaaacagcatcagcaagcgcaggtaatttcagccgatcatgtgctggggttgctgcaaagggtgccaggcatcgcgtcattgaatattattgatacgcagctggttgagaatattaccgggcatttattacgttgccttgccgcaccggtgtggattgccgagcaccgccaaagcagcatgaataacctgaaagccgcctggcctgcggcctttgatatgagtctgcactttattacgctactgcgtgaacagctcgatattccccttttcgatagcgatctgatcggtttgtattttgcctgtgcgctggaacggcatcaaaacgaacgccagccgatcattttgctctcggaccagaacgcgattgccactattaatcagctcgccattgagcgcgatgttttacattgtcgggtgattattgcccgtagcttaagcgagcttattgccattcgcgaagagattgagccgttattgatcattaacaacagccattatttactggatgacgcggtaaataattacatcaccgtaaaaaatatcattacggctgccgatatcgaacaaataaaacactttctggcgacggcatttattcgccaacagccggaacgctttttctctgcccccggaagttttcattattcgaatgtacgcggtgaaagctggcaacatattacccggcaaatttgtgcgcaattagtggcacaacaccatattaccgccgatgaagcgcaacggatcatcgcccgcgaaggcgaaggtgaaaacctgattgttaatcgcctcgccatcccacattgctggagcgaacaggagcgacgttttcgtggattttttattaccctcgcccaaccagttgaggtgaataacgaagtcattaaccatgtcttgatcgcctgcgccgccgccgatgcgcgtcatgagctaaaaatatttagctatctggcaagcgtattgtgtcagcatccggcagaagttattgccgggttaacaggatatgaggcatttatggagttacttcacaaggggtga

SEQ ID NO: 482707 - DNA, 1071 bp, Shigella sonnei
atgaacattgagttactgcaacagttgtgcgaagccagcgccgtcagcggcgatgaacaggaagttcgcgacattctgataaacacgctggaaccttgcgttaatgagatcacctttgatggtctgggcagctttgttgcccgtaaggggaataaaggtccaaaagttgccgttgtcaggcatatggatgaagtcggctttatggtcacccacatcgacgagagcggttttctgcgctttaccaccattggcggctggtggaatcagtcaatgctcaaccaccgggtaaccatacgcacacacaagggatttaaaatccctggtgtgattggttccgtcgcacctcatgcgttaacggaaaagcaaaagcaacagccgctgtcatttgatgagatgttcattgatattggcgcgaacagtcgcgatgaggtggaaaaacgcggtgtggcgatgggcgattttattagcccggaagccaattttgcctgctggggcgaagataaagtggtcggcaaggcgctggataaccgcatcggctgcgcaatgatggctgaactattgcagacggtgaataatcccgaaattacgctgtatggcgtcggcagcgtggaagaagaagttgggctacgcggggcacaaacctcggcggaacacattaaaccggatgtggtgattgtgctggataccgctgtcgcaggtgatgttccgggcattgataacattaaatacccgctgaaactgggccaggggccggggctgatgctgtttgacaagcgctacttccccaaccagaaactggtggcggcgttaaaaagctgtgccgcacataacgatttaccgctgcaattttccaccatgaaaaccggtgcgacggatggcgggcgctacaacgtgatgggcggcgggcgtccggttgttgcgctgtgcctgccaacccgctatctgcacgctaacagcggcatgatttcaaaagccgattacgatgctctgctcacgttgatacgggattttctgaccaccttaaccgcggagaaagtcaacgcgtttagccagttccgtcaggtggattaa

SEQ ID NO: 482708 - DNA, 1452 bp, Shigella sonnei
atggagtcatccttatgtattgtcgcgatcaccaactgccccgccgggatcgctcacacctacatggtggcggaagccctggaacagaaagcccgttctctcggccataccataaaagtggaaactcaagggtccagtggcgttgaaaaccgcttatccagcgaagagattgccgctgccgattacgtcattctcgctaccgggcgtggcctgagcggtgatgatcgcgcgcggtttgccgggaagaaagtttatgagattgccatctcccaggcgttgaaaaatatcgaccagattttcagcgaattaccgacaaactcgcagctttttgccgcagatagcggcgtgaagcttggcaaacaggaagtgcaaagcggcagcgtgatgagccacctgatggcgggcgtctctgcggcgctgccgtttgtcatcggcggtggtatcctggtggcgcttgccaacatgctggtgcagttcggtttgccgtataccgatatgtcgaaaggcgcgccgtcgtttacctgggtagttgaatccatcggttaccttggcttcacctttatgatccccatcatgggcgcttatattgcctcgtcgattgccgataaaccggctttcgctccggcgtttctggtttgctatctggcgaacgacaaagcgctgctcggcacccagtcgggtgcgggattcctcggcgcggtggtgctggggctggcgattggctatttcgtcttctggttccgcaaagtgcgccttggcaaagcattacaaccgctgctcggttcaatgctgatcccgttcgttactctgctggttttcggcgtgctcacttactacgttatcgggccggtgatgtccgacctcatgggcgggctgctccacttcctgaataccattcctccatcaatgaagtttgcagcagcgtttctggtcggtgcgatgctggcgttcgatatgggcggccccatcaataaaaccgcctggttcttctgcttctcactgctggaaaaacacatttatgactggtacgccatcgtcggcgttgtcgcgttgatgccgcccgttgcggcgggtcttgcgacgttcattgcgcccaaactgtttacccgacaggaaaaagaggctgccagtagtgccattgtggtcggtgccacagtcgcaaccgaaccggctataccttacgctctggcagctccgttgccgatgattaccgccaatacgctggcgggtggcattaccggcgtgctggtgatcgctttcggaatcaaacgtctggcacctggtttgggtatctttgacccgctgatcggcctgatgtcgccggtgggttcgttttatctggtgctagcgattggcctcgcgctgaacatttcattcattatcgtcctgaaaggattgtggttacgccgcaaagcgaaagccgcgcaacaggagcttgtccatgaacattga

SEQ ID NO: 482709 - DNA, 447 bp, Shigella sonnei
atggcagctcttactgcaagctgtattgacctgaatattcagggcaatggcgcttattccgttctgaagcagttggcgacaatagcgttacaaaacggttttatcaccgactcacaccagttcctgcaaaccctgctgctgcgcgaaaaaatgcactctactggatttggttccggtgtcgccgtgccgcacggtaaaagcgcctgcgttaaacaaccgtttgtattattcgcccgcaaagcgcaggctattgactggaaagccagcgatggcgaagacgtcaattgctggatctgcctcggcgtgccgcaaagcggcgaagaggatcaggtcaaaatcatcggcacactgtgtcgcaaaattatccaccaggattttattcatcaactgcaacagggcgacgccgaccaggtgcttgccttgttaaatcaaaccctcagctcataa

SEQ ID NO: 482710 - DNA, 315 bp, Shigella sonnei
atgatccgcaaagcctttgtcatgcaggttaaccccgacgcccacgaagagtatcagcgtcggcataaccccatctggccggaactggaagcagtgttgaaatctcacggtgcgcataactacgccatttacctcgacaaagcgcgtaatctgctgtttgccacggtagagattgaatctgaagaacggtggaatgcggtagccagcactgatgtttgccaacgttggtggaaatatatgaccgatgttatgcccgctaacccggataacagcccggtgagtagcgagctgcaagaagtgttttacctgccgtaa

SEQ ID NO: 482711 - DNA, 825 bp, Shigella sonnei
atgcaaaacattacccagtcctggtttgtccagggaatgatcaaagccaccaccgatgcctggctgaaaggctgggacgagcgcaatggtggtaacctgacgctgcgcctggatgacgccgatatcgcgccttatcacggcaactttcatgcacaaccgcgctatattcccctcagccaacccatgcctttactggcaaatacgccgtttattgtcaccggctccggcaaattcttccgtaacgtccagcttgatcctgcagctaacttaggcgtcgtaaaagtcgacagcgacggcgcgggctaccatattctctgggggttaaccaacgaagccgttccaacttccgaacttccggctcacttcctttcccactgcgagcgcattaaagccaccaacggtaaagatcgggtgatcatgcactgccacgccaccaacctgatcgccctcacctatgtacttgaaaacgacaccgcggtctttactcgccaactgtgggaaggcagcaccgagtgtctggtggtattcccggatggcgttggcattctgccgtggatggtgcccggcacggacgaaatcggccaggcgaccgcacaagagatgcaaaaacattcgctggtgttgtggcccttccacggcgtcttcggcagcgggtcgacgttggatgaaacattcggtttaatcgacaccgcagaaaaatcagcacaagtattagtgaaggtttattcgatgggcggcatgaaacagaccatcagccgtgaagagttgatagcgctcggcaagcgcttcggcgttacaccactagctagtgcgctggcgctgtaa

SEQ ID NO: 482712 - DNA, 1260 bp, Shigella sonnei
atgaccactcaactggaacaggcctgggagctggcgaaacagcgtttcgcggcggtggggattgatgtcgaggaggcgctgcgccaacttgatcgtttacccgtttcaatgcactgctggcagggcgatgatgtttccggttttgaaaacccggaaggttcgctgaccggtgggattcaggctattggtaattatccgggcaaagcgcgtaatgccagtgagctacgagccgatctggaacaggctatgcggctgattccggggccgaaacggcttaatttacatgccatctatctggaatcagacacgccagtctcgcgcgaccagatcaaacctgagcacttcaaaaactgggttgaatgggcgaaagccaatcagctcggtctggattttaacccctcctgtttctcgcatccgctaagcgccgatggctttacgctctcgcatcccgacgacagcattcgccagttctggattgatcactgcaaagccagccgtcgcgtttcggcctattttggcgagcaactcggcacaccatcggtgatgaacatctggatcccggatggtatgaaagatatcaccgttgaccgtctcgccccgcgtcagcgtctgctggcagcactggatgaggtgatcagcgagaagctggatccggcgcaccatatcgacgccgttgagagcaaattgtttggcattggcgcagagagctacacggttggctccaatgagttttacatggggtatgccaccagccgccagactgcgctgtgcctggacgccgggcatttccacccgactgaagtgatttccgacaagatttccgccgccatgctgtatgtaccgcagttgctgctgcacgtcagccgtccggttcgctgggacagcgatcacgtggtgctgctggatgatgaaacccaggcgattgccagtgagattgttcgtcacgatctgttcgaccgggtgcatatcggcctcgacttctttgatgcctctatcaaccgcattgccgcgtgggtcattggtacacgcaatatgaaaaaagccctgctgcgtgcgttgctggaacctaccgctgagctgcgcaagctggaagcggcgggcgattacactgcgcgtctggcgctactggaagaacagaaatcgttgccgtggcaggcggtctgggaaatgtattgccaacgtcacgatacgccagcaggtagcgaatggctggagagcgtgcgggcttatgagaaagcgattttgagccagcgtgggtaa

SEQ ID NO: 482713 - DNA, 1470 bp, Shigella sonnei
atgacctttcgcaattgtgtcgccgtcgatctcggcgcatccagtgggcgcgtgatgctggcgcgttacgagcgtgaatgccgcagcctgacgctgcgcgaaatccatcgttttaacaatggcctgcatagccagaacggttatgtcacctggaatgtggatagcctggaaagtgccattcgccttggattaaacaaggtgtgcgaggaagggattcgtatcgatagcattgggattgatacctggggcgtggactttgtgctgctcgaccaacagggtcagcgtgtgggcctgcccgttgcttatcgcgatagccgctccaatggcctaatggcgcaggcacagcaacaactcggcaaacgcgatatttatcaacgtagcggcatccagtttctgcccttcaatacgctttatcaactgcgtgcgctgacggagcaacaacctgaacttattccacacattgctcacgctctgctgatgccggattacttcagctatcgcctgaccggcaagatgaactgggagtacaccaacgccacgaccacgcaactggtcaatatcaatagcgacgactgggacgagtcgctactggcgtggagcggggctaacaaagcctggtttggtcgcccgacgcatccgggtaatgtcattgggcactggatttgcccgcagggtaatgagattccggtggtcgccgttgccagccatgataccgccagcgcggttatcgcctcgccgttaaacggttcacgcgctgcttatctctcttctggcacctggtcattgatgggcttcgaaagccagacgccatttaccaatgacacggcgctggcagccaacataaccaatgaaggcggggcggaaggtcgctatcgggtgctgaaaaatattatgggcttatggctgcttcagcgagtgcttcaggagcggcaaatcaacgatctcccggcgcttatcgccgcgacacaggcacttccggcctgccgcttcatcatcaatcccaatgacgatcgctttattaatcctgaggcgatgtgcagcgaaattcaggctgcgtgtcgggaaatggcgcaaccgctcccggaaagtgatgctgaactggcgcgctgcattttcgacagtctggcgctgctgtatgccgatgtgttgcatgagctggcgcagctacgcggtgaagatttctcgcaactgcatattgtcggcggcggctgccagaacacgctgctcaaccagctatgtgccgatgcctgcggtattcgggtgatcgccgggcctgttgaagcctcgacgctcggcaatatcggcatccagttaatgacgctggatgaactcaacaatgtggatgatttccgtcaggtcgtcagcaccaccgcgaatctgaccacctttacccctaatcctgacagtgaaattgcccactatgtggcgcagcttcgctcgacacgacagacaaaggagctttgcgcatga

SEQ ID NO: 482714 - DNA, 837 bp, Shigella sonnei
atgaccgtattacatagtgtggatttttttccgtctggtaacgcgtccgtggcgatagaaccccggctcccgcaggcggattttcctgaacatcatcatgattttcatgaaattgtgattgtcgaacatggcacgggtattcatgtgtttaatgggcagccctataccatcaccggtggcacggtctgtttcgtacgcgctcatgatcggcatctgtatgaacataccgataatctgtgtctgaccaatgtgctgtatcgctcgccggatcgatttcagtttctcgccgggctgaatcagttgctgccacaagagctggatgggcagtatccgtctcactggcgcgttaaccacagcgtattgcagcaggtgcgacagctggttgcacagatggaacagcaggaaggggaaaatgatttaccctcgaccgccagtcgcgagatcttgtttatgcaattactgctcttgctgcgtaaaagcagtttgcaggagaacctggaaaacagcgcatcacgtctcaacttgcttctggcctggctggaggaccattttgccgatgaggtgaattgggatgccgtggcggatcaattttctctttcactgcgtacgctacatcggcagcttaagcagcaaacgggactgacgcctcagcgatacctgaaccgcctgcgactgatgaaagcccgacatctgctacgccacagcgaggccagcgttactgacatcgcctatcgctgtggattcagcgacagtaaccacttttcgacgctttttcgccgagagtttaactggtcaccgcgtgatattcgccagggacgggatggctttctgcaataa

SEQ ID NO: 482715 - DNA, 390 bp, Shigella sonnei
atggctttctgcaataacgcgaatcttctcaacgtatttgtacgccatattgcgaataatcaacttcgttctctggccgaggtagccacggtggcgcatcagttaaaacttctcaaagatgatttttttgccagcgaccagcaggcagtcgctgtggctgaccgttatccgcaagatgtctttgccgaacatacacatgatttttgtgagctggtgattgtctggcgcggtaatggtctgcatgtactcaacgatcgtccttatcgcattacccgtggcgatctcttttatattcatgctgacgataaacactcctacgcttccgttaacgatctggttttgcagaatattatttattgcccggagcggctgaagctgaatcttgactga

SEQ ID NO: 482716 - DNA, 483 bp, Shigella sonnei
atggcgcaggcgcggcaggttatcggtcagcttgagcatgaaagtagtcagcatgtgtcgtttgctaacgaaatggctgagttgctgttcgggcagttggtgatgttgctgaatcgccatcgttacaccagtgattcgttgccgccaacatccagcgaaacgttgctggataagctgattacccggttggcggctagcctgaaaagtccctttgcgctggataaattttgtgatgaggcatcgtgcagtgagcgcgttttgcgtcagcaatttcgccagcagactggaatgaccatcaatcaatatctgcgacaggtcagagtgtgtcatgcgcaatatcttctccagcatagccgcctgttaatcagtgatatttcgaccgaatgtggctttgaagatagtaactatttttcggtggtgtttacccgggaaaccgggatgacgcccagccagtggcgtcatctcaattcgcagaaagattaa

SEQ ID NO: 482717 - DNA, 1035 bp, Shigella sonnei
atgagtaacgcgattacgatggggatattttggcatttgatcggcgcggccagtgcagcctgtttttacgctccgttcaaaaaagtaaaaaaatggtcatgggaaaccatgtggtcagtcggtgggattgtttcgtggattattctgccgtggaccatcagcgccctgttactaccggatttctgggcgtattacagctcgtttagtctctctacgctgctgcctgtttttctgttcggcgctatgtgggggatcggtaatatcaactatggcctgaccatgcgttatctcggcatgtcgatgggaattggcatcgccattggcattacgttgattgtcggtacgctgatgacgccaattatcaacggcaatttcgatgtgctgattaacaccgaaggcggacgcatgacgttgctcggcgttctggtggcgctgattggcgtagggattgtaactcgagccgggcagttgaaagagcgcaagatgggcattaaagccgaagagttcaatctgaaaaaagggctggtgctggcggtgatgtgcggcattttctctgccgggatgtcctttgcgatgaacgccgcaaaaccgatgcatgaagccgctgccgcacttggcgtcgatccactgtatgtcgctctgccaagctatgttgtcatcatgggcggcggcgcgatcattaacctcggtttctgttttattcgtctggcaaaagtgaaggatttgtcgctaaaagccgacttctcgctggcaaaaccgctgatcattcacaatgtgttactctcggcactgggcgggttgatgtggtatctgcaattctttttctatgcctggggccacgcccgcattccggcgcagtatgactacatcagttggatgctgcatatgagtttctatgtattgtgcggcggtatcgtcgggctggtgctgaaagagtggaacaatacaggacgccgtccggtaacggtgttgagcctcggttgtgtggtgattattgtcgccgctaacatcgtcggcatcggcatggcgaattaa

SEQ ID NO: 482718 - DNA, 621 bp, Shigella sonnei
atgagctataccctgccatccctgccgtatgcttacgatgccctggaaccgcacttcgataagcagaccatggaaatccaccacaccaaacaccatcagacctacgtaaacaacgccaacgcggcgctggaaagcctgccagaatttgccaacctgccggttgaagagctgatcaccaaactggaccagctgccagcagacaagaaaaccgtactgcgcaacaacgctggcggtcacgctaaccacagcctgttctggaaaggtctgaaaaaaggcaccaccctgcagggtgacctgaaagcggctatcgaacgtgacttcggctccgttgataacttcaaagcagaatttgaaaaagcggcagcttcccgctttggttccggctgggcatggctggtgctgaaaggcgataaactggcggtggtttctactgctaaccaggattctccgctgatgggtgaagctatttctggcgcttccggcttcccgattctgggcctggatgtgtgggaacatgcttactacctgaaattccagaaccgccgtccggactacattaaagagttctggaacgtggtgaactgggacgaagcagcggcacgttttgcggcgaaaaaataa

SEQ ID NO: 482719 - DNA, 984 bp, Shigella sonnei
atgcagataaaacgctcgattgagaaaatcccgggggggatgatgctcgtcccgctattccttggcgcactgtgccacaccttctcgccgggggcggggaaatattttggatcattcaccaacgggatgattaccggtacggtgcccattctggcggtgtggtttttttgcatgggggcgtcaataaaattaagcgcgacgggaacggtactgcgtaaatccggtacgctggtggtaactaaaattgccgtcgcgtgggtggttgcggcaattgcctcgcgcattattccggaacatggtgttgaagttggattctttgccggactttcaacgctggcgctggtggcggcgatggatatgaccaacggcggactttacgcttccatcatgcagcagtacggtacgaaagaagaagctggggcatttgtgttgatgtcgttggagtccgggccgctcatgacgatgattattctgggcactgccgggattgcctcgtttgaaccgcatgttttcgtcggcgcagtattaccgttcctggtgggctttgccctggggaatcttgaccctgaattacgagaatttttcagcaaagcagtgcaaacgctgattccattctttgccttcgcgctgggcaataccattgatttgactgtgattgcccagactggtttgctggggatcctgttgggtgtggcagtaattatcgtgaccggtattccgttgattatcgccgataaattgattggcggtggcgatggcactgccggaattgccgcttccagttccgcaggggccgcggtagcgacacctgtgctgattgcagaaatggtgcctgcgtttaaaccgatggctccggcagcaacttcgctggtagcgacggcggtcattgtgacttcgattctggtgccaattcttacctctatctggtcacgtaaagtcaaagccagagcagcgaaaatcgaaattttaggtacggtgaaataa

SEQ ID NO: 482720 - DNA, 675 bp, Shigella sonnei
atgcgatatccggttgatgtatacacaggcaagattcaggcttatcccgaaggcaaacccagcgcaattgccaaaatccaggttgatggtgagttgatgctgacggagctggggctggaaggtgacgagcaggcggagaaaaaggttcacggcgggccagacagagcgctgtgtcattatcctcgtgagcactatctctactgggtgcgggaatttccggaacaggcggagttgtttgttgcgcctgcgtttggcgaaaatctctcaaccgacggtctcacggaaagtaatgttcatatgggcgatattttccgctggggagaggcattaattcaggtcagccagccgcgctcgccttgctataaactcaattaccattttgatatcagcgatatagcgcagttgatgcaaaacacaggtaaggtggggtggttgtatagcgtgatagcgccagggaaagtgtctgcggacgcgccgctggagttggtttcccgtgtcagcgatgtgaccgtgcaggaggctgccgccatcgcatggcatatgccgtttgatgacgatcagtatcaccgtttactctccgccgccgggttatcgaaaagctggacgcggacgatgcaaaagcgccgactgagcggcaagatcgaagatttttcccgccggttgtggggaaaataa

SEQ ID NO: 482721 - DNA, 1374 bp, Shigella sonnei
atgataggcagcttaaccgcgcgcatcttcgccatcttctggctgacgctggcgctggtgttgatgttggttttgatgttacccaagctcgattcacgccagatgaccgagcttctggatagcgaacagcgtcaggggctgatgattgagcagcatgtcgaagcggagctggcgaacgatccgcccaacgatttaatgtggtggcggcgtctgttccgggcgattgataagtgggcaccgccaggacagcgtttgttattggtgaccaccgaaggccgcgtgatcggcgctgaacgcagcgaaatgcagatcattcgtaactttattggtcaggccgataacgccgatcatccgcagaagaaaaagtatggccgcgtggaactggtcggtccgttctccgtgcgtgatggcgaagataattaccaactttatctgattcgtccggccagcagttctcaatccgatttcattaacttactgtttgaccgcccgctattactgctgattgtcaccatgttggtcagtacgccgctgctgttgtggttggcctggagtctggcaaaaccggcgcgtaagctgaaaaacgctgccgatgaagttgcccagggaaacttacgccagcacccggaactggaagcggggccacaggaattccttgccgcaggtgccagttttaaccagatggtcaccgcgctggagcgcatgatgacctctcagcagcgtctgctttctgatatctctcacgagctgcgcaccccgctgacgcgtctgcaactgggtacggcgttactgcgccgtcgtagcggtgaaagcaaggaactcgagcgtattgaaaccgaagcgcaacgtctggacagcatgatcaacgatctgttggtgatgtcacgtaatcagcaaaaaaacgcgctggttagcgaaaccatcaaagccaaccagttgtggagtgacgtgctggataacgcggcgttcgaagccgagcaaatgggcaagtcgttgacagttaacttcccgcctgggccgtggccgctgtacggcaatccgaacgccctggaaagtgcgctggaaaacattgttcgtaatgctctgcgttattcccatacgaagattgaagtgggctttgcggtagataaagacggtatcaccattacggtggacgacgatggtcctggcgttagcccggaagatcgcgaacagattttccgtccgttctatcggaccgatgaagcacgcgatcgtgaatctggcggtacaggattggggctggcgattgttgaaaccgccattcagcagcatcgtggctgggtgaaggcagaagacagcccgctgggcggtttacggctggtgatttggttgccgctgtataagcggagttaa

SEQ ID NO: 482722 - DNA, 699 bp, Shigella sonnei; identical to SEQ ID NO: 459571

SEQ ID NO: 482723 - DNA, 501 bp, Shigella sonnei; identical to SEQ ID NO: 471055

SEQ ID NO: 482724 - DNA, 903 bp, Shigella sonnei
atgaatcaatcttatggacggctggtcagtcgggcggcgattgctgcgacggcgatggcttcgctgctattgctgattaaaatttttgcatggtggtataccgggtcggtgagtattctcgccgcgctggtggattcgctggtggatatcggcgcgtcgttgacgaatttactggtggtgcgatattccctgcaacctgccgacgataatcactcgtttggtcacggtaaagctgagtccctcgcggcgctggcgcaaagtatgtttatctccggttcggcactattcctgtttttgacgggtattcaacatctggtatctccaacaccgatgacagatccaggcgtcggggttatcgtgacaattgtggcgctaatttgtacgattatccttgtctcgtttcagcggtgggtggtgcgccggacgcaaagccaggcggtgcgggctgatatgctacattaccagtctgatgttatgatgaacggcgcaattctgctggcgctggggttgtcctggtacggctggcatcgcgccgatgctctgtttgcattgggaatcggcatctatattttatatagcgcgttacgcatgggatatgaggcggtacagtcattactggatcgcgcattgcctgatgaggaacggcaagaaattattgatatcgtgacttcctggccgggtgttagcggcgctcacgatcttcgcacgcggcagtcagggccgacccgctttattcagattcatttggaaatggaagactctctgcctttggttcaggcacatatggtggcggatcaggtagagcaggctattttacggcgttttccgggatcggatgtaattatccatcaggacccctgttccgtcgtacccagggagggtaaacggtctatgctttcataa

SEQ ID NO: 482725 - DNA, 963 bp, Shigella sonnei
atgattaagaaaatcggtgtgttgacaagcggcggtgatgcgccaggcatgaacgccgcaattcgcggggttgttcgttctgcgctgacagaaggtctggaagtaatgggcatttatgacggctatctgggtctgtatgaagaccgtatggtacagctagaccgttacagcgtttctgacatgatcaaccgtggcggtacgttcctcggttctgcgcgcttcccggaattccgcgacgagaacatccgcgccgtggctatcgaaaacctgaaaaaacgtggtatcgacgcgctggtggttatcggcggtgacggttcctacatgggtgcaatgcgtctgaccgaaatgggcttcccgtgcatcggtctgccgggcactatcgacaacgacatcaaaggcactgactacactatcggtttcttcactgcgctgagcaccgttgtagaagcgatcgaccgtctgcgtgacacctcttcttctcaccagcgtatttccgtggtggaagtgatgggccgttattgtggcgatctgacgttggctgcggccattgccggtggctgtgaattcgttgtggttccggaagttgaattcagccgtgaagacctggtaaacgaaatcaaagcgggtatcgcgaaaggtaaaaaacacgcgatcgtggcgattaccgaacatatgtgtgatgttgacgaactggcgcatttcatcgagaaagaaaccggtcgtgaaacccgcgcaactgtgctgggccacatccagcgcggtggttctccggtgccttacgaccgtattctggcttcccgtatgggcgcttacgctatcgatctgctgctggcaggttacggcggtcgttgtgtaggtatccagaacgaacagctggttcaccacgacatcatcgacgctatcgaaaacatgaagcgtccgttcaaaggtgactggctggactgcgcgaaaaaactgtattaa

SEQ ID NO: 482726 - DNA, 990 bp, Shigella sonnei
atgaacaagtggggcgtagggttaacatttttgctggcggcaaccagcgttatggcaaaggatattcagcttcttaacgtttcatatgatccaacgcgcgaattgtacgaacagtacaacaaggcattcagcgcccactggaaacagcaaactggtgataacgtggtgattcgtcagtcacacggtggttcaggtaaacaagcgacgtcggtaatcaacggtattgaagctgatgttgtcacgctggctctggcctatgacgtggacgcgattgcggaacgtgggcggattgataaagagtggatcaaacgtctgccggataactccgcaccgtacacttccaccattgttttcctggtgcgtaagggcaatccgaagcagatccatgactggaacgatctgattaaaccgggtgtttcggtgatcacgcctaatccgaaaagctctggtggcgcacgctggaactacctagctgcctggggctacgcgctgcatcacaacaacaacgatcaggcaaaagcacaggattttgttcgggcactgtataaaaacgtcgaagttctggattctggcgcgcgcggctccactaacacctttgtcgagcgcgggattggcgatgtactgatcgcctgggaaaacgaagctctgctggcagcgaatgaactggggaaagataaattcgaaatcgtcacgccgagtgagtctatcctcgcagagccaaccgtgtcggtggtcgataaagtggtcgagaaaaaaggcaccaaagaggtggcggaagcctacctgaaatatctctactcgccagaaggtcaggaaattgccgcgaaaaactactaccgtccgcgcgacgctgaagtagcgaaaaagtacgaaaatgcgtttccaaagctgaagttattcaccattgatgaagagttcggcggctggacgaaagcgcaaaaagagcattttgctaacggcggtacgttcgatcagatcagcaaacgctga

SEQ ID NO: 482727 - DNA, 756 bp, Shigella sonnei
atgaaaaaagcgggtcttctttttttggtgatgatagttatcgccgttgtggctgccggtattggttactggaaattaaccggtgaagagtcggatacattacgtaagattgtccttgaggaatgtttgcccaatcagcagcaaaatcaaaatccttcgccatgtgcggaagtcaaacccaatgccggatacgtggttttaaaagatcttaatggtccactgcaatatctgttgatgccaacgtatcgtattaacggtactgaaagtcctttgttgaccgatccttcaacgccgaacttcttttggttggcctggcaggcgcgtgattttatgagcaaaaaatacggccagccggttcccgatcgcgcggtttctttggcgatcaactcccgcaccgggcgtacgcaaaaccattttcatattcatatctcttgtattcgtcctgatgtgcgcgaacaactggataacaatctggcgaacatcagcagccgctggttgccactgccaggtggtttgcgtgggcatgaatacctggcgcgtcgggtaacggaaagcgaactggtacaacgcagcccatttatgatgctggcagaagaagtacctgaggcgcgggaacatatgggaagctacgggctggcgatggtacggcagagtgataactcatttgtattgctggcgacacaacgaaatctactgacgcttaaccgtgcttcagccgaggaaattcaggatcatcagtgtgagattttgcgttaa

SEQ ID NO: 482728 - DNA, 768 bp, Shigella sonnei
atgcgacatcctttagtgatgggtaactggaaactgaacggcagccgccacatggttcacgagctggtttctaacctgcgtaaagagctggcaggtgttgctggctgtgcggttgcaatcgcaccaccggaaatgtacatcgatatggcgaagcgcgaagctgaaggcagccacatcatgctgggtgcgcaaaacgtggacctgaacctgtccggcgcattcaccggtgaaacttctgccgctatgctgaaagacatcggcgctcagtacatcatcatcggccactctgaacgtcgtacttaccacaaagagtctgacgaactgatcgcgaaaaaattcgcggtgctgaaagagcagggcctgactccggttctgtgcatcggtgaaaccgaagctgaaaacgaagcgggcaaaactgaagaagtttgcgcacgtcagatcgacgcggtactgaaaactcagggtgctgcggcattcgaaggtgcggttatcgcttacgaacctgtatgggcaatcggtactggcaaatctgcaactccggctcaggcacaggctgttcacaaattcatccgtgaccacatcgctaaagttgacgctaacatcgctgaacaagtgatcattcagtacggcggctctgtaaacgcgtctaacgctgcagaactgtttgctcagccagatatcgacggcgcgctggttggcggtgcttctctgaaagctgacgctttcgcagtgatcgttaaagctgcagaagcggctaaacaggcttaa

SEQ ID NO: 482729 - DNA, 600 bp, Shigella sonnei
atgaagccagggtgtacgctgttttttctcttatgttctgcattaaccgttacaacaacggcgcatgcacaaacaccagatacggcaacgaccgcgccttatctgctggctggagcccctactttcgatctctccatcagccagtttcgagaagactttaacagccagaatcctagcctgccactgaacgaatttcgtgccatcgacagcagtcccgacaaagccaatctcactcgtgctgcaagtaaaattaacgagaacttgtatgcttctacagcgctggagcgcggtaccttaaaaatcaaaagcattcaaatgacctggctacccatccaggggccagagcaaaaagcagcgaaagcgaaagctcaggaatacatggcagcagtgatccgcacactcaccccattaatgaccaaaacacaaagccagaaaaaactgcagtcgctactaacggcggggaaaaacaaacgttattacaccgagacagaaggtgcactgcgttatgttgtcgcggacaacagcgaaaaggggctgaccttcgctgttgaaccgattaagctggcgctatctgaatcgcttgaaggtttgaataaatga

SEQ ID NO: 482730 - DNA, 441 bp, Shigella sonnei
atgaccatacagcaatggttattctcatttaaagggcgtattggacgccgtgatttctggatttggataggcctgtggttcgcaggcatgctggtgcttttctcactggcgggtaaaaatttactcgatattcagaccgcggcgttttgccttgtgtgcttgctttggccaacagcggcagtaactgttaagcgcttgcatgatcgcgggcgttccggcgcatgggcatttctgatgattgtggcgtggatgctgctggcgggtaactgggcgattttaccgggtgtctggcaatgggcggtggggcgttttgtcccgacgttgattctggtgatgatgcttatcgatcttggtgcgtttgttggcacacaaggcgaaaataaatatggtaaagatactcaggatgtgaagtataaagccgacaataaatcaagtaattaa

SEQ ID NO: 482731 - DNA, 300 bp, Shigella sonnei; identical to SEQ ID NO: 471047

SEQ ID NO: 482732 - DNA, 429 bp, Shigella sonnei
atggcttataaacacattggcgtggcaatttccgggaatgaagaagatgccttactggtgaataaagccctggagctcgccagacataatgacgctcacctgacgttaattcatattgatgatggcttaagcgagttgtatccgggtatctacttccctgcaacagaagatattcttcaattgttgaagaataagtcggataacaagctgtataaactgacgaaaaatattcaatggccgaagacaaaactgcgtattgaacgcggagaaatgccggaaacactgctggaaattatgcaaaaagagcagtgcgacctccttgtctgtggtcatcaccactcatttatcaaccgtttgatgccggcatatcgcgggatgatcaataagatgagtgcggatttgctcatcgtgccgtttatcgataagtaa

SEQ ID NO: 482733 - DNA, 747 bp, Shigella sonnei
atggctgattgggtaacaggcaaagtcactaaagtgcagaactggaccgacgccctgtttagtctcaccgttcacgcccccgtgcttccgtttaccgccgggcaattcaccaagcttggccttgaaatcgacggcgaacgcgtccagcgcgcctactcctatgttaactcgcccgataatcccgatctggagttttacctggtcaccgtccccgatggcaaattaagcccacgactggcggcactgaaaccaggcgatgaagtgcaggtggttagcgaagcagctggcttctttgttctggaggaagtaccagattgcgaaacgctatggatgctggcaaccggtacagcgattggcccttatttatcgattctgcaactaggcaaagatttagatcgcttcaaaaatctggtcctggttcacgccgcacgttatgccgccgacttaagctatttgccactgatgcaagaactggaaaaacgctacgaaggcaaactgcgcattcagacggtggtcagtcgggaaacggcagcggggtcgctcaccggacggataccggcattaattgaaagtggggaactggaaagcgcgattggcctgccgatgaataaagaaaccagccatgtgatgctgtgcggcaatccacagatggtgcgcgatacacaacagttgctgaaagagacccggcagatgacgaaacatttacgtcgccgaccgggccatatgacagcggagcattactggtaa

SEQ ID NO: 482734 - DNA, 1122 bp, Shigella sonnei
atgccgcatccggtagtcccgaaacgtgcgggggcaaccccgcacacatcaataatccctcccttcccctgtgctacacttcgcgccattccttactgcttagagtttgctatgagacgagaacttgccatcgaattttcccgcgtcaccgaatctgcggcgctggctggctacaaatggttaggacgcggcgataaaaacaccgcggacggcgcggcggtaaacgccatgcgtattatgctcaaccaggtcaatattgacggcaccatcgtcattggtgaaggtgaaatcgacgaagcaccgatgctctacattggtgaaaaagtcggtactggtcgcggcgacgcggtagatattgctgttgatccgattgaaggcacgcgcatgacggcgatgggccaggctaacgcgctggcggtgctggcagtaggcgataaaggctgcttcctcaatgcgccggatatgtatatggagaagctgatcgtcggaccgggagccaaaggcaccattgatttgaacctgccgctggcggataacctgcgcaatgttgcggcggcgctcggcaaaccgttgagcgaactgacggtaacaattctggctaaaccacgccacgatgccgttatcgctgaaatgcaacaactcggcgtacgcgtatttgctattccggatggcgacgttgcggcctcaattctcacctgtatgccagacagcgaagttgacgtgctgtacggtattggtggcgcgccggaaggcgtagtttctgcggcggtgatccgcgcattagatggcgacatgaacggtcgtctgctggcgcgtcatgacgtcaaaggcgacaacgaagagaatcgtcgcattggcgagcaggagctggcacgctgcaaagcgatgggcatcgaagccggtaaagtattgcgcctgggcgatatggcgcgcagcgataacgtcatcttctctgccaccggtattaccaaaggcgatctgctggaaggcattagccgcaaaggcaatatcgcgactaccgaaacgctgctgatccgcggcaagtcacgcaccattcgccgcattcagtctatccactatctggatcgcaaggacccggaaatgcaggtgcacatcctctga

SEQ ID NO: 482735 - DNA, 1512 bp, Shigella sonnei
atgactgaaaaaaaatatatcgttgcgctcgaccagggcaccaccagctcccgcgcggtcgtaatggatcacgatgccaatatcattagcgtgtcgcagcgcgaatttgagcaaatctacccaaaaccaggctgggtagaacacgacccaatggaaatctgggccacccaaagctccacgctggtagaagtgctggcgaaagccgatatcagttccgatcaaattgcagctatcggtattacgaaccagcgtgaaaccactattgtctgggaaaaagaaaccggcaagcctatctataacgccattgtctggcagtgccgtcgtaccgcagaaatctgcgagcatttaaaacgtgacggtttagaagattatatccgcagcaataccggtctggtgattgacccgtacttttctggcaccaaagtgaagtggatcctcgaccatgtggaaggctctcgcgagcgtgcgcgtcgtggtgaattgctgtttggtacggttgatacgtggcttatctggaaaatgactcagggccgtgtccatgtgaccgattacaccaacgcctctcgtaccatgttgttcaacatccataccctggactgggacgacaaaatgctggaagtgctggatattccgcgcgagatgctgccagaagtgcgtcgttcttccgaagtgtacggtcagactaacattggcggcaaaggcggcacgcgtattccaatctccgggatcgccggtgaccagcaggccgcgctgtttggtcagttgtgcgtgaaagaagggatggcgaagaacacctatggcactggctgctttatgctgatgaacaccggcgagaaagcggtgaaatcagaaaacggcctgctgaccaccatcgcctgcggcccgactggcgaagtgaactatgcgctggaaggtgcggtgtttatggcaggcgcatccattcagtggctgcgcgatgagatgaagttgattaacgacgcctacgattccgaatatttcgccaccaaagtgcaaaacaccaatggtgtgtatgtggttccggcctttaccgggctgggtgcgccgtactgggacccgtatgcgcgcggggcgattttcggtctgactcgtggggtgaacgctaaccacattatacgcgcgacgctggagtctattgcttatcagacgcgtgacgtgctggaagcgatgcaggccgactctggtatccgtctgcacgccctgcgcgtggatggtggcgcagtagcaaacaatttcctgatgcagttccagtccgatattctcggcacccgcgttgagcgcccggaagttcgcgaagtgactgcattgggcgcggcctatcttgctggtctggcggtcggtttctggcagaacctcgacgagctgcaagagaaagcggtgattgagcgcgagttccgtccaggcatcgaaaccactgagcgtaattaccgttacgcaggctggaaaaaagcggttaaacgcgcgatggcgtgggaagaacacgacgtaatgtaa

SEQ ID NO: 482736 - DNA, 846 bp, Shigella sonnei
atgagtcaaacatcaaccttgaaaggccagtgcattgctgaattcctcggtaccgggttgttgatttttttcggtgtgggttgcgttgcagcactaaaagtcgctggtgcgtcttttggtcagtgggaaatcagtgtcatttggggactgggggtggcaatggccatctacctgaccgcaggggtttccggcgcgcatcttaatcccgctgttaccattgcattgtggctgtttgcctgtttcgacaagcgcaaagttattccttttatcgtttcacaagttgccggcgctttctgtgctgcggctttagtttacgggctttactacaatttatttttcgacttcgagcagactcatcacattgttcgcggcagtgttgaaagtgttgatctggcaggcactttctctacttaccctaatcctcatatcaattttgtgcaggctttcgcagttgagatggtgattaccgctattctgatggggctgatcctggcgttaacggacgatggcaacggtgtaccacgcggccctttggctcccttgctgattggtctactgattgcggtcattggcgcatctatgggcccattgacgggttttgccatgaacccagcgcgtgacttcggtccgaaagtctttgcctggctggcgggctggggcaatgtcgcctttaccggcggcagagacattccttacttcctggtgccgctttttggccctatcgttggcgcgattgtaggtgcatttgcctaccgcaaactgattggtcgccatttgccttgcgatatctgtgttgtggaagaaaaggagaccacaactccttcagaacaaaaagcttcgctgtaa

SEQ ID NO: 482737 - DNA, 240 bp, Shigella sonnei; identical to SEQ ID NO: 3072

SEQ ID NO: 482738 - DNA, 486 bp, Shigella sonnei
atgaaatacgatacttccgagctttgtgacatctatcaagaagatgttaacgtcgtggaaccgctgttctccaactttggcggacgggcgtcgtttggcggacaaataatcacggtaaaatgtttcgaggacaacgggttgctgtacgatctgctcgaacagaatggccgtggtcgtgttcttgtcgtcgatggcggtggttctgttcgtcgcgcactggtcgatgctgaactggcgcgtctggcagtacaaaatgaatgggaaggtctggttatttacggcgcggtgcgtcaggtagatgacctagaagagttggatatcggcatccaggcgatggcggcaattccggttggtgccgctggcgaaggcattggcgaaagcgatgtccgcgtcaattttggcggtgtaaccttcttctccggcgaccatctttatgccgacaataccgggattattctttcagaagatccgctggatattgaatga

SEQ ID NO: 482739 - DNA, 927 bp, Shigella sonnei
atgactgaacaacaaattagccgaactcaggcgtggctggaaagtttacgacctaaaaccctccccctcgcctttgctgcaattatcgtcgggacggcgctggcatggtggcaaggtcacttcgatccgctggtcgccctgctggtactaattaccgccgggctattacagatcctttctaacctcgccaatgattacggcgatgcggtaaaaggcagcgataaacctgaccgcattgggccgctacgcggcatgcaaaaaggggtcattacccagcaagagatgaaacgggcgctcattattaccgtcgtgctcatctgtctctccgggctggcactggttgcagtggcatgccatacgctggccgattttgtcggtttcctgattcttggcgggttgtcgatcattgccgctatcacctacaccgtgggcaatcgtccttatggttatatcggtctgggtgatatttccgtactggttttctttggctggttgagcgtcatggggagctggtatttacaggctcatacattgattccggcactgatccttccggcgaccgcctgtggcctgctggcaacggcagtactgaacattaataacctgcgtgatatcaatagcgaccgcgaaaatggcaaaaacacgctggtggtgcgcttaggtgaagtgaacgcgcgtcgttatcatgcctgcctgctgatgggctctctggtatgtctggcgctgtttaatctcttttcgctgcatagcctgtggggctggctgttcctgctggcggcaccattactggtgaagcaagcccgttatgtgatgcgggaaatggacccggtggcgatgcgaccaatgctggaacgtactgtcaagggagcgttactgactaacctgctgtttgttttagggatattcctaagccagtgggcagcataa

SEQ ID NO: 482740 - DNA, 1332 bp, Shigella sonnei
atgtctgaaatgaccccacgcgaaatcgtcagcgaactggataagcacatcatcggccaggacaacgccaagcgttctgtggcgattgctctgcgtaaccgctggcgtcgcatgcagctcaacgaagagctgcgccatgaagtgaccccgaaaaatatcctgatgatcggcccgaccggtgtcggtaaaactgaaatcgcccgtcgtctggctaagctggcgaatgcgccgttcatcaaagttgaagcgaccaaattcaccgaagtgggctatgtcggtaaggaagtggattctattattcgcgatctgaccgatgccgccgtgaaaatggtacgcgtccaggctatcgagaaaaaccgttatcgcgctgaagaactggcagaagaacgtattctcgacgtgctgatcccacctgctaaaaacaactggggacagaccgaacagcagcaggaaccgtccgctgctcgtcaggcattccgcaaaaaactgcgtgaaggccagcttgatgacaaagaaatcgagatcgatcttgccgcagcaccgatgggcgttgaaattatggctcctccaggcatggaagagatgaccagccagctgcagtccatgttccagaacctgggcggccagaagcaaaaagcgcgtaagctgaaaatcaaagacgccatgaagctgctgattgaagaagaagcggcgaaactggtgaacccggaagagctgaagcaagacgctatcgacgctgttgagcagcacgggatcgtgtttatcgacgaaatcgacaaaatctgtaagcgcggcgagtcttccggtccggatgtttctcgtgaaggcgttcagcgtgacctgctgccgctggtagaaggttgcaccgtttccaccaaacacgggatggtcaaaactgaccacattctgtttatcgcttctggcgcgttccagattgcgaaaccgtctgacctgatcccggaactgcaaggtcggctgccaatccgcgttgaactgcaggcactgaccaccagcgacttcgagcgtattctgaccgagccgaatgcctctatcaccgtgcagtacaaagcactgatggcgactgaaggcgtaaatatcgagtttaccgactccggtattaagcgcatcgcggaagcggcatggcaggtgaacgaatctaccgaaaacatcggtgctcgtcgtttacacactgttctggagcgtttaatggaagagatttcctacgacgccagcgatttaagcggtcaaaatatcactattgacgcagattatgtgagcaaacatctggatgcgttggtggcagatgaagatctgagccgttttatcctataa

SEQ ID NO: 482741 - DNA, 531 bp, Shigella sonnei
gtgacaactatagtaagcgtacgccgtaacggccatgtggtcatcgctggtgatggtcaggccacgttgggcaataccgtaatgaaaggcaacgtgaaaaaggtccgccgtctgtacaacgacaaagtcatcgcgggctttgcgggcggtactgcggatgcttttacgctgttcgaactgtttgaacgtaaactggaaatgcatcagggccatctggtcaaagccgccgttgagctggcaaaagactggcgtaccgatcgcatgctgcgcaaacttgaagcactgctggcagtcgcggatgaaactgcatcgcttatcatcaccggtaacggtgacgtggtgcagccagaaaacgatcttattgctatcggctccggcggcccttacgcccaggctgcggcgcgcgcgctgttagaaaacactgaacttagcgcccgtgaaattgctgaaaaggcgttggatattgcaggcgacatttgcatctataccaaccatttccacaccatcgaagaattaagctacaaagcgtaa

SEQ ID NO: 482742 - DNA, 855 bp, Shigella sonnei
atggtcgctattgctgccgccgtgcttgtgacctttatcggtggtctgtacttcattacgcatcacaagaaagaagagtccgagacgctgcaaagccagaaagtgaccggtaacggactaccaccaaaaccagaagaacgctggcgctacattaaagagctggaaagtcgccagccgggtgtgcgtgcgcccacagaaccttctgccggtggtgaagtgaaaacgccggagcaactgacaccagaacaacgtcagcttcttgaacaaatgcaggctgatatgcgccagcagccaacgcagctggttgaagttccgtggaatgaacagacgccggaacagcgtcagcaaacgctacaacgccagcgtcaggcgcagcaattagcggagcagcaacgcctggctcagcagtcgcgtacgactgaacaaagctggcagcagcagacgcgtacgtcgcaagccgcgccggtacaggcgcaaccgcgccagtctaaaccggcttctactcagcagccgtaccaggatctgctgcaaacccctgcgcacacgaccgcgcagtcgaagccgcagcaagctgcgccggttgctcgtgccgctgacgcgccaaaaccgacggcggagaaaaaagacgaacgccgctggatggtgcagtgcggttcgttcagaggcgcggaacaggcagagacggtacgtgctcagctggcgttcgaaggatttgactcgaaaatcaccaccaacaatggctggaatcgtgtggtcattggcccggtgaaaggcaaagagaacgcagacagcaccctcaatcggttgaagatggcgggtcatacaaactgcattcggctcgccgccgggggttga

SEQ ID NO: 482743 - DNA, 1026 bp, Shigella sonnei
gtgaaagcgaagaagcaggaaactgccgcgaccatgaaagacgttgccctcaaggcaaaagtctctacagcgactgtctcccgagcattaatgaatcccgataaagtctcccaggccacccgtaatcgggttgaaaaagcggcccgggaagtgggttatttaccgcagcctatggggcgcaacgtcaagcgtaatgaatcccgcaccattctggtgattgtcccggatatctgcgatcccttctttagcgaaattattcgcggtatcgaagttacggcggcaaatcacggatatctggtgctgattggcgactgtgcgcatcaaaatcagcaggaaaaaacctttatcgatttgatcatcaccaagcaaattgatggcatgttgctgctgggttcaaggctgccgtttgatgccagcattgaggaacagcgtaatctgccgccgatggtgatggcgaacgaattcgcaccggaactggagctacctacagttcatatcgacaatctgaccgccgcatttgatgcagtaaattatctatatgagcaagggcataaacggattggctgtatagccggtcccgaagagatgccgctgtgtcactaccgcctgcaaggttacgttcaggcgctgcgtcgctgcggcattatggttgatccgcaatacatcgcccgtggcgacttcaccttcgaagccggaagcaaagcgatgcagcagctgcttgatcttccacaaccgcctactgctgtcttctgccatagcgatgtgatggcgctcggcgcactttctcaggcaaaacgccaggggctgaaagtcccggaagacctttccataatcggttttgataacatcgacctgacgcaattttgtgatccgccgctgacaaccatcgcgcagccgcgttacgaaatcggtcgggaagctatgctgttattgcttgatcaaatgcaggggcaacacgttggcagtggctctcgtttaatggactgcgaacttatcatccggggatcaacacgcgcgttaccttaa

SEQ ID NO: 482744 - DNA, 2199 bp, Shigella sonnei
atgcccgttgcccacgttgccttgcccgttccgcttcctcgtacctttgactatctgctgccagaaggcatggcggttaaagccgggtgtcgcgtgcgcgtgccgtttggcaaacagcaggagcgcatcggggttgtggtatcagttagcgatgtcagtgagctgccgcttaacgagctgaaagcggtagttgaagtgctggacgttgagccggtatttactcactccgtctggcgattactgctctgggcggcagattactatcatcatccgattggcgatgtgctgtttcatgccttgccgattttactgcgccaggggcggcctgcggcgaacgcgccgatgtggtactggtttgccactgaacaaggccaggcggtggatctgaacagcctgaaacgctcacccaagcaacaacaggcgctggcggcgttacggcaagggaaaatctggcgcgaccaggttgccacgctcgaatttaatgatgccgcgttgcagacgctgcgcaaaaaaggtctgtgtgatttagcaagtgaaacaccagagtttagcgactggcgaacgaactatgccgtttctggtgagcggttgcgattgaataccgaacaggccaccgccgttggcgcaattcatagcgcggcagatactttttctgcctggctgctggcgggcgttaccggttccggtaaaacggaggtttatctcagtgtactggaaaacgtgctcgctcagggcaaacaggcgctggtgatggtgccggaaatcggcctgacaccgcaaactatcgcccgttttcgtgaacggtttaatgcgcccgtggaagttctgcattccggtctgaacgacagcgagcgtctttcggcgtggctgaaagcgaaaaatggcgaggcggcgattgtgatcggcacccgctccgcgctgtttacgccgtttaaaaatctcggcgtgattgtcattgacgaagagcacgacagttcctacaagcagcaggaaggctggcgctatcatgcccgcgacctggcggtgtatcgtgcgcatagcgagcaaatcccgattattcttggctccgcaacgcccgcgctggaaacgttgtgcaacgtccagcagaaaaaataccgcctgctgcgcctgacgcgccgggcggggaatgcgcgtccggcaattcaacacgtgctggatttaaaaggtcagaaggtgcaggcaggtctggctccggcgttaatcacccgtatgcgccagcatttacaggccaacaatcaggttatcctctttcttaaccgccgtggctttgcgcctgcgctactgtgccacgactgcggctggattgccgaatgcccacgttgcgatcactactacacgctgcatcaggcgcaacagcatttgcgctgtcaccactgtgacagtcagcgtccggtgccgcgccagtgcccttcctgcggttccacgcacctggtacccgtggggctgggcaccgaacagcttgaacagacgcttgcgccgctgttccctgatgtgcccatttctcgtatcgaccgcgataccaccagccgcaaaggggcgctggaacagcaactggcggaagtacatcgcggcggtgcgaggattttgatcggcacacaaatgctggcgaaaggtcaccactttccggatgtgacgctggtggcgttactggatgtggacggcgcgctgttttctgccgattttcgctcggcagagcgtttcgctcagctttacacccaggtcgccggtcgtgccgggcgtgcgggtaaacagggcgaagtggtgctgcaaacgcaccatccggaacatcctctgttgcaaacgttgctctataaaggctacgacgcctttgccgaacaggcgctggctgagcgacgcatgatgcagctgccgccgtggaccagccatgtgattgtgcgtgcggaagatcataacaatcagcatgcgccgctgttcctgcaacaactgcgtaatctgatcctctccagcccgctggcagacgacaaattgtgggttctcggtccggttccggcactggcacctaaacgtggcggtcgctggcgctggcagatattgttgcagcacccttcccgcgtgcgcttgcaacacatcattaacggtacgctggcactcatcaatacaataccggattcccgtaaggtgaaatgggtgctggatgttgatccgattgagggttaa

SEQ ID NO: 482745 - DNA, 213 bp, Shigella sonnei; identical to SEQ ID NO: 3080

SEQ ID NO: 482746 - DNA, 1047 bp, Shigella sonnei
ttgcacgcgctgtcgttaaatattttcaaagatgaaggccgcgaagcgtttctgaaattaatggaaaccaccgatatcttcatcgaagccagcaaaggtccggcctttgcccgtcgtggcattaccgatgaagtactgtggcagcacaacccgaaactggttatcgctcacctgtccggttttggtcagtacggcaccgaggagtacaccaatcttccggcctataacaccatcgcccaggccttcagtggttacctgattcagaacggtgatgttgaccagccaatgcctgccttcccgtataccgccgattacttttctggcctgaccgccaccacggcggcgctggcagcactgcataaagtgcgtgaaaccggtaaaggcgaaagtatcgacatcgccatgtatgaagtgatgctgcgtatgggccagtacttcatgatggattacttcaacggcggcgaaatgtgcccgcgcatgagcaaaggtaaagatccctactacgccggttgcggtctgtataaatgcgccgacggctacatcgtgatggaactggtgggcattacccaaattgaagagtgctttaaagatattgacctcgcacatctactcggtacgccggaaatcccggaaggcactcagcttatccaccgtatcgaatgcccttacggcccactggtagaagaaaaactcgatgcctggctggcggcacataccatcgcagaagttaaagaacgctttgccgaactgaatatcgcctgtgccaaagtactgaccgtaccggaactggaaagcaatccacagtatgttgcccgtgaatcaatcactcagtggcaaacgatggatggtcgcacctgcaaagggccgaacatcatgccgaaattcaaaaataaccccggacaaatctggcgcggaatgccctcacatggcatggacacggctgccattttgaaaaatatcggctacagcgaaaacgacattcaggagttggtcagcaaagtgaggtgtactggcaatagcggacactaccatttgttctttttttaa

SEQ ID NO: 482747 - DNA, 144 bp, Shigella sonnei
atggatcatctacccatgccgaaattcgggccgttggccggattgcgcgttgtcttctccggtatcgaaatcgccgggccgttcgccgggcaaatgttcgcagaatggggtgcggaagttatctggatcgagaacgtcgcctag

SEQ ID NO: 482748 - DNA, 1143 bp, Shigella sonnei
atggattttaatttaaatgatgagcaggaactgtttgtcgccggtatccgcgaactgatggccagcgaaaactgggaggcctattttgccgagtgcgaccgtgacagcgtctacccggaacgttttgtcaaagcactggcggatatgggtatcgacagtctgctgatccctgaagagcacggtggtctggacgcggggtttgttactctcgccgccgtgtggatggagctgggacgtctgggggcaccaacctatgtgctgtaccagttgccgggcgggttcaacaccttcctgcgcgaaggcacacaagagcagatcgacaaaattatggctttccgcggcaccggtaagcagatgtggaactcagcgattaccgaaccgggcgcgggctccgacgtgggtagcctgaaaacgacttatacccgtagaaatggtaagatttatcttaatggtagtaagtgttttattaccagcagcgcctacaccccgtacatcgtggtgatggcgcgcgacggggcttctccggacaaacctgtctacaccgaatggtttgttgatatgagcaaaccgggcatcaaagtgaccaaacttgaaaagctcggtctgcgtatggatagctgctgtgaaatcacctttgacgacgtggaactggacgagaaagacatgttcggtcgggaaggtaacggctttaaccgcgtcaaagaagagttcgaccatgaacgtttcctggtagccctcaccaactacggtacggcgatgtgcgcttttgaagatgcggcgcgctacgccaatcagcgcgtgcagtttggcgaggctattggtcgtttccagttgattcaggaaaaattcgcccacatggcgatcaaattaaactccatgaaaaacatgctgtatgaagcagcgtggaaagcagacaacggcaccatcacctctggcgatgcagcgatgtgcaaatacttctgcgccaatgcggcatttgaagttgtggatagcgcaatgcaggtgctgggcggtgtcgggattgcgggcaaccaccgcatcagccgcttctggcgtgatctgcgtgtagaccgcgtctccgggggatctgacgaaatgcagatcctgacgctgggtcgcgcggtgctgaagcaataccgctaa

SEQ ID NO: 482749 - DNA, 1515 bp, Shigella sonnei
atgaagaatgaaaagagaaaaacgggaatagaaccgaaggttttctttccgccgttaataatcgtcggcatactttgttggcttacagtcagagatctggatgcagcgaatgtcgttattaatgctgtattcagttacgtcaccaatgtatggggatgggcatttgaatggtatatggtggtgatgcttttcggttggttctggctggtgtttggcccgtatgccaaaaagcgtttaggtaacgaaccacctgaatttagtaccgccagttggatctttatgatgttcgcctcctgtacgtctgctgccgtactgttctggggatcgattgagatctactactacatctccaccccgccgtttggcttagaaccgaactcgacaggggcgaaagagttggggctggcttacagcttgttccactggggacctctgccgtgggccacttacagcttcctttcagtcgccttcgcttacttcttctttgtccgcaaaatggaagtgattcgccccagctcgacactggtgccgctggtaggtgaaaaacacgccaaagggttgttcggcactatcgtcgacaacttctatctcgtcgccttgatcttcgcgatgggtaccagtctgggccttgccacgccgctggtgaccgagtgtatgcaatggttgtttggcattccgcataccctgcaactggacgctatcatcattacctgctggattatcctcaacgccatttgcgtcgcttgcggtctgcaaaaaggggtacgtatcgccagtgacgtgcgtagttacctgagcttcctgatgctgggttgggtgttcattgtcagcggtgccagcttcatcatgaactacttcaccgattcggtggggatgttgctgatgtatctgccgcgcatgttgttctataccgatcccatcgctaaaggcggcttcccgcagggctggaccgtgttctactgggcatggtgggtgatttatgctatccagatgagtatcttcctcgcccgcatctcccgtggtcgtactgtgcgtgaactgtgcttcggcatggtgctggggctgacagcgtcaacctggatcctgtggactgtactcggtagtaacactctgctgttgatagataaaaacatcatcaacattccaaatctgatcgaacagtacggtgtggcgcgcgccatcattgaaacctgggccgctctgccactcagcaccgccaccatgtggggcttcttcatcctctgctttattgccaccgttacgctggttaacgcctgctcttataccctggcgatgtccacttgccgcgaagtacgcgatggtgaagaaccacctctgctggtgcgtatcggttggtcaattctggttggcattatcggtattgttctgctggcgctcggcggcctgaaaccgattcaaaccgccattatcgccggaggatgcccgctgttcttcgtcaacattatggtgacgctctcctttattaaagacgcgaaacagaactggaaagattaa

SEQ ID NO: 482750 - DNA, 771 bp, Shigella sonnei
atgaagattattacttgctataagtgcgtgcctgatgaacaggatattgcggtcaataatgctgatggttcattagacttcagcaaagccgatgccaaaataagccaatacgatctgaacgctattgaagcggcttgccagctaaagcaacaggcagcagaggcgcaggtgacggccttaagtgtgggcggtaaagccctgaccaacgccaaagggcgtaaagatgtactatcgcgcggcccggatgaactgattgtggtgattgatgaccagttcgagcaggcactgccgcaacaaacggcgagcgcactggctgcagccgcccagaaagcaggctttgatttgatcctctgtggcgatggttcttccgacctttatgcccagcaggttggtctgctggtgggcgaaatcctcaatattccggcagttaacggcgtcagcaaaattatctccctgacggcagataccctcaccgttgagcgcgaactggaagatgaaaccgaaaccttaagcattccgctgcctgcggttgttgctgtttccactgatatcaattccccacaaattccttcgatgaaagccattctcggcgcggcgaaaaagcccgtccaggtatggtcggcggcggatattggttttaacgcagaggcagcctggtcagaacaacaggttgccgcgccgaaacagcgcgaacgtcagcgcatcgtgattgaaggcgacggcgaagaacagatcgccgcatttgctgaaaatcttcgcaaagtcatttaa

SEQ ID NO: 482751 - DNA, 942 bp, Shigella sonnei
atgaacacgttttctcaagtctgggtattcagcgataccccttctcgtctgccggaactgatgaacggtgcgcaggctttagctaatcaaatcaacacctttgtcctcaatgatgccgacggcgcacaggcaatccagctcggcgctaatcatgtctggaaattaaacggcaaaccggacgatcggatgatcgaagattacgccggtgtcatggctgacactattcgccagcacggcgcagacggcctggtgctgctgccaaacacccgtcgcggcaaattactggcggcaaaactgggttatcgccttaaagcggcggtgtctaacgatgccagcaccgtcagcgtacaggacggtaaagcaacagtgaaacatatggtttacggtggtctggcgattggcgaagaacgcattgccacgccgtatgcggtactgaccatcagcagcggcacgttcgatgcggctcagccagacgcgtcacgcactggcgaaacgcacaccgtggagtggcaggctccggctgtggcgattacccgcacggcaacccaggcgcgccagagcaacagcgtcgatctcgacaaagcccgtctggtggtcagcgtcggtcgcggtattggcagcaaagagaacattgcgctggcagaacagctttgcaaggcgataggtgcggagttggcctgttctcgtccggtggcggaaaacgaaaaatggatggagcacgaacgctatgtcggtatctccaacctgatgctgaaacctgaactgtacctggcggtggggatctccgggcagatccagcacatggttggtgctaatgcatcgcaaaccattttcgccatcaataaagataaaaatgcgccgatcttccagtacgcggattacggcattgttggtgacgccgtgaagatccttccggcgctgaccgcagctttagcgcgttga

SEQ ID NO: 482752 - DNA, 1287 bp, Shigella sonnei
atgtccgaagatatctttgacgccatcatcgtcggtgctgggcttgccggttcggttgccgcactggtgctcgcccgcgaaggggcgcaagtgttagttatcgagcgtggcaattccgcaggtgccaagaacgtcaccggcgggcgtctctatgcccacagcctggaacacattattcctggtttcgccgaatccgccccggtagaacgcctgatcacccatgaaaaactcgcgtttatgacggaaaagtcagcgatgactatggactactgcaacggtgacgaaacctcgccatcccagcgttcttactccgttttgcgcagtaaatttgatgcctggctgatggagcaggccgaagaagcgggcgcgcagttaattaccgggatccgcgtcgataacctcgtacagcgcgatggcaaagtcgtcggtgtagaagccgatggcgatgtgattgaagcgaaaacggtgatccttgctgatggagtgaactccatccttgccgaaaagctggggatggcaaaacgcgttaaaccgacggatgtggcggttggcgtgaaggaactgatcgagttaccgaagtcggtaatcgaagaccgttttcagttgcagggtaatcagggcgcggcttgtctgtttgcgggatcacccaccgatggcctgatgggcggcggcttcctttataccaatgaaaataccctgtcgctggggctggtttgtggtctgcatcatctgcatgacgcaaaaaaatcggtgccgcaaatgctggaagatttcaaacagcatccggcagtggcaccgctgatcgcgggcggcaagctggtggaatattccgctcacgtagtgccggaagcaggcatcaacatgctgccggagttggttggtgacggcgtattgattgccggtgatgccgccggaatgtgtatgaacctcggttttaccattcgcggtatggatctggcgattgccgccggggaagccgcagcaaaaaccgtgctttcagcgatgaaaagcgacgatttcagtaagcaaaaactggcggaatatcgtcagcatcttgagagtggcccgctgcgcgatatgcgtatgtaccagaaactaccggccttccttgataacccacgcatgtttagcggctacccggaactggcggtgggcgtggcgcgtgacctgttcaccattgacggcagtgcgccggaactgatgcgcaagaaaatcctccgccacggcaagaaagtgggcttcatcaatctgatcaaggatggcatgaaaggagtgaccgttttatga

SEQ ID NO: 482753 - DNA, 288 bp, Shigella sonnei
atgacttctcccgtcaatgtggacgtcaaactgggcgtcaataaattcaatgtcgatgaagagcatccgcacattgttgtaaaggccgatgccgataaacaggccctggagctgctggtgaaagcgtgccccgcaggtctgtacaagaagcaggatgacggcagtgtgcgcttcgattacgccggatgtctggagtgcggcacctgtcgcattctggggctggggtcggcgctggaacagtgggaatacccgcgcggcacctttggtgtggagttccgttacggctga

SEQ ID NO: 482754 - DNA, 687 bp, Shigella sonnei
atgcaaccgtccagaaactttgacgatctcaaattctcctcaattcaccgccgcattttgctgtggggaagcggtggtccgtttctggatggttatgtactggtaatgattggcgtggcgctggagcaactgactccggcgctaaaactggacgctgactggattggcttgttgggcgcgggaacgctcgccgggctgttcgttggcacatcgctgtttggctatatttccgataaagtaggacggcgcaaaatgttcctcattgatatcatcgccatcggcgtgatatcggtggcgacgatgtttgtttcatcccccgtcgaactgttggtgatgcgggtacttatcggcattgtcatcggtgcagattatcccatcgccacctcaatgatcaccgagttctccagtacccgtcagcgggcattttccatcagctttatcgccgccatgtggtatgtcggcgcgacctgcgccgatctggtcggctactggctttatgatgtggaaggcggctggcgctggatgctgggtagcgcggcgatcccctgtttgttgattttgattggtcgattcgaactgcctgaatctccccgctggttattacgcaaagggcgagtaaaagagtgcgaagagatgatgataaaactgtttggcgaaccggtggctttcgatgaagagcagccgtag

SEQ ID NO: 482755 - DNA, 558 bp, Shigella sonnei
atgttcgccatttacacctttggcccgcaaatcgttggtttgttgggattgggtgttggcaaaaacgcggcgctggggaacgtggtgattagcctgttctttatgctcggctgtattccgccgatgctgtggttaaacactgccggacggcgtccattgttgattggcagctttgccatgatgacgctggcgctggcggttttggggctgatcccggatatggggatctggctggtagtgatggcctttgcggtgtatgcctttttctctggcgggccgggtaatttgcagtggctctatcctaatgaactcttcccgacagatatccgcgcctctgccgtgggcgtgattatgtccttaagccgtattggcaccattgtttcgacctgggcactgccgatctttatcaataattacggtatcagtaacacgatgctaatggaggcgggtatctcgctgtttggcttgttgatttccgtagcgtttgccccggagactcgagggatgtcactggcgcaaaccagcaatatgacgatccgcgggcagagaatggggtaa

SEQ ID NO: 482756 - DNA, 531 bp, Shigella sonnei
atgattcttataatttatgcgcatccgtatccgcatcattcccatgcgaataaacggatgcttgaacaggcaaggacgctggaaggcgtcgaaattcgctctctttatcaactctatcctgacttcaatatcgatattgccgccgagcaggaggcgctgtctcgcgccgatctgatcgtctggcagcatccgatgcagtggtacagcattcctccgcttcttaaactttggatcgataaagttttgtcgcacggctgggcttacggtcacggcggcaaggcgctgcatggcaaatatttgctgtgggcggtgacgaccggcggcggggaaagccattttgaaattggtgcgcatccgggctttgatgtgctgtcgcagccgctacaggcgacggcaatctactgcgggctgaactggctgccaccgtttgccatgcactgcacctttatttgtgacgacgaaaccctcgaagggcaggcgcgtcactataagcaacgtctgctggaatggcaggaggcccatcatggatag

SEQ ID NO: 482757 - DNA, 1863 bp, Shigella sonnei
atggatagccatacgctgattcaggcgctgatttatctcggttcggcagcgctgattgtacccattgcggtacgtcttggtctgggatcggtacttggctacctgatcgccggctgcattattggcccgtgggggctgcgactggtgaccgatgccgaatctattctgcactttgccgagattggggtggtgctgatgctgtttattatcggcctcgaactcgatccacaaaggctgtggaagctgcgtgcggcagtgttcggcggtggcgcattgcagatggtgatttgcggcggcctgctggggctgttctgcatgttacttgggctgcactggcaggtcgcggaattgatcggcatgacgctggcgctctcctctacggcgattgccatgcaggcgatgaatgaacgcaatctgatggtgacgcaaatgggtcgcagtgcctttgcggtgctgctgttccaggatatcgcggcgatcccgctggtggcgatgattccgctactggcaacgagcagtgcctcgacgacgatgggcgcatttgctctctcggcgttaaaagtggcgggtgcgctggtgctggtggtattgctggggcgctatgtcacgcgtccggcgctgcgttttgtagcccgctctggcttgcgggaagtgtttagtgccgtggcgttattcctcgtgtttggctttggtttgctgctggaagaggtcggcttgtcgatggcgatgggcgcgtttctggcgggcgtactgctggcaagctcggaataccgtcatgcgctggagagcgatatcgaaccatttaaaggtttgctgttggggctgtttttcatcggtgttggcatgtcgatagactttggcacgctgcttgaaaacccattgcgcattgtcattttgctgctcggtttcctcatcatcaaaatcgccatgctgtggctgattgcccgaccgttgcaagtgccaaataaacagcgtcgttggtttgcggtgttgttagggcagggcagtgagtttgcctttgtggtatttggcacggcgcagatggcgaatgtgctggaaccggagtgggcgaaatcgctgaccctggcggtggcgctgtcgatggcggcaacgccgattctgctggtgatcctcaatcgccttgagcaatcttctactgaagaggcgcgtgaagctgatgagatcgacgaagaacagccgcgggtaatcattgccggattcggtcgttttgggcagatcaccggacgtttactgctctccagcggggtgaaaatggtggtgctcgatcacgatccggaccatatcgaaaccttgcgtaaatttggtatgaaagtgttttatggcgatgccacgcggatggatttactggaatctgcgggagcggcgaaagcggaagtgctgattaacgccatcgacgatccgcaaaccaacctgcaactgacagagatggtgaaagaacacttcccgcatttgcagattattgcccgcgcccgcgatgtcgaccactacattcgtttgcgtcaggcaggcgttgaaaagccggagcgtgaaaccttcgaaggtgcgctgaaaaccgggcgtctggcactggaaagtttaggtctggggccgtatgaagcgcgagaacgtgccgatgtgttccgccgctttaatattcagatggtggaagagatggcaatggttgagaacgacaccaaagcccgcgcggcggtctataaacgcaccagcgcgatgttaagtgagatcattaccgaggaccgcgaacatctgtcattaattcaacgacatggctggcagggaaccgaagaaggtaaacataccggcaacatggcggatgaaccggaaacgaaaccctcatcctaa

SEQ ID NO: 482758 - DNA, 591 bp, Shigella sonnei
gtggactcgccagcagaatataaaattttcctcaacatcatcctcgcaccagtcgacgacggtttacgctttacgtatagtggcgacaattttttttatcgggaaatctcaatgatcagtctgattgcggcgttagcggtagatcgcgttatcggcatggaaaacgccatgccgtggaacctgcctgccgatctcgcctggtttaaacgcaacaccttaaataaacccgtgattatgggccgccatacttgggaatcaatcggtcgtccgttgccaggacgcaaaaatattatcctcagcagtcaaccgggtacggacgatcgcgtaacgtgggtgaagtcggtggatgaagccatcgcggcgtgtggtgacgtaccagaaatcatggtgattggcggcggtcgcgtttatgagcagttcctgccaaaagcgcagaaactgtatctgacgcatatcgacgcagaagtggaaggcgacacccatttcccggattacgagccggatgactgggaatcggtattcagcgaattccacgatgctgatgcgcagaactctcacagctattgctttgagattctggagcggcggtaa

SEQ ID NO: 482759 - DNA, 843 bp, Shigella sonnei
atggcgacataccttattggcgacgttcatggttgttacgatgaactgatcgcattgctgcataaagtagaatttacccctgggaaagataccctctggctgacgggcgatctggtcgcgcgcgggccgggttcgctggatgttctgcgctatgtgaaatccttaggcgacagcgtacgtctggtgctgggcaatcacgatctgcatctgctggcggtatttgccgggatcagccgcaataaaccgaaagatcgcctgacaccgctgctggaagcgccggatgccgacgagctgcttaactggctgcgtcgccagcctttgctgcaaatcgacgaagagaaaaagttggtgatggcccacgcagggatcacgccgcagtgggatctacagaccgccaaagagtgcgcgcgcgatgtagaagcggtgctatcgagtgactcctatcccttctttctcgacgctatgtacggcgatatgccaaataactggtcaccggaattgcgggggctgggaagactgcgttttatcaccaacgcttttacccgtatgcgtttttgcttcccgaacggtcaactggatatgtacagcaaagaatcgccggaagaggcccctgccccactgaaaccgtggtttgcgattcctggccctgtcgctgaagaatacagcatcgcctttggtcactgggcatcgctggagggcaaaggtacgccggaaggtatatacgcgctggataccggctgctgctggggtggtacattaacctgcctgcgctgggaagataaacagtattttgtccagccgtcgaaccggcataaggatttgggcgaagcggcggcgtcttaa

SEQ ID NO: 482760 - DNA, 378 bp, Shigella sonnei; identical to SEQ ID NO: 263724

SEQ ID NO: 482761 - DNA, 822 bp, Shigella sonnei
atgaataatcgagtccaccagggccacttagcccgtaaacgcttcgggcaaaactttctcaacgatcagttcgtgatcgacagcattgtttctgccattaacccgcaaaagggccaagcaatggtcgaaatcggccccggtctggcggcattgaccgagccggtcggcgaacgtctggaccagctgacggtcatcgaacttgaccgcgatctggcggcacgtctgcaaacgcatccattcttaggcccgaaactgacgatttatcagcaggatgcgatgacctttaactttggcgaactggccgagaaaatgggtcagccgctgcgtgttttcggcaacctgccttataacatctccacgccgttgatgttccatctgtttagctatactgatgccattgccgacatgcactttatgttgcaaaaagaggtggtgaatcgtctggttgcaggaccgaacagcaaagcgtatggtcgattaagcgtcatggcgcaatactattgcaacgtgatcccagtgctggaagtaccgccgtcagcctttacaccaccacccaaagtggattccgccgtcgtgcgcctggttcctcatgcaacgatgcctcacccggttaaagatgttcgcgtgttgagccgcatcaccactgaagcctttaaccagcgtcgtaaaaccattcgtaacagcctcggcaacctgtttagcgtcgaggtgttaacgggaatggggatcgacccggcgatgcgagcggaaaatatctctgtcgcgcaatattgccagatggcgaactatctggcggagaacgcgcctttgcaggagagttaa

SEQ ID NO: 482762 - DNA, 990 bp, Shigella sonnei
atggttaaaacccaacgtgttgtgatcactcccggcgagcccgccgggattggcccggacttagttgtccagcttgcacagcgtgagtggccggtcgaactggttgtttgtgccgatgccactctccttaccgaccgggcagcgatgctcggtttgccgctcaccctccgcccttattcccccaactcccctgcacaaccgcaaactgcgggcacattaacgctacttcctgtcgcgctacgcgaatctgtcactgcggggcagttagcgattgaaaatgggcattacgtggtggagacgctggcgcgagcgtgtgatggctgtctgaacggtgaatttgctgcgctgatcacaggccccgtgcataaaggcgtcattaacgacgcaggtattccgtttactggtcataccgagtttttcgaagagcgctcgcaggcgaaaaaagtggtgatgatgctggcgaccgaagaacttcgcgtggcgctggcaacgacgcatttaccgctgcgcgatatcgcagatgctatcacccctgcacttttgcacgaagtgattgctattttgcatcacgatttgcgtacaaaatttggtattgccgaaccgcgcattctggtctgcgggctgaatccgcacgcgggcgaaggcggtcatatgggtacggaagagatagacaccattattccggtgctcaacgagctgcgggcgcaggggatgaaactcaacgggccgctgcctgccgataccctgtttcagccgaaatatctcgataacgccgacgccgtgctggcgatgtaccacgatcagggtcttcccgtgctaaaataccagggcttcgggcgcggtgtgaacattacgctgggcctgccctttattcgcacatcagtggaccacggcaccgcgcttgaactggcgggacgtggcgaagccgatgtcggcagttttattacggcgcttaatctcgccatcaaaatgattgttaacacccaatga

SEQ ID NO: 482763 - DNA, 1287 bp, Shigella sonnei
atgaagaactggaaaacgctgcttctcggtatcgccatgatcgcgaataccagtttcgctgccccccaggtagtcgataaagtcgcagccgtcgtcaataacggcgtcgtgctggaaagcgacgttgatggattaatgcagtcggtaaaactgaacgctgcgcaggcaaggcagcagcttcctgatgacgcgacgctgcgccaccaaatcatggaacgtttgatcatggatcaaatcatcctgcagatggggcagaaaatgggagtgaaaatctccgatgagcagctggatcaggcgattgctaacatcgcgaaacagaacaacatgacgctggatcagatgcgcagccgtctggcttacgatggtctgaactacaacacctatcgtaaccagatccgcaaagagatgattatctctgaagtgcgtaacaacgaggtgcgtcgtcgcatcaccatcctgccgcaggaagtcgaatccctggcgcagcaggtgggtaaccaaaacgacgccagcactgagctgaacctgagccacatcctgatcccgctgccggaaaacccgacttctgatcaggtgaacgaagcggaaagccaggcgcgcgccattgtcgatcaggcgcgtaacggcgctgatttcggtaagctggcgattgctcattctgccgaccagcaggcgctgaacggcggccagatgggctggggccgtattcaggagttgccgggtatcttcgcccaggcattaagcaccgcgaagaaaggcgacattgttggcccgattcgttccggcgttggcttccatattctgaaagttaacgacctgcgcggcgaaagcaaaaatatctcggtgaccgaagttcatgctcgccatattctgctgaaaccgtcgccgatcatgactgacgaacaggcccgtgtgaaactggaacagattgctgccgatatcaagagtggtaaaacgacttttgctgccgcagcgaaagagttctctcaggatccaggctctgctaaccagggcggtgatctcggctgggctacaccagatattttcgatccggccttccgtgacgccctgacccgcctgaacaaaggtcaaatgagtgcaccggttcactcttcattcggctggcatttaatcgaactgctggatacccgtaatgtcgataaaaccgacgctgcgcagaaggatcgtgcataccgcatgctgatgaaccgtaagttctcggaagaagcagcaagctggatgcaggaacaacgcgccagcgcctacgttaaaatcctgagcaactaa

SEQ ID NO: 482764 - DNA, 2355 bp, Shigella sonnei
atgaaaaaacgtatccccactctcctggccaccatgattgccaccgccctttatagtcaacagggactggcagccgacctcgcctcacagtgcatgttgggcgtgccaagctatgaccgtcctctggtacagggcgataccaatgacttacccgtgactatcaatgctgaccacgcgaaaggggactacccggatgacgccgtgtttactggcagcgtggatatcatgcagggtaacagccgtctgcaggccgacgaagtgcagctccatcaaaaagaggcaccaggacaaccggagccggtacgtaccgttgatgcgctcggtaatgtccattacgacgataaccaggtgatcctcaaagggccgaaaggctgggcgaatctgaacaccaaagataccaacgtctgggaaggtgattaccagatggtgggtcgccagggtcgcggtaaagcggacctgatgaaacaacgtggcgaaaaccgctataccattctggataacggtagctttacctcctgtctgccgggttctgacacctggagcgtggtaggtagcgaaattattcatgaccgcgaagaacaagttgcggagatctggaacgcccgctttaaggtgggtccggtaccgatcttttatagcccctatttgcagttgccggtgggtgacaaacgtcgctctggtttcttgatcccgaacgccaagtacaccaccaccaactactttgagttctacctgccatattactggaacatcgcgccaaatatggatgccaccatcacgccgcattatatgcatcgtcgtggcaacatcatgtgggagaacgaattccgctacctctcccaggcgggcgctggcttgatggaactggactatctgccttcagataaagtctatgaagatgaacacccgaacgatgacagttcacgtcgttggttgttctactggcaacactccggggtcatggatcaagtgtggcgtttcaacgtcgactacaccaaggtcagcgatcctagctacttcaatgatttcgataacaagtacggttccagtactgacggctacgcaacgcaaaaattcagcgttggctatgcggtgcaaaacttcaatgccaccgtttcaaccaagcagttccaggtctttagcgagcagaacaccagtagctactcggcagagccgcagttagacgttaactactaccagaatgatgttggtccgtttgatacgcgtatttacggccaggcagtgcactttgttaacaccagagacgacatgcctgaagcaacccgtgttcacctggaaccgaccatcaatttgccgctctctaataactggggcagcatcaataccgaagcgaagttgctggcaacccattatcagcaaaccaatcttgactggtataactccagaaacacgaccaagctggacgaatccgttaaccgcgttatgccgcaattcaaagttgacggcaaaatggtctttgaacgcgatatggaaatgctggctccgggttatacccaaacgctggaaccgcgcgcgcagtatttgtacgtgccgtatcgcgatcagagcgacatctataactacgactcgtctctactgcaatctgactactctggcctgttccgggaccggacttacggcggtcttgaccgtattgcctccgctaaccaggtgacgaccggtgtcacatctcgcatatatgatgatgctgccgttgaacgttttaatatttccgttggtcaaatctactatttcacggagtctcgcactggcgatgacaacataacatgggagaatgacgacaaaacgggctcactggtgtgggcaggcgatacttactggcgtatctccgagcgttggggattgcgtggcgggattcagtacgatacacgtctggataacgtagcgaccagtaactccagcattgaataccgtcgggatgaagaccgtctggtacagctgaattaccgttacgccagcccggaatatattcaggctacgctgcctaagtactattccactgctgagcaatataagaatggtatttcgcaggtaggtgctgtcgccagctggccaattgccgatcgttggtccattgttggggcctactactacgacaccaatgcgaacaagcaagccgactctatgttaggtgtgcaatacagctcctgctgctatgcaattcgcgtcggttacgagcggaagctgaacggttgggataacgataaacaacatgcggtatatgacaacgcaatcggctttaacatcgaacttcgcggcctgagctccaactacggtctgggtacgcaagagatgctgcgttcgaacattctgccgtatcaaaacactttgtga

SEQ ID NO: 482765 - DNA, 816 bp, Shigella sonnei; identical to SEQ ID NO: 471715

SEQ ID NO: 482766 - DNA, 660 bp, Shigella sonnei
atggggatggaaaactacaatccaccgcaggaaccctggttggttatcctgtatcaggatgaccacattatggtggttaacaagccgagcggtttgttgtctgtgccggggcgtctggaagagcacaaagacagcgtgatgacgcgcattcagcgtgattatccgcaggcagaatcggtgcatcgtctggatatggctaccagcggcgtgattgtagtggcgctgaccaaagccgcggagcgggagttaaaacgccagttccgcgagcgcgagccgaaaaagcagtatgtagcccgcgtctgggggcatccatcccctgcggaaggtctggtggatctgccgctgatttgcgactggccaaaccgcccgaaacagaaagtctgttacgaaacgggtaaacctgcgcagacggaatatgaagtggtggagtatgcggcggataacacggcaagagtggtgttaaaaccgattaccgggcgttcgcatcagctgcgtgtgcatatgctggcgctgggtcatccgattctcggcgatcgtttttatgcatcaccagaagcgagagcgatggcaccgcgtttgttgctacatgcagagatgttgacgattacccatccggcgtatggcaatagtatgacgtttaaagcgccagcggatttttaa

SEQ ID NO: 482767 - DNA, 2907 bp, Shigella sonnei
atgccttttacacttggtcaacgctggatcagcgatacagaaagcgaattgggacttggaaccgttgtcgcggtggatgcgcgaactgtcactttacttttcccatctactggtgaaaaccgtctgtacgcacgcagtgattcccccgtgacccgcgtgatgttcaaccctggtgatactattaccagccatgacggctggcagatgcaagtcgaagaagtaaaagaagaaaatggcttgctgacctatatcggtactcgcctggatactgaagagtccggcgtagccctgcgtgaagttttccttgatagcaaactggtgttcagcaaaccgcaggaccgtctgtttgccgggcagattgaccgtatggaccgctttgcgctgcgttatcgcgcgcgtaagtattccagcgaacagttccgtatgccgtacagcggcctgcgcggtcagcgtaccagcctgatcccgcatcagctcaacatcgctcatgatgttggtcgccgccacgcgccgcgcgtcctgctggctgacgaagtgggtttagggaaaaccattgaagccgggatgatcctgcatcagcaactgctctctggcgctgctgaacgtgtgctaattatcgtcccggaaaccttacagcatcagtggctggtagaaatgctgcgccgtttcaacctgcgctttgcgctatttgatgatgagcgttatgccgaagctcagcacgatgcttacaacccgttcgacaccgaacagctggtgatttgctcgctggattttgcccgtcgtagcaaacagcgcctggaacatctctgtgaagccgaatgggacctgctggtggtcgatgaagcgcatcacctggtgtggagcgaagatgcgccaagccgtgaatatcaggccattgaacaactggcagagcacgtgccgggcgttctgctgctgaccgcgaccccggaacagctggggatggaaagccacttcgcccgtctgcgtctgctggacccgaaccgtttccacgattttgcgcagttcgttgaagagcagaaaaattatcgtccggttgcggacgccgttgccatgctgctggcaggtaacaaactgagcaatgacgaactgaacatgctcggcgagatgatcggcgagcaggatatcgagccgctgttgcaggcagcaaacagcgacagcgaagatgcccagagcgcccgtcaggagctggtttcgatgctgatggatcgccacggcaccagccgcgtgctgttccgtaacacgcgtaacggtgtgaaaggattcccgaaacgcgagctgcacaccattaagctgccgctgccgacgcagtatcagacggctattaaagtctccggcattatgggcgcacgtaaaagtgcggaagatcgtgctcgcgatatgctctacccggagcgtatttatcaggaatttgaaggtgataacgccacctggtggaacttcgatccgcgcgttgagtggctgatgggctacctgaccagccatcgctctcagaaagtgctggtgatctgcgccaaagctgccactgcgctgcaactggagcaggtactgcgcgaacgtgaaggtattcgcgctgcggtgttccacgaaggtatgtcgattatcgaacgtgaccgcgctgccgcctggtttgccgaagaagacaccggcgcacaggtactgctgtgctcagaaatcggttctgaaggacgtaacttccagttcgccagccacatggtgatgtttgacctgccattcaacccggatctactggagcagcgtattggtcgtctggatcgtatcggccaggcgcacgatattcagatccatgtgccttatctggagaaaaccgctcagtcggtgctggtgcgctggtatcacgaaggtctggatgcatttgagcacacctgcccgaccggacgcactatttacgatagcgtatacaacgatctgattaactatctggcttcaccggttcaaaccgaaggctttgacgatctgatcaaaaactgccgcgagcaacatgaagcgctgaaagcacagctggaacagggtcgtgaccgcctgctggaaatccactccaacggtggcgaaaaagcccaggcactggcagaaagcattgaagagcaggatgacgataccaacctgatcgccttcgccatgaacctgttcgatattatcggtatcaatcaggacgatcgcggcgacaacatgatcgtgctgacgccgtccgatcatatgctggtgccggacttccctggcctgtcggaagatggcatcaccatcacctttgatcgtgaagtggcgctggcgcgtgaagatgcacagtttattacctgggagcatccgctgatccgcaacggtctggatctgatcctttctggcgatactggtagcagcacgatttcactattgaaaaacaaagcgttgccggtaggtacgctgttggtggaactgatttatgtcgttgaagcccaggctccgaagcagttgcagctcaaccgcttcctgccaccgacgccggtacgtatgctgctggataaaaacggcaacaacctggcggcgcaggtagagtttgaaacctttaaccgtcagcttaacgcggttaaccgtcacaccggcagcaaactggttaacgccgtgcagcaggatgttcacgctatccttcagctgggtgaagcgcagatcgagaaatctgcccgtgcattgattgatgccgcacgtaacgaagccgacgaaaaactgtctgccgagctgtctcgtctggaagcgctgcgcgcagtgaacccgaacattcgtgacgacgaactgaccgccattgagagcaaccgtcagcaggtaatggaaagcctggatcaggcaggctggcgtctggatgccctgcgtttgatcgttgtaacgcatcagtaa

SEQ ID NO: 482768 - DNA, 2352 bp, Shigella sonnei
gtggcgcaggcaggttttatcttaacccgacactggcgggacaccccgcaagggacagaagtctccttctggctggcgacggacaacgggccgttgcaggttacgcttgcaccgcaagagtccgtggcgtttattcccgccgatcaggttccccgcgctcagcatattttgcagggtaaacaaggctttcgcctgacaccgctggcgttaaaggattttcaccgccagccggtgtatggcctttactgtcgcgcccatcgccaattgatgaattacgaaaagcgcctgcgtgaaggtggcgttaccgtctacgaggccgatgtgcgcccgccagaacgctatctgatggagcggtttatcacctcaccggtgtgggtcgagggtgatatgcacaatggcactatcgttaatgcccgtctgaaaccgcatcccgactatcgtccgccgctcaagtgggtttctatagatattgaaaccacccgccacggtgagctgtactgcatcggcctggaaggctgcgggcagcgcatcgtttatatgctggggccggagaatggcgacgcctcctcgcttgatttcgaactggaatacgtcgccagccgcccgcagttgctggaaaaactcaacgcctggtttgccaactacgatcctgatgtgatcatcggttggaacgtggtgcagttcgatctgcgaatgctgcaaaaacatgccgagcgttaccgtcttccgctgcgtcttgggcgcgataatagcgagctggagtggcgcgagcacggctttaaaaacggcgtcttttttgcccaggctaaaggtcggctaattatcgacggtatcgaggcgctgaaatccgcgttctggaatttctcttcattctcgctggaaactgtcgctcaggagctattaggcgaaggaaaatctatcgataacccgtgggatcgaatggacgaaattgaccgccgtttcgccgaagataaacctgcgctggcaacttataacctgaaagattgcgagctggtgacgcagatcttccacaaaactgaaatcatgccatttttactcgaacgagcaacggtgaacggcctgccggtggatcggcacggcggttcggtggcagcgtttggtcatctctattttccgcgaatgcatcgcgctggttatgtcgcgcctaatctcggcgaagtgccgccgcacaccagccctggcggctacgtgatggattcacggccagggctttatgattcagtgctggtgctggactataaaagcctgtacccgtcgatcatccgcacctttctgattgatcccgtcgggctggttgaaggcatggcgcagcctgatccagagcacagtaccgaaggttttctcgatgcctggttctcacgggagaaacattgcctgccggagattgtgactaacatctggcacgggcgcgatgaagccaaacgtcagggtaataaaccactttcgcaggcgctgaagatcattatgaatgccttttatggcgtgcttggcaccaccgcctgccgctttttcgatccgcgcctggcatcgtcgatcaccatgcgtggtcatcagatcatgcggcaaaccaaagcattgattgaagcgcagggctacgacgttatctacggagataccgactcgacttttgtctggctaaaaggtgcacattcggaagaagaggcggcgaaaatcggtcgtgcactggtgcagcacgttaacgcctggtgggcggaaacgctgcaaaaacaacggctgaccagcgcattagaactggagtatgaaactcatttctgccgttttcttatgccaaccattcgcggagctgataccggcagtaaaaagcgctacgccgggctgattcaggagggcgataaacagcggatggtgtttaaagggctggaaaccgtgcgcaccgactggacgccgctggcccagcagtttcagcaggagctatacctgcgcatcttccgcaacgagccatatcaggaatatgtacgcgaaaccatcgacaaactgatggcgggtgaactggatgcgcgactggtttaccgtaaacgccttcgccgtccgctgagcgagtatcagcgtaatgtgccgcctcatgtacgcgccgctcgccttgccgatgaagaaaaccaaaagcgtggtcgccccttgcaatatcagaatcgcggcaccattaagtacgtatggaccaccaacggcccggagccgctggactaccaacgttcaccactggattacgaacactatctgacccgccagctacaacccgtggcggagggaatactcccttttattgaggataattttgctacacttatgaccgggcaacttgggctattttga

SEQ ID NO: 482769 - DNA, 696 bp, Shigella sonnei
atgttagaagatctcaaacgccaggtattagaagccaacctggcgctgccaaaacacaacctggtcacgctcacatggggcaacgtcagcgccgttgatcgcgagcgcggcgtctttgtgatcaaaccttccggcgtcgattacagcgtcatgaccgctgacgatatggtcgtggttagcatcgaaaccggtgaagtggttgaaggtacgaaaaagccctcctccgacacgccaactcaccggctgctctatcaggcattcccctccattggcggcattgtgcatacgcactcgcgccacgccaccatctgggcgcagtcgggtcagtcgattccagcaaccggcaccacccacgccgactatttctacggcaccattccctgcacccgcaaaatgaccgacgcagaaatcaacggcgaatatgagtgggaaaccggtaacgtcatcgtagaaacctttgaaaaacagggtatcgatgcagcgcaaatgcccggcgttctggtccattcccacggcccgtttgcatggggcaaaaatgccgaagatgcggtgcataacgccatcgtgctggaagaggtcgcttatatggggatattctgccgtcagttagcgccgcagttaccggatatgcagcaaacgctgctggataaacactatctgcgtaagcatggcgcgaaggcatattacgggcagtaa

SEQ ID NO: 482770 - DNA, 1503 bp, Shigella sonnei
atgacgatttttgataattatgaagtgtggtttgtcattggcagccagcatctgtatggcccggaaaccctgcgtcaggtcacccaacatgccgagcacgttgttaatgcgctgaatacggaagcgaaactgccctgcaaactggtgttgaaaccgctgggcaccacgccggatgaaatcaccgctatttgccgcgacgcgaattacgacgatcgttgcgctggtctggtggtgtggctgcacaccttctccccggccaaaatgtggatcaacggcctgaccatgctcaacaaaccgttgctgcaattccacacccagtttaacgcggcgctgccgtgggacagtatcgatatggactttatgaacctgaaccagactgcacatggcggtcgcgagttcggcttcattggcgcgcgtatgcgtcagcaacatgccgtggttaccggtcactggcaggataaacaagcccatgagcgtatcggctcctggatgcgccaggcggtctctaaacaggatacccgtcatctgaaagtctgccgttttggcgataacatgcgtgaagtagcggtcaccgatggtgataaagttgccgcacagatcaagttcggtttctccgtcaatacctgggcggttggcgatctggtgcaggtggtgaactccatcagcgacggcgatgttaacgcgctggtcgatgagtacgaaagctgctacaccatgacgcctgccacacaaatccacggcgaaaaacgacagaacgtgctggaagcggcgcgtattgagctggggatgaagcgtttcctggaacaaggtggcttccacgcgttcaccaccacctttgaagatttgcacggtctgaaacagcttccaggtctggccgtacagcgtctgatgcagcagggttacggctttgcgggcgaaggcgactggaaaaccgccgccctgcttcgcatcatgaaggtgatgtcaaccggtctgcagggcggcacctcctttatggaggactacacctatcacttcgagaaaggtaatgacctggtgctcggctcccatatgctggaagtctgcccgtcgattgccgtagaagagaaaccgatcctcgacgttcagcatctcggtattggtggtaaggacgatcctgcccgactgatcttcaatacccaaaccggtccagcgattgtcgccagcctgattgatctcggcgatcgttaccgtctgctggttaactgtatcgacacggtgaaaacaccgcactccctgccgaaactgccggtggcgaatgcgctgtggaaagcgcaaccggatctgccaactgcttccgaagcgtggatcctcgctggtggcgcgcaccataccgtcttcagccatgcgctgaacctcaacgatatgcgccagttcgccgagatgcacgacattgaaatcacggtgattgataacgacacccgcctgccagcgtttaaagacgcactgcgctggaacgaagtgtattacggatttcgtcgctaa

SEQ ID NO: 482771 - DNA, 1701 bp, Shigella sonnei
atggcgattgcaattggcctcgattttggcagtgattctgtgcgagctttggcggtggaatgcgctaccggtgaagagatcgccaccagcgtagagtggtatccccgttggcagaaagggcaattttgtgatgccccgaataaccagttccgccatcatccgcgtgactacattgagtcaatggaagcggcgctgaaaatcgtgcttgcagagcttagcgccgaacagcgcgcagctgtggtcgggattggcgttgacacaaccggctcgacgcccgcaccgattgacgccgacggtaacgtgctggcgctgcgcccagagtttgccgaaaacccaaacgcgatgttcgtattgtggaaagaccacactgcggttgaagaagcggaagagattacccgtttgtgccacgcgccgggcaacgttgactactcccgctatattggcggtatttattccagcgaatggttctgggcaaaaatcctgcatgtgactcgccaggacagcgccgtggcgcaatctgccgcatcgtggattgagctgtgcgactgggtgccagctctgctttccggtaccacccgcccgcaggatattcgtcgcggacgttgcagcgccgggcataaatctctgtggcacgaaagctggggcggcttgccgccagccagtttctttgatgagctggacccgatcctcaatcgccatttgccttccccgctgttcactgacacctggactgccgatattccggtgggcaccttatgcccggaatgggcgcagcgtctcggcctgcctgaaagcgtggtgatttccggcggcgcgtttgactgccatatgggcgcagttggcgcaggcgcacagcctaacgcactggtaaaagttatcggtacttccacctgcgacattctgattgccgacaaacagagcgttggcgagcgggcagttaaaggtatttgcggtcaggttgatggcagcgtggtgcctggatttatcggtctggaagcaggccaatcggcgtttggtgatatctacgcctggtttggtcgcgtactcggctggccgctggaacagcttgccgcccagcatccggaactgaaagcgcaaatcaacgccagccagaaacaactgcttccggcgctgaccgaagcatgggccaaaaatccgtctctggatcacctgccggtggtgctcgactggtttaacggtcgtcgcacgccaaacgctaaccaacgtctgaaaggggtgattaccgatcttaacctcgctaccaacgctccgctgctgttcggcggtttgattgctgccaccgcctttggcgcacgcgcaatcatggagtgctttaccgatcaggggatcgccgtcaataacgtgatggcgctgggcggcatcgcgcggaaaaaccaggtcattatgcaggcctgctgcgacgtgctgaatcgcccgctgcaaattgttgcctctgaccagtgctgtgcgctcggtgcggcgatttttgctgccgtcgccgcgaaagtgcacgcagacatcccatcagcccagcaaaaaatggccagtgcggtagagaaaaccctgcaaccgcgcagcgaacaggcacaacgctttgaacagctttatcgccgctatcagcaatgggcgatgagcgccgaacaacactatcttccaacttccgccccggcacaggctgcccaggccgttgcgactctataa

SEQ ID NO: 482772 - DNA, 879 bp, Shigella sonnei
atggctgaagcgcaaaatgatcccctgctgccgggatactcgtttaacgcccatctggtggcgggtttaacgccgattgaggccaacggttatctcgatttttttatcgaccgaccgctgggaatgaaaggttatattctcaatctcaccattcgcggtcagggggtggtgaaaaatcaggggcgagaatttgtctgccgaccgggtgatattttgctgttcccgccaggagagattcatcactacggtcgtcatccggaggctcgcgaatggtatcaccagtgggtttactttcgtccgcgcgcctactggcatgaatggcttaactggccgccaatatttgccaatacgggtttctttcgcccagatgaagcgcaccagccgcatttcagcgacctgtttgggcaaatcattaacgccgggcaaggggaagggcgctattcggagctgctggcgataaatctgcttgagcaattgttactgcggcgcatggaagcgattaacgagtcgctccatccaccgatggataatcgtgtacgcgaggcttgtcagtacatcagcgatcacctggcagacagcaattttgatatcgccagcgtcgcacagcatgtttgcttgtcgccgtcgcgtctgtcacatcttttccgccagcagttagggattagcgtcttaagctggcgcgaggaccaacgcattagtcaggcgaagctgcttttgagcactacccggatgcctatcgccaccgtcggtcgcaatgttggttttgacgatcaactctatttctcgcgggtatttaaaaaatgcaccggggccagcccgagcgagttccgtgccggttgtgaagaaaaagtgaatgatgtagccgtcaagttgtcataa

SEQ ID NO: 482773 - DNA, 765 bp, Shigella sonnei
atgcaagcattgctggaacactttattacccaatccaccgtgtattcattgatggcggtggtgttggtggcctttctggagtcgctggcgctggtcggtttgattctacccggtacggtgctgatggcggggctgggagcgctgattggcagcggcgagttaagtttctggcacgcgtggatggcggggattgtcggttgcctgctgggcgactggatctccttctggctgggctggcgttttaaaaagccgttgcatcgctggtcatttctgaagaaaaacaaagcactacttgataaaactgaacatgcgttgcatcaacacagcatgttcaccattctggtcggtcgttttgttggcccgacgcgtccgctggtgccaatggtggcgggaatgctggatctgccagtggcaaaatttatcacgccgaatattatcggctgcctgctgtggccgccgttttacttcctgccagggattctggcgggcgcggcgatcgatattcctgccgggatgcagagcggtgagtttaaatggttgctgctggcgacggcggtatttttgtgggttggtggctggctgtgctggcggttatggcgcagtggtaaagcgactgaccgtttgagtcattatttgtcccgcggtcgtttgttgtggctgacgccgttgatttctgccatcggcgtggtggcgctggtggtgttaattcgccacccgttgatgccggtgtatatcgatattttgcgtaaagtggttggggtttag

SEQ ID NO: 482774 - DNA, 699 bp, Shigella sonnei
atgttaaaactgactgatatcacctggctttaccaccatttgccgatgcgttttagcttaacggtagaacgcggcgagcaggtggcgatcctcgggccaagcggcgcaggtaaaagtaccctgctgaatttgattgccggttttctgacaccagccagcggttcgctgactatcgacagcgttgatcacaccacgacgccgccgtcacgccgtccggtatcgatgctgtttcaggagaacaacctgttcagccacctgacggtcgcgcagaacatcgggctggggcttaatccgggattgaagctgaacgcggcgcagcaggagaaaatgcacgctatcgcccgccagatggggattgataatttaatggcgcggttaccgggcgagctttccggcggtcagcgacagcgcgtggcgttagcgcgttgtctggtacgcgagcagccgattttattgctcgatgaaccgttctctgcgctcgatccggcgctacgccaagagatgttgacgctggtgagcacgagctgccagcagcaaaaaatgacgttattgatggtgtcgcacagtgtggaagatgccgcgcggatcgccacgcgctcggtggtggtcgccgacgggcgcatcgcctggcagggtaaaaccgatgaattgttaagcggtaaggcgagtgcttcggcgctgttgggaattacaggttaa

SEQ ID NO: 482775 - DNA, 1611 bp, Shigella sonnei
atggcaacgcgccgtcagccgttaattcccggctggttaattccaggtgtaagcgccgccacgctggtggtagcggttgcgctcgcggcgtttctcgccctgtggtggaacgcgccgcagggtaactgggtagcagtctggcaggacagctacctgtggcatgtggtgcgcttctccttctggcaggcgtttctctcggcgctactctctgtcgtacccgcgatattcctcgcccgcgccctctatcgcaggcgctttccgggtcggctggcgctgttgcgtctgtgcgcaatgaccttgatcctcccggtgctggttgctgttttcggcattcttagcgtctatggtcgtcagggctggctggcatcgctctgccaatcgctcggtctggagtggaccttttcgccctacggcctgcaaggcattttgctggcccatgtgttttttaatctgccgatggcgagccgtttattacttcaggcactggaaaacattcccggcgaacaacgtcaacttgccgcccagcttggaatgcgtggctggcacttctttcgtttcgtcgaatggccgtggttacggcgacaaatcccgccagttgctgcgcttatctttatgctctgtttcgccagcttcgccaccgtactgtcgctaggcggcggtccgcaagcgaccactatcgagctggctatttatcaggcgctgagttacgactacgatcctgcccgcgcggcgatgctggcgctgatccagatgatgtgttgccttgggctggtgctgttgagtcagcgattgagtaaggccattgcgcccggcaccacgctgctgcaaggctggcgcgacccggacgatcgtctgcatagccgcatttgcgacacggtgttaatagtgctggcgctgctgctgttgttgccaccgttgctggcggtgatcgtcgatggggtaaatcgccagttgccggaagtgctggcacaatcggtgctgtggcaggcgctgtggacctcgttgcgtattgcgctggcggcaggtgtattgtgcgtagtgctgaccatgatgctgctatggagcagtcgcgaacttcgggcgcggcagaaaatgctggcgggtcaggcgctggagatgagcggcatgttgatcctcgccatgccggggattgtgctggctaccggcttctttttactgctcaacaacactatcggcctgccacaatctgctgacggcattgtgattttcaccaatgcgttaatggcgatcccttacgcgctgaaagtactggaaaacccgatgcgcgatatctccgcccgctacagcatgttgtgtcagtcgttgggcattgaaggctggtcacgcttaaacgtggtggagctgcgcgccctgaaacgcccactggtgcaggcgctggcctttgcatgcgtgctgtcgattggtgattttggcgtggtggcgttgttcggtaacgatgatttccgcaccctgccgttttatctctaccagcaaattggctcctatcgcagccaggacggcgcggtcaccgcgttaattctgctactactctgttttctgctgtttaccgtgattgaaaaactaccggggcgaaatgttaaaactgactga

SEQ ID NO: 482776 - DNA, 984 bp, Shigella sonnei
gtgttaaaaaaatgtcttcccctgctgttgctgtgcacagcgcccgttttcgctaaacccgttctgactgtttatacctacgattccttcgccgccgactgggggcctggtccaaagatcaaaaaagcttttgaagccgactgtaactgcgaactgaaactggtggcgctggaagatggcgtttcgcttctcaaccgtctacggatggaaggcaaaaatagtaaagccgatgtggtgctggggctggataacaatctgttagacgccgccagtaaaaccggactatttgccaaaagcggtgtggcagcggatgccgttaacgttcccggcggctggaataatgacactttcgtcccgtttgattacggctatttcaccttcgtctatgacaagaacaaactgaaaaacccgccgcaaagcctgaaagaattggttgagagcgatcagaactggcgggtgatttatcaggatccgcgtaccagcacgccggggctgggtctgctgttgtggatgcaaaaagtctatggcgatgacgccccacaagcctggcagaaactggcgaagaaaactgtcactgtcaccaaaggctggagcgaagcctatggcctgtttttaaaaggcgaaagcgatctggtactgagttacaccacctctccggcttatcacattctcgaagagaagaaagataactacgccgccgcgaacttcagcgaaggtcactatctgcaggtggaagtcgccgcccgcaccgctgccagcaagcagccggagctggcgcaaaaattcctccagtttatggtttatccggcttttcagaatgcgatcccaaccggcaactggatgtatccggtggcaaacgtcacgcagcctgccggttttgaacaattgaccaaaccagcaaccacgctggagttcacgccagccgaagtggcggcacaacgtcaggcatggattagcgaatggcaacgcgccgtcagccgttaa

SEQ ID NO: 482777 - DNA, 1656 bp, Shigella sonnei
atgccatctgctcgtctgcaacaacagttcatccgcctgtggcaatgctgcgagggtaaatcgcaggacacaacgctcaacgaactggcagcgttattgagctgctcgcgtcgtcatatgcgtaccctgctcaacaccatgcaggatcgcggctggctgacgtgggaagcggaagtcgggcgcggtaaacgctcgcgtctgacattcctctataccgggctggcgcttcagcaacagcgggcggaagacctgctggagcaggatcgtatcgaccaactagtgcagttggttggcgacaaagcgactgtgcggcaaatgctggtttctcatctgggccgcagcttccgccaggggcggcacatcctgcgcgtgctctactatcgtccgttgcgtaatctgctacctggcagcgcattgcgccgttccgaaacccatattgcccggcaaatcttcagttccctaacgcgcataaatgaggaaaatggggaactggaagcagacatcgcccaccactggcagcaaatatcaccgcttcactggcgtttctttttgcgtccaggagtccattttcatcatggtcgtgaactggaaatggacgacgtgatcgcctctttaaaacgaatcaatacgctgccgctctattcgcatattgcggacattgtgtcgccgacgccctggacgctggatatccatctcacgcaaccggaccgctggttaccgttactgctggggcaagttccggcgatgatcctgccgcgcgaatgggaaaccctcagtaactttgccagccatcccatcggcaccggtccgtatgcggtgatccgcaacaccaccaatcaactgaaaattcaggcattcgatgacttcttcggttaccgggcattaatcgatgaagttaacgtctgggttctgccggaaattgccgacgagccagctggaggtctgatgctaaaaggtccacagggtgaggaaaaagagattgaaagccgcctggaggaaggttgctactatttactattcgacagccgcacccatcgcggggcgaatcagcaagtcagggactgggtaagctatgtgctttctccaactaatctggtctatttcgctgaggaacagtaccagcaactgtggttcccggcttatggactgctcccccgttggcaccatgcccgcaccataaagagcgaaaaaccggctggcctggaaagcctcaccctgaccttttatcaggatcacagtgagcatcgggtgattgccgggatcatgcagcagattctggcaagtcaccaggtcacgctggaaatcaaagagatcagctacgatcagtggcatgaaggagagatcgagagcgatatctggcttaacagcgccaactttacgctgccgctggatttttcgctgttcgcgcacttgtgcgaggtgccgctgctccaacactgtattccgatcgactggcaagccgacgccgcccgctggcgcaatggcgaaatgaacctggcgaactggtgccagcaactggtcgccagcaaagcaatggtgccgcttatccaccactggctgatcattcaggggcaacgcagtatgcgcggcctgcgcatgaacaccctcggctggttcgattttaaatcagcgtggtttgcgccaccggatccatga

SEQ ID NO: 482778 - DNA, 132 bp, Shigella sonnei; identical to SEQ ID NO: 457666

SEQ ID NO: 482779 - DNA, 1116 bp, Shigella sonnei
atgatctggataatgacgatggctcgccgtatgaacggtgtttacgcggcatttatgctggtcgcttttatgatgggggtggccggggcgctacaggctcctacattgagcttatttctgagtcgtgaggttggcgcgcaacctttctggatcggactcttttatacggtgaatgctattgctgggatcggcgtaagcctctggttggcaaaacgttctgacagtcagggcgatcggcgaaaactgattatattttgctgtttgatggctatcggcaatgcgctattgtttgcatttaatcgtcattatctgacgcttatcacctgtggtgtgcttctggcatctctggccaatacggcaatgccacagttatttgctctggcgcgggaatatgcggataactcggcgcgagaagtggtgatgtttagctcggtgatgcgtgcgcagctttctctggcatgggttatcggtccaccgttggcctttatgctggcgttgaattacggctttacggtgatgttttcgattgccgccgggatattcacactcagtctggtattgattgcatttatgcttccgtctgtggcgcgggtagaactgccgtcggaaaatgctttatcaatgcaaggtggctggcaggatagtaacgtacggatgttatttgtcgcctcgacgttaatgtggacctgcaacaccatgtacattattgatatgccgttgtggatcagtagcgagttaggattgccagacaaactggcgggtttcctgatggggacggcagctggactggaaataccagcaatgattctggctggctactatgtcaaacgttatggtaagcggcgaatgatggtcatagcagtggcggcaggagtactgttttacaccggattgattttctttcatagccgtatggcgttgatgacgctgcaactttttaacgctgtatttatcggcattgttgcgggtattgggatgctatggtttcaggatttaatgcctggaagagcgggggcagctaccaccttatttactaacagtatttctaccggggtaattctggctggcgttattcagggagcaattgcacaaagttgggggcactttgctgtctag

SEQ ID NO: 482780 - DNA, 792 bp, Shigella sonnei; identical to SEQ ID NO: 460263

SEQ ID NO: 482781 - DNA, 522 bp, Shigella sonnei; identical to SEQ ID NO: 460264

SEQ ID NO: 482782 - DNA, 1293 bp, Shigella sonnei
atgaagcaggcattacgagtagcatttggttttctcatactgtgggcatcagttctgcatgctgaagtccgcattgtgatcgacagcggtgtagattccggtcgtcctattggtgttgttcctttccagtgggcgggccctggtgcggcacctgaagatattggcggcatcgttgctgccgacttgcgtaacagcggtaaatttaatccgttagatcgcgctcgtctgccacagcagccgggtagtgcgcaggaagtacaaccagctgcatggtccgcgctgggtattgacgctgtagttgtcggtcaggtcactccgaatccggatggttcttacaatgttgcttatcaacttgttgacactggcggcgcaccgggtactgtacttgctcagaactcgtacaaagtgaacaagcagtggctgcgctatgctggtcataccgccagtgatgaagtgtttgaaaaactgaccggcattaaaggtgcgttccgtacccgtattgcctacgttgttcagaccaacggcggtcagttcccgtatgaactgcgcgtatctgactatgacggttacaaccagtttgtcgttcaccgttcaccacagccgctgatgtccccggcgtggtcaccagacggttctaaactggcttatgtgaccttcgaaagcggtcgttccgcgctagttatccaaacgctggcaaacggcgctgtacgtcaggtggcttcattcccgcgtcacaacggtgcgcctgcattctcgccagacggcagcaaactggcattcgccttgtcgaaaaccggtagcctgaacctgtacgtaatggatttggcttctggtcagatccgccaggtgactgatggtcgcagtaacaataccgaaccgacctggttcccggacagccagaacctggcatttacttctgaccaggccggtcgtccacaggtttataaagtgaatatcaacggcggtgcgccacaacgtattacctgggaaggttcgcagaaccaggatgcggatgtcagcagcgacggtaaatttatggtaatggtcagctccaacggtgggcagcagcacattgccaaacaagatctggcaacgggaggcgtacaagttctgtcgtccacgttcctggatgaaacgccaagtctggcacctaacggcactatggtaatctacagctcttctcaggggatgggatccgtgctgaatttggtttctacagatgggcgtttcaaagcgcgtcttccggcaactgatggacaggtcaaattccctgcctggtcgccgtatctgtga

SEQ ID NO: 482783 - DNA, 1185 bp, Shigella sonnei
gtgtcaaaggcaaccgaacaaaacgacaagctcaagcgggcgataattatttcagcagtgctgcatgtcatcttatttgcggcgctgctctggagttcgttcgatgagaatatagaagcttcagccggaggcggcggtggttcgtccatcgacgctgtcatggttgattcaggtgcggtagttgagcagtacaaacgcatgcaaagccaggaatcaagcgcgaagcgttctgatgagcagcgcaagataaaggaacagcaggctgctgaagaactgcgtgagaaacaagcggctgaacaggaacgcctgaagcaacttgagaaagagcggttagctgctcaggaacagaaaaagcaggctgaagaagccgcaaaacaggccgagttaaagcagaagcaagcggaagaggcggcagcgaaagcggcggcagatgctaaagcgaaggccgaagcggatgctaaagctgcggaagaagcagcgaagaaagcggcggcagacgcgaagaaaaaagcagaagcagaagccgccaaagccgcagccgaagcgcagaaaaaagccgaggcagccgctgcggcactgaagaagaaagcggaagcggcagaagctgctgcagctgaagcaagaaagaaagcggcagcagagaaagctgcagccgacaaaaaagcagcagaaaaagcggctgctgataaggcagcagctgataagaaagcagcggcagaaaaagccgccgcagacaaaaaagcggcagcggcaaaagcagcagctgaaaaagccgctgcagcaaaagctgccgcagaggcagatgatattttcggtgagctaagctctggtaagaatgcaccgaaaacggggggaggggcgaaagggaacaatgcttcgtctgccgggagtggtaatactaaaaacaatggcgcatcaggggccgatatcaataactatgccgggcagattaaatctgctatcgaaagtaagttctatgacgcatcgtcctatgcaggcaaaacctgtacgctgcgcataaaactggcacccgatggtatgttactggatatcaaacctgaaggtggcgatcccgcactttgtcaggctgcgttggcagcagctaaacttgcgaagatcccgaaaccaccaagccaggcagtatatgaagtgttcaaaaacgcgccattggacttcaaaccgtaa

SEQ ID NO: 482784 - DNA, 429 bp, Shigella sonnei; identical to SEQ ID NO: 260669

SEQ ID NO: 482785 - DNA, 693 bp, Shigella sonnei
gtgactgacatgaatatccttgatttgttcctgaaggctagccttctggttaaacttatcatgttgattttgattggtttttcaatcgcatcctgggccattattatccagcggacccgtattcttaacgcagcggcgcgcgaagccgaagcgtttgaagataaattctggtctggaatcgaactctctcgcctctatcaagagagtcaggggaaacgggataatctgactggttcggaacaaatattttacagcgggttcaaagagtttgtgcgcctgcatcgtgccaatagccatgcgccggaagccgtagtggaaggggcgtcgcgtgctatgcgtatctccatgaaccgtgaacttgaaaatctggaaacgcacattccgttcctcggtacggttggctccatcagcccgtatattggtctgtttggtacggtctgggggatcatgcacgcctttatcgccctcggggcggtaaaacaagcaacactgcaaatggttgcgcccggtatcgcagaagcgttgattgcgactgcaattggtctgttcgccgcaattccggcggtaatggcttataaccgcctcaaccagcgcgtaaacaaactggaactgaattacgacaactttatggaagagtttaccgcgattctgcaccgccaggcgtttaccgttagcgagagcaacaaggggtaa

SEQ ID NO: 482786 - DNA, 405 bp, Shigella sonnei
gtgaatacaacgctgtttcgatggccggttcgcgtctactatgaagataccgatgccggtggtgtggtgtaccacgccagttacgtcgctttttatgaaagagcacgcacagagatgctgcgtcatcatcacttcagtcagcaggcgctgatggctgaacgcgttgcctttgtggtacgtaaaatgacggtggaatattacgcacctgcgcggctcgacgatatgctcgaaatacagactgaaataacatcaatgcgtggcacctctttggttttcacgcaacgtattgtcaacgccgagaatactttgctgaatgaagcagaggttctggttgtttgcgttgacccactcaaaatgaagccttgtgcgcttcccaagtctattgtcgcggagtttaagcagtga

SEQ ID NO: 482787 - DNA, 294 bp, Shigella sonnei; identical to SEQ ID NO: 472494

SEQ ID NO: 482788 - DNA, 1140 bp, Shigella sonnei
atgatcgattatgaagtattgcgttttatctggtggctgctggttggcgttctgctgattggttttgcagtcactgacggtttcgacatgggggtgggcatgctcacccgtttcctcggtcgtaacgacaccgagcgtcgaattatgattaactccattgcaccacactgggacggtaaccaggtttggctgatcaccgcgggcggcgcactctttgctgcctggccgatggtctatgccgctgcgttctccggcttctatgtggcgatgatcctcgtgctggcgtctttgttcttccgtccggtcggttttgactaccgctccaagattgaagaaacccgctggcgtaacatgtgggactggggcatcttcattggtagtttcgttccgccgctggtaattggtgtagcgttcggtaacctgttgcagggcgtaccgttcaacgttgatgaatatctgcgtctgtactacaccggtaacttcttccagttgcttaacccgttcggcctgctggcaggcgtggtgagcgtagggatgatcattactcagggcgcaacctatctgcaaatgcgtaccgtgggcgaactgcacctgcgtacccgtgcaacggctcaggtggctgcgctggtgacactggtctgtttcgcactggctggcgtatgggtgatgtacggtatcgatggttatgtcgtgaaatcgacaatggaccattacgcagcctctaacccactgaataaagaagtggttcgtgaagctggcgcatggctggttaacttcaacaacacgccaattctgtgggctattccggcactgggtgtggttcttccgctgctgaccatcctgactgcacgtatggataaagccgcgtgggcgtttgtgttctcctccctgacgctggcctgcatcatcctgacagccggtatcgcaatgttcccgtttgtgatgccgtccagcaccatgatgaacgcaagtctgacaatgtgggatgcaacttccagccagctgacgcttaacgtcatgacctgggttgcggtggttctggtaccgatcattctgctctacaccgcttggtgttactggaaaatgttcggtcgtatcaccaaagaagatattgaacgtaacacccactctctgtactaa

SEQ ID NO: 482789 - DNA, 1569 bp, Shigella sonnei
atgttagatatagtcgaactgtcgcgcttacagtttgccttgaccgcgatgtaccacttcctttttgtgccactgacgctcggtatggcgttcctgctggccattatggaaacggtctacgtcctctccggcaaacagatttataaagatatgaccaagttctggggcaagttgtttggtatcaacttcgctctgggtgtggctaccggtctgaccatggagttccagttcgggactaactggtcttactattcccactatgtaggggatatcttcggtgcgccgctggcaatcgaaggtctgatggccttcttcctcgaatccacctttgtaggtctgttcttcttcggttgggatcgtctgggtaaagttcagcatatgtgtgtcacctggctggtggcgctcggttcaaacctgtccgcactgtggattctggttgcgaacggctggatgcaaaacccaatcgcgtccgatttcaactttgaaactatgcgtatggagatggtgagcttctccgagctggtgcttaacccggttgctcaggtgaaattcgttcacactgtagcgtctggttatgtgactggcgcgatgttcatcctcggtatcagcgcatggtatatgctgaaaggtcgtgacttcgccttcgctaaacgctcctttgctatcgctgccagcttcggtatggctgctgttctgtctgttattgttctgggtgatgaatccggctacgaaatgggcgacgtgcagaaaaccaaactggctgctattgaagccgagtgggaaacgcaacctgcgcctgctgcctttactctgttcggcattcctgatcaggaagaggagacgaacaaatttgcgattcagatcccttacgcactgggcatcattgcaacgcgttccgtggataccccggttatcggcctgaaagagctgatggtgcagcatgaagaacgcattcgtaacgggatgaaggcgtactctctgctcgaacaactgcgttctggttctaccgaccaggcggttcgtgaccagttcaatagcatgaagaaagacctcggttacggtctgctgctgaaacgctatacgccaaacgtggctgatgcgactgaagcgcagattcaacaggcaaccaaagactccatcccgcgtgtagcgccgctgtactttgcgttccgtatcatggtggcgtgtggcttcctgcttctggcaatcatcgcgctctctttctggagtgtcatccgcaaccgcattggcgagaaaaaatggcttctgcgcgccgcgctgtacggtattccgctgccgtggattgctgtagaagcgggctggttcgtggctgaatatggccgccaaccgtgggctatcggtgaagtgctgccgacagctgtggcgaactcgtcactgaccgcaggcgatctcatcttctcaatggtgctgatttgcggcctgtataccctgttcctggtggcagaattgttcttaatgttcaagtttgcacgcctcggcccaagcagcctgaaaaccggtcgctatcactttgagcagtcttccacgactactcagccggcacgctaa

SEQ ID NO: 482790 - DNA, 2634 bp, Shigella sonnei
atgaaagcggtatctcgcgttcacatcaccccgcatatgcattgggatcgggagtggtatttcaccaccgaagagtcacgcattctgctggtcaataatatggaagagatcctgtgccgactggaacaggacaacgaatacaaatattacgtactcgacgggcaaacggcgatcctcgaagattatttcgcggtgaaaccggaaaacaaagaccgcgtgaagaaacaggtagaagccggtaagttgattatcggcccctggtatacccagaccgataccacgattgtttctgcggaatccatcgtccgtaatctgatgtacggaatgcgtgactgcctcgcgtttggcgagccgatgaaaataggttatttaccggattcctttggcatgtccgggcaactgccgcatatttacaatggatttggcattacccgcactatgttctggcgcggatgttcggagcgccacggtactgataaaaccgagtttttgtggcaaagcagtgacggtagcgaagtgacggcgcaggtgctgccgctgggctacgccatcggtaagtacttacctgccgacgaaaacggattacgtaaacgcctcgacagttattttgacgtgctggaaaaagcgtctgtaaccaaagagattttgctgccgaatggtcatgaccagatgccattgcagcaaaatatcttcgaagtgatggataagctacgtgagatctaccctcaacgtaagtttgtgatgagccgctttgaagaggtatttgagaagatcgaagcgcagcgtgaaagtctggccaccctgaaaggtgaatttatcgatggcaaatatatgcgcgtacatcgcaccatcggttccacgcgcatggatatcaaaattgcccacgcacgtattgaaaataagattgttaatctgctggaaccgctggcaacgctggcctggacgttgggttttgaataccaccacggcttgctggagaaaatgtggaaagagatcttaaaaaatcatgcccacgacagtatcggttgttgttgcagtgacaaagttcatcgcgaaattgtcgcccgcttcgaactggctgaagacatggcggataatctgctgcgtttctacatgcgcaaaattgccgataacatgccacagagtgatgccgacaaactcgtgctgtttaacctgatgccctggccgcgggaagaagttattaacaccactgtgcggctgcgcgccagccagtttaatctacaagacgatcgcggtcagcctgtaccgtattttattcgccatgcccgtgagatcgatcctggcctaatcgatcggcaaattgttcattatggcaattatgatccctttatggagtttgatattcagatcaaccagattgtcccttctatgggctatcgcacgctttatattgaagcgaatcagcctggcaacgtgattgcggcaaaaagtgacgctgaagggattctggaaaatgctttctggcagattgcgctcaatgaggatggttctctgcaactggtagataaagacagcggtgtgcgctatgaccgggtattgcaaattgaagaaagctctgatgatggtgatgaatatgactattcacccgcaaaagaagagtgggtaattaccgcagcgaacgcgaaaccgcaatgcgatattattcatgaagcctggcagagcagggctgttatccgctatgacatggcagtgccgctcaatttgtcagaacgcagcgcccggcaatccactggcagagtagggggggtgttggttgtcactcttagtcataacagcaggcgtattgatgtggatatcaaccttgataaccaggctgacgatcatcgccttcgtgtcctggtccctacaccttttaacactgacagtgttctggcagatacgcagtttggttcgctaacgcgccccgtgaacgacagtgcaatgaacaactggcagcaagaaggctggaaagaagcgccggttccggtatggaatatgctcaactatgttgccttacaggaagggcgtaacggcatggctgtctttagcgaagggttacgtgaatttgaagtcatcggtgaagagaagaaaacctttgccattacgttgctgcgtggcgtgggcttactgggcaaagaagatctgcttttaaggcctgggcggccttcgggaattaaaatgccagtcccggactcacaactacgtggtctgctttcttgtcgcctaagtttattgagttataccggtacgccaaccgccgctggtgtagctcagcaggcgcgagcatggctgactccagtacagtgttacaacaaaatcccatgggatgcgatgaagctcaacaaagccggattcaacgtgccggaaagttatagtttgttgaaaatgcccccagtgggatgcctgataagcgcacttaagaaagctgaagaccgacaagaagtgattttacggctgtttaatccggctgaatcagcaacctgtgatgcgactgttgctttcagtcgcgaggtgatttcttgctcagaaacgatgatggatgaacacattaccaccgaggaaaatcaaggttcaaatctatcggggccttttttacccggccagtcacggacgttcagttaccggcttgcctga

SEQ ID NO: 482791 - DNA, 1917 bp, Shigella sonnei
atgaatctgacgactctgacccaccgcgatgcgttgtgtctgaatgcgcgctttaccagccgtgaagaggccatccacgcgttgactcaacgtcttgctgctctggggaaaatttccagtactgagcaatttctggaagaagtgtatcgccgtgaaagccttggcccgaccgccttaggtgaagggttggctgtgccgcatggcaaaactgctgcggtaaaagaagcggcgtttgcggtcgccacactcagcgagccgcttcagtgggaaggcgttgatggcccggaagcagttgatttagtggtgctgctggcgattccccccaatgaagcgggtactacgcatatgcaactgctgacagcgctgaccacgcgccttgcggatgatgagattcgggcgcgtatacagtcggcgacgacgcctgatgagttgctctcggcgctggatgacaagggaggcacgcaaccttctgcctctttttccaacgcgccaactatcgtctgcgtaacggcctgtccggcgggtattgctcacacctatatggctgcggaatatctggaaaaagccggacgcaaactcggcgtaaatgtttacgttgaaaaacaaggcgctaacggcattgaagggcgtttaacggcggatcaactcaatagtgcaaccgcctgtatttttgcggctgaagtcgccatcaaggagagtgagcgttttaatggcattcccgcgctttcagtgcctgttgccgagccgattcgccatgcagaagcgttgatccaacaagcgcttaccctcaagcgtagcgatgagacgcgtaccgtacagcaagatacgcaaccggtgaaaagtgtcaaaacggagctgaaacaggcactgttgagcggaatctcttttgccgtaccgttgattgtcgcggggggcacggtgctggcggtcgcggtattactgtcgcaaatcttcgggctacaagatctgtttaatgaagaaaactcctggctgtggatgtaccgcaagctgggcggcgggctgctcggaattttgatggtaccggtgctcgcggcctataccacctattctctggcagataaaccggcgttagcgctaggctttgcggctggacttgccgccaacatgatcggctccgggtttctcggcgcggtcgttggcggattgatagccggttacttgatgcgctgggtgaaaaatcacttgcgtcttagcagtaaattcaatggattcctgactttttatctctacccggtgctcggtacgttgggagcgggcagtctgatgctgtttgtggtgggagaacctgtcgcatggatcaataactcgcttaccgcctggctgaacggtctgtcaggaagtaacgcgctgttgctgggtgccattctcggttttatgtgttcctttgaccttggagggccagtgaacaaagccgcttatgcattctgcctgggcgcaatggcgaacggcgtttacggcccgtatgccattttcgcctccgtcaaaatggtttcggcatttaccgtaaccgcttccacgatgctcgcaccgcgcctgtttaaagagtttgaaattgagaccgggaaatccacctggctgttagggctggcaggtattaccgaaggggcgatcccgatggcgattgaagatccgctgcgggttattggttcgtttgtgctgggctctatggtaacgggcgctattgtcggtgcgatgaatatcggcctttcgacacccggtgccggcattttctcgctctttttacttcatgataatggcgcgggcggtgttatggcggcaattggctggtttggtgcggcattggtgggggctgcaatctcgactgcaattctcctgatctggcggcgtcacgcggttaagcatggcaactatctgactgatggcgtaatgccataa

SEQ ID NO: 482792 - DNA, 723 bp, Shigella sonnei
atgggacacaagcccttataccggcagattgccgatcgcattcgtgaacaaattgcgcgtggcgagcttaaacctggcgatgcgttacccactgaatcagcgctacaaacagagtttggcgtcagccgggttacggtgcgtcaggctttgcgccagctagtcgagcagcagatcctcgaaagcattcagggcagcgggacttacgtcaaagaagagcgggtcaattacgatatttttcagttaaccagttttgatgaaaaactgtcggaccgtcacgtcgatacacacagtgaaatcctgatatttgaagtgattccggctgacgattttcttcagcaacagctacaaatcaccgcgcaggatcgtgtgtggcatgtgaagcgcgtgcgctatcgcaagcaaaagccaatggcgctggaagaaacctggatgccgcttgcgttgttcccggatctcacctggcaggtcatggaaaattcgaaatatcactttattgaagaagtgaagaagatggttatcgatcgtagcgaacaggaaatcattcctctgatgccaaccgaagagatgagccgtctgcttaatatcagccagacaaagccgattcttgaaaaagtatcgcgtggatatttagttgatggtcgggtgtttgaatatagccgcaacgcttttaataccgatgactataaatttaccctgatagcgcagcgaaaatcatcgcgataa

SEQ ID NO: 482793 - DNA, 870 bp, Shigella sonnei
atgtccattttaattgataaaaacaccaaggttatctgccagggctttactggtagccaggggactttccactcagaacaggccattgcatacggcactaaaatggttggcggcgtaaccccaggtaaaggcggtactacccacctcggcctgccggtgttcaacaccgtgcgtgaagctgttgctgctactggcgctaccgcttctgttatctacgtaccagcaccgttctgcaaagactccattctggaagctattgatgcaggcatcaaactgattatcaccatcactgaaggcatcccgacgctggatatgctgactgtgaaagtgaaactggacgaagccggcgttcgtatgatcggcccgaactgcccgggcgttatcactccgggtgaatgcaaaatcggtatccagccgggtcacattcacaaaccgggtaaagtgggtatcgtttcccgttccggtacactgacctatgaagcggttaaacagaccacggattacggtttcggtcagtcgacctgtgttggtatcggcggtgacccgatcccaggctctaactttatcgacatcctcgaaatgttcgaaaaagatccgcagaccgaagcgatcgtgatgatcggtgagatcggcggtagcgctgaagaagaagcggcagcgtacatcaaagagcacgttaccaagccagttgtaggttacatcgctggtgtgactgcgccgaaaggcaaacgtatgggccacgcgggtgcgatcattgctggtgggaaagggactgcggatgagaaattcgctgctctggaagccgcaggcgtgaaaaccgttcgcagcctggcggatatcggtgaagcactgaaaactgttctgaaataa

SEQ ID NO: 482794 - DNA, 1167 bp, Shigella sonnei
atgaacttacatgaatatcaggcaaaacaactttttgcccgctatggcttaccagcaccggtgggttatgcctgtactactccgcgcgaagcagaagaagccgcttcaaaaatcggtgccggcccgtgggtagtgaaatgtcaggttcacgctggtggccgcggtaaagcgggcggtgtgaaagttgtaaacagcaaagaagacatccgtgcttttgcagaaaactggctcggcaagcgtctggtaacgtatcaaacagatgccaatggccaaccggttaaccagattctggttgaagcagcgaccgatatcgctaaagagctgtatctcggtgccgttgtagaccgtagttcccgtcgtgtggtctttatggcctccaccgaaggcggcgtggaaatcgaaaaagtggcggaagaaactccgcacctgatccacaaagttgcgcttgatccgctgactggcccgatgccgtatcagggacgcgagctggcgttcaaactgggtctggaaggtaaactggttcagcagttcaccaaaatcttcatgggcctggcgaccattttcctggagcgcgacctggcgttgatcgaaatcaacccgctggtcatcaccaaacagggcgatctgatttgcctcgacggcaaactgggcgctgacggcaacgcactgttccgccagcctgatctgcgcgaaatgcgtgaccagtcgcaggaagatccgcgtgaagcacaggctgcacagtgggaactgaactacgttgcgctggacggtaacatcggttgtatggttaacggcgcaggtctggcgatgggtacgatggacatcgttaaactgcacggcggcgaaccggctaacttccttgacgttggcggcggcgcaaccaaagaacgtgtaaccgaagcgttcaaaatcatcctctctgacgacaaagtgaaagccgttctggttaacatcttcggcggtatcgttcgttgcgacctgatcgctgacggtatcatcggcgcggtagcagaagtgggtgttaacgtaccggtcgtggtacgtctggaaggtaacaacgccgaactcggcgcgaagaaactggctgacagcggcctgaatattattgcagcaaaaggtctgacggatgcagctcagcaggttgttgccgcagtggaggggaaataa

SEQ ID NO: 482795 - DNA, 1218 bp, Shigella sonnei
atgagtagcgtagatattctggtccctgacctgcctgaatccgtagccgatgccaccgtcgcaacctggcataaaaaacccggcgacgcagtcgtacgtgatgaagtgctggtagaaatcgaaactgacaaagtggtactggaagtaccggcatcagcagacggcattctggatgcggttctggaagatgaaggtacaacggtaacgtctcgtcagatccttggtcgcctgcgtgaaggcaacagcgccggtaaagaaaccagcgccaaatctgaagagaaagcgtccactccggcgcaacgccagcaggcgtctctggaagagcaaaacaacgatgcgttaagcccggcgatccgtcgcctgctggctgaacacaatctcgacgccagcgccattaaaggcaccggtgtgggtggtcgtctgactcgtgaagatgtggaaaaacatctggcgaaagccccggcgaaagagtctgctccggcagcggctgctccggcggcgcaaccggctctggctgcacgtagtgaaaaacgtgtcccgatgactcgcctgcgtaagcgtgtggcagagcgtctgctggaagcgaaaaactccaccgccatgctgaccacgttcaacgaagtcaacatgaagccgattatggatctgcgtaagcagtacggtgaagcgtttgaaaaacgccacggcatccgtctgggctttatgtccttctacgtgaaagcggtggttgaagccctgaaacgttacccggaagtgaatgcttctatcgacggtgatgacgtggtttaccacaactatttcgacgtcagcatggcggtttccacgccgcgcggcctggtgacgccggtactgcgtgatgtcgataccctcggcatggcagacatcgagaagaaaatcaaagagctggcagttaaaggccgtgacggcaagctgacggttgaagatctgaccggtggtaacttcaccatcaccaacggtggtgtgttcggttccctgatgtctacgccgatcatcaacccgccgcagagcgcaattctgggtatgcacgctatcaaagatcgtccgatggcggtgaatggtcaggttgagatcctgccgatgatgtacctggcgctgtcctacgatcaccgtctgatcgatggtcgcgaatccgtgggcttcctggtaacgatcaaagagttgctggaagatccgacgcgtctgctgctggacgtgtag

SEQ ID NO: 482796 - DNA, 2802 bp, Shigella sonnei
atgcagaacagcgctttgaaagcctggttggactcttcttacctctctggcgcaaaccagagctggatagaacagctctatgaagacttcttaaccgatcctgactcggttgacgctaactggcgttcgacgttccagcagttacctggtacgggagtcaaaccggatcaattccactctcaaacgcgtgaatatttccgccgcctggcgaaagacgcttcacgttactcttcaacgatctccgaccctgacaccaatgtgaagcaggttaaagtcctgcagctcattaacgcataccgcttccgtggtcaccagcatgcgaatctcgatccgctgggactgtggcagcaagataaagtggccgatctggatccgtctttccacgatctgaccgaagcagacttccaggagaccttcaacgtcggttcatttgccagcggcaaagaaaacatgaaactcggcgagctgctggaagccctcaagcaaacctactgtggcccgattggtgccgagtatatgcacattaccagcaccgaagaaaaacgctggatccaacagcgtatcgagtctggtcgcgcgactttcaatagcgaagagaaaaaacgcttcttaagcgaactgaccgccgctgaaggccttgaacgttacctcggcgcaaaattccctggcgcaaaacgcttctcgctggaaggcggtgacgcgttaatcccgatgcttaaagagatgatccgccacgctggcaacagcggcacccgcgaagtggttcttgggatggcgcaccgtggtcgtctgaacgtgctggtgaacgtgctgggtaaaaaaccgcaagacttgttcgacgagtttgccggtaaacataaagaacacctcggcacgggtgacgtgaaataccacatgggcttctcgtctgacttccagaccgatggcggcctggtgcacctggcgctggcgtttaacccgtctcaccttgagattgtaagcccggtagttatcggttctgttcgtgcccgtctggacagacttgatgagccgagcagcaacaaagtgctgccaatcaccatccacggtgacgccgcagtgaccgggcagggcgtggttcaggaaactctgaacatgtcgaaagcgcgtggttatgaagttggcggtacggtacgtatcgttatcaacaaccaggttggtttcaccacctctaatccactggatgctcgttctacaccgtactgtactgatatcggtaagatggttcaggcaccgattttccacgttaacgcggatgatccggaagccgttgcctttgtgacccgtctggcgctcgatttccgtaacacctttaaacgtgatgtcttcatcgacctggtgtgctaccgccgtcacggccacaacgaagccgacgagccgagcgcaacccagccgctgatgtatcagaaaatcaaaaaacatccgacaccgcgcaaaatctacgctgacaagctggagcaggaaaaagtggcgacgctggaagatgccaccgagatggttaacctgtaccgcgatgcgctggatgctggcgattgcgtagtggcagagtggcgtccgatgaacatgcactctttcacctggtcgccgtacctcaaccacgaatgggacgaagagtacccgaacaaagttgagatgaagcgcctgcaggagctggcgaaacgcatcagcacggtgccggaagcagttgaaatgcagtctcgcgttgccaagatttatggcgatcgccaggcgatggctgccggtgagaaactgttcgactggggcggtgcggaaaacctcgcttacgccacgctggttgacgaaggcattccggttcgcctgtcgggtgaagactccggtcgcggtaccttcttccaccgccacgcggtgatccacaaccagtctaacggttccacttacacgccgttgcaacacatccataacgggcagggcgcgttccgcgtctgggactccgtactgtctgaagaagcagtgctggcgtttgaatacggttatgccaccgcagaaccacgcactctgaccatctgggaagcgcagttcggtgacttcgccaacggtgcgcaggtggttatcgaccagttcatctcttctggcgaacagaaatggggccggatgtgtggtctggtgatgttgctgccgcacggttacgaagggcaggggccggagcactcctccgcgcgtctggaacgttatctgcaactttgtgctgagcaaaacatgcaggtttgcgttccgtctaccccggcacaggtttaccacatgctgcgtcgtcaggcgctgcgcgggatgcgtcgtccgctggtagtgatgtcgccgaaatccctgctgcgtcatccgctggcggtttccagcctcgaagaactggcgaacggcaccttcctgccagccatcggtgaaatcgacgagcttgatccgaagggcgtgaagcgcgtagtgatgtgttctggtaaggtttattacgacctgctggaacagcgtcgtaagaacaatcaacacgatgtcgccattgtgcgtatcgagcaactctacccgttcccgcataaagcgatgcaggaagtgttgcagcagtttgctcacgtcaaggattttgtctggtgccaggaagagccgctcaaccagggcgcatggtactgcagccagcatcatttccgtgaagtgattccgtttggggcttctctgcgttatgcaggccgcacggcctccgcctctccggcggtagggtatatgtccgttcaccagaaacagcaacaagatctggttaatgacgcgctgaacgtcgaataa

SEQ ID NO: 482797 - DNA, 717 bp, Shigella sonnei
atgagactcgagttttcaatttatcgctataacccggatgttgatgatgctccgcgtatgcaggattacaccctggaagcggaagaaggtcgcgacatgatgctgctggatgcgcttatccagctgaaagagaaagatcccagcctgtcgttccgccgctcctgccgtgaaggtgtgtgcggttccgacggtctgaacatgaacggcaagaatggtctggcctgtattaccccgatttcggcactcaaccagccgggcaagaagattgtgattcgcccgctgccaggtttaccggtgatccgcgatttggtggtagacatgggacaattctatgcgcaatatgagaaaattaagccttacctgttgaataatggacaaaatccgccagctcgcgagcatttacagatgccagagcagcgcgaaaaactcgacgggctgtatgaatgtattctctgcgcatgttgttcaacctcttgtccgtctttctggtggaatcccgataagtttatcggcccggcaggcttgttagcggcatatcgtttcctgatcgatagccgtgataccgagactgacagccgcctcgacggtttgagcgatgcattcagcgtattccgctgtcacagcatcatgaactgcgtcagtgtatgtccgaaggggctgaacccgacgcgcgccatcggccatattaagtcgatgttgttgcaacgtaatgcgtaa

SEQ ID NO: 482798 - DNA, 1767 bp, Shigella sonnei
atgaaattgccagtcagagaatttgatgcagttgtgattggtgccggtggcgcaggtatgcgcgcggcgctgcaaatttcccagagcggccagacctgtgcgctgctctctaaagtcttcccgacccgttcccataccgtttctgcgcaaggcggcattaccgttgcgctgggtaatacccatgaagataactgggaatggcatatgtacgacaccgtaaaagggtcggactatatcggtgaccaggacgcgattgaatatatgtgtaaaaccgggccggaagcgattctggaactcgaacacatgggcctgccgttctcgcgtcttgatgatggtcgtatctatcaacgtccgtttggcggtcagtcgaaaaacttcggcggcgagcaggcggcacgcactgcggcggcggctgaccgtaccggtcacgcactgttgcacacgctttatcagcagaacctgaaaaaccacaccaccattttctccgagtggtatgcgctggatctggtgaaaaaccaggatggcgcggtggtgggttgtaccgcactgtgcatcgaaaccggtgaagtggtttatttcaaagcccgcgctaccgtgctggcgactggcggggcagggcgtatttatcagtccaccactaacgcccacattaacactggcgacggtgtcggcatggctatccgcgcaggcgtaccggtgcaggatatggaaatgtggcaattccacccgaccggcattgccggtgcgggcgtactggtcaccgaaggttgccgtggtgaaggcggttatctgctgaacaaacatggcgaacgctttatggagcgttatgcgccgaacgccaaagacctggcgggccgtgatgtggtggcgcgttccatcatgattgaaatccgtgaaggtcgcggctgtgatggtccgtgggggccacacgcgaaactgaaactcgatcacctgggtaaagaagttctcgaatcccgtctgccgggtatcctggagctttcccgtacctttgctcacgtcgatccggtgaaagagccgattccggttatcccaacctgtcactacatgatgggcggtattccgaccaaagtgaccggtcaggcgctgacggtgaacgagaaaggcgaagatgtggttgttccggggctgtttgccgttggtgaaatcgcttgtgtatcggtacacggcgctaaccgtctgggcggcaactcgctgctggacctggtggtctttggtcgtgcggcaggtctgcatctgcaagagtctatcgccgaacagggcgcattgcgcgatgccagcgagtctgatgttgaagcatctctggatcgtctgaaccgctggaacaataatcgtaacggtgaagatccggtggcgattcgtaaagcgctgcaagaatgtatgcagcataacttctcggtcttccgtgaaggtgatgcgatggcgaaagggcttgagcagttgaaagtgatccgcgagcgtctgaaaaatgcccgtctggatgacacttccagcgagttcaacacccagcgcgttgagtgcttggaactggataacctgatggaaacggcgtatgcaacggctgtttctgccaacttccgtaccgaaagccgtggcgcacatagccgcttcgacttcccggatcgtgatgatgaaaactggctgtgccactccctgtatctgccagagtcggaatccatgacgcgccgaagcgtcaacatggaaccgaaactgcgcccggcattcccgccgaagattcgtacttactaa

SEQ ID NO: 482799 - DNA, 348 bp, Shigella sonnei
atggtaagcaacgcctccgcattaggacgcaatggcgtacatgatttcatcctcgttcgcgctaccgctatcgtcctgacgctctacatcatttatatggtcggttttttcgccaccagtggcgaactgacatatgaagtctggatcggtttcttcgcctctgcgttcaccaaagtgttcaccctgctggcgctgttttctatcttgattcatgcctggatcggcatgtggcaggtgttgaccgactacgttaaaccgctggcattgcgcctgatgctgcaactggtgattgtcgttgcactggtggtttacgtgatttatggattcgttgtggtgtggggtgtgtga

SEQ ID NO: 482800 - DNA, 405 bp, Shigella sonnei; identical to SEQ ID NO: 459750

SEQ ID NO: 482801 - DNA, 1284 bp, Shigella sonnei
atggctgatacaaaagcaaaactcaccctcaacggggacacagctgttgaactggatgtgctgaaaggcacgctgggtcaagatgttattgatatccgtactctcggttcaaaaggtgtgttcacctttgacccaggcttcacttcaaccgcatcctgcgaatctaaaattacttttattgatggtgatgaaggtattttgctgcaccgcggtttcccgatcgatcagctggcgaccgattctaactacctggaagtttgttacatcctgctgaatggtgaaaaaccgactcaggaacagtatgacgaatttaaaactacggtgacccgtcataccatgatccacgagcagattacccgtctgttccatgctttccgtcgcgactcgcatccaatggcagtcatgtgtggtattaccggcgcgctggcggcgttctatcacgactcgctggatgttaacaatcctcgtcaccgtgaaattgccgcgttccgcctgctgtcgaaaatgccgaccatggccgcgatgtgttacaagtattccattggtcagccatttgtttatccgcgcaacgatctctcctatgccggtaacttcctgaatatgatgttctccacgccgtgcgaaccgtatgaagttaatccgattctggaacgtgctatggaccgtattctgatcctgcacgctgaccatgaacagaacgcctctacctccaccgtgcgtaccgctggctcttcgggtgcgaacccgtttgcctgtatcgcagcaggtattgcttcactgtggggacctgcgcacggtggtgctaacgaagcggcgctgaaaatgctggaagaaattagctccgttaaacacattccggaatttgttcgtcgtgcgaaagataaaaatgattctttccgcctgatgggcttcggtcaccgcgtgtacaaaaattacgacccgcgcgccaccgtaatgcgtgaaacctgccatgaagttctgaaagagctgggcaccaaagatgacctgctggaagtggctatggagctggaaaacatcgcgctgaacgacccgtactttatcgagaagaaactgtacccgaacgtcgatttctactctggtatcatcctgaaagcgatgggtattccgtcttccatgttcaccgtcattttcgcaatggcacgtaccgttggctggatcgcccactggagcgaaatgcacagtgacggtatgaagattgcccgtccgcgtcagctgtatacaggatatgaaaaacgcgactttaaaagcgatatcaagcgttaa

SEQ ID NO: 482802 - DNA, 567 bp, Shigella sonnei
atgtttaaaggacaaaaaacattggccgcactggccgtatctctgctgttcacagcacctgtttatgcggctgatgaaggatccggtgaaattcactttaaaggtgaagttattgaagcaccgtgtgaaatacatcaggatgatattgataaagaggttgaactcggtcaggtgaccaccagccacattaatcagtcacatcacagcgatgccgttgctgtcgacctgcgcttagtcaactgtgatctggaaaactccagcaacggttccggtggcaagatttctaaagttgcagtcacctttgatagctcagcgaaaaccaccggcgcagatccgattctcaacaacaccagcacgggtgaagccaccggcgtcggcgtacgtttaatgaataaagatcaaagcaatatcgttttaggcaccgctactccagatatcgacctggctccgacctccagcgaacaaacgctgaatttctttgcctggatggaacaaattgatcaggctacacctgtaacgccaggcgcagttacggcgaatgcaacctacgtgctggattataaataa

SEQ ID NO: 482803 - DNA, 1470 bp, Shigella sonnei
gtgaatatttatcgactctcttttgtatcctgcctggtcgtggcgatgccttgcgcattggcggtcgaattcaaccttaatgttctcgataaatcgatgcgcgaccgcattgatatttcattattaaaggaaaaaggagtcattgctcccggtgagtattttgttagcgttgcggtaaataataaccaaatcagtaacgggcaaaagattaactggcacaaaaatgacgataaaaccattccgtgcatcaatgatttactggtcgataaatttggcttaaaacctgaagtccgtcagtcgttaccattgataaatcagtgcgtcgattttagctcccgacctgaaatgctcttcaatttcgatcaagccaatcagcaactgaatattagtattccgcaagcctggctggcgtggcactcagaaaactggaccccaccctccacatggaaagaaggtgtcgccggtatcctgatggattacaacttgtttgccagcagctaccgcccacaggacggcagcagcagcactaacctgaacgcctacggtaccaccggaattaacgccggggcatggcgcttacgtagtgattatcagttgaatcagactgatagcgatgataaccatgaacagtcaggcggaatatcgcgcacctatctttttcgtccattaccgcaattaggctctaaattaaccctcggcgaaacggattttagttccaatattttcgacggtttttcttataccggcgcggcactggcaagtgacgagcgaatgttgccatgggaactacgcggctacgccccacaaattagcggtattgcacagaccaatgccacggtgacgatcagtcaatcaggccgcgtcatttaccagaaaaaagtcccaccaggcccatttatcattgacgaccttaatcagtctgttcagggcacactggatgtcaaagtgacggaagaagatggtcgggtgaacaatttccaggtttcggcagcatcgacgcccttcctgactcgtcagggacaggttcgctataaactggccgcgggtcagccacggccctccatgtcacatcaaactgaaaatgaaaccttttttagcaatgaagtttcctgggggatgctgtcaaacacctcgctgtacggcggcctgctgctttctggtgatgactaccattctgccgcaatgggtattgggcaaaatatgctgtggcttggtgcgctgtcgtttgatgtcacgtgggccagtagccattttgatactcagcaggacgagcggggcttaagctaccgttttaattacagcaaacaagtggatgccactaacagcacgatttccctcgccgcttatcgtttctccgatcgtcattttcacagctacgccaactatctggatcacaaatacaacgacagcgatgcgcaggacgaaaaacagacgatcagcttattgtgggccaaccgattaccccactaa

SEQ ID NO: 482804 - DNA, 1005 bp, Shigella sonnei
gtgggccaaccgattaccccactaaacctcaatctttacgccaacctgctacatcaaacctggtggaatgcagacgcctccacgaccgccaacatcacggcaggttttaatgttgatattggtgactggagagatatctctatttcgacgtcattcaatacaacccattacgaagataaagatcacgacaaccagatttacctgtcgatttcgctccccttcggtaacggtggtcgggttggctatgacatgcaaaacagtagccacagcaccacacaccgcatgtcgtggaacgatacgctggatgaacgtaatagctggggcatgtctgccggactgcaatccgaccgtcctgacaatggagcccaggtgagcggtaactatcagcacctgagttcagcgggtgagtgggatatttctggtacctatgccgccaatgattacagttccgtcagcagcagctggagcggttctttcaccgcaacccaatatggtgcagcgtttcatcgccgcagctccaccaatgaaccacgcctgatggtcagcaccgatggcgtggcagatattccggttcagggcaatctcgactacaccaaccattttggcattgcggtggtgccgttgatttccagttaccagccttccaccgtggcggtgaacatgaatgacttacccgacggcgtaacagttgcagaaaacgttatcaaagaaacgtggattgaaggcgcgataggttacaaatcactggcttcccgttccggtaaagacgttaacgtcatcattcgcaacgccagcggtcagtttcctcccctcggagcggatatccgccaggatgacagcggcattagcgtggggatggttggcgaggaaggacatgcctggttaagcggagtcgctgaaaatcaaaagtttaccgtggtctggggtgatagccagcattgctcgctccatcttcctgaacatatggaagacaccgcaaatcgcctgattttaccttgtcattaa

SEQ ID NO: 482805 - DNA, 732 bp, Shigella sonnei
atgacatttatgaaaggactaccccttttgttgttggttgccagtctgtgcagccacgctgcactacaacccgatcgcactcgtattgtgtttaacgctaatgataaagctaccagtctgcgggtggataatcgtagcgataaactcccctacctcgcttattcctggctcgaaaatgaaaaaggggagaaaagcgatgatcttctggtcgccctgccgccgatacaacgtctggaaccgaaagcaacaacgcaggtacggatagtaaagcaagcctcgaccacaaaattaccgggcgatcgcgaaacgctatttttctacaatatgcgtgaaattcctcccgccccggaaaaaaacagcgaccatgccgttctgcaagtcgccattcagagtcgtatcaaggtgttctggcgaccggctgcattacgcaagaaagcaggagaaaaggtcgaactgcagttacaggtcagccagcagggcaaccaactgacactgaaaaatcctaccgcgtattatctgaccattgcctacctgggacgaaatgaaaaaggcgttctccccggcttcaaaaccgtgatggttgcgccttttagtacggtcaacacaaacaccggaaattatagcggcagccagttttatctcggttatatggatgattacggcgcgttacgcatgacgacgctcaactgcagcggacaatgccatttacaagccgtggaggcgaagaaatga

SEQ ID NO: 482806 - DNA, 1062 bp, Shigella sonnei
atgagtgctggcaagggagtgttgctcgtcatctgtctgttatttctgccgttgaagtctgcgcttgccctgaactgctactttggttcatccggtggctcggtagaaaaatcagaagcgattcaaccttttgctgtaccaggcaatgccaaactcggcgataagatttgggaatctgacgatattaaaattcccgtctattgtgacaacaataccaacggcaattttgaaagtgagcatgtttatgcctgggtaaacccctacccgggggtgcaggatcgctattatcaactcggcgtaacttacaatggcgttgattatgacgccaaccagggaaaaagccgcatcgacactaaccagtgtattgacagtaagaacattgacatttatacccctgagcagattatcgcgatgggatggcagaacaaaatttgctcgggtgatcccgctaatattcacatgtcgcgtacctttctcgctcgcatgcggttatacgtcaaaatacgagaaatgccgccgcatgattatcaaagtacgcttagcgactatatcgtcgtgcaatttgacggtgccggtagcgttaacgaagaccctactgcccaaaacctgaaatatcatattactggtctggaaaacattcgcgtgctggattgcagcgtcaatttttccatttcaccggaaacacaggtgattgattttggtaaatttaatttgctggatattcgtcgccacacaatgtcgaaaacattcagtattaagacgacaaaatcacaaaatgaccaatgcaccgacggatttaaagtcagttcctccttttataccgaagaaacgttggttgaagaagataaagcattgttgattggtaatggtctgaagctacgtttgctggatgaaaacgcctcgccttataccttcaataaatatgctgaatacgccgatttcaccagcgacatgttggtctacgaaaaaacctatacagctgaactttcgtccattgcaggtacccccatcgaggctgggcccttcgatacagtggtgctttttaaaattaactataactga

SEQ ID NO: 482807 - DNA, 1047 bp, Shigella sonnei
atgccagttttgcagtggggaatgttatgtgtgctatcacttctcctttctattggtttcctcgcggtacatctcccggcggcgctattacttgggccgatgatcgccgggatcatcttcagtatgcgcggaattactctgcaacttccccgctccgcttttctcgccgcgcaggccattcttggctgcatgattgcgcaaaacctcactggttcgattctcaccacgctggccgccaactggccgatcgtgcttgctattttactggtgacgctgctttccagcgccatcgtgggttggttattggtgcgctatagctcactgcctggaaataccggtgcctggggttcttctccaggcggcgcagcggcaatggtcgctatggcgcaagattacggcgcagatattcgcctggttgcatttatgcaatatctgcgagtgctgttcgtcgcgggggccgctgttctggtcacccgcatgatgctgggtgataacgctgaagcggttaaccagcaaatcgtctggttcccgccagtgagcattaatctcctgcttacgattttgctcgcagtcgttgccggtacggcgggatgcatgctgcgtcttccttccggcacgatgctcatcccgatgctggcgggcgcagtgctccagtctggtcagctcatcaccatcgaactaccggaatggctgctggcgatggcgtatatggcaattggctggcggattggtcttggtttcgataaacaaatcttactgcgggcactacgcccgctaccgcaaatcctgctgtcgatttttgctctgctggctatttgtgcgggtatggcgtgggggctgacccggtttatgcacattgattttatgactgcctacctcgccaccagtcccggcgggcttgataccgtggcggtcatcgccgcagggagcaatgccgatatggcgcttattatggcgatgcaaaccctgcgcctgttcagtattttgctgacggggccagccattgcgcggtttatttcaacctatgcgccgaagcggtcggcctag

SEQ ID NO: 482808 - DNA, 792 bp, Shigella sonnei
atgcctgaaggcccggagatccgccgtgcagcggataacctggaggcggcgatcaaaggcaaaccactaactgatgtctggtttgccttcccgcagttaaaaacttatcaatcacaacttatcggtcaacacgttacccatgtggaaacgcgtggtaaggcgttgttaactcatttttccaacgacttaacgctctacagccataatcagctttacggcgtctggcgcgtggttgataccggcgaagagccgcagaccacgcgagtattgcgggtaaaactgcaaacggctgacaaaaccattctgctttatagcgcctcggatattgagatgttgaggccggaacaactgaccacgcatccgtttttacaacgcgttggtcccgatgtgctggatccgaatctgacgccggaggtggtaaaggaacggttattgtcaccgcgctttcgtaaccgtcagtttgcaggattactgctcgatcaggcgtttctggctgggcttggcaattatttgcgggtggagatcctctggcaggttgggttgactggaaatcataaagcgaaagatctcaatgcggcgcaactggatgcactcgcacacgcgttactggatattcctcgattttcctacgctacgagggggctggtggatgagaataagcatcatggggcgctgtttcgctttaaggtttttcatcgtgatggcgaaccgtgcgaacgctgtggcagcatcattgagaaaaccacgctgtcatctcgcccgttttactggtgccctggctgccagcactag

SEQ ID NO: 482809 - DNA, 735 bp, Shigella sonnei
atgaaaattgacctgaacgccgatctgggcgaaggctgcgccagcgacgcagagctattaacgctggtttcctctgccaatattgcctgtggatttcatgcaggcgatgcgcaaatcatgcaggcttgcgtgcgtgaagcaataaaaaatggtgtcgcgattggcgctcacccgagttttcccgacagggaaaattttggtcgcagcgccatgcagctgccgccagaaaccgtttacgcccagacgctgtatcaaattggcgcgctggcaacgattgcccgtgcgcaaggcggcgtaatgcgtcatgtcaaaccgcacggcatgttgtacaaccaggcggcgaaagaagcacaactggcagacgccatcgccagagcggtatacgcttgcgatccggcattgattctcgttgggctggcaggaagcgagctgattcgtgcaggcaagcaatatggcctgacaacgcgcgaggaagtgtttgccgatcgcggttatcaggctgacggctcgctggtgccgcgaagtcagcgaggcgcgttgattgaaaacgaagaacaggcgttggcgcaaacgctagagatggtgcaacacggcagagtcaaaagtatcaccggcgaatgggcaacggtcacggcgcaaacagtctgcctgcatggcgacggcgagcacgcactggcgttcgcccgccgactacgctctacatttgccgaaaaggagattgttgtcgcagcataa

SEQ ID NO: 482810 - DNA, 933 bp, Shigella sonnei
atgctgaagattattcgtgcgggcatgtataccactgtgcaggatggcggtcgtcacggttttcgccagtcgggaatcagccactgcggcgcactggatatgcctgcgttacgcattgctaacctgctggtgggtaatgacgccaatgcccccgcgctggagatcacgctcggtcagttaacggttgagttcgaaactgatgggtggtttgctctgacgggtgccggttgcgaagcgcggctggatgataatgccgtctggaccggctggcgattgccgatgaaagcaggccagcgtttaacgcttaaacgcccgcagcacgggatgcgcagttatctggcggtcgcgggtggtattgatgttccgccggtaatggggtcatgcagcaccgatctcaaagtggggattggcgggctggaaggccgtttactgaaggatggtgaccgactcccgattggcaaatcgaagcgtgattttatggaagcgcagggcgttaaacagctgctgtggggcaaccgcattcgcgccttgccggggccggaatatcatgagttcgatcgcgcctcgcaggatgcattctggcgttcgccctggcagcttagctcgcaaagtaaccgcatgggctatcgcttacaggggcaaattttaaaacgcaccaccgatcgcgaactgttatctcacggtttgttaccgggcgtggtgcaggtgccacataacgggcagccgattgtgttgatgaacgacgcacagaccaccgatggttacccgcgtattgcctgtatcattgaggctgatatgtaccatctggcgcaaattccgctcggtcagccgattcattttgtccagtgttcactggaagaggcactgaaagcgcggcaagatcagcaacgttatttcgaacaattagtgtggcggctgcacaatgaaaattga

SEQ ID NO: 482811 - DNA, 657 bp, Shigella sonnei
gtgcaacgagcgcgttgttatctgataggtgaaacggcggtagtgctggaactggaaccgccggtgacgctggctagccagaaacggatctggcgactggcgcagcgtctggtggatatgccgaatgtggttgaagccattcccggcatgaacaatatcacggtgattttgcgtaatcctgagtcgctggcgctggatgccatagagcgtttgcaacgctggtgggaggagagcgaggccctggaacctgagtctcgctttattgaaattccggtggtttacggtggtgcaggcggaccggatttggcggtggtcgcggcgcattgcgggtttagcgaaaaacaggttgttgaattgcactcctccgtggaatacgtggtctggtttttaggttttcaaccgggcttcccgtatctcgggagtttgccggaacaactacacacgccacggcgcgctgaaccgcgcttgctcgttccggcaggttctgtcgggatcggcgggccgcagactggtgtttatccgctggcaacgccgggtggctggcagttgattggtcatacctcactcagcctgtttgatccggcgcgtgacgaacccatcttattacgtccgggagacagcgtgcgctttgtaccgcagaaggagggagtatgctga

SEQ ID NO: 482812 - DNA, 744 bp, Shigella sonnei
atgaaaaacaccgaactggaacaactgattaacgaaaaactgaacagcgcggcgattagtgattacgcgccgaatggtttgcaggtagaaggcaaagagacggtgcaaaaaattgttaccggtgtcaccgccagccaggctttgctcgatgaggcagtgcgtctgggcgcggatgcggtcattgtgcatcatggctacttctggaaaggagagtctccggtcattcgcggaatgaagcgtaaccgtttaaaaacgttgctggcgaatgatatcaacctgtatggctggcatttgccgcttgacgtacatcctgagctgggcaataacgcacagctggcggcgttactggggatcacggtcatgggcgaaattgagccgttggtgccgtggggagagctgaccatgcctgtgccgggactggaactagcctcctggattgaagcgcgtctgggacgtaagccgttatggtgtggcgataccggacctgaggtggtccagcgcgtcgcctggtgcacgggcggcgggcaaagttttatcgatagcgccgcgcgttttggcgtggatgcttttattactggcgaagtttctgaacagaccattcattcagcccgcgagcaggggttgcatttttatgctgcaggtcaccatgccactgaacgtggtggtattcgcgcattgagcgagtggctgaatgaaaataccgatcttgatgtgacctttattgatattcctaatcctgcataa

SEQ ID NO: 482813 - DNA, 1482 bp, Shigella sonnei
atgaataaacacgcatcacaaccgcgcactatttactatgtcgttgcgctgcaaatctgggaatattttagcttttacggcatgcgtgccctgctgattctctatctcaccaatcaactaaaatacaacgatactcacgcctacgagttatttagcgcctactgttcgctggtgtatgtcacgccaatcctcggtggctttttggcggataaagttctcggcaatcgcatggcggtgatgctgggggcgttgttgatggcgatcggtcatgtggtgctgggtgccagtgagatccatccgtcattcctctatctgtccctggcgattatcgtttgtggctatggtctgtttaaatccaatgtcagttgcctgctcggcgagctgtatgagccaaccgatccgcgtcgtgatggcggtttctcgctgatgtatgcagcgggtaacgtggggtctattatcgcacctatcgcctgtggttacgcccaggaagagtacagctgggcgatgggctttggcctggcggcggtgggtatgatcgcgggtctggtcattttcttatgtggcaatcgtcatttcacacatacccgcggcgttaataaaaaagtactgcgtgcaacaaactttctcctgcctaactggggatggctgctggttctgctggtggcaacgcctgcgctgattaccgtactgttctggaaagagtggtcggtatacgccttaattgtcgcgactattattggcctgggtgtactggcaaaaatttatcgcaaagcagaaaaccagaaacagcgtaaggagctggggctgattgtgacgctcaccttcttcagtatgttgttctgggccttcgcacaacagggcggcagctcaattagcctttatatcgaccgcttcgttaaccgcgatatgtttggttataccgttccgactgctatgttccagtcgattaatgccttcgcagttatgctatgcggtgtgttcctggcgtgggtggttaaagaaagcgtcgcaggtaatcgtaccgtgcgcatctggggaaaatttgctcttggccttggcctgatgagcgccggattctgcattctgaccttaagcgcccgctggtccgcaatgtatggtcactcttctctgccactgatggtgttaggcctcgcggtgatgggctttgcggaactgtttatcgacccggttgccatgtcgcaaattacgcgcattgaaattccgggcgtgaccggcgtattaaccggcatctacatgctgctttctggcgcgatcgcgaactatctggcgggcgtgattgccgatcagacatcgcaggcttcgtttgatgcttccggggcgatcaactactccatcaatgcatatattgaagtatttgatcaaattacctggggcgcactggcgtgtgtaggactggtactgatgatttggctgtatcaggcgctgaaattcagaaaccgcgcgctggcgctggagtcataa

SEQ ID NO: 482814 - DNA, 282 bp, Shigella sonnei
ttgctgcaaagtcgcaatgatcatttgcgccaaacggcattacgcaacgcacataccccggcgtcgttgttaacgacattgactgagtctcaggatcggtcgctggctattaataatccacagctggctgccgatgtgaaaacggcgtggttaaaagaggatctatcattactcttatttgtcgaacaacccgatctttcgcagttacgtgatttagtgaaaaccggggcaacgcggaaaattcgcagtgaagcgcgtcaccggcttgaggaaaaacaatga

SEQ ID NO: 482815 - DNA, 456 bp, Shigella sonnei
atgacacaacatccatggagcaagttacagcgggagatctatgacttactgacgccaacgatcaacctgcaaattcactgtacccgttatctcatgcgcagccaaaatggtggaagtaccgatttaccgcgttattggatcacgttggataaaaacgtgatctgggattacccgaaagactttattgcaggtaacgctggagtgcgtaattttcacggtgaaacttgctggtatccttacctgacggatatttgttcaatttctgatttattgcgtgaatatattgataccccaaaagcggagctgttaacaaaacaatttaccagcgataaatgggggttagtgaatattctgcgtgctgctgacaggcgaatagggatgaggcgattagatcagttacggcgtaaaacgcataatattgctgcgctaaaaattattgctcgccgtagcgaataa

SEQ ID NO: 482816 - DNA, 978 bp, Shigella sonnei
atgcaaggccgccgacaattcgttatcatgcccgctaaatttaacgacaaggccgtggaaattatcatgctgtggttcaaaaatttaatggtttaccgtcttagccgcgagatttcgctgcgtgcagaagagatggaaaaacagctagcctcgatggcatttaccccatgcggcagccaggacatggcgaagatgggctgggttcctccgatgggatcgcacagcgatgcgttaacgcacgttgccaatggtcaaattgttatctgcgcgcgcaaagaagaaaaaatcctcccgtctccggtgattaaacaggcgctggaagcgaaaatcgccaaactggaagcggaacaggcgcgtaagctgaagaaaaccgaaaaagattcgctgaaagacgaagtgctgcactctctgctgccgcgtgctttcagccgttttagccagacaatgatgtggatcgacacggttaacggtttgattatggtggactgcgccagtgccaaaaaagcggaagatacgctggcattactgcgtaaaagcctggggtcgttaccggttgtaccattgagcatggaaaacccgattgaactgacgctgaccgaatgggttcgctccggtagtgcggcacagggcttccagctgcttgatgaagccgagctgaaatcgttgctggaagatggcggcgtgatccgcgcgaagaaacaagatctgaccagcgaagagatcaccaatcacattgaagccggaaaagtggtgactaaactggcgctcgactggcagcagcgcattcagtttgtgatgtgcgacgatggttcgctcaagcgtcttaagttctgcgacgagctgcgcgatcaaaacgaagatatcgaccgtgaagatttcgccctgcgttttgatgccgatttcatcctgatgactggtgaactggcagcgttaattcaaaacctgattgaaggattaggtggcgaagcacaacgttaa

SEQ ID NO: 482817 - DNA, 909 bp, Shigella sonnei
gtgcgtataggtatcgatttaggcggcaccaaaactgaagtgattgcactgggcgatgcaggggagcagttgtaccgccatcgtctgcccacgccgcgtgatgattaccggcagactattgaaacgatcgccacgttggttgatatggcggagcaggcgacagggcagcgcggaacggtaggtatgggcattccaggttcgatttcgccctacaccggtgtggtgaagaatgccaattcaacctggctcaacggtcagccattcgataaagacttaagcgcgaggttgcagcgggaagtgcggctggcaaatgatgccaactgtctggcggtttcagaagcagtagatggcgcggcagcgggagcgcagacggtatttgccgtgattatcggcacgggatgcggcgcgggcgtggcattaaatgggcgggcgcatatcggcggcaatggcacggcaggcgagtggggacacaatccgctaccgtggatggatgaagacgagctgcgttatcgcgaggaagtcccttgttattgcggtaaacaaggttgtattgaaacctttatttcgggcacgggattcgcgacggattatcgtcgtttgagcggacatgcgctgaaaggcagtgaaattatccgcctggttgaagaaagcgatccggtagcggaactggcattgcgtcgctacgagctgcggctggcaaaatcgctggcacatgtcgtgaatattctcgatccggatgtgattgtcctggggggcgggatgagcaatgtagaccgtttatatcaaacggttgggcagttgattaaacaatttgtcttcggcggcgaatgtgaaacgccggtgcgtaaggcgaagcacggtgattccagcggcgtacgcggcgctgcgtggttatggccacaagagtaa

SEQ ID NO: 482818 - DNA, 1269 bp, Shigella sonnei
ttggccttgctggtcgttatcctgcaagctatcactttattggctacggtgattggtagccgttctggtggttgtgatggtggtatgaaaaaagtcattttatctttggctctgggcacgtttggtttggggatggccgaatttggcattatgggcgtgctcacggagctggcgcataacgtaggaatttcgattcctgctgccgggcatatgatctcgtattatgcactgggggtggtggtcggtgcgccaatcatcgcactcttttccagccgctactcactcaaacatatcttgttgtttctggtggcgttgtgcgtcattggcaacgccatgttcacgctctcttcgtcttacctgatgcttgccattggtcgcctggtttccggctttccgcatggcgcattttttggcgtcggcgcgatcgtgttatcaaaaattatcaaacccggaaaagtcaccgccgccgtggcggggatggtttccgggatgacagtcgccaatttgctgggcattccgctgggaacgtatttaagtcaggaatttagctggcgttacacctttttattgatcgctgtttttaatattgcggtgatggcatcggtctatttttgggtgccagatattcgcgacgaggcgaaaggaaatctgcgcgaacaatttcactttttgcgcagcccggccccgtggttaattttcgccgccacgatgtttggcaacgcaggtgtctttgcctggttcagctacgtaaagccatacatgatgtttatttccgttttttcggaaacggcgatgacctttattatgatgttagttgggctagggatggtgctgggaaatatgctaagtggcaggatttcaggacgttattcaccactgcgcattgcagcagtgactgactttatcattgtactggcactgctgatgctctttttctgcggcggcatgaaaacaacgtcgcttatttttgcttttatttgttgcgcgggattatttgccctttcagcacctctgcaaatattgttactgcaaaacgccaaaggcggagagttattaggtgccgcaggtgggcaaatagcgtttaacctcggtagcgccgtcggcgcatattgcggaggtatgatgctgacgctggggctggcatataattacgtggcgctgcctgccgccctgctttcgtttgctgcgatgtcatcgttgctgctgtatggtcgctataagcgccagcaagcggcggatagtccggtgctggcgaaaccactggggtag

SEQ ID NO: 482819 - DNA, 3144 bp, Shigella sonnei
atgaaaattctcagcctgcgcctgaaaaacctgaactcattaaaaggcgaatggaagattgatttcacccgcgagccgttcgccagcaacgggctgtttgctattaccggcccaacaggtgcggggaaaaccaccctgctggacgccatttgtctggcgctgtatcacgaaactccgcgtctctctaacgtttcacaatcgcaaaatgatctcatgacccgcgataccgccgaatgtctggcggaggtggagtttgaagtgaaaggtgaagcgtaccgtgcattctggagccagaatcgggcgcgtaaccaacccgacggtaatttgcaggtgccacgcgtagagctggcgcgctgcgccgacggcaaaattctcgccgacaaagtgaaagataagctggaactgacagcgacgttaaccgggctggattacgggcgcttcactcgttcgatgctgctttcgcaggggcaatttgctgccttcctgaatgccaaacccaaagaacgcgcggaattgctcgaggagttaaccggcactgaaatctacgggcaaatctcggcgatggtttttgagcagcacaaatcggcccgcacagagctggagaagctgcaagcgcaggccagcggcgtcacgttgctcacgccggaacaagtgcaatcgctgacagcgagtttgcaggtacttactgacgaagaaaaacagttaattaccgcgcagcagcaagaacaacaatcgctaaactggttaacgcgtcaggacgaattgcagcaagaagccagccgccgtcagcaggccttgcaacaggcgttagccgaagaagaaaaagcgcaacctcaactggcggcgcttagtctggcacaaccggcacgaaatcttcgtccacactgggaacgcatcgcagaacacagcgcggcgctggcgcatattcgccagcagattgaagaagtaaatactcgcttacagagcacaatggcgcttcgcgcgagcattcgccaccacgcggcgaagcagtcagcagaattacagcagcagcaacaaagcctgaatacctggttacaggaacacgaccgcttccgtcagtggaacaacgaactggcgggttggcgtgcgcagttctcccaacaaaccagcgatcgcgagcatctgcggcaatggcagcaacagttaacccatgctgagcaaaaacttaatgcgcttgcggcgatcacgttgacgttaaccgccgatgaagttgctagcgccctggcgcaacattccgagcaacgcccactgcgtcagcgcctggtcgcgctgcatgggcagattgttccccaacaaaaacgtctggcgcagttaatggtcactatccagaatgtcactctggaacagacgcaacgtaatgtcgcacttaacgaaatgcgccagcgttataaagaaaagacgcagcaacttgccgatgtgaaaaccatttgcgagcaggaagcgcgcatcaaaacgctggaagctcaacgtgcacagttacaggcgggtcaaccttgtccactttgtggttccaccagccacccggcggtcgaggcgtatcaggcgctggagcctggtgttaatcagtctcgattactggcgctggaaaacgaagttaaaaagctcggcgaagaaggtgcggcgctgcgcgggcaactggatgcattaacgaagcagcttcagcgcgatgaaaacgaagcgcaaagcctccgacaagatgagcaagcacttactcaacaatggcaagccgtcacgaccagcctcaatatcaccttgcagccacaggacgatattcaaccgtggctggatgcacaagatgagcacgaacgccagctgcggttactcagccaacgacatgaattacaagggcagattgccgcgcataatcagcaaattatccagtatcaacagcaaattgaacaacgccagcagcagctcttaacggcattgacgggttatgcactgacattgccacaggaagatgaagaagagagctggttggcgacacgtcagcaagaagcgcagagctggcagcaacgccagaacgaattaaccgcgctgcaaaaccgtattcagcagctgacgccgattctggaaacgttgccgcaaagtgatgatctcccgcacagcgaagaaactgtggcgctggataactggcggcaggttcatgaacaatgtctcgcattacacagccagcagcagacgttacagcaacaggatgttctggcggcgcaaagtctgcaaaaagcccaggcgcagtttgacaccgcgctacaggccagcgtctttgacgatcagcaggcgttccttgcggcgctaatggatgaacaaacactaacgcagctggaacagctcaagcagaatctggaaaaccagcgccgtcaggcgcaaacgctggtcacacagacagcagaaacgctggcacagcatcaacaacaccgacctgacgggttggctctcactgtgacggtggagcagattcagcaagagttagcgcaaactcaccaaaagttgcgtgaaaacaccacgagtcaaggcgagattcgccagcagctgaagcaggatgcagataaccgtcagcaacaacaaaccttactgcagcaaattgctcaaatgacgcagcaggttgaggactggggatatctgaattcgctaataggttccaaagagggcgataaattccgcaagtttgcccaggggctgacgctggataatttagtccatctcgctaatcagcaacttacccggctgcacgggcgctatctgttacagcgcaaagccagcgaggcgctggaagtcgaggttgttgatacctggcaggcagatgcagtacgcgatacccgtaccctttccggcggcgaaagtttcctcgttagtctggcgctggcgctggcgctttcggatctggtcagccataaaacacgtattgactcgctgttccttgatgaaggttttggcacgctggatagcgaaacgctggataccgcccttgatgcgctggatgccctgaacgccagtggcaaaaccatcggtgtgattagccacgttgaagcgatgaaagagcgtattcctgtgcagatcaaagtgaagaagatcaacggcctgggctacagcaaactggaaagtacgtttgcagtgaaataa

SEQ ID NO: 482820 - DNA, 1203 bp, Shigella sonnei
atgcgcatccttcacacctcagactggcatctcggccagaacttctacagtaaaagccgcgaagctgaacatcaggcttttcttgactggctgctggagacaacacaaacccatcaggtggatgcgattattgttgccggtgatgttttcgataccggctcgccgcccagttacgcccgcacgttatacaaccgttttgttgtcaatttacagcaaactggctgtcatctggtggtactggcaggaaaccatgactcggtcgccacgctgaatgaatcgcgcgatatcatggcgttcctcaatactaccgtggtcgccagcgccggacatgcgccgcaaatcttgcctcgtcgcgacgggacgccaggcgcagtgctgtgccccattccgtttttacgtccgcgtgacattattaccagccaggcggggcttaacggtattgaaaaacagcagcatttactggcagcgattaccgattattaccaacaacactatgccgatgcctgcaaactgcgcggcgatcagcctctgcccatcatcgccacgggacatttaacgaccgtgggggccagtaaaagtgacgctgtgcgtgacatttatattggcacgctggacgcgtttccggcacaaaactttccaccagccgactacatcgcgctcgggcatattcaccgcgcacagattattggcggcatggaacatgttcgctattgcggctcccccattccactgagttttgatgaatgcggtaagagtaaatatgtccatctggtgacattttcaaacggcaaattagagagcgtggaaaacctgaacgtaccggtaacgcaacccatggcagtgctgaaaggcgatctggcgtcgattaccgcacagctggaacagtggcgcgatgtatcgcaggagccaccagtctggctggatatcgaaatcactactgatgagtatctgcatgatattcagcgcaaaatccaggcattaaccgaatcattgcctgtcgaagtattgctggtacgtcggagtcgtgaacagcgcgagcgtgtgttagccagccaacagcgtgaaaccctcagcgaactcagcgtcgaagaggtgttcaatcgccgtctggcactggaagaactggatgaatcgcagcagcaacgtctgcagcatcttttcaccacgacgttgcataccctcgccggagaacacgaagcatga

SEQ ID NO: 482821 - DNA, 690 bp, Shigella sonnei
atggcgagacgtattctggtcgtagaagatgaagctccaattcgcgaaatggtctgcttcgtgctcgaacaaaatggctttcagccggtcgaagcggaagattatgacagtgctgtgaatcaactgaatgaaccctggccggatttaattctccttgactggatgttacctggcggctccggtatccagttcatcaaacaccttaagcgcgagtcgatgacccgggatattccagtggtgatgttgaccgccagaggggaagaagaagatcgcgtgcgcggccttgaaaccggcgcggatgactatatcaccaagccgttttcgccgaaggagctggtggcacgaatcaaagcggtaatgcgccgtatttcgccaatggcggtggaagaggtgattgagatgcagggattaagtctcgacccgacatctcaccgagtgatggcgggcgaagagccgctggagatggggccgacagaatttaaactgctgcacttttttatgacgcatcctgagcgcgtgtacagccgcgagcagctgttaaaccacgtctggggaactaacgtgtatgtggaagaccgcacggtcgatgtccacattcgtcgcctgcgtaaagcactggagcccggcgggcatgaccgcatggtgcagaccgtgcgcggtacaggatatcgtttttcaacccgcttttaa

SEQ ID NO: 482822 - DNA, 1296 bp, Shigella sonnei
gtgctggaacggctgtcgtggaaaaggctggtgctggagctgctactttgctgcctcccggctttcatcctgggtgcattttttggttacctgccctggtttttgctggcatcggtaacaggactgcttatctggcatttctggaatttattgcgcctttcatggtggctgtgggtggatcgcagtatgaccccgccaccggggcgtggtagctgggaaccgctactatacggcttacaccagatgcagctgcgaaataaaaaacgccgccgtgaactgggcaatctgattaaacgctttcgtagcggcgcggagtcgctgcccgacgcggtggtgctgaccacggaagagagcggtattttctggtgtaacggtctggcgcaacaaattcttggtttgcgctggccggaagataacgggcagaacatccttaacctactgcgttacccggagtttacgcaatatctgaaaacgcgtgatttttctcgcccgctcaatctggtgctcaacaccgggcggcatctggaaattcgcgtcatgccttatacccacaaacagttgctgatggtggcgcgtgatgtcacgcaaatgcatcaactggaaggggcgcggcgtaacttttttgccaacgtgagccatgagttacgtacgccattgaccgtgttacagggttacctggagatgatggatgagcagccgctggaaggcgcggtacgcgaaaaagcgttgcacaccatgcgcgagcagacccagcggatggaagggctggtgaagcagttgctaacgctgtcgaaaattgaagccgcgccgacgcaattgctcaatgaaaaggttgatgtgccgatgatgctgcgcgttgttgagcgcgaggctcagactctgagtcagaaaaaacagacatttacctttgagatagataacggcctcaaagtgtctggcaacgaagatcagctacgcagtgcgatttcgaacctggtctataacgccgtgaatcatactccagaaggcacgcatatcaccgtacgctggcagcgagtgccgcacggtgccgaatttagcgttgaagataacggaccgggcattgcaccggagcatattccgcgcctgaccgagcgtttttatcgcgttgataaagcgcgttcccggcaaaccggcggtagcggattagggttagcgatcgtgaaacatgctgtgaatcatcacgaaagtcgcctgaatattgagagtacagtaggaaaaggaacacgtttcagttttgttatcccggaacgtttaattgccaaaaacagcgattaa

SEQ ID NO: 482823 - DNA, 1320 bp, Shigella sonnei
atgacccatcaattaagatcgcgcgatatcatcgctctgggctttatgacatttgcgttgttcgtcggcgcaggtaacattattttccctccaatggtcggcttgcaggctggcgaacacgtctggactgcggcattcggcttcctcattactgccgttggcctgccggtattaacggtagtggcgctggcaaaagttggcggcggtgttgacagcctcagcacgccaatcggtaaagtcgctggcgtgctgctggcaacggtttgttacctggcggtggggccgcttttcgctacgccgcgtacagctaccgtttcctttgaagtggggattgcgccgctgactggtgattccgcgctgccgctgtttatctacagcctggtctatttcgctatcgttattctggtttcgctctatccgggcaagctgctggataccgtgggcaacttccttgcgccgctgaaaattatcgcgctggtcatcctgtctgttgccgcgattgtctggccggcgggttctatcagcacggcgactgaggcttatcaaaacgctgcgttttctaacggcttcgttaacggctatctgaccatggatacgctgggcgcaatggtgtttggtatcgttattgttaacgcggcgcgttctcgtggcgttaccgaagcgcgtctgctgacccgttataccgtctgggctggcctgatggcgggtgttggtctgactctgctgtacctggcgctgttccgtctgggttcagacagcgcgtcgctggtcgatcagtctgcaaacggcgctgctattctgcatgcttacgttcagcacacctttggcggcggcggtagcttcctgctggcggcgttaatcttcatcgcctgcttggtaacggcagttggcctgacctgtgcttgtgcagaattctttgcccagtacgtaccgctctcttatcgtacgctggtgtttatcctcggcggcttctcgatggtggtttctaacctcggcttaagccagctgatccagatctccgtaccggtgctgaccgctatttatccgccgtgtatcgcactggttgtattaagttttacacgctcatggtggcataattcgtcccgcgtgattgctccgccgatgtttatcagcctgctttttggtattctcgacgggatcaaagcatctgcattcagcgatatcttaccgtcctgggcgcagcgtttaccgctggccgaacaaggtctggcgtggttaatgccaacagtggtgatggtggttctggccattatctgggatcgcgcggcaggtcgtcaggtgacctccagcgctcactaa

SEQ ID NO: 482824 - DNA, 1374 bp, Shigella sonnei
atggaaagtaagaacaagctaaagcgtgggctaagtacccgccacatacgctttatggcactgggttcagcaattggtaccgggctgttttacggttcggcagacgccatcaaaatggccggtccgagcgtgttgttggcctatattatcggtggtatcgcggcgtatatcattatgcgtgcgctgggggaaatgtcggtacataacccggccgccagctctttctcgcgttatgcgcaggaaaacctcggcccgctggcaggttacattaccggctggacctactgctttgaaatccttattgtcgccatcgccgatgtgaccgcttttggtatctatatgggtgtctggttcccgacggtgccgcactggatttgggtactgagcgtggtgctgatcatttgcgccgtaaacctgatgagcgtgaaggtcttcggggagctggaattctggttctcgttctttaaagtcgccaccatcatcatcatgattgtcgctggtttcggcatcatcatctgggggattggcaacggcgggcaaccgaccggtattcataatctgtggagcaacggcggcttcttcagtaacggctggcttgggatggtgatgtcgttgcaaatggtgatgtttgcttacggtgggatcgaaattatcgggattaccgccggtgaagcgaaagatcctgagaaatcgataccgcgtgcgattaactccgtgccgatgcgtattctggtgttctacgtcggtacgctgttcgtcattatgtctatctacccgtggaatcaggttggcactgccggtagcccgttcgtgctgacgttccagcatatgggcattacctttgccgctagcattcttaactttgttgtgctgaccgcttcgctatcggcaattaacagtgacgtctttggcgtaggccgtatgctccacggtatggcagagcagggcagcgcgccgaaaattttcagcaaaacgtcgcgtcgcggtattccgtgggttacggtgctggtgatgactaccgcgctgctgtttgcggtgtatctgaactacatcatgccggaaaacgtcttcctggtgatcgcttcgctggcaaccttcgccacggtgtgggtgtggattatgatcctgctgtcgcaaattgccttccgtcgctgtttgccgccagaagaagttaaggcgctgaaatttaaagtgccgggtggggtagcaacgaccatcggcgggctgattttcctgctctttattatcgggttgattggttatcacccggatacgcgtatctcgctgtatgtcggtttcgcgtggattgttgtgctgttgattggctggatgtttaagcgtcgccacgatcgtcagctggctgaaaaccagtaa

SEQ ID NO: 482825 - DNA, 1818 bp, Shigella sonnei
atgatgttaaatgcatggcacctgccggtgcccccatttgttaaacaaagcaaagatcaactgctcattacactgtggctgacgggcgaagacccaccgcagcgcattatgctgcgtacagaacacgataacgaagaaatgtcagtatcgatgcataagcatcgcagtcagcagcagcctggcgtcaccgcatggcgtgcggcgattgatctctccagcggacaaccccggcggcgttacagtttcaaactgctgtggcacgatcgccagcgttggtttacaccgcagggcttcagccgaatgccgccggcacgactggagcagtttgccgtcgatgtaccggatatcggcccacaatgggctgcggatcagattttttatcagatcttccctgatcgttttgcgcgtagtcttcctcgtgaagctgaacaggatcatgtctattaccatcatgcagccggacaagagatcatcttgcgtgactgggatgaaccggtcacggcgcaggcgggcggatcaacgttctatggcggcgatctggacgggataagcgaaaaactgccgtatctgaaaaagcttggcgtgacggcgctgtatctcaatccggtgtttaaagctcccagcgtacataaatacgataccgaggattatcgccatgtcgatccgcagtttggcggtgatggggcgttgctgcgcttacgccacaatacgcagcagctgggaatgcggctggggctggatggcgtgtttaaccacagtggcgattcccatgcctggtttgataggcacaatcgtggcacggggggagcttgtcacaaccctgaatcgccctggcgcgactggtactcgtttagtgatgatggcacggcgctcgactggcttggctatgccagcttgccgaagctggattatcagtcggaaagtctggtgaatgaaatttatcgcggggaagacagtattgtccgccattggctgaaagcgccgtggagtatggacggctggcggctggatgtggtgcatatgctaggggaggcgggtggggcgcgcaataatatgcagcacgttgctgggagcaccgaagcggcgaaagaaacccagccggaagcgtatattgtcggcgaacattttggcgatgcacggcaatggttacaggccgatgtggaagatgccgccatgaactatcgtggcttcacattcccgttgtggggatttcttgccaataccgatatctcttacgatccgcagcaaattgatgcccaaacctgtatggcctggatggataattaccgcgcagggctttctcatcaacaacaattacgtatgtttaatcagctcgacagccacgatactgcgcgatttaaaacgctgctcggtcgggatattgcgcgcctgccgctggcggtggtctggctgttcacctggcctggtgtaccgtgcatttattacggtgatgaagtaggactggatggcaaaaacgatccgttttgccgtaaaccgttcccctggcaggtggaaaagcaggatacggcgttattcgcgctgtaccagcgaatgattgcgctgcgtaagaaaagtcaggcgctacgtcatggcggctgtcaggtgctgtatgcggaagataacgtggtggtatttgtccgcgtgctgaatcagcagcgtgtactggtggcaatcaaccgtggcgaagcttgtgaagtcgtgctacccgcgtcaccgttgctcaatgccgtgcaatggcaatgcaaagaaaggcatgggcaactgactgacgggattctggctttgcctgccatttcggctacggtatggatgaactaa

SEQ ID NO: 482826 - DNA, 582 bp, Shigella sonnei
atgaattttttagctcacctgcatttagcccatctcgcggaaagctcgctttccggcaatttactggctgatttcgtacgcggaaatcctgaagaaagttttccgcccgacgtcgtggctggcattcatatgcatcgacgtatcgacgtattaaccgacaatctgccggaagtccgcgaagcacgggaatggtttcgtagtgaaactcgccgcgttgcgcctattacgctggatgtcatgtgggatcactttctttcccgccactggtcgcagctgtcgccggactttccgctacaggaatttgtctgttatgcccgcgagcaagtgatgacgattttgccggactcaccgccacgttttatcaatctgaacaattacttgtggtcagagcagtggctggtgcgctatcgcgatatggatttcatccagaacgtgttaaacggcatggcaagccgccgcccacgtctggatgccctgcgtgactcctggtacgatttagacgctcattatgacgccctcgaaacccgcttctggcagttttatccgcggatgatggcgcaggcgtcacacaaggcgttataa

SEQ ID NO: 482827 - DNA, 1071 bp, Shigella sonnei
atgcgcgttaccgatttctcctttgaattgcccgaatccctgattgcccactatcccatgcctgaacgcagtagctgtcgtttactgtcgctggacgggccgacgggcgcgctgacgcacggtactttcaccgatttacttgataagctcaaccccggcgatcttctggtttttaataatacccgcgtgatcccggcgcgcctgtttgggcgtaaagccagcggcggcaagattgaagtgctggttgaacggatgctcgacgacaaacgcattcttgcgcatattcgcgcctcgaaagcgccaaaacctggcgcagaactgctgctgggcgatgacgaaagtattaacgcaacaatgaccgcgcgccacggcgcactgtttgaagtcgaatttaatgatgaacgctcggtgctggatattctcaacagcatcggccatatgccgctgccgccgtatatcgaccgtccggacgaagacgctgaccgcgaactttatcaaaccgtttatagcgaaaaaccgggcgcggttgcagccccgaccgcaggtctgcattttgacgaacctttgctggaaaaattacgcgccaaaggcgtggagatggcgtttgtgacgttgcacgttggtgcgggcaccttccagccggtgcgcgtcgacaccattgaagatcacatcatgcactcggaatacgctgaagtgccgcaggatgtggtagacgcggtactggcggcgaaagcgcgcggtaaccgggtgattgcggttggcaccacctcagtacgttcgctggaaagcgcggctcaggcggcgaaaaacgatcttatcgaaccgttctttgacgatacccaaatctttatctatccgggcttccagtacaaagtggtcgatgcgctggtgacaaacttccacctgccggaatcgacgctgattatgctggtttcggcctttgccggttatcaacacaccatgaacgcctataaagcagcggtagaagagaaatatcgcttttttagttacggtgatgcgatgtttatcacgtacaatccgcaggcaattaatgagcgcgtcggggagtaa

SEQ ID NO: 482828 - DNA, 1128 bp, Shigella sonnei
atgaaatttgaactggacaccaccgacggtcgcgcacgccgtggccgcctggtctttgatcgtggcgtagtggaaacgccttgttttatgcctgttggcacctacggcaccgtaaaagggatgacgccggaagaagttgaagccactggcgcgcaaattatcctcggcaacaccttccacctgtggctgcgcccgggccaggaaatcatgaaactgcacggcgatctgcacgattttatgcagtggaaggggccgatcctcaccgactccggcggcttccaggtcttcagccttggcgatattcgtaaaatcaccgaacagggcgtgcacttccgtaacccgatcaacggcgatccgattttcctcgatcctgaaaaatcaatggagattcagtacgatcttggttcggatatcgtcatgatctttgatgagtgtacgccgtatcctgctgactgggattacgcaaaacgctccatggagatgtctctgcgttgggcgaagcgtagccgtgagcgttttgacagtctcggaaacaaaaatgcgctgtttggtatcattcagggcagcgtttacgaagatttacgtgatatttctgttaaaggtctggtagatatcggttttgatggctacgctgtcggcggtctggctgtgggtgagccgaaagcagatatgcaccgcattctggagcatgtatgcccgcaaattccggcagacaaaccgcgttacctgatgggcgttggtaaaccagaagacctggttgaaggcgtacgtcgtggtatcgatatgtttgactgcgtaatgccaacccgcaacgcccgaaatggtcatttgttcgtgaccgatggcgtggtgaaaatccgcaatgcgaagtataagagcgatactggcccacttgatcctgagtgtgattgctacacctgtcgcaattattcacgcgcttacttgcatcatcttgaccgttgcaacgaaatattaggcgcgcgactcaacaccattcataaccttcgttactaccagcgtttgatggcgggtttacgcaaggctattgaagagggtaaattagagagcttcgtaactgatttttaccagcgtcaggggcgagaagtaccacctttgaacgttgattaa

SEQ ID NO: 482829 - DNA, 333 bp, Shigella sonnei; identical to SEQ ID NO: 41008

SEQ ID NO: 482830 - DNA, 1815 bp, Shigella sonnei
atgctgatcgtggtgattgtcatcggtctgctgtatgcgcttcccaacctgtttggtgaggatccggctgttcagatcactggtgcgcgcggagtcgccgccagtgagcaaacgctgatccaggtccagaaaacgttacaagaagaaaaaataactgctaagtctgtggcactggaagagggcgctattcttgcgcgcttcgactccactgacacccagttgcgcgctcgtgaagcattaatgggcgttatgggtgacaaatacgtcgtggcgcttaaccttgccccggcaacgccgcgctggctggcagctattcatgctgagccgatgaagctcggccttgacctgcgtggcggcgttcacttcctgatggaagtggatatggacaccgcgcttggcaaactccaggaacaaaatatcgatagcctacgcagtgacctgcgcgaaaagggcatcccgtataccactgttcgtaaagaaaacaactacggcctgagcatcactttccgcgatgctaaagctcgtgatgaagccattgcgtatctgagcaagcgccatccggacctggtgattagcagccagggcagcaaccagctgcgtgcggtaatgagcgatgctcgtctgagtgaagcgcgtgaatatgcggtgcagcagaacattaatatcctgcgtaaccgtgtaaaccaacttggcgtggcggagccggtggttcagcgtcagggtgctgaccgtatcgttgttgaactgcctggtattcaggacactgcgcgtgcgaaagagattctgggcgcgacggcaacgctggaattccgtctggtaaacaccaatgttgatcaggccgctgcggcatccggtcgcgtaccgggcgactctgaagtgaaacagacccgcgaaggtcagccggttgtgctgtacaaacgcgtaattctgaccggtgaccatatcaccgactccacttccagccaggacgaatacaaccagccgcaggttaacatctcgctcgatagcgctggtggcaacattatgtctaacttcaccaaggacaacatcggcaaaccgatggcaaccctgtttgtggagtacaaagacagcggtaagaaagatgcaaatggtcgtgcggttctggtgaaacaggaagaggtgattaacatcgccaacatccagtctcgtctgggtaacagcttccgtatcaccggcatcaacaacccgaacgaagcccgtcagctgtcactgctgctgcgtgccggtgcgttgatcgcgccgattcagattgttgaagaacgtacaattggcccgaccctgggtatgcagaacattgagcaggggctggaggcttgccttgccggtctgctggtttctattctgttcatgatcatcttctataagaagtttggtctgattgcgaccagtgctctgattgctaacttgatcttgatcgtcggtattatgtcgctgttgccaggcgcaacactgagtatgccaggtatcgcgggtatcgtcttaacccttgcggtagcggtcgatgcgaacgtactgatcaacgaacgtattaaagaagagttgagcaacggacgtactgttcaacaggcaattgatgaaggttatcgtggcgcattcagttctatcttcgatgcgaacatcaccacgctgattaaagtcatcatcctgtacgcagtgggtaccggggcaattaaagggttcgcgattactaccggtatcggtgtggcgacgtcgatgtttaccgcgattgtcggtacgcgtgccatcgtaaacctgctatatggcggcaagcgcgtcaagaagctgtcaatctga

SEQ ID NO: 482831 - DNA, 972 bp, Shigella sonnei
gtggcacaggaatatactgttgaacaactaaaccacggccgtaaagtctatgactttatgcgctgggactactgggctttcggcatctctggtctgctgttaatcgctgctatcgttattatgggcgtgcgcggctttaactgggggctggatttcaccggtggtacggttatcgaaattacgctcgaaaaaccggctgaaattgacgtaatgcgtgatgcattgcaaaaagccggttttgaagagccaatgctgcaaaactttggtagcagccacgacatcatggtccgtatgccgcctgctgaaggcgaaaccggcggtcaggtgctgggcagccaggttctgaaggtgattaacgaatccaccaatcagaatgcagcagtgaagcgtattgagttcgtcggtccgagcgtgggggcagaccttgcgcaaaccggtgcgatggcgttgatggcagcgctgctgtctatcctcgtgtacgtaggtttccgctttgagtggcgactggcggcaggggtggttattgcgctggcgcacgacgttatcattacgctgggtattttgtcgttattccatatcgagattgacctgaccattgtggcatcgttgatgtcggttatcggttactcgcttaacgacagtatcgtggtatcggaccgaattcgtgaaaacttccgcaagatccgtcgcggtacgccttacgaaatctttaacgtgtccttgacccagacgctgcaccgtaccttgatcacatccggtactaccttgatggttatcctgatgctgtatctcttcggtggtccggtactggaaggcttctcgctgaccatgcttatcggtgtttccatcggcactgcatcttccatctacgtagcatctgcgttggctctgaaactgggtatgaagcgcgaacacatgttgcagcagaaagtggaaaaagaaggggcggatcagccgtcaattctgccgtaa

SEQ ID NO: 482832 - DNA, 348 bp, Shigella sonnei; identical to SEQ ID NO: 41013

SEQ ID NO: 482833 - DNA, 885 bp, Shigella sonnei
atgaaaaaaacattactggcagccggtgcggtactggcgctctcttcgtcttttactgtcaacgcagctgaaaacgacaaaccgcagtatctttccgactggtggcaccagagcgttaacgttgtcggaagctatcacacccgtttcggaccgcagatccgcaacgatacctaccttgagtacgaagcattcgctaaaaaagactggttcgacttctatggttatgcggatgcgccggtattcttcggcggtaactccgatgctaaaggtatctggaaccacggttctccgctgtttatggaaatcgaaccacgtttctccatcgacaagctgaccaatactgaccttagcttcggtccgttcaaagagtggtacttcgcgaacaactacatttacgacatgggtcgtaataaagatggtcgccagagcacctggtacatgggtctgggtaccgacatcgatactggtctgccgatgagcctgtccatgaacgtctatgcgaaataccagtggcagaactatgacgcagcgaacgaaaacgagtgggacggttaccgtttcaaaattaaatactttgtgccgattaccgatctgtggggcggtcagctgagctacatcggcttcaccaacttcgactggggttccgatttaggggatgacagcggtaacgcaatcaacggtattaagacccgtactaataactctatcgcttccagccatattctggctctgaactacgatcactggcactactctgtcgtagctcgttactggcacgacggtggtcagtggaacgacgatgcagaactgaacttcggcaacggcaacttcaacgttcgctctaccggctggggtggttacctggtagtaggttacaacttctga

SEQ ID NO: 482834 - DNA, 540 bp, Shigella sonnei
atgaatactaacgtttttcgactgctcctgctgggaagcctgttcagccttagcgcctgtgtgcagcaaagtgaagtgcgacagatgaaacacagcgtcagcacgctgaaccaggagatgacgcaactcaatcaagaaacagtcaaaatcactcagcaaaacaggctgaatgcaaaatccagcagtggggtttaccttctgcctggagcgaaaacaccggcaagactggaaagccagatcggtactttacgtatgtcgctggtgaatattacgcctgatacagatggcaccacccttacactacgtattcagggtgagtcgaatgatcccttgcccgcattcagcggaactgttgaatatgggcaaattcagggaacaatagacaactttcaggaaatcaatgtgcagaatcaattgattaatgcccctgccagcgtcctcgcccccagcgatgttgatattccgttacaattaaaggggatttctgtggatcagttaggctttgtacgtatccacgacattcaacctgttatgcagtaa

SEQ ID NO: 482835 - DNA, 450 bp, Shigella sonnei
atgcattgcccattctgtttcgccgtggacactaaggtaattgactctcgtctcgtgggcgagggttcatccgtacgccgccgtcggcagtgtctggtgtgtaatgaacgtttcaccacctttgaagtggcggagctggttatgccgcgtgttgtaaaaagcaacgacgtgcgtgaaccgtttaatgaagagaaattgcgtagcggaatgctgcgggcgctggaaaaacgtccggtgagttccgatgacgttgaaatggcaatcaatcatattaaatcgcagctgcgcgccaccggtgagcgcgaagtaccgagcaagatgattggcaatctggtgatggagcaattgaaaaagctcgataaagtcgcctatatccgttttgcctctgtctaccgcagtttcgaagatatcaaagaatttggcgaagagatcgcgcgcctggaggactaa

SEQ ID NO: 482836 - DNA, 1104 bp, Shigella sonnei
gtgcaggacgagtattacatggcgcgggcgctaaagctggcgcaacgaggacgttttaccacccaccccaacccgaatgtcgggggcgtcattgtcaaagatggcgaaattgtcggtgaaggttaccaccaacgagcgggtgaaccacatgccgaagtacacgcgttgcgtatggcgggtgaaaaagccaaaggcgcaacggcgtatgtgacactcgaaccctgtagccatcatggccgtacgccaccgtgctgtgacgcactcatcgccgctggcgtagcgcgcgtggtcgcagcgatgcaggatcctaacccgcaggtcgctgggcgtggactttaccgtctgcaacaggctggcattgacgtcagccacgggctgatgatgagtgaagccgagcaattgaataaaggctttctcaagcggatgcgcaccggctttccttatattcagttaaaacttggcgcatcgcttgatggccgcacggcgatggcgagcggcgaaagccagtggatcacttcgcctcaggcgcggcgcgacgtacaacgacagcgcgcacaaagtcatgccattttaaccagcagcgccacggtgctggcggatgatccagccttaacagtgcgttggtctgaactggatgaacaaactcaggcgctctacccgcaacaaaatctccgccagccagtacgtattgtgattgatagccaaaatcgcgtgacgccggaacatcgcattgtgcagcagcccggcgaaacctggttcgcgcgtacgcaggaagattctagtgagtggccggaaacggtgcgtaccttgctgattccagagcataaaggtcatctggatctggttgtactgatgatgcaactgggtaaacagcaaattaacagcatctgggtggaagcggggccaacgctcgctggcgcattgctgcaggcgggtttagtcgatgagctgattgtctatatcgcacctaaactattaggcagcgacgcccgcggattatgcacgctgccagggcttgagaaattagccgacgccccccaatttaaattcaaagagatacgtcatgtaggcccggatgtttgcctgcatttagtgggtgcatga

SEQ ID NO: 482837 - DNA, 471 bp, Shigella sonnei; identical to SEQ ID NO: 471528

SEQ ID NO: 482838 - DNA, 420 bp, Shigella sonnei
gtgaaacctgctgctcgtcgccgcgctcgtgagtgtgccgtccaggcgctctactcctggcagttgtcccagaacgacatcgctgatgttgaataccagttcctggctgaacaggatgtaaaagacgttgacgtcctgtacttccgtgagctgctggccggggtggcgactaataccgcatacctcgacggactgatgaagccatacctgtcccgcctgctggaagaactgggacaggtagaaaaagcagtactgcgcattgcgctgtacgaactgtctaaacgtagcgatgtgccatacaaagtggccattaacgaagcgatcgaactggcgaaatcgttcggcgcagaagacagccataagttcgtcaacggcgtactcgataaagcagcacctgtgattcgccctaacaaaaagtga

SEQ ID NO: 482839 - DNA, 978 bp, Shigella sonnei
atggcatgtggcgagttctccctgattgcccgttattttgaccgtgtaagaagttctcgtcttgatgtcgaactgggcatcggcgacgattgcgcacttctcaatatccccgagaaacagaccctggcgatcagcactgatacgctggtggcgggtaaccatttcctccctgatatcgatcctgctgatctggcttataaagcactggcggtgaacctaagcgatctggcagcgatgggggccgatccggcctggctgacgctggcattaaccttaccggacgtagacgaagcgtggcttgagtccttcagcgacagtttgtttgatcttctcaattattacgatatgcaactcattggcggcgataccacgcgtgggccattatcaatgacgttgggtatccacggctttgttccgatgggacgagccttaacgcgctctggggcgaaaccgggtgactggatctatgtgaccggtacaccgggcgatagcgccgccgggctggcgattttgcaaaaccgtttgcaggttgccgatgctaaagatgctgactacttgatcaaacgtcatctccgtccatcgccgcgtattttacaggggcaggcactgcgcgatctggcaaattcagctatcgatctctctgacggtctgatttccgatctcgggcatatcgtgaaagccagcgactgcggcgcacgtattgacctggcattgctgccgttttctgatgcgctttctcgccatgttgaaccggaacaggcgctgcgctgggcgctctctggcggtgaagattacgagttgtgtttcacggtgccggaactgaaccgtggcgcgctggatgttgctctcggacaccttggcgtaccgtttacctgtatcgggcaaatgaccgccgatatcgaagggctttgttttattcgtgacggcgaacctgtcacgtttgactggaaaggatatgaccattttgccacgccataa

SEQ ID NO: 482840 - DNA, 519 bp, Shigella sonnei
atgaccattttgccacgccataaagatgtcgcgaaaagtcgcctgaagatgagtaatccgtggcatctgcttgctgtcggattcggaagtggattaagcccaatcgttcctggcacgatgggatcgctggcagcgattccgttctggtatctgatgacctttttaccctggcagctctactcgctggtggtgatgttggggatctgtatcggcgtctatctttgtcatcaaacggcgaaagatatgggcgtgcacgatcacggcagcattgtctgggacgaatttattggtatgtggatcacgctcatggcgctgccgaccaatgactggcagtgggttgccgccgggtttgtgattttccgtattctggatatgtggaagccgtggccgatccgctggtttgatcgcaatgtacatggcggcatggggatcatgatcgacgatattgtcgccggggtgatttccgcaggcatcctgtactttatcggtcatcactggccgctgggtattctgtcgtag

SEQ ID NO: 482841 - DNA, 975 bp, Shigella sonnei
atgcaatacaaccccttaggaaaaaccgaccttcgcgtttcccgactttgcctcggctgtatgacctttggcgagccagatcgtggtaatcacgcatggacactaccggaagagagtagccgtcccatcattaaacgcgcgctggaaggcggcataaatttctttgataccgccaatagctattccgatggcagcagcgaagagatcgttggtcgcgcactgcgggatttcgcccgtcgtgaagacgtggtcgttgcgacgaaagtgttccatcgcgttggtgatttaccggaaggattatcccgtgcacaaattttgcgctctatcaacgacagcctgcgccgtctcggcatggattatgtcgatatcctgcaaattcatcgctgggattacaacacgccgatcgaagagacgctggaagccctgaacgacgtggtaaaagccgggaaagcgcgttatatcggcgcgtcatccatgcacgcttcgcagtttgctcaggccctgaagctacaaaaacagcacggctgggcgcagtttatcagtatgcaggatcactacaatctgatttatcgcgaagaagagcgcgagatgctgcctctgtgttatcaggagggcgtggcggtgattccgtggagcccgctggcgcgggggcgactgacgcgtccgtggggagaaactaccgcacgactggtgtctgatgaggtggggaaaaatctctataaagaaagcgatgaaaatgacgcgcagatcgcagagcggttaacgggcgtcagtgaagaactcggtgcaacacgagcacaagttgcgctggcctggttattgagtaaaccgggcattgccgcaccgattatcggtacatcgcgggaagaacagcttgatgagctgctgaacgcggtggatatcactttgaagccagaacagattgccgaactggaaacgccgtataaaccgcatgcggtcgtaggatttaaataa

SEQ ID NO: 482842 - DNA, 1863 bp, Shigella sonnei
atgagttttgatattgccaaatacccgaccctggcactggtcgactccacccaggagttacgactgttgccgaaagagagtttaccgaaactctgcgacgaactgcgccgctatttactcgacagcgtgagccgttccagcgggcacttcgcctccgggctgggcacggtcgaactgaccgtggcgctgcactatgtctacaacaccccgtttgaccaattgatttgggatgtggggcatcaggcttatccgcataaaattttgaccggacgccgcgacaaaatcggcaccatccgtcagaaaggcggtctgcatccgttcccgtggcgcggcgaaagcgaatatgacgtattaagcgtcgggcattcatcaacctccatcagtgccggaattggtattgcggttactgccgagaaagaaggcaaaaatcgccgcaccgtctgtgtcattggcgatggcgcgattaccgctggcatggcgtttgaagcgatgaatcacgcgggcgatatccgtcctgatatgctggtggtcctcaacgacaatgaaatgtcgatttccgaaaatgtcggcgcgctcaataaccatctggcacagctgctttccggtaagctttactcttcgctgcgcgaaggcgggaaaaaagttttctctggcgttccgccaattaaagagctgctcaaacgtaccgaagaacatattaaaggcatggtagtgcctggcacgttgtttgaagagctgggctttaactacatcggcccggttgacggtcacgatgtgctggggcttatcaccacgctgaagaacatgcgcgacctgaaaggcccgcagttcctgcatatcatgaccaaaaaaggtcgtggttatgaaccggcagaaaaagaccccatcactttccacgccgtgcctaaatttgatccctccagcggttgtttgccgaaaagtagcggcggtttgccgagctattcaaaaatctttggcgactggttgtgcgaaacggcagcgaaagacaacaagctgatggcgattactccggcgatgcgtgaaggttccggcatggtcgagttttcacgtaaattcccggatcgttacttcgacgtggcaatcgccgagcaacacgcggtgacctttgccgccggtctggcgattggtgggtacaaacccattgtcgcgatttactccactttcctgcaacgcgcctatgatcaggtgctgcatgacgtggcgattcaaaagctcccggtcctgttcgccatcgaccgcgcgggcattgttggtgctgacggtcaaacccatcagggcgcttttgacctctcttacctgcgctgcataccggaaatggtcattatgaccccgagcgatgaaaacgaatgtcgccagatgctctataccggctatcactataacgacggcccgtccgcggtgcgctacccgcgcggtaacgcggttggcgtggaactgacgccgctggaaaaactgccaattggcaaaggcattgtgaagcgtcgtggcgagaaactggcgatccttaactttggtacgctgatgccagacgcggcgaaagtcgctgaatcgctgaacgctacgctggtcgatatgcgttttgtgaaaccgcttgatgaagcgttaattctggaaatggccgccagccatgaagcgctggtcaccgtagaagaaaacgccattatgggcggcgcaggcagcggcgtgaacgaagtgctaatggcccatcgtaaaccagtacccgtgctgaacattggcctgcctgacttctttattccacaaggaactcaggaagaaatgcgcgccgaactcggcctcgatgccgccggtatggaagccaaaatcaaggcctggctggcataa

SEQ ID NO: 482843 - DNA, 900 bp, Shigella sonnei
atggactttccgcagcaacttgaagcctgcgttaagcaggccaaccaggcgctgagccgttttatcgccccactgccctttcagaacactcccgtggtcgaaaccatgcagtatggcgcattattaggtggtaagcgcctgcgaccttttctggtttatgccaccggtcatatgttcggcgttagcacaaacacgctggacgcacccgctgccgccgttgagtgtatccacgcttactcattaattcatgatgatttaccggcgatggatgatgacgatctgcgtcgcggtttgccgacctgccatgtgaagtttggcgaagcaaacgcgattctcgctggcgacgctttacaaacgctggcgttctcgattttaagcgatgccgatatgccggaagtgtcggaccgcgacagaatttcgatgatttcagaactggcaagcgccagcggtattgccggaatgtgcggtggtcaggcattagatttagatgcggaaggcaaacacgtacctctggacgcactcgagcgtattcatcgtcataaaaccggcgcattgattcgcgccgccgttcgccttggtgcattaagcgccggagataaagggcgtcgtgctctgccagtactcgacaagtacgcagagagcatcggccttgccttccaggttcaggatgacatcctggatgtggtgggagatactgcaacgttgggaaaacgccagggtgccgaccagcaacttggtaaaagtacctaccctgcacttctgggtcttgagcaagcccggaagaaagcccgggatctgatcgacgatgcccgccagtcgctgaaacaactggctgaacaatcactcgatacctcggcactggaagcgctagcggactacatcatccagcgtaataaataa

SEQ ID NO: 482844 - DNA, 243 bp, Shigella sonnei
atgccgaagaaaaatgaggcgcccgccagctttgaaaaggcgctgagcgagctggaacagattgtaacccgtctggaaagtggcgacctgccgctggaagaggcgctgaacgagttcgaacgcggcgtgcagctggcacgtcaggggcaggccaaattacaacaagccgaacagcgcgtacaaattctgctgtctgacaatgaagacacctctctacccccttttacaccggacaatgagtaa

SEQ ID NO: 482845 - DNA, 1449 bp, Shigella sonnei
atgaagtttatcattaaattgttcccggaaatcaccatcaaaagccaatctgtgcgcttgcgctttataaaaatccttaccgggaacattcgtaacgttttaaagcactatgatgagacgctcgctgtcgtccgccactgggataacatcgaagttcgcgcaaaagatgaaaaacagcgtctggctattcgcgacgccctgacccgtattccgggtatccaccatattctcgaagtcgaagacgtgccgtttaccgacatgcacgatattttcgagaaagcgttggttcaatatcgcgatcagctggaaggcaaaaccttctgcgtacgcgtgaagcgccgtggcaaacatgattttagctcgattgatgtggaacgttacgtcggcggcggtttaaatcagcatattgaatccgcgcgcgtgaagctgactaacccggatgtaactgtccatctggaagtggaagacgatcgtcttctgctgattaaaggccgctacgaaggtattggcggtttcccgattggcacccaggaagatgtgctgtcgctcatttccggtggtttcgactccggtgtttccagttatatgttgatgcgtcgcggctgccgcgtgcattactgcttctttaacctcggcggcgcagcgcatgaaattggcgtgcgtcaggtggcgcattatctgtggaaccgctttggcagctcccaccgcgtgcgttttgtcgccattaatttcgaaccggtcgtcggggaaattctcgagaaaatcgacgacggtcagatgggcgttatcctcaaacgtatgatggtgcgtgccgcgtctaaagtggctgaacgttacggcgtacaggcgctggtcaccggcgaagcgctcggccaggtgtccagtcagacgctgaccaacctgcgcctgattgataacgtctctgatacgctgatcctgcgtccgctgatttcttacgacaaagagcacatcatcaacctggcccgccagattggcactgaagactttgctcgcacgatgccagaatattgtggcgtgatctccaaaagcccgacggtgaaagcggttaaatcgaagattgaagcggaagaagagaagttcgacttcagtattctcgataaagtggttgaggaagcgaataacgttgatatccgcgaaatcgcccagcagaccgagcaggaagtggtggaagtggaaaccgtcaatggctttggcccgaacgacgtgatcctcgatatccgttctgtcgatgagcaggaagataagccgctgaaggttgaaggtatcgacgtggtttctctgccgttctataaactgagcaccaaatttggcgatctcgaccagaacagaacctggctactgtggtgtgagcgcggggtgatgagccgtctgcaggcgctctatctgcgcgagcagggctttaacaatgtgaaggtgtatcgcccataa

SEQ ID NO: 482846 - DNA, 591 bp, Shigella sonnei
atgagcgcatcggcactggtttgcctcgcccctggtagtgaagagactgaagccgtcaccactatcgatctgctggttcgcggcggtatcaaagtcaccactgccagcgtcgccagcgatggcaacctggccattacctgctcgcgcggcgtgaagctgctggcggatgcgccgctggtcgaggtggctgatggcgaatatgacgtgatcgtactgcctggtggcattaaaggcgcagagtgttttcgcgatagtaccctgctggttgaaaccgttaaacagttccaccgttccgggcgtatcgtcgcggctatttgcgccgcgccagccaccgtgctggtaccgcacgatatcttcccgattggcaatatgaccggcttcccgacgctgaaagacaaaattcccgccgaacaatggcaggacaagcgcgtcgtctgggatgcacgggtaaaattgctgaccagccaggggccgggtacggctattgattttggtctgaaaattatcgacctgctggttgggcgcgagaaagcccatgaagtggcatcacaactggtgatggcggcagggatttataattattacgagtag

SEQ ID NO: 482847 - DNA, 912 bp, Shigella sonnei
atgaaaattaccgtattgggatgcggtgccttagggcaattatggcttacagcactttgtaaacagggtcacgaagttcagggctggctgcgcgtaccgcaaccttattgtagtgtgaatctggttgagactgatggttcgatatttaacgaatcgctgaccgccaacgatcccgattttcttgccaccagcgatctgctcctggtgacgctgaaagcatggcaggtttccgatgccgtcaaaagcctcgcgtccacactgcctgtaaccacgccaatactgttaattcacaacggcatgggcaccatcgaagagttgcaaaacattcagcagccattactgatgggcaccaccacccatgccgcccgccgcgacggcaatgtcattattcatgtggcaaacggaatcacgcatattggtccggcacggcaacaggacggcgattacagctatctggcggatattttgcaaaccgtgttgcctgacgttgcctggcataacaatattcgcgccgagctgtggcgcaagctggccgtcaactgtgtgattaatccactgaccgccatctggaattgcccgaatggtgaattacgtcatcatccgcaagaaattatgcagatatgcgaagaagtcgcggcagtgatcgagcgcgaagggcatcatacttcagcagaagatttgcgtgattacgtgatgcaggtgattgatgccacagcggaaaatatctcgtcgatgttgcaggatatccgcgcgctgcgccacaccgaaatcgactatatcaatggttttctcttacgccgcgcccgcgcgcatgggattgccgtaccggaaaacacccgcctgtttgaaatggtaaaaagaaaggagagtgaatatgagcgcatcggcactggtttgcctcgcccctggtag

SEQ ID NO: 482848 - DNA, 492 bp, Shigella sonnei
atgccatctttcgatattgtctctgaagttgatcttcaggaagcacgtaacgcggtcgataacgcgagccgcgaagtggagtcccgttttgacttccgtaatgttgaagcctcatttgagctgaacgacgccagcaaaaccatcaaagtgttgagcgagtccgatttccaggtcaatcagttgctggatattctgcgtgccaagctgctgaagcgcggcattgaaggcagttcactggatgtaccggaaaatatcgttcatagcggtaaaacctggtttgtggaagcgaaactgaaacagggcattgagagcgcgacccagaagaaaatcgtcaagatgattaaagacagcaaactgaaagtgcaggcgcaaattcagggcgatgagatccgtgtgactggcaaatctcgtgatgatttgcaggctgtcatggcgatggtacgtggtggcgatctcggccagccgttccagttcaaaaacttccgcgattaa

SEQ ID NO: 482849 - DNA, 1365 bp, Shigella sonnei
atgaacgattataaaatgacgccaggtgagaggcgcgcgacctggggtttagggaccgtattctcgttgcgcatgctgggcatgtttatggttctgccggttctgaccacgtacggcatggctctgcaaggtgccagcgaagcattaatcggtattgccattggtatttatggtctgactcaggccgtttttcagattccgtttggcctgctttccgaccgcattggtcgcaaaccattaattgtcggtgggctggcggtgtttgccgccggtagcgttatcgctgcgctttccgactccatctggggaattattctgggccgggcgctacaaggctctggagcaattgccgccgccgttatggcgctgctttccgatctcacgcgcgaacaaaaccgcaccaaagcgatggcgtttatcggcgtgagctttggcattacctttgccattgcgatggtgcttggcccgatcatcactcacaaacttgggctgcacgcgctgttctggatgatcgctattctggcaacaaccggcattgcgttgaccatttgggttgtgcccaacagtagcactcacgtacttaatcgtgagtccggaatggtgaaaggcagtttcagtaaagtgctggcggaaccgcggctgctgaaactcaactttggcattatgtgtctgcacatgcttctgatgtctacgtttgttgccctgcccggacagctagctgatgcggggttcccggcggctgaacactggaaggtctatctggcgacgatgttaatcgcctttggctcgatcgtgcctttcattatctacgctgaagttaagcgcaaaatgaagcaagtctttgtcttctgcgtcgggttgatcgtggttgcggaaattgtgttgtggaacgcacaaacgcagttctggcaactggtggtcggcgtgcagcttttctttgtggcgtttaatttgatggaagcccttctgccctcacttatcagtaaagagtcgccagcaggttacaaaggtacggcgatgggtgtctactccaccagccagtttcttggcgtggcgattggcggttcgctgggcggctggattgacggcatgtttgacggtcagggggtatttctcgctggcgcaatgctggccgcagtgtggctggcagtcgccagtaccatgaaagaaccgccgtatgtcagcagtttgcgcattgaaatcccggcggacattgccgcaaacgaagcgttaaaagtgcgtttgctggaaactgaaggcgtcaaagaagtgttgattgcagaagaagagcattcagcttatgtgaaaatcgacagcaaagtgacaaatcgctttgaggttgaacaggcaattcgtcaggcataa

SEQ ID NO: 482850 - DNA, 1203 bp, Shigella sonnei
atggaccgcgtccttcattttgtactggcacttgccgttgttgcgattctcgcactgctggtaagcagcgaccgcaaaaaaattcgtatccgttatgttattcaactgcttgttatcgaagtgttactggcgtggttcttcctgaactccgacgttggtttaggcttcgtgaaaggcttctccgaaatgttcgaaaaactgctcagatttgccaacgaagggactaacttcgtctttggtagcatgaatgatcaaggcctggcattcttcttcctgaaagtgctgtgcccaatcgtctttatctctgcactgatcggtattctccagcacattcgcgtgttgccggtgattatccgcgcaattggtttcctgctctccaaagtcaacggtatgggcaaactggaatcctttaacgccgtcagctccctgattctgggtcagtctgaaaactttattgcctataaagatatcctcggcaaaatctcccgtaatcgtatgtacaccatggctgccacggcaatgtccaccgtgtcgatgtccatcgttggtgcatacatgaccatgctggaaccgaaatacgtcgttgctgcgctggtactgaacatgttcagcacctttatcgtgctgtcgctgatcaatccttaccgtgttgatgccagtgaagaaaacatccagatgtccaacctgcacgaaggtcagagcttcttcgaaatgctgggtgaatacattctggcaggtttcaaagttgccattatcgttgccgcgatgctgatcggctttatcgccctgatcgccgcgctgaacgcactgtttgccaccgttactggctggtttggctacagcatctccttccagggcatcctgggctacatcttctatccgattgcatgggtgatgggtgttccttccagtgaagcactgcaagtgggcagtatcatggcgaccaaactggtttccaacgagttcgttgcgatgatggatctgcagaaaattgcttccacgctctctccgcgtgctgaaggcatcatctctgtgttcctggtttccttcgctaacttctcttcaatcgggattatcgcaggtgcagttaaaggcctgaatgaagagcaaggtaacgtggtttctcgcttcggtctgaaactggtttacggctctaccctggtgagtgtgctgtctgcgtcaatcgcagcactggtgctgtaa

SEQ ID NO: 482851 - DNA, 1239 bp, Shigella sonnei
atgacgaactatcgcgttgagagtagcagcggacgggcggcgcgcaagatgaggctcgcattaatgggacctgcgttcattgcggcgattggttatatcgatcccggtaactttgcgaccaatattcaggcgggtgccagcttcggctatcagctactgtgggttgtcgtttgggccaacctgatggcgatgctgattcagatcctctctgccaaactagggattgccaccggaaaaaatctggcggagcagattcgtgatcactatccgcgtcccgtagtgtggttctattgggttcaggcagaaattattgcgatggcaaccgacctggcggaatttattggtgcggcgatcggttttaaactcattcttggtgtctcgttgttgcagggcgcggtgctgacggggatcgcgactttcctgattttaatgctgcaacgtcgcgggcaaaaaccactggagaaagtgattggcgggttactgttgtttgttgccgcggcttacattgtcgagttgattttctcccagcctaacctggcgcagctgggtaaaggaatggtgatcccgagtttacctacttcggaggcggtcttcctggcagcaggcgtgttaggggcgacgattatgccgcatgtgatttatttgcactcttcgctcactcagcatttacatggcggttcgcgtcaacaacgttattccgccaccaaatgggatgtggctatcgccatgacgattgccggttttgtcaatctggcgatgatggctacagctgcggcggcgttccacttttctggtcatactggtgttgccgatcttgatgaggcttatctgacgctgcaaccgctgttaagccatgctgcggcaacggtctttgggttaagtctggttgctgccggactgtcctcaacggtggtggggacactggcggggcaggtggtgatgcagggattcattcgcttccatatcccgctgtgggtgcgtcgtacagtcaccatgttgccgtcatttattgtcattctgatgggattagatccgacacggattctggttatgagtcaggtgctgttaagttttggtatcgccctggcgctggttccactgctgattttcaccagtgacagcaagttgatgggcgatctggtgaacagcaaacgcgtaaaacagacaggctgggtgattgtagtgctggtcgtggcgctgaatatctggttgttggtggggacggcgctgggattgtag

SEQ ID NO: 482852 - DNA, 327 bp, Shigella sonnei; identical to SEQ ID NO: 471588

SEQ ID NO: 482853 - DNA, 1257 bp, Shigella sonnei
atgctccatccgcgagccagaaccatgttgttattatcgctccccgccgtggcaattgggattgcgtccagtcttattctgattgtggtgatgaaaatcgcctcggtattacagaatttgctctggcaacgactgccgggaactctggggatagcccaggattcacctatctggatcatcggtgtattaacgctaacgggtattgcggtggggttggttatccgtttcagccagggtcatgccggaccagaccccgcctgtgaaccgctgatcggcgcaccagttccgccctctgcgctaccaggacttatcgtagcattaattctcggtcttgctggcggcgtcagcctggggccggaacatccgatcatgaccgtcaatatcgcccttgccgtcgccattggcgctcgtctgttaccgcgcgtcaaccgaatggagtggactattttagcctctgccggaaccatcggcgcgctgtttggtacacctgttgcggcggcgttgatattttcgcaaaccttaaatggcagtagtgaagttccgctatgggatcgtctttttgcgccgttaatggcggcagcagctggtgcacttactaccggattatttttccatccccatttttcactgcccattgcgcattacggacagatggaaatgaccgatattctcagcggtgcaattgtcgcggcgattgccatcgcagcagggatggtcgccgtatggtgcttaccacggttgcacgcgatgatgaatcaaatgaaaaatccggtgctcgtgctgggtattggcggatttattctcggaattctgggggttattggtggaccagtttcgctgtttaaagggctggatgagatgcagcagatggtggcaaatcaggctttcagcaccagcgattactttttgctggcggtaattaaacttgccgccctggtcgttgctgccgccagtggctttcgcggtgggcgaatcttcccggcagtgtttgtcggcgtggcattagggttgatgctgcatgagcacgttcccgccgttccagcggcaataaccgtttcctgcgctattctcggcatcgtgctggtggtaacacgcgatggctggttaagtctttttatggcggcagtcgttgtacccaataccacattgctaccgctgctctgtatcgtcatgcttccggcatggctgttattagcaggtaagccgatgatgatggtcaatcgtccgaagcaacagccaccccacgataatgtttag

SEQ ID NO: 482854 - DNA, 966 bp, Shigella sonnei
atgacaaagtatgcattagtcggtgatgtgggcggcaccaacgcacgtcttgctctgtgtgatattgccagtggtgaaatctcgcaggctaagacctattcagggcttgattaccccagcctcgaagcggtcattcgcgtttatcttgaagaacataaggtcgaggtgaaagacggctgtattgccatcgcttgcccaattaccggtgactgggtggcaatgaccaaccatacctgggcgttctcaattgccgaaatgaaaaagaatctcggttttagccatctggaaattattaacgattttaccgctgtatcgatggcgatcccgatgctgaaaaaagagcatctgattcagtttggtggcgcagaaccggtcgaaggtaaacctattgcggtttacggtgccggaacagggcttggggttgcgcatctggtccatgtcgataagcgttgggtaagcttgccgggcgaaggcggtcacgttgattttgcgccgaatagtgaagaagaggccattatcctcgaaatattgcgtgcggaaattggtcatgtttcggcggaacgcgtgctttctggtcctgggctggtgaatttgtatcgcgcaattgttaaagccgacaaccgcctgccagaaaatctcaagccaaaagatattaccgaacgcgcgctggctgacagctgcaccgattgccgccgtgcgttgtcgctgttttgcgtcattatgggccgttttggcggcaatctggcattaacgctgggaacctttggtggggtttatattgctggcggtatcgtgccgcgcttccttgagttcttcaaagcctctggtttccgtgccgcatttgaagataaagggcgctttaaagaatatgtccatgatattccggtgtatctcatcgtccatgacaatccgggtcttctcggttccggtgcacatttacgccagaccttagggcacattctgtaa

SEQ ID NO: 482855 - DNA, 327 bp, Shigella sonnei
atgagtaagaaactaattgccttatgtgcctgcccaatgggcctggctcacacctttatggccgctcaggcgctggaagaagcggcggtagaagcaggttatgaagtgaaaattgaaacccagggcgcggacggtatccagaatcgcctgacggcgcaggatatcgccgaagcaaccatcatcatccactccgtggcagttaccccggaagataatgagcgtttcgaatcacgcgacgtttatgaaatcactttgcaggacgcaattaaaaacgctgcgggcatcatcaaagaaatcgaagagatgattgcctctgaacaacagtaa

SEQ ID NO: 482856 - DNA, 1248 bp, Shigella sonnei
atggccattaaaaaacgcagtgcaaccgttgtgcctggcgcatccggtgcggcagcggcagttaagaatccgcaggcctctaaaagcagcttctggggtgaactcccgcagcatgtgatgtcagggatttcacgcatggtgccgaccttaattatgggcggtgtgatcctcgctttcagccagctgattgcttatagctggcttaaaattcctgctgagatcggcatcatggatgctcttaatagcgggaaattctccggtttcgacctctccttactgaaatttgcctggctgtcgcagtccttcggcggcgtgttgtttggttttgccattccgatgtttgctgcttttgtggcgaactctatcggtggcaaactggcgttcccggctggttttatcggcggcttgatgtctacccagccgacgcaactgctgaacttcgatcccagcactatgcaatgggcgacctcttcgccggtgccgtccaccttcattggtgcgctgattatttctatcgtcgcgggttaccttgtgaagtggatgaaccagaaaatccagttaccggatttcctgttagcgttcaaaaccacatttttgctaccgattctttccgccatttttgtcatgctggcgatgtactacgtcattaccccctttggcggctggatcaacggcggtatccgtaccgtgctgactgccgcaggtgagaagggcgcgctgatgtacgcaatggggatcgccgcggcgaccgcaatcgaccttggtggcccgatcaacaaagccgcaggttttgttgccttcagctttaccactgaccacgtattaccggtcactgcacgttctatcgctatcgttattccgccgataggtctgggtctggcgaccattatcgaccgtcgtttaaccggcaaacgcctgttcaacgctcaactttatccgcagggtaagaccgcgatgttccttgcctttatggggattagtgagggtgcgattccgtttgcgctggaaagctccatcaccgccattccgtcgtatatggtcggcgcgattgtcggctcaaccgccgctgtctggctgggcgcagtgcaatggttcccggaatccgctatctgggcatggccgctggtcactaacctgggcgtctatatggcggggatcgcgctgggggcagtcataactgcgctgatggtggtgttcctgcgtctgatgatgttccgtaaaggtaaattgttaatcgatagcctgtaa

SEQ ID NO: 482857 - DNA, 801 bp, Shigella sonnei
atgacattactcgcttcgctgcgcgactggcttaaggcgcaacaactggatgcagtgcttctctcctcacggcagaacaaacagccgcatctggggatctccaccggatcaggctatgtggttattagccgtgaaagtgcgcacattctggtagattcgcgctatttcgttgaggtggaagcccgtgcgcaaggctaccagctgcatttgcttgacgcgacgaacacgcttaccactatcgtcaatcaaatcattgccgatgagcagttgcaaacgctcggttttgaaggccagcaggtgagttgggaaaccgcgcaccgctggaagtctgaactcaatgcgaaactggttagcgccacgccggatgtgctgcggcaaatcaaaacgccagaggaggtggagataatccgcctcgcctgtgggattgccgatcgcggagcggagcatattcgccgctttattcaggcggggatgagcgagcgcgagatagccgctgaactggagtggtttatgcgccagcagggcgcagaaaaagcctcttttgacaccattgtcgccagcggctggcgtggggcgctgccgcacggcaaagccagcgacaagattgttgcagcaggcgagtttgtcactcttgattttggtgcgctctatcaggggtactgctctgatatgacgcgcaccttgctggtgaatggcgaaggggtaattgccgaatctcacccgctgtttaacgtctatcagattgtcctgcaagcacagctggcggcaatctccgcgattcgccctggcgtacgctgctaa

SEQ ID NO: 482858 - DNA, 261 bp, Shigella sonnei
gtgattaccgaggcaggatttggcgactattttggtcacaacaccggtcatgctatcggtattgaagtacacgaagatccacgcttttcaccgcgggataccacgacgctacagccaggcatgttactgaccgtggagccggggatttatttgccagggcaagggggcgtgcgcatcgaagatgttgtgctggttaccccgcaaggcgcagaagtgctctacgccatgccgaaaacagtgttgctcacgggagaggcataa

SEQ ID NO: 482859 - DNA, 1038 bp, Shigella sonnei
atggatttatcgctattaaaagcgttgagcgaggcagatgcgatcgcctcctcggaacaggaagtgcggcagatcctactggaagaagcggatcgcctgcaaaaagaagtacgatttgatggtctgggatcggtgctgatccgcctcaatgaatcgacaggtccgaaggtgatgatctgtgcgcatatggacgaagtgggatttatggtgcgcagcatctcccgcgaaggggcaattgatgtgctgccggttggcaacgtgcgcatggctgcccgccagctgcagccggtgcgcatcaccacccgtgaagagtgcaaaattccaggcctgcttgacggcgaccggcaggggaatgacgtcagcgccatgcgcgtggacattggtgcgcgctcgtatgacgaagtgatgcaggcgggaattcgtccaggcgatcgcgtcacctttgatacagcttttcaggttctccctcaccagcgggtgatggggaaagcctttgatgaccgcctcggttgctatctgctggtgacgttactacgtgagctgcacgacgccgaactgcctgcggaagtgtggctggtggcaagttccagcgaagaggtgggattacgcggcgggcaaactgctacccgcgcggtgtcgccggacgtcgccattgtgcttgataccgcctgctgggcgaaaaactttgattatggcgcggctaaccatcgtcagattggtaacgggccgatgctggtgttaagcgataaatcgctgattgcgccgccaaaacttaccgcgtggattgaaaccgtgtcggcagaaattggcgttccgttgcaggcggatatgttcagtaacggcggcacggacggtggagcggtgcacttaaccgatactggcgtacccacagtggtaatggggcctgccacccgccacggacattgcgcggcatcgattgccgattgccgcgacattttgcagatggagcaacttttatctgcccttattcaacgtcttacgcgtgagacggttgttcaactgacggatttcagatga

SEQ ID NO: 482860 - DNA, 750 bp, Shigella sonnei
atgttaacgattcaatttctctgtcctttgcctaacggtctacatgctcgtccggcgtgggaacttaaagaacagtgcagccagtggcaaagcgaaatcacctttatcaaccatcgccagaacgcaaaggccgatgctaaaagctcgctggcgttgattggaactggcaccttatttaatgacagttgcagcctgaacattagcggcagcgatgaagagcaggcgcggcgcgtgctggaagagtacatcctggtgcgctttatcgacagcgacagcgttcagccgacgcaggcagaactgacggcgcatccgctgccgcgttcattaagccgccttaacccggatttactgtacggcaatgtgctggcaagcggcgtcggcgtgggtacgctgaccctgttacaaagcgacagcctcgacagttatcgggcaatccccgccagtgcgcaagattccacccggctggagcacagcctggcaacgcttgccgagcaactgaaccagcaattgcgtgagcgtgacggcgaaagcaaaactatcctcagcgctcatttgtcgctgattcaggatgatgaatttgcaggcaatatccgtcgcctgatgacagaacagcatcagggactgggggcggcgatcatcagcaatatggagcaggtttgcgccaaactatctgcttctgccagcgattatctgcgcgagcgggtcagcgacattcgcgatatcagcgaacagttgctgcatatcacctag

SEQ ID NO: 482861 - DNA, 1719 bp, Shigella sonnei
gtgctggaaaaaccgaccattctggtggctgaagatttaaccccaagccagtttttgagccttgatttgaaaaatcttgcgggcatgattctggagaaaaccgggcgcacctcgcatacactgattctggcccgtgcctcggcgatcccggtactgagtggcttgccgctggatgcgattgcccgttatgccgggcaacctgcagtgcttgacgcccagtgcggcgtgctggcgattaacccgaatgacgcggtgagcggttattatcaggtcgcgcagacgctggcggataaacgccaaaaacaacaggcgcaggctgccgcgcagctggcctattcccgtgataacaagcgtattgatattgcggcgaatatcggcaccgctctggaagcgccaggcgcgtttgccaacggcgcggaaggtgtcgggctgttccgtaccgaaatgctctatatggatcgcgacagcgcgccggacgagcaggagcaatttgaagcctaccagcaggtgctactggcggcgggcgacaagccgattatcttccgcacgatggacatcggcggcgataaaagcattccttatctgaatattccccaggaagagaacccgttcctcggctatcgcgcggtacgtatttacccggaatttgctggcctgttccgcactcaactgcgggccattttgcgcgccgccagtttcggcaacgcccagttgatgatcccgatggttaacagcctcgatcagatcttatgggtgaaaggcgagatccaaaaagcgatcgttgagcttaagcgcgatggcctgcgtcatgcagagacgattacgcttgggatcatggtggaagtgccgtcggtgtgctacatcatcgaccacttctgcgatgaggtcgatttcttcagtatcggctccaacgatatgacccagtatctgtatgcggtcgatcgtaataacccgcgcgtatcgccgctatataacccgattacgccatcgttcctgcgcatgttgcagcaaatagttaccactgcgcatcagcggggcaaatgggtaggcatttgcggtgaactgggcggtgaaagccgttatctgccgctactgcttgggctgggcctggatgagctgagtatgagtagcccgcgtattccggcggtgaaaagccagcttcgtcaactggatagcgaggcgtgtcgggaactggcgcgtcaggcatgtgaatgccgcagtgcgcaggaaattgaagcgttactcaccgcctttacgccggaagaagacgttcgcccactgctggcgctggagaatatctttgttgatcaggattttagcaataaagagcaggcgatccagttcctgtgcggcaacctcggcgttaacgggcgcactgaacatccgtttgagctggaagaagatgtctggcagcgggaagagattgttaccaccggcgttggttttggcgtagcgatcccgcacaccaaatctcagtggatccgtcattccagtatcagcattgcccggctggcgaaaccggttgactggcagtcagaaatgggcgaagttgaactggtgatcatgctgacgctgggtgctaacgaagggatgaatcatgtgaaagtcttctcgcagctggcgcgtaaactggtgaataaaaacttccgccagtcgttgtttgccgcgcaagatgcacaaagtatcctgacgctgctggaaacagaattaaccttctga

SEQ ID NO: 482862 - DNA, 858 bp, Shigella sonnei
atgaaagcaccaggcttgcccgccgatcaacaatttttcgccgatctgttcagcggcctggtgcttaacccgcaactactggggcgcgtctggtttgccagccagcctgcctcgttaccggtgggcagtttatgtattgattttccccgtctggatatcgtgctgcgcggcgaatacggcaacctgctggaagcaaagcagcagcgaatggtggaaggagaaatgctgtttattccggcacgcgcggctaatttaccgatcaacaacaaaccggtgatgctgttaagcctggtgttcgcaccgacctggcttgggttatcgttttacgatagccgcaccacgtcgttgttgcatcctgctcgccagatccagcttcccagcctgcaacgcggtgaaggtgaagcgatgcttaccgccctcacccatcttagccgttcgccgctggagcagaatatcattcagccactggtgttaagtttgctgcatctttgccgcaacgtggtgaatatgccgccgggtaattcgcaaccgcgcggcgattttctctatcacagcatttgtaactgggttcaggataattatgcccagccgctcacccgcgagagcgtggcgcagttttttaatatcacgcccaatcatctgtcaaaactgtttgctcagcatggaacgatgcgttttatcgagtatgtgcgttgggtgcgaatggcgaaggcgaggatgattttgcagaaatatcatctgtcaattcatgaagtggcacagcgttgcggttttccggatagcgactatttttgtcgcgttttccggcgtcagtttggtctgacgccgggagagtacagcgcccgttttcagggctaa

SEQ ID NO: 482863 - DNA, 735 bp, Shigella sonnei; identical to SEQ ID NO: 458242

SEQ ID NO: 482864 - DNA, 1698 bp, Shigella sonnei
gtgcacgaaatattcaacatgctgctggcggtcttcgatcgggcagcgttaatgcttatctgcctgttctttctcatccgtatccgcctgtttcgcgaactgttgcacaagtcggcgcactccccaaaagaattgctcgccgttaccgccattttctcgctgttcgccctgttcagcacctggtccggcgttcccgtagaaggctcgctggtgaacgtacgtattatcgcggtgatgtccgacgggattctgtttggcccgtgggtaggcatcattaccggcgtgattgcgggtattcaccggtatttaattgatatcggcggcgtgacggcgatcccctgctttatcaccagcattctggcgggttgtatatcaggctggataaacctgaaaatccccaaagcacagcgctggcgcgtcagtattctcggcggcatgttgtgtgagacgttgaccatgattctggtaattgtctgggcaccaactaccgcgttggggatcgatatcgtctctaaaatcggcattccaatgatcctcggtagcgtctgtatcggctttattgtgcttctggtgcaaagcgttgagggcgaaaaagaggccagcgccgcgcggcaggccaagctggcgctggatatcgccaacaaaacgctaccgctgtttcgccatgtcaatagcgagtcattacgcaaggtctgcgaaattatccgcgatgacattcacgccgatgcggtggcgattactaataccgatcatgtgctggcctatgttggcgtgggtgaacataactatcagaatggcgatgacttcattagcccgactacccgtcaggcgatgaattacggaaaaatcatcattaaaaacaatgatgaagcccaccgcacaccagagattcattccatgctggtgatcccattgtgggagaaaggggtcgtgaccggaacgctgaaaatttactactgccacgcgcatcagatcacctcgtcattacaggaaatggcggtcggtctgtcgcaaatcatctccacgcaactggaggtttcacgcgccgagcagctacgtgaaatggcaaataaggcagagcttcgcgccctgcaaagcaaaattaatccccattttctgtttaacgctctgaacgctatttcatcgtcaatccgtctgaatccggataccgctcgccagttgatctttaatctgtcgcgttatctgcgctataacattgaattaaaagacgatgagcaaatcgatatcaaaaaagagctgtatcaaattaaagactatattgccattgagcaggcccgctttggtgacaagctgacggttatctatgatattgatgaagaggtgaattgctgcattcccagcctgctgatccagccgttggtggagaacgccattgtccacggtattcagccttgcaaaggtaaaggcgttgtcaccatcagcgttgcagagtgcggaaatcgggtacgcattgcggtgcgagataccgggcacggcatcgatccaaaggtgattgagcgggtcgaagcgaatgaaatgccgggcaataaaattggcctgctgaatgtccatcatcgcgtgaagttattgtatggcgaggggctgcatatccgccgcctggagccggggacggaaattgcgttttacattcctaaccaacgcaccccagtcgcctcacaggctacgttattgctttga

SEQ ID NO: 482865 - DNA, 1239 bp, Shigella sonnei
atggctgacactcgccctgaacgtcgctttacgcgcattgatcgtctcccgccctacgtttttaacatcaccgctgaactgaaaatggctgcgcgtcggcgcggcgaagatattatcgatttcagcatgggtaacccggacggtgcgactccgccgcatatcgtcgaaaaattatgtactgtggcccagcgcccggacacgcatggttactccacttcacgcggcattccgcggttacgtcgcgccatttcccgctggtatcaggatcgctacgacgttgaaatcgacccggaatcagaagccatcgtcactattggttcgaaagagggcctggcgcatctgatgctggcgacgctggatcatggtgacacggtgctggtgccgaatccaagttacccgatccatatttatggcgcggtgattgccggggcgcaggtacgctcagtgccgctggtggaaggtgtcgatttcttcaacgaactggagcgcgccattcgtgaaagttatccgaaaccgaagatgatgatcctcggcttcccgtcgaacccaaccgcgcaatgcgtggaactggagttcttcgaaaaggttgtggcgctggcgaaacgctacgatgtgctggtggtccatgacctggcctatgccgatatcgtctacgatggctggaaagcgccgtcaattatgcaggtgccgggtgcacgcgatgtggcggtcgagttctttacgctgtcgaaaagctacaacatggcgggctggcgtatcggctttatggtcggcaacaaaacgctggtcagtgccctggcgcgaatcaaaagctatcacgattacggcacttttacgccgttgcaggtggcggcgattgcggcactcgagggcgatcaacagtgcgtgcgcgacattaccgaacagtacaaacgccgccgtgatgtattggttaaagggctgcatgaagcgggctggatggtcgaaatgccgaaggcttcgatgtatgtctgggcgaaaatcccggaaccatatgcggccatgggatcgctggaatttgccaagaagctccttaacgaagcgaaggtttgtgtctcgccggggattggctttggcgactatggtgatacgcatgttcgctttgcactgattgaaaaccgcgaccgtattcgtcaggccatcagagggattaaagcgatgttccgtgccgacggtttactacccgccagcagcaaacatattcacgaaaacgcggaataa

SEQ ID NO: 482866 - DNA, 921 bp, Shigella sonnei
atgtttccacaatgcaaattttcccgcgagtttctacatcctcgctactggctcacatggtttgggcttggtgtactctggctttgggtacagcttccttatcctgttctctgctttctcggcacgcgtattggcgcaatggcgcgaccattcctgaaacgtcgtgaatctatcgcccgtaaaaacctggaactttgtttcccgcagcattctgcggaagaacgcgagaagatgattgccgaaaactttcgttcactcggcatggcgctggtagaaaccggcatggcatggttctggcccgacagtcgcgtacgtaaatggtttgatgttgaagggttggataaccctaaacgcgcacaaatgcaaaatcgcggcgtaatggttgtcggcgtccattttatgtcgctggaactgggcggccgcgtgatgggactgtgccaaccaatgatggctacctatcgtccacataataatcagctgatggaatgggtgcagacccgtgggcgcatgcgctctaacaaagcgatgatcggcagaaataatctgcgcggcattgtcggtgcactgaagaaaggtgaagcggtatggtttgctcccgatcaggattatggtcgtaaaggcagctccttcgcgccgttctttgcggtggaaaatgtcgccacaaccaatggcacctatgttctctcccgtctctctggcgcagccatgttgaccgtaacgatggtaagaaaagcggattacagcggatatcgtttgtttatcaccccagagatggaaggctacccgacagatgaaaatcaagccgctgcctatatgaacaagattatcgagaaagagatcatgcgcgcaccggagcagtacctctggatccaccgtcgctttaaaacgcgcccggtgggagaatcgtcgttgtacatttaa

SEQ ID NO: 482867 - DNA, 243 bp, Shigella sonnei; identical to SEQ ID NO: 471602

SEQ ID NO: 482868 - DNA, 276 bp, Shigella sonnei
atgaaagtaaacttaatacttttcagcttatttttattggtctctattatggcatgcaatgtttttgcattttccatttctggtggtgtaagtgagaggagctataaagagactgaaaaaacatcagcgatgacaaccacacactctacaaaacttcagccatcacaggcgattttgtttaagatgagagaagatgcgccaccattaaacctcacagaagaaatcacgcctacttatccgacaaaggcgaattatcttattcatcctgtgcgatag

SEQ ID NO: 482869 - DNA, 624 bp, Shigella sonnei; identical to SEQ ID NO: 471604

SEQ ID NO: 482870 - DNA, 1251 bp, Shigella sonnei
atgtcaactccacttcaaggaattaaagttctcgatttcaccggtgtgcaatctggcccatcttgtactcaaatgctggcctggtttggcgctgacgttattaaaattgaacgtcccggcgttggtgacgtaacgcgtcaccaactgcgagatattcctgatatcgatgcgctttacttcaccatgcttaacagtaacaaacgttctattgagttaaataccaaaacagcggaaggcaaagaggtaatggaaaagctgatccgcgaagctgatatcttagtcgagaactttcatccaggggccattgatcacatgggcttcacctgggagcatattcaagaaatcaatccacgtctgatttttggttcgatcaaagggtttgatgagtgttcgccttatgtgaatgtaaaagcctatgaaaacgttgctcaggcagcgggtggcgcggcatccactacgggtttttgggatggtccgccgctggtaagcgctgcagcgttgggtgacagcaacaccggaatgcatttgctgatcggtttacttgctgctttgctgcatcgcgaaaaaacggggcgtgggcaacgagtcaccatgtcaatgcaggatgccgtattgaacctttgccgcgtgaaattacgtgaccagcagcgtctcgataaattgggttatctggaagaatacccgcagtatccgaatggtacatttggtgatgcagttccccgcggtggtaatgcaggtggtggcggtcagcctggctggatcctgaaatgtaaaggctgggaaaccgatcctaacgcctatatttatttcactattcaggagcaaaactgggaaaacacctgtaaagccatcggcaaaccagaatggattaccgattcggcatacagtacagcccatgcccgacagccacatattttcgatatttttgctgaaatcgaaaaatacactgtcactattgataaacatgaagcggtggcctatttgactcagtttgatattccttgtgcaccggttttaagtatgaaagaaatttcacttgatccctctttgcgccaaagtggcagtgttgttgaagtggaacaaccgttgcgtggaaaatatctgaccgttggttgtccaatgaaattctctgcctttacgccggatattaaagctgcgccgctattaggtgaacataccgctgctgtattgcaggagctgggttatagcgacgatgaaattgctgcaatgaagcaaaaccacgccatctga

SEQ ID NO: 482871 - DNA, 1695 bp, Shigella sonnei
atgtcagatcaacttcaaatgacagatggtatgcatatcatcgttgaagcattaaaacagaataatattgacactatttatggtgttgtaggtattcctgtgacggatatggcacgccatgcccaggcggaaggcattcgttatattggttttcgtcatgagcagtcggcaggctatgccgctgcggcaagcggttttcttacccaaaaaccggggatctgcctgacagtttctgcgccaggattcctcaatggtttgaccgcattggccaacgcaacggtaaatggttttccgatgatcatgattagcggctccagcgaccgcgcgatcgtcgacctacagcaaggtgattatgaagagctggaccaaatgaatgcggcaaaaccgtatgccaaagcagcatttcgcgttaatcagccgcaggatcttggcattgcattggcacgcgctatccgggtctctgtatcgggtcgccctggcggagtttatcttgatttgccagcaaatgtcctggccgcgacgatggaaaaagacgaagcgttaaccacgattgttaaagttgaaaatccgtcgccagcattattgccatgcccgaagtcagtcactagcgcaatttcgcttttagcaaaagctgaacggccattaattatccttggcaaaggcgcggcgtattcacaagctgatgaacagcttcgtgaatttattgaaagtgctcagattccattcctgccaatgtctatggcgaaagggatccttgaagatacgcatccactttctgcggcagctgcgcgttcgtttgccctggcaaatgctgacgttgtcatgcttgttggtgcacgactgaattggttattggcacacggtaaaaaaggatgggcggcagatacacagtttattcaactggatattgaaccgcaggaaattgacagcaaccgccccattgctgtgccagtcgttggtgatattgcatccagtatgcaaggtatgctggcagaactgaaacaaaacacatttacgactccactggtatggcgcgatattttaaatatccacaagcagcaaaatgcacaaaaaatgcatgaaaaattaagtacagatactcaaccattaaattactttaatgcattaagtgctgtgcgcgacgtattgcgcgagaaccaggatatttatttagttaatgaaggtgcaaataccctggataatgcacgaaatattattgatatgtataaaccacgtcgtcgtctggattgtggtacctggggtgtcatgggcatcggtatgggctatgccatcggtgctagcgtgacttctggttctccggttgtcgccattgaaggtgatagtgcttttggtttcagtgggatggaaattgaaacgatttgtcgatataacctgccggtgacgatcgttatttttaataatggcggcatctacagaggagacggtgttgatctcagtggcgctggtgcaccatcaccaacggatctgttgcaccatgcaaggtatgacaaattaatggatgcgtttcgtggcgttggctataacgtcaccacgacagatgaacttcgtcatgctttaaccaccggtattcagtcgcgcaaaccgaccattattaatgtggtcatcgaccctgctgcaggaactgaaagtggccatattaccaaacttaacccaaaacaagtcgctggtaattaa

SEQ ID NO: 482872 - DNA, 945 bp, Shigella sonnei
atgctaacattttttattggcgatttattgcctattatcgtaatcatgctgttgggttattttagcggcagacgagaaactttttcagaagatcaagcccgcgcatttaataaactggtattaaactacgctcttcctgcggctctatttgtttctattacccgggcaaacagggaaatgatttttgcggacactcgtctgacccttgtatcacttgtggttattgtcggatgtttctttttctcttggtttggttgctacaaattttttaaacgtacccatgcagaagccgctgtatgtgcattaattgcgggttcacctaccattggattcctggggtttgcagttctcgatcctatttatggtgattccgtatcaacaggtttagtggtagcaattatttctattattgttaacgcaattactattcctattggtctgtatttgctgaatccttcctcaggagcggatggtaagaagaatagtaatctgagcgcattaatttctgcggcaaaggagccagtagtatgggcacctgttctggcaacgatcctggtgctggttggggtaaaaattccggcagcatgggacccgacctttaatctgattgcgaaggctaactcaggggtagcggtattcgctgcggggttgactctggctgcacataaattcgagttcagtgccgaaattgcttataacaccttcctgaagttgattctgatgccactggcgctgcttctcgttggtatggcatgtcatttgaacagcgaacatttgcagatgatggtactggcaggcgcattaccgccggcattctccggaatcattattgccagccggtttaatgtctacacccgtactggtacagcgtcattggctgtgagcgtactgggctttgtcgtcacggctcccttgtggatttatgtcagtcgactggtttcataa

SEQ ID NO: 482873 - DNA, 1146 bp, Shigella sonnei
atgacaaataatgaaagcaaagggccgtttgaaggcttattagttatcgatatgacacatgtccttaatggacctttcggaactcaacttctttgtaatatgggcgcaagggtaattaaagttgagccaccaggtcatggtgatgatacccgcacatttggtccctatgtggatggacagtcactctattacagttttattaatcatggcaaagagagtgtggttcttgatttaaagaatgatcacgataaaagtatatttataaatatgctcaaacaagctgatgtattagctgagaattttcgcccaggtacaatggaaaaactggggttttcatgggaaaggttacaagaaatcaacccgcgcctcatatatgcttcatcgtcaggtttcggacataccggtccgctaaaagatgctcctgcctacgataccatcattcaggcaatgagtgggataatgatggaaacagggtaccctgatgctccgccagtgcgtgttggtacctctcttgcggatctatgcggcggtgtctatttattcagcggaatagtgagtgcactttatggccgcgaaaagagccagagaggggcgcatgtcgatatagcgatgtttgatgccacgctgagttttctggagcatggtctgatggcatatattgcgacagggaagtcaccacaacgcctgggaaatcgccatccctacatggcaccttttgatgttttcgatactcaggataagccgattacgatttgttgtggtaatgacaagcttttttctgcgttatgccaggcactggagcttacggaactggttaatgatccccgatttagcagcaatattttacgcgtacaaaaccaggctattcttaaacaatatattgagcgaacgttaaaaacgcaggcagctgaagtttggttagccaaaatacatgaagttggtgtgcccgtcgcgccgttattaagtgtggctgaggccattaatttgccacaaactcaggcgagaaatatgttgattgaagccggaggaataatgatgccgggtaatccgataaaaatcagcggctgcgcggacccgcatgttatgccgggagcggcaacgctcgaccagcatggggaacaaattcgccaggagttctcatcataa

SEQ ID NO: 482874 - DNA, 3594 bp, Shigella sonnei
atgaagtttttaccctatatttttcttctctgttgtggtctttggtcgaccataagtttcgcagacgaagattacatcgaatatcgtggcatcagtagtaacaaccgtgtcatacttgatccagtacgtctgagcaacaaggaattacgttggttagcgagcaaaaaaaatcttgtgattgcagtacataagtcccaaacggctacgttgttgcataccgattcgcagcaacgagttcgtggtattaatgctgattatttaaatcttttaaaaagaacgttaaatatcaaattaacactccgggaatacgccgatcatcaaaaagcaatggacgcgctggaagaaggtgaagtcgatatagtgttatcacatttagtagcttcgccgcctcttaatgatgacattgctgcaaccaaaccactgataattacctttccggcgctggtaaccacccttcacgattcaatgcgaccgcttacctcatcaaaaccagtaaatattgctcgagtagcaaattatccccctgacgaggtaattcatcaatcatttccaaaagcaacaattatctcttttacaaatttatatcaggcattagcatccgtctcagccggacagaatgattactttattggtagtaacatcattaccagcagtatgatttcccgctatttcactcactccttaaatgtagtgaaatattataactcaccgcgtcaatataattttttcttgaccagaaaagaatctgtcgttcttaatgaagtactcaatcgatttgttgatgctttgacaaatgaagttcgctatgaagtatcacaaaattggcttgatacaggaaacctggcctttctgaacaaaccattagaactcactgaacatgaaaaacaatggattaagcagcatcccgatttaaaggtgctggaaaatccttactcccctccctattctatgacggatgaaaatggctcggttcggggcgttatgggggatattcttaatattattactttgcaaacaggtttaaatttttctccgatcaccgtttcacacaatatccatgctggaacacagctgaatcccggcggatgggatatattacccggtgctatttatagtgaagatagagaaaataatgttttatttgctgaagccttcataacaacgccttacgtttttgtcatgcaaaaagcgcctgacagtgaacaaacattaaaaaaaggaatgaaagttgccattccatattattatgagcttcattcgcaattaaaagagatgtatccggaggtagagtggataaaagtcgataacgccagcgctgcatttcacaaggtcaaggaaggcgaacttgatgctctggtcgcgacacagttaaattcacgttacatgatcgaccattactatcctaatgaactttatcattttcttattcccggcgttccgaatgcatcgctttcgttcgcttttcctcgcggagaaccggaacttaaggatattattaataaagcactgaatgcaatccccccaagcgaagttctgcgcctgaccgaaaaatggattaaaatgcccaatgtgaccattgacacatgggacctctatagcgagcaattttatattgttacgacattatccgttttattagttggcagtagccttttatggggattctacctgttacgctcagttcgtcgtcgtaaagtcattcagggtgatttagaaaaccaaatatcattccgaaaagcactctcggattccttaccgaatccaacttatgttgtaaactggcaaggtaatgtcattagtcataatagtgcttttgaacattatttcactgcggattactacaaaaatgcaatgttaccattagaaaacagtgactccccctttaaagatgttttttctaatgcgcatgaagtcacagcagaaacgaaagaaaatcgaacaatatacacacaggtttttgaaattgataatggcatcgagaaaagatgcattaatcactggcatacattatgcaatctgccagccagcgatcatgctgtttatatttgtggttggcaagatattacagagacgcgtgatttaattcatgcactcgaagtagagagaaataaagcgatcaatgcaactgtcgcaaaaagtcagtttctggcaacaatgagtcacgaaataagaacaccaataagctccattatgggcttcctggaacttctgtcgggttctggtcttagcaaggagcaacgggtggaggcgatttcacttgcctactccaccggacaatcactcctcggcttaattggtgaaatccttgatgtcgacaaaattgaatcgggtaactatcaacttcaaccacaatgggtcgatatccctactttagtccagaacacttgtcactctttcggtgcgattgctgcaagcaaatcgatcgcattaatttgcagcagtacatttcctgatcattacctggttaagatcgaccctcaggcgtttaagcaggtcttatcaaatttactgagcaatgctctcaaatttaccaccgagggggcagtaaaaattacgacctccctggttcacattgatgacaaccacgctgttatcaaaatgacgattatggattctggaagtggattatcgcaggaagaacaacaacaactctttaaacgctacagccaaacaagtgcaggtcgccagcaaacaggatctggcttaggcttaatgatctgcaaagaattaattaaaaatatgcagggcgatttgtcattagaaagtcatccaggcataggaacaacatttacgatcacaatcccggtagaaattagccagcaagtggcgactgtcgaggcaaaagcagaacaccccatcacactacctgaaaagttgagcatattaatcgcggatgatcatccgaccaacaggctattactcaaacgccagctaaatctattaggatatgatgttgatgaagccactgatggtgtgcaagcgctacacaaagtcagtatgcaacattatgatctgcttattactgacgttaatatgccgaatatggatggttttgagttgactcgcaaactccgtgagcaaaattcttccttacccatctgggggcttacagccaacgcacaggctaacgaacgtgaaaaagggttaagttgcggcatgaacttatgtttgttcaaaccgttgaccctggatgtactgaaaacacatttaagtcagttacaccaggttgcgcatattgcacctcagtatcgccaccttgatatcgaagccctgaaaaataatacggcgaacgatctacaactgatgcaggagattctcatgactttccagcatgaaacgcataaagatctacccgctgcgtttcaagcactagaagctggcgataacagaactttccatcagtgtattcatcgcatccacggtgcggctaacatcctgaatttgcaaaagttgattaatattagccatcagttagaaataacacctgtttcagatgacagtaagcctgaaattcttcagttgctgaactctgtaaaagaacacattgcagagctggaccaggagattgctgttttctgtcagaaaaatgactaa

SEQ ID NO: 482875 - DNA, 615 bp, Shigella sonnei
atgaacgcaataattattgatgaccatcctcttgctatcgcagcaattcgtaatttattgatcaaaaacgatattgaaatcttagcggagttaactgaaggcggaagcgccgttcagcgggtggaaacacttaagcctgatatcgtcatcattgatgtcgatatccccggagttaacggtatcctggtgttagaaacgctgaggaagcgccaatatagcggaattattattatcgtctccgctaaaaatgaccatttttacgggaaacattgtgctgatgctggcgctaatggtttcgtgagtaaaaaagaaggcatgaacaatatcattgcggctattgaagctgcaaaaaatggctactgctatttccccttctctctcaaccggtttgttggaagtttaacgtccgaccagcaaaaactcgactccttatcgaaacaagaaattagtgtcatgcggtatattcttgatggcaaggataataatgacattgcggaaaaaatgttcatcagcaacaaaactgtcagcacttataaaagtcgcctgatggaaaaattagaatgtaaatcactgatggatctttacacattcgcacaacgtaacaaaatcggctaa

SEQ ID NO: 482876 - DNA, 1164 bp, Shigella sonnei
gtggaacagattaattcaaataaaaaacagtctaacagaaaaaaatacttttctttattggtgatagttttatttattgcgttttcaggtgcctatgcctattggtcaatggaattagaagacatgattagtacagatgacgcctatgtcacggggaatgcagatccaatttctgcacaagtctcaggtagtgtcactgtagttaatcataaagatacgaactacgttcgacagggtgacattttagtttcactggataaaactgatgccactatcgcactcaataaagctaaaaataatctggcaaatattgttcggcaaacgaataaactgtacttacaggataaacaatacagtgccgaagtcgcttcagcacgtattcagtatcaacaatccttagaagattataaccgtcgtgtgcctttagcgaagcagggggttatttcaaaagaaacgctggagcataccaaagatacgttaataagtagcaaagcggcactgaatgccgctatccaggcttataaagcgaataaagctttagtaatgaacacaccattaaaccgtcagccacaagtagttgaagcggcggatgcaaccaaagaagcctggttggcgcttaaacgtacggatataaggagtccggttactggctatattgcccagcgaagtgttcaggtcggcgaaacagtgagtcccggacaatcgttaatggctgtcgtaccggcacgtcaaatgtgggttaatgccaactttaaagaaacacaactcacggatgtacggattggtcaatcagtcaatattatcagcgatctttatggtgaaaatgttgtgtttcatggtcgggtgacagggatcaatatgggaaccggcaatgcgttctccttattacctgcacaaaatgcgacagggaactggatcaaaatcgttcagcgtgtaccggttgaagtttctcttgatccaaaagaactcatggaacaccccttgcgcattggtttatcgatgactgcaactattgatacgaaggacgaagacattgctgagatgcctgagctggcttcaaccgtgacctccatgccggcttataccagtaaggctttagttatcgataccagtccgatagaaaaagaaattagcaacattatttcgcataatggacaactttaa

SEQ ID NO: 482877 - DNA, 1539 bp, Shigella sonnei
atggcaatcactaaatcaactccggcaccattaaccggtgggacgttatggtgcgtcactattgcattgtcattagcgacatttatgcaaatgttggattccactatttctaacgtcgcaataccgacaatatctggctttctgggagcatcaacagacgaaggcacctgggttatcacctcgtttggtgtagcaaatgccattgcgatccctgttactggcaggttggcacaaagaataggcgaattaagattatttttactttcagtaacctttttttcgctgtcttcattaatgtgtagcctatcgaccaatcttgatgtgctgatattttttagagtcgttcaggggttaatggcggggccgttaattccactgtcacagagtttattattaaggaattatccgccagaaaaaagaacatttgctctggcattatggtcaatgaccgtgattatcgctccgatatgtgggccgatattgggcggttatatttgtgataactttagctggggttggatatttttaatcaatgtccctatggggattatcgtcctgacattatgcttaaccttacttaaaggaagagaaactgagacttcaccggtcaaaatgaatctaccaggactgaccctgttagtgctcggtgttggtggcttgcaaattatgcttgataaagggcgcgatctggattggttcaactcgagtacaataataatattaacagtagtatcagttatttctctgatctctttagtcatttgggagtcgacctcagagaacccgattcttgatctcagtttgtttaagtcccgtaacttcaccattggtattgtgagtatcacatgcgcgtatttattttactctggagcgatcgtccttatgccgcagttactccaggaaacgatggggtataatgcgatatgggccggacttgcttatgcgcccatcggcatcatgccactattaatttcacctttgataggacgttatggcaacaaaatagacatgcggttgttagtgacatttagttttttgatgtatgcggtttgctattactggcgttctgtgacatttatgccaacgattgattttacaggcatcattttgccgcagttttttcagggattcgccgttgcctgtttctttttacccttaacaacgatttcgttttcaggcttgccagataataaatttgccaatgcctcgagtatgagtaatttttttcgtaccttgtcaggatcagttggtacgtcgttgacaatgacgctgtggggacgacgcgaatcgttacaccatagtcagttgacagcaaccatcgatcaatttaaccccgtgtttaattcatcgtcacaaattatggataaatattatggttcgctttcaggagttcttaatgaaattaataatgaaataacccagcagtcactttctatttctgcaaatgagattttccgtatggcggctattgcttttatcttacttacggttttggtttggtttgcgaaaccgccgtttacagcgaaaggcgttgggtga

SEQ ID NO: 482878 - DNA, 1329 bp, Shigella sonnei
atggaaaacgctaaaatgaactcgctcatcgcccagtatccgttggtaaaggatctggttgctcttaaagaaaccacctggtttaatcctggcacgacctcattggctgaaggtttaccttatgttggcctgaccgaacaggatgttcaggacgcccatgcgcgcttatcccgttttgcaccctatctggcaaaagcatttgctgaaactgctgccactggggggattattgaatcagaactggttgccattccagctatgcaaaaacggctggaaaaagaatatcagcaaccgatcagcgggcaactgttactgaaaaaagatagccatttgcccatttccggctccataaaagcacgcggcgggatttatgaagtcctggcacacgcagaaaaactggctctggaagcggggttgctgacgcttgatgatgactacagcaaactgctttctccggagtttaaacagttctttagccaatacagcattgctgtgggctcaaccggaaatctggggttatcaatcggcattatgagcgcccgcattggctttaaggtgacagttcatatgtctgctgatgcccgggcatggaaaaaagcgaaactgcgcagccatggcgttacggtcgtggaatatgagcaagattatggtgttgccgtcgaggaaggacgtaaagcagcgcagtctgacccgaactgtttctttattgatgacgaaaattcccgcacgttgttccttgggtattccgtcgctggccagcgtcttaaagcgcaatttgcccagcaaggccgtatcgtcgatgctgataaccctctgtttgtctatctgccgtgtggtgttggcggtggtcctggtggcgtcgcattcgggcttaaactggcgtttggcgatcatgttcactgcttttttgccgaaccaacgcactccccttgtatgttgttaggcgtccatacaggattacacgatcagatttctgttcaggatattggtatcgacaaccttaccgcagcggatggccttgcagttggtcgcgcatcaggctttgtcgggcgggcaatggagcgtctgctggatggcttctatacccttagcgatcaaaccatgtatgacatgcttggctggctggcgcaggaagaaggtattcgtcttgaaccttcggcactggcgggtatggccggacctcagcgcgtatgtgcatcagtaagttaccaacagatgcacggtttcagcgcagaacaactgcgtaataccactcatctggtgtgggcgacgggaggtggaatggtgccggaagaagagatgaatcaatatctggcaaaaggccgttaa

SEQ ID NO: 482879 - DNA, 219 bp, Shigella sonnei
gtgctgccgctgtatcccgacatcagcccggaaattattgcgattgctatcggttcaggtgcaattggctgcacgatcgttacggactcgcttttctggctagtgaagcaatattgcggcgctacgctcaatgaaacatttaaatactatacgacagcgacatttatcgcttcagtcgtcgctctggcgggcacattcctgctgtcatttatcatctaa

SEQ ID NO: 482880 - DNA, 954 bp, Shigella sonnei
atgatgacagtctcccgggtgatgcataatgcagaatctgtgcgtcctgcaacgcgtgaccgcgtattgcaggcaatccagaccctgaattatgttcctgatctttccgcccgtaagatgcgcgctcaaggacgtaagccgtcgactctcgccgtgctggcgcaggacacggctaccactcctttctctgttgatattctgcttgccattgagcaaaccgccagcgagttcggctggaatagttttttaatcaatattttttctgaagatgacgctgcccgcgcggcacgtcagctgcttgcccaccgtccggatggcattatctatactacaatggggctgcgacatatcacgctgcctgagtctctgtatggtgaaaatattgtattggcgaactgtgtggcggatgacccagcgttacccagttatatccctgatgattacactgcacaatatgaatcaacacagcatttgctcgcggcgggctatcgtcaaccgttatgcttctggctaccggaaagtgcgttggcaacagggtatcgtcggcagggatttgagcaggcctggcgtgatgctggacgagatctggctgaggtgaaacaatttcacatggcaacaggtgatgatcactacaccgatctcgcaagtttactcaatgcccacttcaaatcgggcaaaccagattttgatgttctgatatgtggtaacgatcgtgcagcctttgtcgcttatcaggttctcctggcgaagggggtacgtatcccgcaggatgtcgccgtaatgggctttgataatctggttggcgtcgggcatctgtttttaccgccgctgaccacaattcagcttccacatgacattatcgggcgggaagctgcattgcatattattgaaggtcgtgaagggggaagagtgacgcggatcccttgtccgctgttgatccgttgttccacctga

SEQ ID NO: 482881 - DNA, 1434 bp, Shigella sonnei
atgacgcaatctcgattgcatgcggcgcaaaacgcactagcaaaacttcatgagcaccggggtaacactttctatccccattttcacctcgcgccacctgccggatggatgaacgatccaaacggcctgatctggtttaacgatcgttatcacgcgttttatcaacatcacccgatgagcgaacactggggaccaatgcactggggacatgccaccagcgacgatatgatccactggcagcatgagcctattgcgctagcgccaggagacgataatgacaaagacgggtgtttttcaggtagtgctgtcgatgacaatggtgtcctctcacttatctacaccggacacgtctggctcgattgtgcaggtaatgacgatgcaattcgcgaagtacaatgtctggctaccagtcgggatggtattcatttcgagaaacagggtgtgatcctcactccaccagaaggaatcatgcacttccgcgatcctaaagtgtggcgtgaagccgacacatggtggatggtagtcggggcgaaagatccaggcaacacggggcagatcctgctttatcgcggcagttcattgcgtgaatggaccttcgatcgcgtactggcccacgctgatgcgggtgaaagctatatgtgggaatgtccggactttttcagccttggcgatcagcattatctgatgttttccccgcagggaatgaatgccgagggatacagttaccgaaatcgctttcaaagtggcgtaatacccggaatgtggtcgccaggacgactttttgcacaatccgggcattttactgaacttgataacgggcatgacttttatgcaccacaaagctttttagcgaaggatggtcggcgtattgttatcggctggatggatatgtgggaatcgccaatgccctcaaaacgtgaaggatgggcaggctgcatgacgctggcgcgcgagctatcagagagcaatggcaaacttctacaacgcccggttcacgaagctgagtcgttacgccagcagcatcaatctgtctctccccgcacaatcagcaataaatatgttttgcaggaaaacgcgcaagcagttgagattcagttgcagtgggcgctgaagaacagtgatgccgaacattacggattacagctcggcactggaatgcggctgtatattgataaccaatctgagcgacttgttttgtggcggtattacccacacgagaatttagacggctaccgtagtattcccctcccgcagcgtgacacgctcgccctaaggatatttatcgatacatcatccgtggaagtatttattaacgacggggaagcggtgatgagtagtcgaatctatccgcagccagaagaacgggaactgtcgctttatgcctcccacggagtggctgtgctgcaacatggagcactctggctactgggttaa

SEQ ID NO: 482882 - DNA, 618 bp, Shigella sonnei
atggcacagctatatttctactattccgcaatgaatgcgggtaagtctacagcattgttgcaatcttcatacaattaccaggaacgcggcatgcgcactgtcgtatatacggcagaaattgatgatcgctttggtgtcgggaaagtcagttcgcgtataggtttgtcatcgcctgcaaaattatttaaccaaaattcatcattatttgatgagattcgtgcggaacatgaacagcaggcaattcattgcgtactggttgatgaatgccagtttttaaccagacaacaagtatatgaattatcggaggttgtcgatcaactcgatatacccgtactttgttatggtttacgtaccgattttcgaggtgaattatttattggcagccaatacttactggcatggtccgacaaactggttgaattaaaaaccatctgtttttgtggccgtaaagcaagcatggtgctgcgtcttgatcaagcaggcagaccttataacgaaggtgagcaggtggtaattggtggtaatgaacgatacgtttctgtatgccgtaaacactataaagaggcgttacaagtcggctcattaacggctattcaggaaaggcatcgccacgattaa

SEQ ID NO: 482883 - DNA, 414 bp, Shigella sonnei; identical to SEQ ID NO: 471495

SEQ ID NO: 482884 - DNA, 909 bp, Shigella sonnei; identical to SEQ ID NO: 471494

SEQ ID NO: 482885 - DNA, 1014 bp, Shigella sonnei
atgacgcagccattggtcggaaaacagattctcattgttgaagatgagcaggtatttcgctcgcttctggattcatggttttcctcattgggagcgacaacggtactggcggctgatggggtggatgcccttgagttgctgggaggtttcactccagacctgatgatatgtgatatcgcgatgccacgaatgaacgggcttaaactgctggagcatatacgtaacagaggcgaccagaccccagttctggtgatatctgccactgaaaatatggcagatattgccaaagcgttacgtctgggcgttgaagatgttttgctgaaaccagttaaagatctgaatcgcttgcgcgagatggtttttgcctgtctctatcccagcatgtttaattcgcgcgttgaggaagaggaaaggctttttcgcgactgggatgcaatggttgataaccctgccgcagcggcgaaattattacaggaactacaaccgccggttcagcaggtgatttcccattgccgggttaattatcgtcaattggttgccgcggacaaacccggcctggtgcttgatattgccgcactttcggaaaacgatctggcattttattgccttgatgtcacccgagctggacataatggcgtacttgctgccttgttattacgcgcattgtttaacggattattacaggaacagcttgcacaccaaaatcaacggttgccagagttgggcgcgttattgaagcaggtaaaccatttactccgtcaggccaatctgccggggcagtttccgctattagttggctattatcatcgcgaactgaaaaatctcattctggtttctgcgggtctgaatgcgacgttaaataccggcgaacaccaggtgcaaatcagtaatggtgttccgttaggcactttaggtaacgcttatttgaatcaattgagccagcgatgcgatgcctggcaatgccaaatatggggaaccggtggtcgactgcgcttgatgttgtctgcagaatga

SEQ ID NO: 482886 - DNA, 945 bp, Shigella sonnei; identical to SEQ ID NO: 471492

SEQ ID NO: 482887 - DNA, 459 bp, Shigella sonnei; identical to SEQ ID NO: 458949

SEQ ID NO: 482888 - DNA, 843 bp, Shigella sonnei
atgcattcactccaacgtaaagttctgcgtactatttgtccggaccaaaaaggtctgatcgcacgtattaccaatatttgctacaagcacgagttaaatatcgtacagaacaatgaatttgttgatcaccgtaccgggcgcttttttatgcgcacggaactggaagggatttttaatgattccaccctgctggcggatctcgatagcgcattgccagaaggctccgtgcgtgagctgaatcctgccggtcgtcgccggatagtgattctggtcactaaagaagcgcattgccttggcgatttgttgatgaaagccaattacggcggcctggatgtcgaaatcgcggcagttattggtaaccacgatactttacgttctctggttgagcgttttgatattccgtttgagctggtaagccatgaagggttaagccgcaacgagcacgatcaaaagatggcggaagccattgatgcttatcaacctgactatgtggtgctggcgaagtatatgcgggtattaacgccggaatttgtggcacgcttcccgaataaaatcatcaatattcaccattcattcctgcctgcgtttatcggcgcacgtccttatcaccaggcctatgaacgtggtgtgaagattattggcgcaaccgctcactatgtgaatgacaatctggacgaaggcccaatcatcatgcaggacgttattcatgtcgatcatacctacacagctgaagatatgatgcgcgcaggtcgtgacgtcgagaaaaacgtcttaagtcgtgcgctatacaaagtactggcacagcgcgtctttgtttacggtaatcggacgattattctttaa

SEQ ID NO: 482889 - DNA, 180 bp, Shigella sonnei; identical to SEQ ID NO: 465171

SEQ ID NO: 482890 - DNA, 678 bp, Shigella sonnei; identical to SEQ ID NO: 458951

SEQ ID NO: 482891 - DNA, 711 bp, Shigella sonnei
atgatcgaactcgtgattgtatcgcgtctccttgaatatccggatgctgccttatggcagcatcaacaagagatgtttgaggcgattgctgcgtcgaaaaatctgtcgaaagaagatgcccatgcgctgggcattttcctgcgcgatttaacggcgatggatccgctcgatgcccaggcccagtacagcgaactgttcgaccgtggtcgcgccacgtcactgttgctatttgaacatgttcacggtgaatcccgtgaccgcggccaggcgatggtggacctgctggcgcagtacgagcagcacggcttgcagttaaacagccgcgaattaccggaccatctgccgctgtatctggagtacctgtcgcagctgccgcaaagcgaagccgtggaaggtttgaaagatatcgcgccgattctggcattgctgagcgcgcgtctgcaacagcgtgaaagccgttatgccgtgatgtttgatctgctgctgaaattggccaataccgctatcgacagcgacaaagtggcggaaaaaattgccgacgaagcgcgcgatgatacgccgcaggcgctggatgctgtctgggaagaagagcaggttaaattctttgctgacaaaggctgcggtgattcagcaatcactgctcatcagcgtcgctttgccggtgccgtcgcgccgcaatatctgaatatcaccaccggaggacagcactaa

SEQ ID NO: 482892 - DNA, 1539 bp, Shigella sonnei
atgaaaattcgttcacaagtcggcatggtgctgaatctcgataagtgcatcggctgccacacctgttcagttacctgtaaaaacgtctggaccagccgtgaaggcgtggaatacgcgtggttcaacaacgtggaaaccaagccgggtcagggcttcccgactgactgggaaaaccaggaaaaatacaaaggcggctggatccgtaaaatcaacggcaaactgcagccgcgcatgggtaaccgtgccatgttgctgggtaaaatcttcgctaacccgcatctgccggggatcgacgattattacgagccgttcgattttgactatcagaacctgcataccgcgccggaaggcagcaaatcgcagccgattgcccgtccgcgttcgctgattaccggggaacggatggcgaaaatcgaaaaagggccgaactgggaagatgacctgggtggtgagtttgacaaactggcgaaagacaagaacttcgacaacatccagaaggcgatgtatagccagttcgaaaacacctttatgatgtatttgccgcgcctgtgcgaacactgcctgaacccggcatgtgtggcgacctgcccgagcggtgcgatttacaagcgtgaagaagatggcatcgtcctgatcgaccaggataaatgccgtggctggcgtatgtgcatcaccggatgcccgtacaaaaaaatctacttcaactggaagagcggtaagtctgagaagtgcatcttctgctatccgcgtattgaagcgggtcagccgaccgtgtgctcagaaacctgtgtcggtcgtatccgttatcttggcgtgctgctgtacgatgccgacgcgattgaacgtgcagccagcaccgagaacgagaaagatctttaccagcgtcagctggaggtgttcctcgatccgaacgatccgaaagtcatcgagcaggcgattaaagacggtattccgctgagcgttattgaagccgcacagcagtcgccggtttataaaatggcaatggaatggaaactggcgctgccgctgcatccagaatatcgcacactgccgatggtctggtacgtgccgcctctgtctccgattcagtctgcagcagacgcgggtgagctgggtagcaacggcattctgccagacgtcgaaagcttgcgtattccggtacagtatctggcgaatctgctgaccgccggtgataccaaaccggtactgcgcgcactgaaacgtatgctggcgatgcgtcattacaaacgtgctgaaaccgttgacggtaaagttgatacccgtgcgctggaagaggtcggtctgaccgaagcccaggcacaggagatgtaccgttatctggcgattgctaactacgaagatcgctttgtggtgccgagtagtcatcgtgaactggcacgggaagccttcccggagaaaaatggctgcggctttacctttggtgatggctgccacggttcagataccaaattcaatctgttcaacagccgtcgtatcgatgccatcgatgtgaccagcaaaacggagccgcatccatga

SEQ ID NO: 482893 - DNA, 3744 bp, Shigella sonnei
atgagtaaattcctggaccggtttcgctacttcaaacagaagggtgaaacctttgccgatgggcatggccagcttctcaataccaaccgtgactgggaggatggatatcgccagcgttggcagcatgacaaaatcgtccgctctacccacggggtaaactgcaccggctcctgcagctggaaaatctacgtcaaaaacggtctggtcacctgggaaacccagcagactgactatccgcgtacccgtccggatctgccaaaccatgaacctcgcggctgcccgcgcggtgccagctactcctggtatctttacagtgccaaccgcctgaaatacccgatgatgcgcaaacgcctgatgaaaatgtggcgtgaagcgaaggcgctgcatagcgatccggttgaggcatgggcttctatcattgaagacgccgataaagcgaaaagctttaagcaggcgcgtggacgcggtggatttgttcgttcttcctggcaggaggtgaacgaactgatcgccgcatctaacgtttacaccatcaaaaactacggcccggaccgtgttgctggtttctcgccaattccggcaatgtcgatggtttcttacgcatcgggtgcacgctatctctcgctgattggcggtacttgcttaagcttctacgactggtactgcgacctgcctcctgcgtctccgcaaacctggggcgagcaaactgacgtaccggaatctgctgactggtataactccagctacatcatcgcctggggttcaaacgtgccgcagacgcgtaccccggatgctcacttctttactgaagtgcgttacaaaggcaccaaaactgttgccgtcacaccagactacgctgaaatcgccaaactgtgcgatctgtggctggcaccgaaacagggcaccgatgcggcaatggcgctggcgatgggccacgtaatgctgcgtgaattccacctcgacaacccaagccagtatttcaccgactatgtgcgtcgctacaccgacatgccgatgctggtgatgctggaagaacgcgacggttactacgctgcaggtcgtatgctgcgcgctgctgatctggttgatgcgctgggccaggaaaacaatccggaatggaaaactgtcgcctttaataccaatggcgaaatggttgcgccgaacggttctattggcttccgctggggcgagaagggcaaatggaatcttgagcagcgcgacggcaaaactggcgaagaaaccgagctgcaactgagcctgctgggtagccaggatgagatcgctgaggtaggcttcccgtactttggtggcgacggcacggaacacttcaacaaagtggaactggaaaacgtgctgctgcacaaactgccggtgaaacgcctgcaactggctgatggcagcaccgccctggtgagcaccgtttatgatctgacgctggcaaactacggtctggaacgtggcctgaacgacgttaactgtgcaaccagctatgacgatgtgaaagcttataccccggcctgggccgagcagattaccggcgtttctcgcagccagattattcgcatcgcccgtgaatttgccgataacgctgataaaacgcacggtcgttcgatgattatcgtcggtgcggggctgaaccactggtatcacctcgatatgaactatcgtggtctgatcaacatgctgattttctgcggctgtgtcggtcagagcgggggcggctgggcgcactatgtaggtcaggaaaaactgcgtccgcaaaccggctggcagccgctggcgtttgcccttgactggcagcgtccggcgcgtcacatgaacagcacttcttatttctataaccactccagccagtggcgttatgaaaccgtcacggcggaagagttgctgtcaccgatggcggacaaatcccgctataccggacacttgatcgactttaacgtccgtgcggaacgcatgggctggctgccgtctgcaccgcagttaggcactaacccgctgactatcgctggcgaagcggaaaaagccgggatgaatccggtggactatacggtgaaatccctgaaagagggttccatccgttttgcggcagaacaaccagaaaacggtaaaaaccacccgcgcaacctgttcatctggcgttctaacctgctcggttcttccggtaaaggtcatgagtttatgctcaagtacctgctggggacggagcacggtatccagggtaaagatctggggcaacagggcggcgtgaagccggaagaagtggactggcaggacaatggtctggaaggcaagctggatctggtggttacgctggacttccgtctgtcgagcacctgtctctattccgacatcattttgccgacggcgacttggtacgaaaaagacgacatgaatacttcggatatgcatccgtttattcacccgctgtctgcggcggtcgatccggcctgggaagcgaaaagcgactgggaaatctacaaagccatcgcgaagaaattctccgaagtgtgcgtcggccatctgggtaaagaaaccgacatcgtcacgctgcctatccagcatgactctgccgctgaactggcgcagccgctggatgtgaaagactggaaaaaaggcgagtgcgacctgatcccaggtaaaaccgcgccacacattatggtcgtagagcgcgattatccggcgacttacgaacgctttacctctattggcccgttgatggagaaaatcggtaatggcggtaaagggattgcctggaacacccagagcgagatggatctgctgcgtaagctcaactacaccaaagcggaaggtccggcgaaaggccagccgatgctgaacaccgcaattgatgcggcagagatgatcctgacactggcaccggaaaccaacggtcaggtagccgtgaaagcctgggctgccctgagcgaatttaccggtcgtgaccatacgcatctggcgctgaataaagaagacgagaagatccgcttcctcgatattcaggcacagccgcgcaaaattatctccagcccgacctggtctggtctggaagatgaacacgtttcttacaacgccggttacaccaacgttcacgagctgatcccatggcgtacgctctctggtcgtcagcaactgtatcaggatcaccagtggatgcgtgatttcggtgaaagcctgctggtttatcgtccgccgatcgacacccgttcggtgaaagaagtgataggccagaaatccaacggcaacccggaaaaagcgctcaacttcctgacgccgcaccagaagtggggtatccactccacctacagcgacaacctgctgatgctgactttaggtcgcggtggtccggtggtctggttgagtgaagccgatgccaaagatctgggtatcgccgataacgactggattgaagtattcaacagcaacggtgctctgactgcccgtgcggttgtcagccagcgtgttccggcagggatgaccatgatgtaccacgcgcaggaacgtatcgttaacctgcctggttcggaaattacccaacagcgtggtggtatccataactcggtcacccgtatcacgccgaaaccgacgcatatgatcggcggctatgcccatctggcatacggctttaactactacggcaccgtaggttctaaccgcgatgagtttgttgtagtgcgtaagatgaagaacattgactggttagatggcgaaggcaatgaccaggtacaggagagcgtaaaatga

SEQ ID NO: 482894 - DNA, 1392 bp, Shigella sonnei
atgagtcactcatccgcccccgaaagggctactggagctgtcattacagattggcgaccggaagatcctgcgttctggcaacaacgcggtcaacgtattgccagccgtaacctgtggatttccgttccctgtctgctgctggcgttttgcgtatggatgttgttcagcgctgttgcggtgaacttaccgaaagtcggttttaattttacgaccgatcagctatttatgttgactgcgctgccttcggtttctggcgcgttattacgtgttccatactcctttatggttcctatcttcggtggtcgtcgctggacggcgttcagcaccggtattctgattattccttgcgtctggctgggttttgccgtgcaggatacctccacgccttatagcgtcttcatcatcatctctctgctatgcggctttgctggcgcgaacttcgcatccagtatggcaaacatcagcttcttctttccgaaacagaagcagggtggcgcgctgggtctgaatggtggtctgggaaacatgggcgtcagcgtcatgcagttggttgctccgctggtggtatcactgtcgattttcgcagtatttggtagccagggcgtcaaacagccggatgggactgagctgtatctggcgaatgcgtcctggatatgggtgccgttccttgccatcttcaccattgcggcgtggtttggcatgaacgatcttgctacctcgaaagcctccatcaaggagcagttgccggtactcaaacggggtcatctgtggattatgagcctgctgtatctggcaaccttcggctcctttatcggcttctccgcgggctttgcgatgctgtcaaaaacgcagttcccggatgttcagattctgcaatacgctttcttcgggccgtttattggtgcgctggcgcgttctgcaggtggtgcattatctgaccgtctgggcggaactcgtgtcacgctggtgaactttattctgatggcgattttcagcggcctgctgttcctgaccttaccgactgacgggcagggcggaagcttcatggcgttcttcgcggtcttcctggcgctgttcctgacagctgggctgggtagtggttccactttccagatgatttcagtgatcttccgtaaactgacaatggatcgcgtgaaagcagaagggggttctgacgaacgtgcgatgcgtgaagcggcaaccgacacggcagcggcgctgggtttcatctctgcgattggcgctattggtggcttctttatcccgaaagcgtttggtagctcgctggcattaacgggttcgccagtcggcgcaatgaaggtatttttgattttctatatcgcctgcgtagtgattacctgggcggtatatggtcggcattctaaaaaataa

SEQ ID NO: 482895 - DNA, 219 bp, Shigella sonnei; identical to SEQ ID NO: 262868

SEQ ID NO: 482896 - DNA, 1797 bp, Shigella sonnei
atgcttaaacgttgtctctctccgctcaccctggttaatcaggttgcgcttattgtgttgctttctactgctattggactggcagggatggcggtttctggctggctggtgcaaggcgttcagggcagcgcccatgcgatcaacaaagcgggatcgctgcgcatgcaaagttaccgtctgttggcggcagtgccattaagtgagaaagacaagcccttaattaaagagatggaacaaacggcatttagcgccgagttaactcgagcagcagaacgagacgaacaactggcgcaattacagggtttacaagattactggcgtaatgaactgatccctgcactgatgcgtgcacaaaaccgcgaaacggtgtcagcggatgtcagccagtttgttgccgggcttgatcagctggtatctggttttgaccgcaccacggaaatgcgcattgagacagtggtactggtccatcgggtaatggcggtatttatggcacttttactggtgttcactattatctggttgcgggcgcgactgctacaaccgtggcggcaactgctggcaatggcgagtgccgtcagtcatcgcgattttacccaacgcgcgaacatcagcgggcgcaacgaaatggcgatgcttggaactgcattgaacaatatgtctgcagaactggccgaaagttatgccgtacttgagcagcgggttcaggagaaaaccgccgggctggagcataaaaatcagatcctctcttttttatggcaggctaaccgccgtttgcattcccgcgccccgctgtgtgaacgcctgtcacctgtactcaacggcttacagaatttaaccctgctacgtgatatcgaattgcgggtgtatgacactgatgatgaagagaatcatcaggagtttacctgccagccagatatgacttgtgatgataaaggctgccagctctgcccgcgcggcgtattacccgttggtgatcgcggcacgaccctgaagtggcggctggctgactctcatacgcagtacggtattttgctggcgaccctgccgcaggggcgtcatcttagccatgatcaacaacaactgctggataccctggttgaacaactcaccgccacgctggcgctggatcgccatcaggaacgtcagcaacagttgatcgtgatggaagagcgtgccaccattgcgcgcgaactgcatgattctattgcccaatctctctcttgcatgaagatgcaggtgagttgtttacagatgcagggcgatgcgctgccagaaagcagccgcgaactgttaagtcagatccgtaacgaactgaatgcatcctgggcgcagttgcgtgaattgctcaccacattccgcttgcagctcaccgagcctggattacgtccggcgctggaggcgagttgcgaagagtacagcgccaaatttggcttcccggtgaagctggattatcaattgccgcctcgcctggtgccttcgcatcaggcaatccacttgttgcaaattgcccgtgaggcattaagtaacgccctcaaacattcgcaagcgagtgaagtcgtggtgacggtggcgcaaaacgataatcaggtcaaactgaccgtccaggataacggctgcggcgtgcctgaaaatgccatccgcagcaatcactacggcatgataataatgcgcgaccgtgcgcaaagtttacgaggcgattgccgcgtccgccgtcgtgaatcaggtggcaccgaagtggtggtcacctttattcccgaaaaaactttcacagacgtccaaggagatacccatgagtaa

SEQ ID NO: 482897 - DNA, 651 bp, Shigella sonnei
atgagtaatcaggaaccggctactatcctgctgattgacgatcacccgatgctgcgaactggcgtaaaacagcttatcagtatggcaccagatatcaccgtggttggcgaagcgagtaatggcgaacagggtattgaactggcggaatctcttgatcccgatctgatcctgttagatctcaatatgcccggcatgaacggtctggaaacgctggataaactgcgcgaaaagtccctctcagggcgcattgtggtattcagcgtctctaaccatgaagaagatgtggtcaccgcactgaaacgcggcgcggatggttatctgttaaaagatatggaaccggaagatctgctgaaagcattgcatcaggcagctgctggcgaaatggtattaagcgaagcattaacgcctgttctggccgccagcttgcgcgctaaccgtgccactactgagcgcgatgttaaccagttaaccccacgcgagcgcgatattctcaagctgattgcccagggtttgccgaacaagatgattgcccgccgcctggatatcaccgaaagcacagtaaaagtgcacgtcaagcacatgctgaagaaaatgaagctcaagtctcgcgtggaagcagcggtatgggtgcatcaggagcgcattttctga

SEQ ID NO: 482898 - DNA, 1395 bp, Shigella sonnei
ttgagccgtttcgttcctcgcattatcccgttttatttactcttgctggcggcaggcggtacagctaacgcacaatctaccttcgagcaaaaagcggcaaatccctttgataataacaatgatggtctgccggatttaggcatggctcccgaaaaccatgatggggaaaaacactttgctgaaattgtgaaagatttcggcgaaaccagtatgaatgataacgggctggatactggcgagcaggcaaaagctttcgcattgggaaaagtccgcgacgcgcttagtcaacaggttaatcagcacgtagagtcctggctatcaccgtggggaaatgccagtgttgacgtcaaagtggataacgaaggacatttcaccggcagtcgtggaagctggtttgtgccgttacaagataatgatcgttatctcacctggagccagcttggtcttactcagcaggatgatgggttggtgagcaatgtgggcgttgggcaacgctgggcgcgcggcaactggctggtgggttataacactttttatgacaacttgctggacgaaaatcttcagcgagcgggctttggtgccgaagcgtggggcgaatatttgcgactatcggcaaacttttatcagccgtttgctgcatggcatgaacagacagccacgcaggaacaacggatggcgcgcgggtatgacctgacagcccggatgcgcatgccgttctatcaacacctcaataccagtgtcagggtagaacagtattttggtgagcgtgttgatttgtttaactctggtacgggttatcacaatcccgtcgcgttgagtctgggattaaattacacccctgtgccattagtcactgtgacggcccagcataaacagggtgaaagtggcgaaaatcaaaataacctcggactgaatcttaattaccgctttggtgtgccgctcaaaaaacaactttctgcgggcgaggttgccgaaagtcagtcgttacgtggtagtcgctatgataatccgcagcgaaataatctaccgactcttgagtaccgacagcgaaaaacgttaacggtgtttctggcgacaccgccgtgggatctaaaacctggcgaaacagtgccgctgaaattacaaatccgcagtcgttacggtattcggcaactgatttggcagggcgatacgcagatattaagtttgacgccgggcgcacaagccaacagcgcggagggctggacgctgatcatgcctgactggcagaacggggaaggggcgagcaatcactggcgattgtcggtggtggtggaagataaccaggggcagcgtgtctcctccaatgagatcacgctaacgcttgtcgaaccgttcgatgcattgtcaaacgacgaactgcgctgggaaccgtaa

SEQ ID NO: 482899 - DNA, 354 bp, Shigella sonnei
atgcaaaaaatcgtgatcgttgccaatggcgcaccttacgggagcgaatccttgtttaacagcttgcggctggccattgcgttacgagagcaggagagcaatctggatctgcgtctgttcctgatgtctgatgcggtcacagccgggttgcgcgggcaaaaaccaggggaaggctacaacattcagcaaatgctggagatccttaccgctcagaatgtaccggtgaaattgtgcaaaacctgtaccgacgggcgcgggattagcacacttcctcttattgatggggtggaaatcggtactcttgtggaactggcgcaatggacgctgtcagccgataaagtgctcacattttaa

SEQ ID NO: 482900 - DNA, 717 bp, Shigella sonnei
atgcagtggcggaggtgtaaggtgataacgcgtgatttcttgatgaatgccgattgtaaaacggcatttggtgccattgaagaatcactcttatggtcagcagaacaacgggcggcttcgctggcggcgacgctggcttgtcgacctaatgagggaccggtgtggatcttcggttatggatcgttgatgtggaatccggcactggagtttaccgaattatgcaccggtacactggttggatggcatcgcgcgttttgcctgcgcctgaccgccgggcgcgggactgcgcaccagccgggacggatgcttgcactgaaagagggcggacgcaccacaggcgtcgcctatcgactaccagaagagacgctggagcaggaactaaccctgttgtggaagcgcgagatgattaccggctgttatctgccaacctggtgtcagcttgatcttgatgatggacgcacagtaaacgccattgtgtttattatggacccgcgacatccagaatatgaatctgacactcgcgctcaggtcatcgcgccgttgattgcggcggcgagcggtccgctgggaaccaacgcacaatacctgttttcactggaacaggagcttatcaaactgggaatgcaggacgatgggctgaatgatttgctggtatcggtaaaaaaactgctggcggagaattatccggatggtgtgttacggccgggattcgcctga

SEQ ID NO: 482901 - DNA, 231 bp, Shigella sonnei; identical to SEQ ID NO: 471478

SEQ ID NO: 482902 - DNA, 1101 bp, Shigella sonnei
atgtcaaatgctcaagaggcggtaaaaacccgccacaaggagacttcgcttattttcccggttctggcgctggtagtgctgttcctgtggggaagcagccagacactaccagtggtcattgccatcaatcttcttgcgcttattggtattttaagtagcgcctttagtgttgtccgtcatgcggacgtattagcccatcgcctgggagaaccttacggttcgcttattcttagcctttcagtggttattcttgaagtcagtttgatttcagctttaatggcaaccggcgacgccgcgccaacgctaatgcgtgatacgctctattcaatcattatgattgttaccggtgggctggttggcttttcattattgttgggcggtcgtaagtttgccacccaatatatgaatctgtttggtatcaagcagtatttaattgcgctgttccccctggcgataatcgtactggtatttccaatggctctgcctgcggcgaatttttcaaccggtcaggcgttactggtagcattaatttctgcggcaatgtatggcgtatttttgctgatccagaccaaaacgcatcaaagtttgtttgtctacgagcacgaagatgacagtgatgacgacgacccgcaccacggtaaaccgtctgcccatagcagcgtgtggcatgctatctggttgattatccatctgattgccgttattgcagtcaccaaaatgaatgccagcccgctggagacattgctcgacagcatgaatgcccctgtcgcctttactggcttcctggtggctctgttgattctgtcgccggaaggtttaggtgcgttaaaagcagtgttgaacaaccaggtccagcgcgcaatgaatctgttctttggttcagtgttagcaaccatttcgcttaccgtacctgtcgtcacgctaattgcctttatgacgggtaacgaattacagtttgcacttggtgcgccagaaatggtggtgatggtggcctctttagtgctgtgccatatctccttctccaccggacgtactaacgtgctcaatggcgcagcgcatctggcactgtttgccgcctatttgatgacgatatttgcctga

SEQ ID NO: 482903 - DNA, 855 bp, Shigella sonnei
atgaaacaaaaagtggttagcattggcgacatcaacgtagcaaatgacctgccgttcgtactgtttggtggtatgaacgtgctggaatctcgcgatctggcgatgcgcatttgcgagcactacgtaaccgtgacccagaaactgggtatcccttacgtgttcaaagcctcttttgacaaagccaaccgctcctccatccactcttatcgtggaccgggcctggaagaagggatgaaaatcttccaggagttgaagcagacttttggcgtgaaaattatcaccgacgttcacgaaccaagtcaggcacagcccgttgctgatgtcgtggatgtgattcagttaccggcgtttcttgctcgccagactgacctggttgaagccatggcgaaaaccggtgcggtaattaacgtcaagaaaccacagtttgtcagcccgggacagatgggtaatatcgttgataaattcaaagaaggcggcaacgaaaaagtgattctttgcgatcgcggtgctaacttcggctatgacaacctggttgtcgatatgctgggcttcagcattatgaagaaagtgtctggtaactcgccggtgattttcgacgtgacccacgcactgcaatgccgcgatccgtttggcgcagcttccggtggtcgtcgtgctcaggtggctgagctggcacgagccggtatggcggtaggtctggcggggctgtttattgaagcgcatccggatccggaacatgcgaaatgtgatggtccatccgcgctgccgctggctaaactggaaccgttcctcaagcagatgaaagcgattgatgatctggtgaaaggtttcgaagaactggataccagcaagtaa

SEQ ID NO: 482904 - DNA, 555 bp, Shigella sonnei
atggctggaccaggtgttaaagaatcgacaggcagtgcggtatcattaggtgcggttttattatgggtcgcgaatcgtctcgatttgccgctgctgccggtgattttccctacgcagctgatattgcgcattgaatgtccggatggcgaaatttggctgattaatccttttaacggtgaatcgttaagcgaacatatgctggacgtatggttaaagggaaatatcagcccgtcggcggaactgttttatgaagaccttgatgaagctgataacattgaggtaatccgcaaattgttggatacactcaaagcctcgttgatggaagaaaatcagatggagctggcgttacgcaccagcgaagctttattacaattcaacccggaagatccctatgaaattcgcgatcgcgggttgatttatgcgcaactggattgcgaacacgttgcgttgaacgatttaagttatttcgttgaacagtgtccggaagacccgatcagcgaaatgatccgtgcgcaaataaataacatcgcgcataaacatattgtgctgcattaa

SEQ ID NO: 482905 - DNA, 303 bp, Shigella sonnei
atgagatcgttagctgatttcgaatttaataaagcgccattgtgcgaaggcatgatcctggcttgcgaagcaatccgccgcgattttccctcgcaagatgtttacgacgaactggagcgtctcgttagtctggcgaaggaagaaatcagccagcttctgcctttagaagagcagctggaaaaactgatcgcgctgttttacggcgactggggatttaaagcctcacgcggcgtttatcgtctttccgatgcattatggctggaccaggtgttaaagaatcgacaggcagtgcggtatcattag

SEQ ID NO: 482906 - DNA, 393 bp, Shigella sonnei; identical to SEQ ID NO: 459656

SEQ ID NO: 482907 - DNA, 834 bp, Shigella sonnei
atggaatatcaatactggttacgtgaagcaataagccaacttcaggcgagcgaaagcccacgccgtgacgctgaaatcttattggagtatgtcactggcagggggcggacttttattctggcctttggtgaaacgcagctgactgacgaacaatgtcagcaacttgatgcgctactgacacgtcgtcgcgatggtgaacccattgctcatttaaccggggtgcgagaattctggtcgttgccgttatttgtttcgccagcgaccttaattccgcgcccggatacggagtgtctggtggagcaggcactggcgcggttgcctgaacaaccttgccgtattctcgatctcgggacgggtaccggggcgattgcgcttgcgctggctagcgagcgcccggactgcgaaattatcgctgtagatcgtatgcctgatgctgtctccctggcacaacgtaatgcccagcatctggcgatcaaaaatatccacattctgcaaagcgactggtttagcgcgctagccgggcagcagtttgcgatgattgtcagcaatccgccgtatattgacgagcaggacccacatcttcaacaaggcgatgtccgctttgagccgctcactgcgctggttgcggcagacagtggaatggcagacatcgtgcatatcatcgaacagtcgcgtaacgcgctggtatccggcggctttctgcttctggaacatggctggcagcagggcgaagcggtgcgacaagcatttatcctcgcggggtatcatgacgtcgaaacctgccgtgactatggtgataacgagcgcgtaacgctcggccgctattatcaatga

SEQ ID NO: 482908 - DNA, 1083 bp, Shigella sonnei
atgaagccttctatcgttgccaaactggaagccctgcatgaacgccatgaagaagttcaggcgttgctgggtgacgcgcaaactatcgccgaccaggaacgttttcgcgcattatcacgcgaatatgcgcagttaagtgatgtttcgcgctgttttaccgactggcaacaggttcaggaagatatcgaaaccgcacagatgatgctcgatgatcctgaaatgcgtgagatggcgcaggatgaactgcgcgaagctaaagaaaaaagcgagcaactggaacagcaattacaggttctgttactgccaaaagatcctgatgacgaacgtaacgccttcctcgaagtccgagccggaaccggcggcgacgaagcggcgctgttcgcgggcgatctgttccgtatgtacagccgttatgccgaagcccgccgctggcgggtagaaatcatgagcgccagcgagggtgaacatggtggttataaagagatcatcgccaaaattagcggtgatggtgtgtatggtcgtctgaaatttgaatccggcggtcatcgcgtgcagcgtgttcctgctacggaatcgcagggtcgtattcatacttctgcttgtaccgttgcggtaatgccagaactgcctgacgcagaactgccggacatcaacccagcagatttacgcattgatactttccgctcgtcaggggcgggtggtcagcacgttaacaccaccgattcggcaattcgtattactcacttgccgaccgggattgttgttgaatgtcaggacgaacgttcacaacataaaaacaaagctaaagcactttctgtacttggtgctcgtatccacgctgcagaaatggcaaaacggcaacaggccgaagcgtctacccgtcgtaacctgctggggagtggcgatcgcagcgaccgtaaccgtacttacaacttcccgcaggggcgcgttaccgatcaccgcatcaacctgacgctctaccgtctggatgaagtgatggaaggtaagctggatatgctgattgaaccgattatccaggaacatcaggccgaccaactggcggcgttgtccgagcaggaataa

SEQ ID NO: 482909 - DNA, 1257 bp, Shigella sonnei
atgacccttttagcactcggtatcaaccataaaacggcacctgtatcgctgcgagaacgtgtatcgttttcgccggataagctcgatcaggcgcttgacagcctgcttgcgcagccgatggtgcagggcggcgtggtgctgtcgacgtgcaaccgcacggaactttatcttagcgttgaagagcaggataacctgcaagaggcgttaatccgctggctttgcgattatcacaatcttaatgaagaagatctgcgtaaaagcctctactggcatcaggataacgacgcggttagccatttaatgcgtgttgccagcggcctggattcactggttcttggggagccgcagatcctcggtcaggttaaaaaagcgtttgccgattcgcaaaaaggtcatatgaaggccagcgaactggaacgcatgttccagaaatctttctctgtagcgaaacgcgttcgcactgaaacagatatcggtgccagtgctgtgtctgtcgcttttgcggcttgtacgctggcgcggcagatctttgaatcgctctctacggtcacagtgttgctggtaggcgcgggcgaaaccatcgagctggtagcgcgtcatctgcgcgaacataaagtacagaagatgattatcgccaaccgcactcgcgaacgtgcccaaattctggcagatgaagttggcgcggaagtgattgccctgagtgagatcgacgaacgtctgcgcgaagccgatatcatcatcagttccaccgccagcccgttaccgattatcgggaaaggcatggtggagcgcgcattaaaaagtcgtcgtaaccaaccaatgctgttggtggatattgccgttccgcgcgatgttgagccggaagttggcaaactggcgaatgcttatctttatagtgtggacgatctgcaaagcatcatttcgcacaacctggcgcagcgtaaagccgcagcggttgaggcggaaactattgtcgctcaggaaaccagcgaatttatggcgtggctgcgagcacaaagcgccagcgaaaccattcgcgagtatcgcagccaggcagagcacgttcgcgatgagttaaccgccaaagcgttagcggcccttgagcagggcggcgacgcgcaagccattatgcaggatctggcatggaaactgactaaccgcttgatccatgcgccaacgaaatcacttcaacaggccgcccgtgacggggataacgaacgcctgaatattctgcgcgacagcctcgggctggagtag

SEQ ID NO: 482910 - DNA, 624 bp, Shigella sonnei
atgccccagcccgattttcgtcttatccgcctgctaccgctggctgctcttgtgctcactgcctgttccgttaccacgcccaaaggtcctggcaaaagcccggattcgccacaatggcgtcagcatcagcaagacgtgcgcaatcttaatcagtatcagactcgcggcgcgttcgcttatatttctgaccaacaaaaagtgtacgcccgctttttctggcagcaaaccggccaggatcgctaccgtctgctgctcactaacccattgggcagcacggaactggagctgaatgctcaaccgggtaacgtgcagttagtcgacaataaaggtcagcgttataccgccgatgacgccgaagagatgattggcaaattgaccggaatgccaattccgctcaacagcttgcgccaatggattttaggtttaccgggtgatgcaaccgactacaaactggacgaccagtaccgcctgagcgaaattacctacagccagaatggcaaaaactggaaggttgtttatggtggttatgacaccaaaacgcaacctgcgatgccagccaatatggaactcaccgacggtggtcaacgcatcaagttaaaaatggataactggatagtgaaataa

SEQ ID NO: 482911 - DNA, 852 bp, Shigella sonnei
atgcggacacagtggccctctccggcaaaacttaatctgtttttatacattaccggtcagcgtgcggatggttaccacacgctgcaaacgctgtttcagtttcttgattacggcgacaccatcagcattgagcttcgtgacgatggggatattcgtctgttaacgcccgttgaaggcgtggaacatgaagataacctgatcgttcgcgcagcgcggttgttgatgaaaactgcggcagacagcgggcgtcttccgacgggaagcggtgcgaatatcagcattgacaagcgtttgccgatgggcggcggtctcggcggtggttcatccaatgccgcgacggtcctggtggcattaaatcatctctggcaatgcgggctaagcatggatgagctggcggaaatggggctgacgctgggcgcagatgttcctgtctttgttcgggggcatgccgcgtttgccgaaggcgttggtgaaatactaacgccggtggatccgccagagaagtggtatctggtggcgcaccctggtgtaagtattccgacaccagtgatttttaaagatcctgaactcccgcgcaatacgccaaaaaggtcaatagaaacgttgctaaaatgtgaattcagcaatgattgcgaggttatcgcaagaaaacgttttcgcgaggttgatgcggtgctttcctggctgttagaatacgccccgtcgcgcctgactgggacaggggcctgtgtctttgctgaatttgatacagagtctgaagcccgccaggtgctagagcaagccccggaatggctcaatggctttgtggcgaaaggtgttaatctttccccattgcacagagccatgctttaa

SEQ ID NO: 482912 - DNA, 1014 bp, Shigella sonnei
atgcctggcccgcacagttttcggcagattctttccaccaatggacgcatgcctgaggttcttctcgtgcctgatatgaagctttttgctggtaacgccaccccggaactagcacaacgtattgccaaccgcctgtacacttcactcggcgacgccgctgtaggtcgctttagcgacggcgaagtcagtgtacaaatcaacgaaaatgtacgcggtggtgatattttcatcatccagtccacttgtgcccctactaacgacaacctgatggaattagtcgttatggttgatgccctgcgtcgtgcttccgcaggtcgtatcaccgctgttatcccctactttggctatgcgcgccaggaccgtcgcgtccgttccgctcgtgtaccaatcactgcgaaagtggttgcagacttcctctccagcgtcggtgttgaccgtgtgctgacagtggatctgcacgctgaacagattcagggtttcttcgacgttccggttgataacgtatttggtagcccgatcctgctggaagacatgctgcagctgaatctggataacccaattgtggtttctccggacatcggcggcgttgtgcgtgcccgcgctatcgctaagctgctgaacgataccgatatggcaatcatcgacaaacgtcgtccgcgtgcgaacgtttcccaggtgatgcatatcatcggtgacgttgcaggtcgtgactgcgtactggtcgatgatatgatcgacactggcggtacgctgtgtaaagctgctgaagctctgaaagaacgtggtgctaaacgtgtatttgcgtacgcgactcacccgatcttctctggcaacgcggcgaacaacctgcgtaactctgtaattgatgaagtcgttgtctgcgataccattccgctgagcgatgaaatcaaatcactgccgaacgtgcgtactctgaccctgtcaggtatgctggccgaagcgattcgtcgtatcagcaacgaagaatcgatctctgccatgttcgaacactaa

SEQ ID NO: 482913 - DNA, 1653 bp, Shigella sonnei
atgcctttccgcgctctgatcgacgcttgctggaaagaaaaatatactgccgcacggtttacccgtgacctgattgccgggataaccgtcgggattattgctatcccgctggcgatggcgttggctattggtagtggtgtggcaccccagtacggtttatataccgcagctgttgcggggattgtcattgctctgacgggtgggtcacgctttagcgtttccggtccgactgcggcatttgtggtaattctctatcccgtgtcgcaacagtttggactggcaggactgctggttgcgaccttgctgtcggggatctttttgattctgatgggtctggcacgctttggtcgcctgattgagtatattccggtttccgtcaccttaggtttcacctcgggtatcgggatcaccatcggtaccatgcagattaaagattttctcggtctgcaaatggcccatgtcccggaacattatctacaaaaagtcggcgcattatttatggcgctgccgaccattaatgtgggtgatgctgccattggcattgtgacgctaggtattcttgttttttggccgcgtctgggcattcgtttacccggtcaccttccggccttgctggctggttgcgcggtgatggggattgttaacctgctcggcggacatgttgctaccatcggttcgcaattccactacgtcctggccgatggttctcagggtaacggtattccgcaactgctgccgcaactggtgctgccgtgggatctgcctaattcagaattcacgctaacctgggattctattcgcacactgctgcctgcggcattctcaatggcaatgctcggcgcaatcgaatctctgctctgcgccgtggtactggatggtatgaccgggacgaaacacaaggcgaacagcgaactggttggacagggactggggaatattatcgctccgttctttggtggtattaccgctacagctgccatcgcgcgttctgccgctaacgtccgtgccggggcaacttcccctatctcggcggtgatccactctattctggttattcttgccctgctggtactggcaccgctgctctcctggctgccgctttccgctatggcagccctgctgttgatggtggcgtggaacatgagtgaagcgcataaagtggtcgacttgctgcgtcatgcaccgaaagatgacatcattgtcatgctgctgtgcatgtcgctgaccgtgctgtttgatatggttattgccatcagcgtggggatcgtgctggcatcgctgctgtttatgcgtcgtatcgcacgtatgactcgcctggcaccggtagtcgtagatgttccagacgatgttctggtactgcgcgttattggcccgctgttttttgctgctgctgaaggcttgttcacggacctggagtcacgtcttgaaggcaaacggattgtgattctgaagtgggatgccgttccggtacttgatgctggtggtcttgatgcgttccagcgttttgtgaagcgtctgcccgaaggatgtgaactgcgcgtgtgcaacgtggaattccagccactgcgcactatggctcgcgcaggcattcaaccgatcccgggacgcctcgcgttcttcccgaatcgtcgcgcggcgatggcggatttataa

SEQ ID NO: 482914 - DNA, 279 bp, Shigella sonnei
atgaaacgcaaaaacgcttcgttactcggtaacgtgctcatggggttggggctggtggtaatggtggtcggcgtggggtattcaatcctcaaccagttaccacagtttaatatgccccagtatttcgcacatggtgcagtgctaagtattttcgtcggtgccattctctggctggcgggtgcccgtgttggcgggcatgaacaggtgtgcgaccgttactggtgggttcgtcactatgacaaacgttgccgccgtagcgataatcgccgtcatagctaa

SEQ ID NO: 482915 - DNA, 585 bp, Shigella sonnei
gtgacgattaaattgattgtcggcctggcgaaccccggtgctgaatacgccgcaacgcgacataatgctggtgcctggttcgttgacttactggcagagcgtttgcgcgctccgctgcgcgaagaggctaaattctttggttatacttcgcgagtcactcttggaggcgaagatgtccgcctgttagtcccgactacatttatgaatctcagcggcaaagccgttgcggcgatggccagttttttccgcattaatccggacgaaattctggtggcccacgacgaactggatctgcctcctggcgtcgccaaatttaaattgggcggtggccatggtggtcacaatggactgaaagacatcatcagtaaattgggtaataaccctaactttcaccgtttacgcatcggaatcggtcatcctggcgataaaaataaagttgtcggttttgtgttaggcaaaccgcctgttagtgaacagaagttaattgatgaagccatcgacgaagcggcgcgttgtactgaaatgtggtttacagatggcttgaccaaagcaacgaaccgattgcacgcctttaaagcgcaataa

SEQ ID NO: 482916 - DNA, 1092 bp, Shigella sonnei
atgggattcaaatgcggtatcgtcggtttgcccaacgtcgggaaatctaccctgttcaacgcgctgaccaaagccggtattgaagcggccaactttccattctgcaccattgagccgaacacaggcgtcgtaccaatgcctgaccctcgcctggatcaactggctgaaatcgtaaaaccgcaacgtacgcttcccacgaccatggaatttgtcgatatcgccggtctggtaaaaggcgcatcgaaaggcgaaggtctgggtaaccagttcctgaccaacatccgtgaaaccgaagcgatcggtcacgttgttcgctgctttgaaaatgacaacatcattcacgtttccggcaaagttaacccggctgacgatattgaagttatcaacaccgaactggcgctggcagacctcgacacctgcgaacgtgcgattcatcgcgtacagaagaaagccaaaggtggcgataaagacgcgaaagctgagctggcggtcctagaaaaatgcctgccccagctggaaaacgcaggtatgctgcgcgcgctggatttaagcgctgaagagaaagcggctattcgttacctgagcttcctgacgctgaaaccaacaatgtacatcgccaacgtcaacgaagacggttttgaaaacaacccatatcttgaccaggtgcgtgaaatcgcggcgaaagaaggttctgttgtggttccggtttgtgctgctgttgaagcagacattgccgaactggacgacgaagaacgtgacgagtttatgcaggagcttgggctggaagaaccgggcctgaaccgtgtgatccgtgtcggttataagctgctgaacctgcaaacttacttcaccgctggggtgaaagaagtgcgtgcatggaccattccggttggagcaaccgcgccgcaggcagcgggcaaaatccatactgattttgaaaaaggctttatccgtgcacaaaccatctcgtttgaagatttcatcacttacaaaggtgaacaaggcgcgaaagaagcaggcaaaatgcgtgcagaaggtaaagattacatcgttaaagatggcgatgtgatgaacttccttttcaacgtctaa

SEQ ID NO: 482917 - DNA, 204 bp, Shigella sonnei
atgtatctgcataacaaaaacaatatgcgccatttttgcattactaataagaaaaagcaaaaaacatcgatattcatttttggtcaatgggttttctggcctatcgttgttattgtgctactggttatcattttcatcttgccaggatcgcacgtaatcacgttattcggggactttatctgcgggatattacccttcaggtaa

SEQ ID NO: 482918 - DNA, 255 bp, Shigella sonnei
gtgatccacggcgcaaccgacaaattcgcgccggcaggttttgcgccgatcgctattggtctggccttaaccctgattcacttaattagtattccggtgactaacacttctgttaacccggcgcgcagcaccgcggttgctatcttccagggcggctgggcattagaacaactgtggttcttctgggtggtgccaattgtcggcggcattatcggtggtctgatttaccggaccctgctggaaaagcgtgattaa

SEQ ID NO: 482919 - DNA, 900 bp, Shigella sonnei
atgttttctgggctgttaatcattctggttcccctgattgtaggttacctcattccgcttcgccaacaagctgcgttaaaagttattaatcagctattaagctggatggtttaccttattctcttttttatgggtatcagtctggcgtttctcgataacctcgccagtaacctgttggcgattctgcattattctgccgtcagtattaccgttattttactgtgtaatattgccgccctgatgtggctggagcgaggcctgccgtggcgcaaccaccatcagcaagaaaaactcccgtcgcgtattgcgatggcgctggagtcgctaaaactgtgcggcgtagtagtgattggttttgccattggtctgagtggactggctttcttacaacacgcgaccgaagccagtgaatacacgttaattttgctacttttcctcgttggtattcagttgcgcaataatggcatgaccttaaagcagattgtccttaatcgccggggaatgattgtcgccgtggtggtggttgtcagttcattaattggtggtttaattaacgcctttattcttgatctccccatcaataccgcgctggcaatggcctccggtttcggctggtattctctttccggtattttattgaccgaatcttttggtccggtaatcgggagcgcggcgttttttaatgatctggcccgtgaactgattgctattatgttgatccctgggctgattcgccgcagccgctctactgcactgggcttatgcggtgccacatcaatggatttcaccctgcccgttcttcaacgtactggcgggctggatatggtcccggcggcaattgttcacggttttattcttagcctgttagtgccgatcctcatcgcctttttctctgcgtaa

SEQ ID NO: 482920 - DNA, 1653 bp, Shigella sonnei
atgttttgtgtgcaatgtgaacaaactatccgtactccggcaggaaacggctgctcatacgcgcaggggatgtgtggtaaaacggcggaaacttctgaccttcaggatttactcatcgcggcgctgcaagggctttctgcctgggcggtaaaagcgtgtgaatacggcatcatcaaccacgatgttgacagcttcgcgccacgtgcctttttctcaaccctgaccaacgttaacttcgattctccgcgtattgtcggctacgctcgtgaagcgattgccttgcgcgaggcgctgaaagcacaatgcctggctgtagatgccaacgcgcgcgtcgataacccgatggctgacctgcaactggtgagcgatgatctcggcgagctgcaacgtcaggcagcagaatttacccctaacaaagataaagcggcgattggcgaaaacattctcggcctgcgtctgctgtgcctgtatggcctgaaaggtgcggcggcctatatggaacacgcgcatgttctcggtcaatacgacaacgatatttatgcccagtaccataaaatcatggcgtggctggggacctggcctgccgatatgaacgcgcttcttgagtgttcaatggaaatcggccagatgaacttcaaagtgatgagcattctggatgcaggcgaaaccggtaaatacggtcacccgacgccaacccaggtcaacgtcaaagcgacggcgggtaaatgcattctgatttccggtcacgatctcaaagatctctacaacctgctggaacagaccgaaggcacgggcgttaatgtctacacccacggcgaaatgctgcctgcgcatggctacccggagctgcgtaaattcaagcatctggtcggtaactacggcagcggctggcagaatcagcaagtggagttcgctcgtttccctggccccatcgtgatgacctcgaactgcatcatcgacccaaccgtaggcgcttatgacgatcgtatctggacccgcagcattgttggctggcctggcgtgcgtcatctggacggtgatgatttctctgcggttatcacccaggcgcaacagatggcaggcttcccgtacagcgaaattccgcaccttatcaccgtgggttttggtcgccagacgctgcttggcgctgctgatacgctgattgatctggtgagccgtgaaaaactgcgtcatatcttcctgcttggtggctgtgacggcgcacgcggcgagcgccactacttcaccgatttcgccaccagcgtgccggatgactgcctgatcctgaccctcgcctgtggtaaatatcgctttaacaaacttgagtttggcgatatcgaaggtctgccgcgtctggtagatgcaggtcaatgtaacgatgcttactcagcgattattctggctgtcactctggcagagaaactgggctgtggtgtgaacgatctgccgctgtcgctggtgctctcctggtttgaacagaaagcgatcgtcattctgctgacgctgctttctctgggcgtgaaaaatatcgtcaccggcccgactgcacctggtttcctgacaccagacctgctggcggtgctgaacgagaaattcggcctgcgttctatcaccactgttgaagaagacatgaagcaactgttgagcgcgtaa

SEQ ID NO: 482921 - DNA, 969 bp, Shigella sonnei
atgacgatgccaacgaatcaatgcccgtggcggatgcaggttcatcacattacgcaagaaacgccggatgtgtggacgatttccctgatttgccacgattactacccatatcgcgccgggcaatatgcactggtcagcgtgcgaaactcagcggaaacgctgcgtgcttacaccatttcctccacgccaggcgtgagtgaatatatcaccctgaccgtgcggcggattgatgacggtgtcggctcccagtggctgacgcgcgatgtaaaacgcggtgattatctctggctttcggacgcgatgggggaatttacctgcgacgataaagcagaagataaattcctgttgctggcggcaggctgcggcgtcacgccgattatgtcgatgcgtcgctggcttgcgaagaaccgtccacaggccgatgtgcgggtgatctacaacgtgcgtacgccgcaggatgttattttcgccgatgagtggcgtaactatccggtaacgctggtggcagaaaataacgttaccgaaggctttatcgctggtcgtctcactcgcgaactgctggcaggtgtacctgacttagcttcacgtaccgtgatgacctgcggcccggctccgtatatggattgggtagagcaggaagtgaaagcgctcggcgtgacgcgtttctttaaagagaaattcttcactccagtagcagaagcggcgaccagcggtctgaaattcaccaaactgcaaccggcacgagaattttacgccccggttggcaccacgctactggaggcgctggaaagcaataacgttccggttgtcgctgcctgccgtgcgggtgtttgcggctgctgtaagacaaaagtggtttccggtgaatatacggtgagcagtacaatgacgctgaccgacgccgaaatcgctgaaggttacgtactggcctgctcctgccatccgcagggggatttggttctcgcataa

SEQ ID NO: 482922 - DNA, 1719 bp, Shigella sonnei
atgaaacaaacggttgcagcttatatcgccaaaacactcgaatcggcaggggtgaaacgcatctggggagtcacaggcgactctctgaacggtcttagtgacagtcttaatcgcatgggcaccatcgagtggatgtccacccgccacgaagaagtggcggcctttgccgctggcgctgaagcacaacttagcggagaactggcggtctgcgccggatcgtgcggccccggcaacctgcacttaatcaacggcctgttcgattgccaccgcaatcacgttccggtactggcgattgccgctcatattccctccagcgaaattggcagcggctatttccaggaaacccacccacaagagctattccgcgaatgtagtcactattgcgagctggtttccagcccggagcagatcccacaagtactggcgattgccatgcgcaaagcggtgcttaaccgtggcgtttcggttgtcgtgttaccaggcgacgtggcgttaaaacctgcgccagaaggggcaaccacgcactggtatcatgcgccacaaccagtcgtgacgccggaagaagaagagttacgcaaactggcgcaactgctgcgttattccagcaatatcgccctgatgtgtggcagcggctgcgcgggggcgcataaagagttagttgagtttgccgggaaaattaaagcgcctattgttcatgccctgcgcggtaaagaacatgtcgaatacgataatccgtatgatgttggaatgaccgggttaatcggcttctcgtcaggtttccataccatgatgaacgccgacacgttagtgctactcggcacgcaatttccctaccgcgccttctacccgaccgatgccaaaatcattcagattgatatcaacccagccagcatcggcgctcacagcaaggtggatatggcactggtcggcgatatcaagtcgactctgcgtgcattgcttccattggtggaagaaaaagccgatcgcaagtttctggataaagcgctggaagattaccgcgacgcccgcaaagggctggacgatttagctaaaccgagcgagaaagccattcacccgcaatatctggcgcagcaaattagtcattttgccgccgatgacgctattttcacctgtgacgttggtacgccaacggtgtgggcggcacgttatctaaaaatgaacggcaagcgtcgcctgttaggttcgtttaaccacggttcgatggctaacgccatgccgcaggcgctgggtgcgcaggcgacagagccagaacgtcaggtggtcgccatgtgcggcgatggcggttttagcatgttgatgggcgatttcctctcagtagtgcagatgaaactgccagtgaaaattgtcgtctttaacaacagcgtgctgggctttgtggcgatggagatgaaagctggtggctatttgactgacggcaccgaactacacgacacaaactttgcccgcattgccgaagcgtgcggcattacgggtatccgtgtagaaaaagcgtctgaagttgatgaagccctgcaacgcgccttctccatcgacggtccggtgctggtggatgtggtggtcgccaaagaagagttagccattccaccgcagatcaaactcgaacaggccaaaggatttagcttgtatatgttgcgcgcaatcatcagcggacgcggcgatgaagtgatcgaactggcgaaaacgaactggctaaggtaa

SEQ ID NO: 482923 - DNA, 1002 bp, Shigella sonnei
atgattgatttacgcagtgataccgttacccgaccgagccgcgccatgctcgaagcaatgatggccgccccggttggggacgacgtttacggagacgaccctaccgttaatgctctgcaggactacgccgcagagctttccggtaaagaagccgccatttttctgccgaccggcacccaggctaacctggtcgctctgctcagtcactgcgaacgcggcgaagagtatattgtcggtcaggccgcgcataattatctgtttgaagccggtggcgcagcggtgctgggcagtattcaaccgcaacccatcgacgcggctgccgacggcacgctaccgctggataaagtggcgatgaaaatcaaacccgacgatatccatttcgcccgcaccaaattactcagtctagaaaacacccacaacggcaaagtgctgccgcgtgaatacctgaaagaagcatgggaatttacccgcaagcgcaatctggcgctgcatgttgacggtgcgcgcatctttaatgccgtggtggcttacggctgcgaactgaaagagatcacgcaatattgtgattcgttcaccatttgcctgtcgaaaggtcttgggacgccagtcggttcattactcgtcggtaatcgtgattacattaaacgtgccatccgctggcggaaaatggccggtggcgggatgcgtcagtccgggattctggctgccgccgggatgtatgccctgaaaaataacgtcgcacggttgcaggaagatcacgacaacgccgcctggatggcggagcaactgcgtgaagcaggcgcggatgtgatgcgtcaggacactaatatgctgtttgttcgcgtcggggaagaaaatgctgccgcgttaggcgaatacatgaaagcgagaaacgtgctgattaacgcctcgccgattgtccgcctggtgacgcatcttgacgtctcgcgcgaacaactggcggaagtcgccgcccactggcgcgcattcctggcgcgttaa

SEQ ID NO: 482924 - DNA, 1431 bp, Shigella sonnei
gtgccgcaacgcattttagttctcggtgccagtggctacattggtcagcatctggtgcgcacactcagccagcaagggcatcagatcctggcggcggcacgtcatgtcgacaggcttgcaaagctgcaactggcaaacgtcagttgccataaagtcgatctcagctggccggataaccttccggccctgttgcaggatatcgataccgtctattttctggtgcacagcatgggcgaaggcggcgattttatcgctcaggagcgccaggtggctctcaacgtccgcgatgcgctacgtgaagtaccagttaagcaattaatctttctcagttcgttgcaggccccgccacatgagcagtcggatcatctgcgtgctcgtcaggctacggcggacattcttcgtgaagcgaatgtacctgtgaccgaacttcgggccggaattatcgttggcgcaggttcagcggcgttcgaagtcatgcgcgatatggtctacaacctgccagtgttaacgccgccacgctgggtacgttcacgcaccacgcccatcgcgctggaaaacttgctgcactatctggtggcgttgttagatcatccggccagcgaacaccgcatcttcgaagccgccggaccagaggtgctcagttatcagcaacagtttgaacattttatggcggtgagcggtaagcgccgctggttgatccccatccccctccccacccgctggatttcggtgtggtttctcaatgtgattacttccgtaccgcccaccaccgccagggcgttgattcaggggctgaaacacgatctgctggcggatgataccgcgctacgtgcactcatcccacaacggctgatcgctttcgatgacgcggtacgtagcacgttgaaagaggaggaaaaactggtcaactccagcgactggggctacgacgctcaggcctttgcccgctggcgaccggagtacggttattttgccaaacaggcggggtttaccgttaaaacgtccgccagccttgctgctttatggcaggtagtgaaccaaatcggcggtaaagagcgttatttctttggcaatattttgtggcagacacgggcgttgatggaccgcgcgatcggtcataagctggcgaaaggccgcccggagcgcgaatatttacagactggcgatgcggtggatagctggaaagtgattgtcgttgaaccggaaaaacaacttacgttgttatttggcatgaaagcgtcggggctgggacgactgtgttttagcctggaagataaaggcgactatcgtactatcgatgtccgcgctttctggcatccgcacggtatgccggggctgttttactggttattgatgatccccgcgcatctgtttatttttcgcggaatggcaaaacaaatcgccagactggcagaacaaagcacagattaa

SEQ ID NO: 482925 - DNA, 1014 bp, Shigella sonnei
atgaaggtactggttaccggcgccaccagcggcttaggtcgaaacgcggtagagtttttatgccagaaaggcatcagcgtgcgagcgaccggtcgcaacgaggcaatgggcaaattgctggaaaaaatgggcgcagagtttgttccggcggatctgaccgagctggtttcatcacaagctaaagtgatgctcgcgggcattgatacgctgtggcactgctccagctttacctcaccctgggggacacaacaggctttcgatctggctaacgttcgcgccactcgccgcctgggtgaatgggctgtcgcctggggtgtgcgtaactttattcatatctcttccccctccctgtacttcgattatcaccaccatcgcgatattaaagaagattttcgccctcaccgcttcgccaacgagtttgcccgcagcaaagcagccagcgaagaagtgatcaatatgctttcgcaggcgaatccacaaacgcgctttactattctgcgcccacaaagtctgttcggaccgcacgataaagtctttattccccgtctggcgcatatgatgcaccactacggcagtattctgttaccgcatggcggcagtgcgctggtcgatatgacctactatgaaaataccgtgcacgcaatgtggctggcaagccaggaagcctgcgataagctaccttccgggcgtgtgtacaatatcaccaacggcgagcatcgcacactgcgcagcatcgtgcagaagctgatcgacgagttgaatattgactgtcgtattcgttccgtcccctacccgatgctggatatgatcgcccgcagcatggagcgtttaggccgcaagtcagcaaaagagccgccgctgacccactacggcgtctccaagttgaattttgactttacgctggatattacgcgtgcgcaggaagagttaggttatcagccgatcatcaccctagatgaaggtatcgagaaaactgccgcctggctacgcgaccacggaaaactgccgcgctaa

SEQ ID NO: 482926 - DNA, 831 bp, Shigella sonnei
atgagaagagtcttctggctggtcgctgccgctctgttattggcagggtgtgcaggcgaaaaaggcattgtcgagaaagagggatatcagcttgatacccgacgccaggcgcaggcggcgtatccgcgcattaaagtgctggtgatccactacaccgcagatgattttgatagctcgctggcgacactgaccgataagcaggtcagctcgcattatctggtccctgcggtaccaccgcgatacaacggtaaaccgcgcatctggcaactggtgccggaacaagaactggcctggcatgcggggattagcgcctggcgcggggcaacgcgccttaacgacacctctattggcattgagctggaaaaccgtggctggcaaaaatcggccggagtgaaatattttgccccgtttgaaccgacacagattcaggcgcttattccactggcgaaagatattattgcccgttatcacatcaagccggaaaacgtagtggcacatgcggatatcgcaccgcagcgcaaagacgatccggggccattatttccctggcagcaactggcgcagcaggggattggtgcctggccggatgcgcagcgggttaacttttaccttgccgggcgcgcgccgcacacaccggtagataccgcgtcattgctggagcttttggcgcgctacggttatgacgttaaacctgatatgacaccgcgcgagcagcggcgcgtgattatggcattccagatgcatttccgcccgacgttatataacggcgaagcggatgcagaaactcaggcgattgccgaagcattgctggagaaatacgggcaggattag

SEQ ID NO: 482927 - DNA, 324 bp, Shigella sonnei; identical to SEQ ID NO: 458199

SEQ ID NO: 482928 - DNA, 1803 bp, Shigella sonnei
gtggattatcgtttttcttgggtgatttttaatatgataaacaatatatctgatcaagcatcatcatttccaggcacacaactaaatcaaagtgataatttcctggattcactgagggaatttttcgcgatattaaattccagtcgtaagggtgagttgtctacatgggataccatctacttgcatctgatattagcaataaatgctgacagtgatctcataaaaaatgatgtgttgctcgcggaaaatatgccatcagcgaattaccaatttaatactttttttagtaatgctttcgagactgatgttaaaaaatatctgggtaaatcagaagataacgaagttgaaataaaggcgggtaatgaaagaatctctattggaatacgtaatgtatcgaatgggaaacttgaaagacaacagtttcttttccctctggactatgagaataaattacaagatcaattagacaagcattttacgattgaatcgcacccattattatacaggcataccattggtagtaaaattgcgaatgtgatttttgaaaaattatacagccgtattgactttaacaaagaacaatatatatcctttataaagggcgcgtttattcatttttatgattatagcaggcgatatgcaattagtgagaatatcgaaaaagacgctgtaacaaacaatatcgcattgatgaacactttttatgacagtgataatacgtcaggtgaggttttaaataatgattttacagaagaagagccatttgaaactgcgttagatgtagagcatacaatagtgcttggatttgctgatgataattttgaaacaaaacctgttcattatcaggatttattaacacgatttagtgcctttcaagataccgtgtttaatctgtttcctgaaatgcgctcttcgcattaccacgatatttgtagcgtatgtgtggatatgacaaagggaacgcaatgcatgattcacttgatggtgaatgaagaagttttcatgtctctgcctgttccagttgccacgatggtacgtgaagatgcaagtaatttagtcaatcttaaaacactactcaatgatggttttttcattaaatatagtcattttaatgacgtggcattaataaagcaaaacataagtaatctctacttatcacacactgttgtgaatgaaagcatattgaaaaaatgttgttttgaaaacggcagtttaggtgatgttaaaataacaaatagcaatataataaataatgtattcaaaaatgtttcgtttagatctgttaaaattaacaacgtaaatactcattctttaaaatttattaattgccatttttttaatgttgatatgataagagttaatttcagcaaatgtctttttcatgactgtagtatgcatggtgtcaagataaaaccatggttgccagtaaaatggacaaaagagttaataaatgattatttgtatggctgtttactatctctgtactctatctgtgcaagggatatatataatatgagcgccgggaataacgtgaaggttgctgcggatgctttccttgaaattattttctctcttaagaataaatattgcattaaactattaagcgctcaggaacgggcgtttatttacgaatttgcaagaatgatcttcgcttatattaatgacaaaagcattgagatcttattactttcttgttttgcggcgtctgaccaaaaagcaatccagaggtatatacctcagtcacaagatggggaagactttaggagtcatttacaatataagttgcctctttccgctcattaa

SEQ ID NO: 482929 - DNA, 516 bp, Shigella sonnei
atgcgctaccgttcactatctctacttattccatgtgcactgctgctgagtgcctgtaccaccgtcacgccagcttataaagataacggtccccgcaccggttcctgtgtccagggggggcctgacagcgtggctcaacaattctatgactaccgcattcaacatcgcagcaatgacattaccgccctgcgcccctatttgagtgacaaactggcaacccttcttagcgatgccagccgcgataatagtcatcgtgaattgttaagcagcgatccgttctccagtcgaaccaccttgccagatagcgcccacgttgccagtgcatcgactatccctaatcgtgatgcccgtaacattccattgcgcgtagatctcaaacagggtgaccagggttggcaggatgaagtgttaatgattcaggaaggccagtgttgggtcatcgacgatgtgcgctacttaggcggcagcgttcatgccacggcgggtacgctccgtcagtccatcgagaatcgctaa

SEQ ID NO: 482930 - DNA, 729 bp, Shigella sonnei
atgagtattcaattaaacggcattaattgcttctacggcgcgcatcaggcgctgttcgatatcacgctggattgcccacagggcgaaacgctggtgttacttggccccagcggcgcgggtaaaagctcgctgctgcgtgtactcaatctgcttgagatgccacgctccggtacgctcaacattgcaggcaaccatttcgatttcaccaaaacaccctctgacaaagcgattcgcgatttgcgtcgtaacgttggcatggtgtttcagcaatacaacctgtggccgcatctgaccgtgcagcaaaacctgattgaagcgccctgccgtgtactggggttgagtaaagatcaggcgctggcccgtgcagaaaaactgctggaacgtctgcgtctcaaaccttatagcgatcgttacccgctgcatctttctggtggtcagcagcagcgtgttgctattgcccgtgcgttgatgatggaaccgcaggtactgctgttcgatgaaccgaccgccgcactggacccggaaattacggcacaaatcgtcagcatcattcgtgagctggcagaaacgaatattacccaggtgatcgtcacccacgaagttgaagtggcgcgtaaaaccgccagccgagtggtgtatatggaaaatggtcatatcgtagaacaaggcgacgcgagctgctttaccgagccgcaaaccgaagcatttaaaaactatctctctcactaa

SEQ ID NO: 482931 - DNA, 732 bp, Shigella sonnei; identical to SEQ ID NO: 458202

SEQ ID NO: 482932 - DNA, 717 bp, Shigella sonnei
atgaatgaattttttcctttagcaagcgccgccgggatgaccgtcggccttgccgtttgtgcattgattgtcgggctggcgctggcgatgttctttgcggtatgggagtcggcaaaatggcgtcctgtcgcgtgggcaggttcagcgctggtaaccattctgcgtggcctgccagaaattctggtggtgctgtttatctattttggctcctcgcagctgctgctgacgctttcggatggcttcactatcaatcttgggttcgtgcagatcccagtgcagatggacattgagaacttcgacgttagcccgttcctttgtggtgtcatcgctctgtcactgctgtatgccgcctatgcctcgcaaacgcttcggggcgcgttgaaagcggtgccggtgggtcagtgggagtctggtcaggcgctggggctgtcgaaatcggctatctttttccgtctggtgatgccgcagatgtggcgtcatgcgctgcctggcctcggtaaccagtggctggtgctgctgaaagataccgcgctggtcagtttgattagtgtgaatgatttaatgctgcaaacaaaaagcatcgctactcgtacccaggaaccatttacctggtacattgtggcggcggcgatttacctggtgatcaccctgctcagtcagtacattctcaaacgcattgacctgcgcgcgacacgttttgagcggaggcccagctaa

SEQ ID NO: 482933 - DNA, 669 bp, Shigella sonnei
atgtttgagtatttacccgaactgatgaaagggctacacaccagcctgacgctaaccgttgcctcgctgattgtggcactgattctggcattgatttttaccatcatcctgacgctgaaaacgccggtgctggtgtggctggtgcggggttatatcacgctgtttaccggtacgccgctgctggtgcagatcttcctgatttattacgggccgggccagtttccgacgttgcaggagtatccggcactgtggcatttgttgtcagaaccgtggttatgtgcgctgattgcgttatcgctgaacagtgcggcgtataccacgcagctgttttacggtgcaattcgtgcgatcccagaaggtcagtggcagtcctgtagcgccctgggaatgagcaaaaaagatacgctggcgctcctgctgccgtatgcctttaaacgctcgctctcttcttattccaacgaagtggtgctggtgttcaaaagtacctctctggcttacaccattacgctgatggaagtgatgggatacagccagttgttgtacggacgcacctacgatgtaatggtgttcggtgcggcagggattatttacctggtcgtcaacggcctgctgacgctgatgatgcgtctgatcgagcgcaaagcactggcattcgaacggcggaattaa

SEQ ID NO: 482934 - DNA, 732 bp, Shigella sonnei
atgaaaaagttagttcttgccgctttacttgcttcctttactttcggtgcttctgccgcagagaaaatcaattttggcgtttcagccacctatccaccctttgaatctataggtgctaataatgagattgtcggctttgatatcgatctggcaaaagccttgtgcaaacaaatgcaggcagaatgtacttttactaatcacgcgttcgacagcctgatcccgtcactgaaattcagaaaatatgactccgtaatctccggtatggatatcacgcccgagcgtagcaagcaggtatcgtttaccacgccctactatgaaaactcagccgtcgtgattgccaaaaaagatacctacaaaacgtttgccgatctgaaaggcaaacgtattgggatggaaaacggcaccacgcaccagaaatatattcaggatcagcaccccgaagtgaaaactgtctcctatgacagttatcagaatgcctttatcgatctgaaaaatggtcgtattgatggggtatttggtgacacagcggtggtaaacgaatggctgaaaaccaatccgcaactgggcgttgctactgaaaaagtgaccgatccgcaatacttcggcaccggtctgggcatcgctgtacgtccggataacaaagctctgctggaaaaactgaataacgcgctggcagcaattaaagctgacggtacatatcagaaaatcaatgaccagtggttcccgcagtaa

SEQ ID NO: 482935 - DNA, 1128 bp, Shigella sonnei
atgcagtgcgcactttacgacgcgggtcgctgtcgttcctgtcagtggataacgcagccgattccagagcaactctccgctaaaaccgccgatcttaaaaatctgctcgccgattttccggttgaggaatggtgcgcgccggtgtcaggcccggaacaagggtttcgtaataaagccaaaatggtggtgagtggtagcgttgaaaaaccactgctcggtatgctgcatcgcgatggcacgccggaagacctttgtgactgcccgctttatcctgcctcttttgcgcccgtttttgcggcgctaaaaccgtttatcgcccgtgcggggttaacgccctacaacgtggcgcgtaagcgtggcgaactgaaatacattctgctgactgaaagccagagcgatggcggcatgatgctgcgctttgtactgcgttctgaaaccaaactggcacaactgcgtaaggcgctgccgtggttacaggaacaactaccgcaactgaaagttattaccgtcaatattcagccggtacatatggcgattatggaaggggagacggagatctacctgactgaacaacaggcgctggcagagcgttttaatgacgtaccgctgtggatccgtccgcaaagtttcttccagactaatccggcggtcgccagccagctgtacgctaccgcgcgcgactgggtacggcagctgccagttaaacatatgtgggatctgttctgcggtgtgggtggctttggtttacactgcgcgacgcctgacatgcagttaaccgggatcgaaattgcatcagaggccattgcctgtgcaaagcagtcagccgctgaactgggcttaacgcgtttgcaatttcaggcgctggactccactcagtttgccaccgctcagggggatgtgccggagctggtgctggttaacccgccgcgccgcggcattggtaaaccgctgtgtgattatctctcaacgatggcaccgcgttttattatctactccagctgtaacgcccaaaccatggcgaaagatatccgcgaactgccaggttaccgcatcgaacgggtacagctttttgatatgttcccgcacaccgcgcactatgaagtgatgacgctgctggtgaagcaataa

SEQ ID NO: 482936 - DNA, 489 bp, Shigella sonnei; identical to SEQ ID NO: 471816

SEQ ID NO: 482937 - DNA, 846 bp, Shigella sonnei
atgaataatttaccggtagttcgttcgccctggcggattgtgattttgctgctgggctttacctttctctacgcgccaatgctgatgctggttatctattcgtttaacagctcgaagctggtgacggtgtgggccggctggtcaacgcgctggtatggtgagttattgcgcgatgacgcgatgatgagtgcggttggtttaagcctgacaattgctgcctgtgcggcaacggcggcggcgatcctcgggactattgcggcggtggtgctggtgcgttttggcaggtttcgcggatcaaatggttttgcctttatgatcaccgcgccgctggtgatgccagatggcatcacgggcttgtcgctgttgttattattcgtcgcgcttgctcatgccattggctggcctgcggaccgcggtatgctcaccatctggctggcgcatgtcactttttgtacggcttatgtggcggtcgttatttcttcaagattgcgggaactggatcgctcgatagaagaagcagcgatggatctcggtgcgacgccgctgaaagtgtttttcgtcattacgctaccgatgatcatgcccgcgatcatttctggctggttactggcttttactttgtcgcttgatgatctggtgatcgccagctttgtttccgggccgggagccaccacgttaccgatgctggtcttttccagcgtgcggatgggagtgaatccggaaatcaacgcccttgcaacgttaattctcggtgcggtcggaattgtcggatttatcgcctggtatctgatggctcgcgcagaaaaacagcggatacgcgatatccagcgtgcaagacatggctga

SEQ ID NO: 482938 - DNA, 954 bp, Shigella sonnei
atgagtacacttgaacctgctgcccagtcgaaaccgccgggcggatttaagctgtggttgtcgcagctgcaaatgaagcatgggcgcaaactggtcattgcgttgctatatatctggttgatcttgctgtttctgctgccatttctgattgtctttaaaataagcctgggagagatggcgcgcgctattccaccttataccgaactgatggagtgggctgacgggcaactttccatcactcttaatctcggtaattttctgcaactgaccgacgatccgctctattttgatgcttatctccagtcgttacaggtggcggcgatttcgacattttgctgtttactgatcggctatccgctggcgtgggcggtggcgcacagtaagccttcgacccgtaatattttattactactggtgatcctgccgtcgtggacctcgtttctgatccgcgtttatgcctggatgggaatattaaaaaacaacggtgtgctgaataattttctgctgtggctgggggttatcgatcaaccgctgaccattctgcataccaatctggccgtttatatcggcattgtttacgcttacgtgccgtttatggtactgccgatttataccgcgttgattcgtattgattattcgctggtggaagcagcgctggatctcggtgcacgaccgctgaaaacgttctttactgtgatcgtgccgctgactaaaggtgggattattgccggatcgatgctggtgtttatcccggctgtgggcgagtttgtgatcccggaactgctcggtggcccggacagcatcatgatcgggcgcgtgttatggcaagagtttttcaataaccgcgactggccggtggcctcggcggtagcgatcatcatgttgctgctgctaattgtgccgataatgtggttccacaaacaccagcaaaaaagcgtgggagaacacggatga

SEQ ID NO: 482939 - DNA, 1134 bp, Shigella sonnei
gtgaatgacgctatccctcgcccgcaggcgaaaacccgtaaggcgctgacgccgctattagaaatccgcaacctcaccaaatcctacgatggtcagcatgcggtcgatgatgtcagcctgaccatctacaaaggtgaaatcttcgcgctgctgggcgcatccggctgtggcaagtccacgctgctgcgtatgctggcaggttttgaacaaccttctgccgggcagataatgctcgatggcgtcgatttgtcacaggtgccgccttacctgcgccccatcaatatgatgtttcagtcttacgcgctgtttccgcatatgaccgtggaacagaacatcgcttttggcctgaaacaggacaaactaccgaaagcggaaattgccagtcgggtccatgagatgctcggcctggtgcacatgcaggagttcgccaaacgcaaaccgcatcagctttccggtggtcagcgacagcgtgtggccctggcccgaagccttgccaaacgcccgaaactattactgctcgatgagccgatgggcgcgctggataaaaagctgcgtgaccggatgcagcttgaagtggtggatattctggagcgcgtcggtgtgacttgtgtgatggtcacccacgatcaggaagaggcgatgaccatggcggggcgtatcgccattatgaatcgcgggaaatttgtccagattggcgagccggaagagatctacgagcatccaactacccgctacagcgctgaatttatcggttcggttaatgtctttgaaggtgtactcaaagagcgtcaggaagatggcctggtgcttgattcgccggggctggtgcatccactgaaagtcgatgcggatgcttcagtggtcgataacgtgccggtacacgtagcgctgcgcccggaaaaaatcatgctttgcgaagagccgcccgccaatggttgtaacttcgcggtgggggaggtgatacacattgcctatctcggcgatctttcggtgtatcacgttcgactgaaaagtgggcagatgatcagcgcccagctacaaaacgcccatcgtcatcgtaaagggttaccgacctggggcgacgaagtgcgtttgtgctgggaagtggacagctgtgtggtgctgacggtttaa

SEQ ID NO: 482940 - DNA, 1113 bp, Shigella sonnei
atgaccgccttaaataaaaaatggctttcgggtctggctgcgggtgctctgatggccgtctctgtcggcacgctcgcggctgaacaaaaaacactccacatttataactggtctgattatatcgccccggacacggtggccaattttgaaaaagaaaccggtattaaagtcgtctacgatgttttcgactctaacgaagtactggaaggcaaattaatggcgggtagcaccggctttgacttggtggttccatctgccagctttcttgaacgccagttgactgcgggagttttccagccgctggacaaaagcaaattgccggagtggaagaatctcgacccggagctgctgaagctggtcgccaaacacgatcccgacaataaatttgctatgccctatatgtgggcgacgaccgggattggctataacgttgataaagttaaagctgtgctgggcgaaaacgcgcccgtcgatagctgggacttgatcctcaaacctgaaaatctggaaaaactgaaaagctgcggtgtctctttcctggatgcgccagaagaagtttttgctaccgtgttgaattatctcggcaaagatcccaacagcactaaagcggatgattacaccggaccggcaaccgatctgctgttaaagctgcgcccgaacattcgttatttccattcatctcaatacattaacgacctggcaaacggcgatatttgcgtcgctatcggctgggcaggtgatgtctggcaggcgtcaaaccgcgcgaaggaagcgaagaatggagtgaatgtctcgttctcgattccaaaagaaggggcgatggcgttctttgatgtattcgccatgcctgcggatgccaaaaacaaagacgaagcctatcagttcctgaattacctgctgcgcccggatgtagtagcgcatatttccgaccatgtgttctatgccaacgccaataaagcagccacgccgctggtgagtgcggaagtccgtgagaacccgggtatttatcctccggcggacgttcgtgcgaagctattcactctgaaagtacaggatccgaaaatcgaccgtgtgcgcacccgcgcgtggaccaaagtgaagagcggaaaataa

SEQ ID NO: 482941 - DNA, 477 bp, Shigella sonnei
atgacatcgctggtcgttcctggtctggatacgctgcgtcaatggctcgatgacctggggatgagtttttttgaatgtgataactgtcaggctctgcatctgccccatatgcagaatttcgacggtgtctttgatgccaaaatcgatctgatcgataacacgatcctgttttctgccatggcggaagtccgaccttcagccgtattgccgctggcggcggatttatctgccatcaatgccagttcgctgaccgtgaaagcatttcttgatatgcaggatgataatctgccaaagctggtggtttgccagtctttatccgttatgcagggcgtaacctatgagcagtttgcatggttcgtgcgtcagagcgaagagcagatttcgatggtcattcttgaagctaatgcccatcaactgctgttaccgactgacgatgaagggcaaaacaacgttaccgaaaactatttcctccactga

SEQ ID NO: 482942 - DNA, 903 bp, Shigella sonnei
gtgaaaattgccatattgtcccgggatggaacgctctattcgtgtaagcggctgcgtgaagccgctatacagcgcggtcacctggttgaaattcttgatccgctttcttgctacatgaacataaatcctgcggcgtcttctattcactacaaaggccgcaagttaccccattttgacgcagtgatcccgcgtattggcaccgccattaccttttatgggacggcggcactgcgccagttcgagatgctggggagctatccgctcaatgagtcggtcgccattgcccgggcgcgtgacaaattgcgttccatgcaactgctggcgcgtcagggcatcgacctgcctgtcacgggcattgcgcattcgccggatgataccagcgatttaatcgacatggtcggtggtgcgccgctggtggtcaagttggttgaaggcacgcagggaattggcgtcgtgctggcggagacgcgtcaggcggcggaaagcgtgattgacgctttccgcggtctgaacgcgcatattctggtgcaggaatatatcaaagaggcgcaagggtgcgatatccgctgtctggttgttggcgatgaagtggtcgctgcgattgaacggcgggcgaaagagggcgattttcgttccaatttgcatcgtggcggcgcggcaagcgtcgccagtatcacaccacaggagcgtgaaatcgcgataaaagccgcgcgaacgatggcgctggacgttgctggtgtggatattctgcgtgctaatcgcgggccgttggtgatggaagtgaatgcgtcgccggggctggaaggaatagaaaaaaccactggtatcgacatcgcgggtaaaatgatccgctggatcgaacgccacgctacgacagaatattgcctgaaaacgggtggttag

SEQ ID NO: 482943 - DNA, 723 bp, Shigella sonnei; identical to SEQ ID NO: 458214

SEQ ID NO: 482944 - DNA, 288 bp, Shigella sonnei; identical to SEQ ID NO: 458215

SEQ ID NO: 482945 - DNA, 258 bp, Shigella sonnei; identical to SEQ ID NO: 471825

SEQ ID NO: 482946 - DNA, 378 bp, Shigella sonnei; identical to SEQ ID NO: 458217

SEQ ID NO: 482947 - DNA, 1686 bp, Shigella sonnei; identical to SEQ ID NO: 458218

SEQ ID NO: 482948 - DNA, 537 bp, Shigella sonnei; identical to SEQ ID NO: 459844

SEQ ID NO: 482949 - DNA, 1128 bp, Shigella sonnei
atggcgtcctgggcaacccgtacgcctgctatccgcgatattctctctgtctcgatcgctgaaatgggcggtgttctctttggtctgtcgatcggttcgatgagcggtattctctgctcggcgtggttagtgaaacgctttgggacacgtaatgtcatcctggtcacgatgtcctgcgcattgatcgggatgatgatattaagtctggcactctggctgacatcgcccctgctctttgccgttggtctcggcgtctttggggcaagttttggttctgcggaagtggcgataaacgttgaaggtgccgccgttgagcgagaaatgaataaaacggttttgccgatgatgcacggtttttatagcctaggcacgctggcaggcgctggtgtcgggatggcactgacggcctttggcgttccggcaacggtgcacattttattggcggcgctggtaggtatcgcgcctatttatatcgccattcaggcaatccctgacggtacgggcaaaaatgctgccgatggcacccagcatggcgaaaaaggcattcctttttatcgcgatatccagttgctgttgattggtgttgtagtgctggcgatggcctttgccgaaggttctgccaacgactggttacccttattaatggttgacggtcacggttttagccctacttccggctcgctgatttatgccggttttaccctagggatgaccgttggacgcttcactggcggttggttcatcgaccgttacagtcgcgttgccgtggttcgggccagtgcactaatgggggcgttgggtattgggctgattatttttgtcgatagcgcctgggtcgctggggtgtctgttgtactctggggactgggtgcctcgctgggcttcccgctgaccatttctgccgccagcgataccggccccgatgcaccaacccgcgtcagtgtggtagcaacgaccggttatctggctttcctcgtcgggccgccgctgctgggctatctcggcgaacattatggattacgtagtgcaatgctggttgtactggcgctggttattctcgcggctattgtcgcgaaagccgtcgccaaacccgataccaaaacgcggacggcgatggagaatagttga

SEQ ID NO: 482950 - DNA, 816 bp, Shigella sonnei
atgagcattaaattaattgcggtagacatggatggtactttcttaagcgatcaaaaaacctataaccgtgagcggtttatggctcagtatcagcaaatgaaagcacaaggcattcgctttgtggtcgccagcgggaatcaatattatcagttgctctctttcttccctgaaattgctaatgaaattgcctttgtggctgaaaacggcggctgggtagtgagtgaaggcaaagatgtttttaatggcgagctgtcgaaggatgcctttactactgtcgtggaacatttgctgacgcgcccggaagtggaaattattgcctgcggaaaaaatagcgcctatacgctcaaaaaatatgacgatgccatgaaaacggtggcagaaatgtattatcaccgtctggaatacgtcgataactttgacaacttagaagatattttctttaagtttggcctgaatctttccgatgaactgattccacaagtacaaaaagcattacatgaggccatcggcgatattatggtgccagtccacaccggcaacggcagcatcgatctgattatccccggcgtacataaagccaatggccttcgccaactgcagaaattatggggaatagacgacagcgaagtggtggtctttggcgatggcggtaacgatattgagatgctgcgtcaggcaggctttagttttgcaatggaaaatgccggcagcgcggtcgtcgcagcggcaaaataccgggcaggctccaataaccgtgaaggcgtactggatgtgatcgataaagtgcttaaacacgaagcgccatttgaccaataa

SEQ ID NO: 482951 - DNA, 279 bp, Shigella sonnei; identical to SEQ ID NO: 459841

SEQ ID NO: 482952 - DNA, 1032 bp, Shigella sonnei
atgcaaaataaattagctttcggtgccaggcttggacgtcaggcgttacttttccctctctgtctggtgctttacgaattttcaacctatatcggcaacgatatgatccaacccggtatgttggccgtggtggaacaatatcaggcgggcattgattgggttcctacttcgatgaccgcgtatctggcgggcgggatgtttttacaatggctcctggggccgctgtcggatcgtattggtcgccgtccggtgatgctggcgggtgtggtgtggtttatcgtcacctgtctggcaatattactggcgcaaaacattgaacaattcaccctgttgcgcttcttgcagggcataagcctctgtttcattggcgctgtgggatacgccgcaattcaggaatccttcgaagaggcggtttgtatcaagatcaccgcgctgatggcgaacgtggcgctgattgctccgctacttggtccgctggtgggcgcggcgtggatccatgtgctgccctgggaggggatgtttgttttgtttgccgcattggcagcgatctcctttttcggtctgcaacgagctatgcctgaaaccgccacgcgtataggcgagaaactgtcactgaaagaactcggtcgtgactataagctggtgctgaagaacggccgctttgtggcgggggcgctggcgctgggattcgttagcctgccattgctggcgtggatcgcccagtcgccgattatcatcattaccggggagcagttgagcagctatgaatatggcttgctgcaagtgcctattttcggggcgttaattgcgggtaacttgctgttagcgcgtctgacctcgcgccgcaccgtacgtgataattatgggcggctggccgattatgattggtctgttggtcgctgctgcggcaacggttatctcatcgcacgcgtatttatggatgactgccgggttaagtatttatgctttcggtattggtctggcgaatgcgggactggtgcgattaaccctgtttgccagcgatatgagtaa

SEQ ID NO: 482953 - DNA, 597 bp, Shigella sonnei
atgctggaaaatttgaatctctctctattctctcttattaacgcgacgccagactcggctccgtggatgatctcgttggcgatttttattgctaaagatttgattaccgtggtgccgttgctggccgcggtactttggttgtgggggcttacagcacaacggcaactggtgataaaaatcgctatcgcgctggcggtcagcctgtttgtgtcctggacgatgggacatctttttccgcacgaccgaccctttgtcgaaaatatcggctataacttcctgcatcatgcggcggatgactcattcccgagcgatcacggtacggtgattttcacctttgcactggcatttttatgctggcatcgcctgtggtccggctcacttttaatggttctggccgtcgtcattgcctggtcgcgcgtttatcttggcgtccactggccgctggatatgctcggtggattgctggcaggtatgattggctgccttagtgcccagattatctggcaagcgatggggcataaactctatcaacgtctgcaatcgtggtatcgcgtctgttttgcattaccgatccgcaaaggctgggtgcgtgactga

SEQ ID NO: 482954 - DNA, 759 bp, Shigella sonnei
atggaaacacgtcgcgaagagcgtatcgggcagctgctgcaagaattaaaacgcagcgataagttacatcttaaagacgccgccgccctgcttggggtttcggagatgacgattcgtcgcgatctgaacaaccacagtgcgcccgtcgttttgctcggcggctatattgttctggaaccgcgcagtgccagccattacctgttaagcgatcaaaaatcccgcctggtggaagaaaaacgccgggcggcaaaactggctgcgacactggtagaacccgatcagaccctcttttttgactgtggcaccaccacgccgtggattattgaagcgattgataatgaaatcccttttaccgccgtttgttattcgctaaatacctttctggcgctgaaagagaaaccccattgccgcgcatttctgtgcggtggtgaatttcacgccagcaacgccattttcaaccccatcgattttcagcaaacgttgaataatttttgcccggatatcgctttttattccgcggcgggcgtgcatgtcagtaaaggcgctacctgttttaatcttgaagagttgccggtaaaacactgggccatgtcgatggcgcaaaagcatgtgctggttgtcgaccacagtaaatttggcaaggtgcgtccggcgcgcatgggtgacctgaaacgctttgatattgtggtgagtgattgttgcccggaagatgagtatgtgaagtacgcgcagacgcaccgtattaagttgatgtattaa

SEQ ID NO: 482955 - DNA, 690 bp, Shigella sonnei
gtgcacggtctggatgcgccggggcagttcagtaccgcgcgcgatatggcattgctgggtaaagcattgatccacgatgtgccggaagagtacgccattcataaagagaaagagttcaccttcaacaaaattcgtcagcctaaccgtaaccgtctgctgtggagcagcaatctgaatgttgatggcatgaagacaggaaccacggcaggtgcgggatataatctggttgcttcggctacccagggtgatatgcgtttaatctccgtagtgctgggggcgaaaactgaccgtatccgttttaatgagtctgagaaattattgacctggggtttccgcttctttgaaactgtgacgccaattaaacctgatgccacctttgtgactcagcgcgtctggtttggtgataagagcgaagtgaatctcggggcaggcgaagcgggctccgtgaccataccgcgtgggcagctgaaaaacctgaaggcgagctacacgttaacggaaccgcagcttaccgcaccgctgaaaaaaggtcaggttgtcgggaccattgatttccagcttaacggtaaatccattgagcagcgtccgctgatcgtgatggaaaatgtggaagagggcggattctttggtcggatgtgggatttcgtgatgatgaaattccatcagtggttcggcagctggttctcttaa

SEQ ID NO: 482956 - DNA, 444 bp, Shigella sonnei
atggattacgccagcggtaaagtgctggcagaaggcaacgcggatgagaaactggatcccgcgagcctgactaaaatcatgaccagctatgtggttgggcaggcgcttaaggccgataagattaaactcaccgatatggtgacggtcggtaaagatgcctgggcgacgggaaatccggcactgcgtggttcatcggtaatgttcctcaaaccgggcgatcaggtttcggtggcagacttgaacaaaggtgtgattatccagtccggtaatgacgcctgtattgcgctggccgattacgttgccgggagccaggagtcatttattggtttgatgaatggttatgccaaaaaaactgggtctgaccaacactaccttccagacggtgcacggtctggatgcgccggggcagttcagtaccgcgcgcgatatggcattgctgggtaa

SEQ ID NO: 482957 - DNA, 597 bp, Shigella sonnei
atgctgagtttatacgaaaagataaagataaggctgataattttatttttattggcagcactgtcatttattggtctttttttcatcattaactatcaactggtatcggaacgcgcggtaaaacgtgccgatagccgctttgaacttattcagaaaaacgttggctatttctttaaagatattgaacgttcggccctgacattaaaggactcactgtatttattaaaaaatacagaggagattcaacgcgccgtgattctgaaaatggaaatgatgccatttttagactcggtgggactggtacttgatgataataaatattatctcttttcgcggagggcgaatgataaaatcgttgtttatcatcaggaacaagtaaatggaccgcttgtcgacgagtcagggcgggttatttttgccgattttaacccatcgaaacgaccgtggtcggtggcttcagatgactctaacaacagctggaatccggcatacaattgctttgatcgtccgggtaaaaaatgtatctcttttacgctacgtatcaacggcaaagatcacgatttgttagcgggtgatgctgccaacttactgatttag

SEQ ID NO: 482958 - DNA, 912 bp, Shigella sonnei; identical to SEQ ID NO: 458503

SEQ ID NO: 482959 - DNA, 921 bp, Shigella sonnei
atgcttaattacgttatcaaacgcttactggggttgattccgacgctgtttatcgtctcggtgctggtgtttttatttgtgcatatgctgcccggcgatccggcgcgattgattgccgggctcgaagctgatgcgcaggttatagaactggtgcgtcagcagctggggttggatcagccgctgtatcaccagttctggcactatatcagcaatgctgtgcagggggattttggcctgtcgatggtgtcgcgtcgtccggttgccgatgagattgccagccgctttatgccaacgctgtggctgaccataaccagtatggtctgggcggtgatatttggtatggcggcgggaattatcgccgccgtctggcgtaatcgttggccggatcgattgagtatgaccattgcggtgtcggggatctcgtttccggcatttgcgctggggatgcttttaattcaggtattctccgttgaactgggctggctgcctaccgtgggagcagacagttggcagcactacattttaccctccctgacgctcggcgcggcagtggcagccgtgatggcgcgctttacccgcgcgtcgtttgtcgatgttttaagcgaagattatatgcgtaccgcgagggcgaaaggggtgagcgaaacctgggttgtcctcaaacacgggctacgtaacgcgatgatcccggtagtgaccatgatgggcttacagtttggctttttgctcggtggttctatcgtggtggagaaagttttcaactggcccggacttggacgcttactcgttgactccgtagaaatgcgcgattacccggtgattcaggcggaaattctgcttttctcgctggaatttattcttatcaacttagtggtggatgtgctttacgccgccattaacccggctatcaggtacaagtaa

SEQ ID NO: 482960 - DNA, 1539 bp, Shigella sonnei
atggcaagagctgtacaccgtagtgggttagtggcgctgggcattgcgacagcgttgatggcatcttgtgcattcgctgccaaagatgtggtggtggcggtaggatcgaatttcaccacgctcgatccgtatgacgcgaatgacacgttatctcaggccgtagcgaaatcgttttaccaggggctgttcggtctggataaagagatgaaactgaaaaacgtgctggcggagagttataccgtttccgatgacggcattacttacaccgtgaaattgcgggaaggcattaaattccaggatggcaccgatttcaacgcagtggcggtaaaagcgaatctggaccgggccagcgatccggcgaatcatcttaaacgctataacctgtataagaatattgccaaaacggaggcgatcgatccgacaacggtaaagattaccctcaaacagccgttctcagcgtttattaatattcttgcccatccggcgaccgcgatgatttcaccggcagcgctggaaaaatatggcaaggagattggttttcatccggtgggaaccggaccgtatgaactggatacctggaatcagaccgattttgtgaaggtgaaaaaattcgcgggttactggcagccaggattgcccaaactggacagcataacctggcgtccggtggcggataacaacacccgcgcggcaatgctgcaaaccggtgaagcgcagtttgctttccccattccctacgagcaggccacactgctggagaaaaacaaaaatatcgagttgatggccagtccgtcaattatgcagcgttatatcagtatgaacgtgacgcaaaagccgttcgataacccgaaggtccgtgaggcgctgaattacgccattaaccgtccggcgctggtgaaagttgcctttgcgggctatgcaacgccagctactggtgtggtaccgccaagtatcgcctacgcgcaaagttataaaccgtggccttacgatccagtgaaagcgcgcgaattactgaaagaggcgggatatcccaacggtttcagtaccacgctgtggtcgtcacataaccacagcaccgcgcagaaagtgctgcaatttacccagcagcagttagcgcaggtcgggattaaagcccaggtgaccgcgatggatgccggacagcgggcggcagaagttgaaggtaaagggcaaaaagagagcggcgtgcggatgttctacactggctggtcggcttcaaccggcgaagcggactgggcgctatcgccactgttcgcctcgcaaaactggccaccgacgctgtttaataccgcattttacagcaataaacaggtggacgacttcctggctcaggcactgaaaactaatgatccggcggaaaagacccgcttgtataaggcggcgcaggatatcatctggcaagagtcgccgtggatcccgctggtggtagaaaaactggtgtcggcacacagtaaaaacctgaccggtttttggatcatgccagacaccggcttcagctttgaagacgcggatttgcaataa

SEQ ID NO: 482961 - DNA, 1872 bp, Shigella sonnei
ttgccacacagtgatgaacttgatgccggtaatgtgctggcggttgaaaatctgaatattgcctttatgcaggaccagcagaaaatagctgcggtccgcaatctctcttttagtctgcaacgcggtgagacgctggcaattgttggcgaatccggctccggtaagtcagtgactgcgttggcattgatgcgcctgttggaacaggcgggcggtttagtacagtgcgataaaatgctgttgcagcggcgcagtcgcgaagtgattgaacttagcgagcagagcgctgcacaaatgcgccatgttcgcggtgcggatatggcgatgatatttcaggagccgatgacatcgctgaacccggtatttactgtgggtgaacagattgccgaatcaattcgtctgcatcagaacgccagtcgtgaagaagcgatggtcgaggcgaagcggatgctggatcaggtacgcattcctgaggcacaaaccattctttcacgttatccgcatcaactctctggcgggatgcgccagcgagtgatgattgcgatggcgctgtcatgccgcccggcggtgctgattgccgatgagccaaccaccgcgctggatgtcactattcaggcgcagatcctgcaattaatcaaagtattgcaaaaagagatgtcgatgggcgttatctttatcactcacgatatgggcgtggtggcagagattgccgatcgggtactggtgatgtatcagggcgaggcggtggaaacgggtaccgtcgaacagatttttcatgcaccgcaacatccttacacccgtgcgctgttagctgctgttccgcaacttggtgcgatgaaagggttggattatccccgacgtttcccgttgatatcgcttgaacatccagcgaaacaggccccccccatcgagcagaaaacggtggtggatggcgaacctgttttacgagtgcgtaatcttgtcacccgtttccctttgcgcagcggtttgttgaatcgcgtaacgcgggaagtgcatgccgttgagaaagtcagttttgatctctggcctggcgaaacgctatcgctggtgggcgagtctggcagcggtaaatccactaccgggcgggcgttgctgcgcctggtcgaatcgcagggcggcgaaattatctttaacggtcagagaatcgataccttgtcacccggcaaacttcaggcattgcgccgggatattcagtttatttttcaggacccttacgcttcgctggacccacgtcagaccatcggtgattcgattatcgaaccgctgcgtgtacacggtttattgccaggtaaagacgcggctgcacgcgttgcgtggttgctggagcgcgtgggcctgttacctgaacatgcctggcgttacccgcatgagttttccggcggtcagcgccagcgcatctgcattgctcgcgcgttggcattgaatccaaaagtgatcattgccgacgaagccgtttcggcgctggatgtttctattcgcgggcagattatcaacttgttgctcgatctccagcgtgatttcggcattgcgtatctgtttatctcccacgatatggccgtggtagagcggattagtcatcgtgtggcggtgatgtatctcgggcaaattgttgaaattggtccacggcgcgcggtcttcgaaaacccgcagcatccttatacgcgtaaattactggcggcagttccggtcgctgaaccgtcccgacaacgaccgcagcgtgtactgctgtcggacgatcttcccagcaatattcatctgcgtggcgaagaggtggcagccgtctcgttgcaatgcgtcgggccggggcattacgtcgcacaaccacaatcagaatacgcattcatgcgtagataa

SEQ ID NO: 482962 - DNA, 966 bp, Shigella sonnei
atgggcaaagcagtcattgcaattcatggtggcgcaggtgcaattagccgcgcgcagatgagtctgcaacaggaattacgctacattgaggcgttgtctgccattgttgaaaccgggcagaaaatgctggaagcgggcgaaagtgcgctggatgtggtgacggaagcggtgcgtctgctggaagagtgtccactgtttaacgccggaattggcgctgtctttacgcgtgatgaaacccatgaactggacgcctgtgtgatggatggtaacaccctgaaagccggtgcggtggcgggcgttagtcatctgcgtaatccggttcttgccgcccggctggtgatggagcaaagcccgcatgtgatgatgattggcgaaggggcagaaaattttgcgtttgctcgtggcatggagcgcgtctcgccggagattttctccacgcctttgcgttatgaacaactactggcagcgcgcaaggaaggggcaaccgtcctcgaccatagcggtgcgccactggatgaaaaacagaaaatgggcaccgtgggggccgtggcgttggatttagacggcaatttggcggcagccacgtccacaggcggaatgaccaataaattacccggacgagttggcgatagtcccttagtgggtgccggatgctacgccaataacgccagtgtggcggtttcttgtatcggcacgggcgaagtcttcatccgcgcgctggcggcatatgacatcgccgcgttaatggattacggcggattaagtctcgcggaagcctgcgagcgggtagtaatggaaaaactccctgcgcttggcggtagcggtggcttaatcgctatcgaccatgaagggaatgtcgcgctaccgtttaacaccgaaggaatgtatcgcgcctggggctacgcaggcgatacgccaaccaccggtatctaccgtgaaaaaggggacaccgttgccacacagtga

SEQ ID NO: 482963 - DNA, 1236 bp, Shigella sonnei; identical to SEQ ID NO: 458508

SEQ ID NO: 482964 - DNA, 750 bp, Shigella sonnei
atggcggaactcagcgatcaggagatgctgcgctacaaccggcaaatcattctgcgcggttttgattttgacggtcaggaggcgctaaaagattctcgtgtgctgatcgtcggcctcggtggactcggctgcgcagcttcgctgtatctggcaagcgccggtgtcggcaacctgacgctgctcgacttcgacacggtttcgctctcgaatctgcaacgccagacactgcacagtgatgccacggtcgggcaaccgaaggtggaatccgcccgtgacgccctgacgcggatcaacccacatatcgcgattacgccagtcaatgcactgctagatgacgcagaacttgcagcattgattgctgaacacgatctggtgctcgactgtacggataacgttgcggtacgtaatcaactgaacgcaggctgttttgccgcgaaggtgccgctggtttccggcgcggcaattcgtatggaagggcaaatcacggtcttcacttatcaggacggcgaaccgtgctatcgctgccttagccgtttgtttggcgagaacgcattaacctgcgtagaagcaggcgtgatggcaccgttgatcggcgtaattggttcgttgcaggcaatggaagcgatcaaactgctggcaggttatggcaaaccgaccagcgggaaaatcgtcatgtacgatgcgatgacctgtcagtttcgcgaaatgaaactgatgcgcaatccggggtgtgaggtgtgcgggcagtaa

SEQ ID NO: 482965 - DNA, 663 bp, Shigella sonnei
atggaactgtatctggatacttcagacgttgttgcggtgaaggcgctgtcacgtatttttccgctggcgggtgtgaccactaacccaagcattatcgccgcgggtaaaaaaccgctggatgttgtgcttccgcaacttcatgaagcgatgggcggtcaggggcgtctgtttgcccaggtaatggctaccactgctgaagggatggtgaatgacgcacgtaaattgcgttctattattgcggatatcgtggtgaaagttccggtgaccgccgaggggctggcagctattaagatgttaaaagcggaagggattccaacgctgggaaccgcggtatatggcgcagcacaagggttgctgtcggcgctggcaggtgcggaatatgttgcgccttacgttaatcgtattgatgctcagggcggtagcggcattcagactgtgaccgacttacaccagttattgaaaatgcatgcgccgcaggcgaaagtgctggcagcgagtttcaaaaccccgcgtcaggcgctggactgcttactggcaggatgtgaatcaattactctgccactggatgtggcacaacagatgattagctatccggcggtggaagccgctgtggcgaagtttgagcaggactggcagggagcgtttggcagaacgtcgatttaa

SEQ ID NO: 482966 - DNA, 900 bp, Shigella sonnei
atgattttcaatattcagcgctactcgacccatgatggccccggtatccgcacggtcgtatttcttaaaggctgttcgctgggctgccgctggtgtcagaacccggaaagccgcgcccgcacgcaggatctgctgtatgacgcacgactgtgtctggaaggctgcgagctgtgcgctaaggccgcgccggaagtgattgagcgcgcgctgaatggtttgcttattcatcgggaaaagttaaccccggagcatctgacggcgttaaccgactgctgtccgacacaggcattaaccgtgtgtggtgaagtgaaaagcgttgaggagatcatgacgaccgttctgcgcgataaaccgttttacgatcgcagcggcggcggtttaacgctttcgggtggtgagccctttatgcagccggaaatggcgatggcgctactgcaagccagccacgaggcaggcattcatactgcggtagaaacctgtctgcatgtgccgtggaaatatatcgccccttctctgccctatatcgatctgtttcttgccgatttaaaacacgttgccgacgcgccgtttaaacagtggaccgacggtaacgccgccagagtgctggataacctgaaaaaactcgccgcagcgggcaaaaaaatcattatccgcgtgccgctgattcagggctttaatgccgacgaaacctctgtaaaagctattaccgattttgccgccgacgagctgcacgttggcgaaattcatttcctgccctaccacacgctaggcatcaacaaatatcacttacttaatctgccctatgacgccccggaaaaaccgcttgatgcgccagaactgctcgactttgcccagcagtatgcctgccagaaagggttaaccgcgaccttacgaggataa

SEQ ID NO: 482967 - DNA, 2433 bp, Shigella sonnei
atgaccacactgaaactggacacgctcagcgaccgcattaaagcgcacaaaaatgcgctggtgcatattgtgaaaccgccagtctgtaccgagcgcgcgcagcactataccgagatgtatcaacaacatctcgataagccgatcccggtacgtcgcgcgctggcactggcgcatcacctggcgaatcgcaccatctggatcaaacacgatgagttgatcattggcaaccaggcaagcgaagttcgcgccgcgccgatcttcccggaatatactgtctcgtggatcgaaaaagagattgatgatctggcagatcgtcccggtgctggctttgcggtgagcgaagagaacaaacgcgttctgcatgaagtgtgcccgtggtggcgcggtcagaccgtacaggatcgctgctacggcatgtttaccgatgagcaaaaaggtctgctggcgaccggaatcattaaagcggaaggcaatatgacctccggcgatgcgcacctggcggtgaatttcccgctgctgctggaaaaaggtcttgatggtctgcgcgagaaagtagcggaacgtcgctcgcgcatcaatctgacggtactggaagatttgcacggcgaacagttcctgaaagcgattgatatcgtgctggtggcagtcagcgaacacattgaacgttttgcagccctggcgcgtgaaatggccgcgaccgaaacccgcgaaagccgtcgcgatgaactgctggcgatagcagaaaactgcgatcttatcgcccaccagccgccgcagactttctggcaggcgctgcaactgtgttacttcatccaattgatattgcagatcgaatctaacggtcactcggtatcgtttggtcgtatggaccagtatctctacccgtactatcgccgcgacgttgaactcaaccagacactggatcgcgaacacgccatcgaattgctgcatagctgctggctgaaactgctggaagtgaacaagatccgctccggctcacactcaaaagcctctgcgggaagtcctctgtatcagaacgtcaccattggcggacaaactctggttgatggtcaaccaatggacgcggtgaatccactctcttacgctatcctcgaatcctgcggtcgcctgcgttccactcagcctaacctcagcgtgcgttaccatgcaggaatgagtaatgatttcctcgacgcctgcgtacaggtgatccgttgcggcttcgggatgccggcgttcaacaacgacgaaatcgtgatcccggaatttattaaactcggtattgaaccgcaggacgcttacgactacgcagcgattggttgtatcgaaaccgccgtcggtggcaaatggggctatcgctgtaccggcatgagctttatcaacttcgcccgcgtgatgctggcggcgctggaaggcgggcgtgatgccaccagcggcaaagtgttcctgccacaagaaaaagcgttgtcggcaggcaactttaacaatttcgatgaagtaatggacgcgtgggatacgcaaatccgttattacacgcgtaaatcaatcgaaatcgaatatgtcgtcgacaccatgctggaagagaacgtgcacgatattctctgctcggcgctggtggatgactgtattgagcgagcgaaaagtatcaagcaaggcggcgcgaaatatgactgggtttctggcctgcaggttggcattgccaacctcggcaacagcctggcggcagtgaagaaactggtatttgaacagggcgcgattggtcagcaacagctggctgccgcactggcggatgacttcgatggcctgactcatgagcaactgcgtcagcggctgattaacggtgcgccgaagtacggcaacgacgatgataccgtcgatacgctgctggctcgcgcttatcagacctatatcgacgaactgaaacagtaccataacccgcgctacggtcgtggtccggttggcggcaactattacgcgggtacctcgtctatctccgctaacgtaccgtttggcgcgcaaactatggcaacaccggacgggcgtaaagcccacaccccgctggcagaaggcgcaagcccggcctccggtactgaccatcttggccctactgcggtcattggctcagtgggtaaactgcctacggcagcgattctcggcggcgtgttgctcaaccagaaactgaatccggcaacgctggagaacgaatctgacaagcagaaactgatgatcctgctgcgtaccttctttgaagtgcataaaggctggcatattcagtacaacatcgtttcccgcgaaacgctgctggaggcgaaaaaacatccggatcagtaccgcgatctggtagtgcgtgtcgcgggctattccgccttcttcaccgcgctctctccagacgcacaggacgatatcatcgcccgtactgaacatatgctgtaa

SEQ ID NO: 482968 - DNA, 816 bp, Shigella sonnei
atgagcgtaaaagttatcgtcacagacatggacggtacttttcttaacgacgccaaaacgtacaaccaaccacgttttatggcgcaatatcaggaactgaaaaagcgcggcattaagttcgttgtcgccagcggtaatcagtattaccagcttatttcgttctttcctgagctaaaggatgagatctcttttgtcgcggaaaacggcgcactggtttacgaacatggcaagcaactgttccacggcgaactgacccgacatgaatcgcggattgttattggcgagttgctaaaagataagcaactcaattttgtcgcctgcggtctgcaaagtgcatatgtcagcgaaaatgcccccgaagcatttgtcgcactgatggcaaaacactaccatcgcctgaaagctgtaaaagattatcaggagattgacgacgtactgttcaagttttcgctcaacctgccagatgaacaaatcccgttagtgatcgacaaactgcacatagcgctcgatggcattatgaaacccgtcaccagtggttttggctttatcgacctgattattcccggtctacataaagcaaacggtatttcgcggttactgaaacgctgggatctgtcaccgcaaaatgtggtagcgattggcgacagcggtaacgatgcggagatgctgaaaatggcgcgttattcctttgcgatgggcaatgctgcggaaaacattaaacaaatcgcccgttacgctaccgatgataataatcatgaaggcgcgctgaatgtgattcaggcggtgctggataacacatccccttttaacagctga

SEQ ID NO: 482969 - DNA, 1077 bp, Shigella sonnei
atggcttctacttttaccagcgacacattgcctgccgatcacaaagcagctatccgtcagatgaagcacgcgctgcgggcgcagcttggcgacgtccagcagatctttaatcagctaagcgatgacattgccacgcgagtggctgaaatcaacgcactcaaagcacagggcgatgccgtctggccggtgctgtcttatgccgatatcaaagcaggtcatgttactgcagagcagcgcgaacagattaaacgtcgcggttgtgcggtgataaaaggccatttcccccgcgaacaagcgctaggctgggatcagtcgatgctggactatctggaccgcaaccgctttgacgaggtctacaaaggccccggcgataatttcttcgggacgctcagcgcttcacgtcccgagatttaccccatctactggtcgcaggcgcaaatgcaggcccgccagagtgaagaaatggcgaatgcgcagtcgtttctcaatcgtctgtggacatttgaaagtgatggaaagcaatggtttaacccggatgtgagcgtcatctaccctgaccgtatccgccgccgtccgcccggaacgacctccaaaggtcttggagcgcataccgactccggggcgctggaacgctggctgcttccagcgtatcagcgcgttttcgccaacgtctttaatggcaatctggcgcaatatgatccctggcatgcggcacatcgtacggaagttgaagagtacacggtggacaacaccaccaaatgttccgtgtttcggacattccaaggctggacagcgctctctaatatgctgcctggtcaggggctgctgcacgttgtgcccattcctgaagccatggcgtacgtactgttacgtccgctgcttgatgatgtgccggaggatgaactgtgcggcgtagcgcccggaagagtgttgccggtatcagagcaatggcatccactgttaattgaggcgttaaccagcattccaaaactcgaggccggagactccgtctggtggcactgcgacgtcatccattccgttgcccccgttgaaaatcaacagggttgggcaacgtga

SEQ ID NO: 482970 - DNA, 189 bp, Shigella sonnei
atgtacattcctgcggcaccaatgtgcgagaaaaatcttgcctacgcgcacaaggtgaaggccgcactggaaaaaggcgcatcgccgggcgacttcccgcgcgaggactatgaaacaaactgggaaggacgctttacgcttgccgacctcaacattcacggtaagcgagcgttgggaatcgacagctga

SEQ ID NO: 482971 - DNA, 1173 bp, Shigella sonnei
atgccagacagaatgggcttttttgctcatgaaaattctgtcatttccgaattagaggcagatcacaaaatggacaagaagctgaaaatcgccgatatcgccgcacgtaccgggctatcgccgagtacggtttcgcgggtgctggctggcaaagcgaataccagtgcacgcgctcgcgaacaggtgctggcctgcgcgcgtgagttgggcgtgatggatggcatggcagcaggtcgtatgttgctgaacaacctgattattttcgcgccgcaacgcgcttttgaccaacgatctgatatcttttattaccgtgtgatccagagcatcagcaaagcgttatcgccgcatgaagtgcggctgcgttactgcgcgctggaggagtttgacagcgatcccgcgctctttctctcgcggatgaatgaagcagatacgcaggcagcgatcctgctggggattgacgatccgcacatccatgatctggccgccgatctcgctaagccttgtgtgctgatcaactgccgtgatgaacgaatgcgcctcccggcgattgcgccggatcatcggttaattggcgcgttcgccgcccgctatctgtttgaaatgggtcaccgggaggtgatgaatgtgatgtgcctgcgccgctacactatggagcagcggtttgcagggattaaagaatcatggcgtcagcataatctggcctttcaccatgaccgtcatttgctgaatatcagcagttttagcgctaaagaagcggaagaaaaggtcggagcgtggctggatgccgccaatggcaagacgttgccgacggcgtttctggtcggcggggattttatggcggcgggaacggtaaatgcgctacatcgtcgtggtctgcgcgtaccacaggatgtctcggtgatgagtatcgacggctttaaccttgcggcaatcgaggatgttcccctgacggctgtgcatgtgccacgcgatgagctaggcaatgaagcggtgcaaatgttgcaacagcggctgattcgcccggatgctccggtgggctcgctgctgctgcacggacgattggcggtgcgggagtcagtgcggcgggttcgcccaggaaaagggaacaccgccgtggaacgggaagggctgtacgacactcagctgtcgattcccaacgctcgcttaccgtga

SEQ ID NO: 482972 - DNA, 1302 bp, Shigella sonnei
atgagtcagggtatcaataacgatatgactgccagtaaaccgcgccatatcgtcaaaaatctgcgttggtggatactggtcctttttttgctcggtgttactgtcaactacatcacgcgtaactcgctgggtattctcgcccccgaactgaaaagcagcctagggattaccaccgaacaatattcctggattgtaggtgctttccagctcgcctataccctattccaaccgttgtgcggatggctgattgacgtcattggcctcaaactgggctttatgatctgcgcgggactgtgggcactggcctgtctgatgcatgcgggggcgggaaactggggacatctggcgctgttgcgcttctttatgggcggtgcggaagccgcggcaaccccagcaaacgccaaaaccatcggtgaatggtttccaaaatcagaacgcccgatcgccgcaggctgggcaggcgtcggtttttccatcggtgccatgctggccccaccgattatctattttgcccacgcttcattcggctggcagggtgcatttatgttcactggcatcctggcgatgctgtgggtggtgctgtggtgggcgttctatcacagcccggataagcatcctaacctcagcaaagccgagctggactttattcgccaggataacgaagcgcccccggtcaagttaccctttctgaccgcactgaaaaccgtgggcaaaaataaacgcttttacggtatcgctatcccggcctttatggcagaaccggcgtgggcggtgatgagtttctgggtgcctctatacctgtccaaaacctatggcatggacctgaagcagatcgcattattcgcctggttgccgttcctcgccgctgatcttggcagtattgccagcggctatctgaccaaactttacacccgcctgtttgggctgagtcgtgtgaactccgttgtcgcatcatcggtcagtggcgcattcttgatggtttcgctggcggtgatggcctttaccaataacccgtatatcgccatcgtccttatctccatcggcggcttcggtcaccagatcatctcctgcatgctgagcgcactggtggtggaatccttcgacaaaggtcagatggccactgttaacggcatgcgcggttctgccgcgtggatcgcaagtttcctgttctccctgattatcggggttaccgctgacaaaatcggctttaaccccctgtttatcgccatgggcttctttgacctgattggcgctttcttcctggtcacctttattgctgaacgtcgcgcaaaacgcgcctga

SEQ ID NO: 482973 - DNA, 2364 bp, Shigella sonnei
atgaaaacgctgaaaaactggaccctgcacaaacagtctgcccaccacgttgaactgctggtcgatggccagcatatcctgtgcctgtacgtgctggaagaaaatctgttccgcgtgctgttaaaacgcaaaggcgagctggcgctagatcgcacctggagcattgctccggcgcaggatgtgccatgggaagggcgcagccgcgaagatctcagcggctttagcctgcccgcgtggacagtgatccagcacgacgacaccgtggttatcgccaccgagtcactgcgtgcaaccgttcaccagccgctgtggctggagtggcactatcgtaacaacgaaggcgaatggctgccgttggtgaatgaccgcccgaccagcgcttatctgctgaatgcccacggcgatggcgtggcacactatcagagccgtcgtaaagatgaacgcttttatggcctcggagataaagccggcgatctgcaacgcaacggtaaacgttacgagatgcgtaacctcgacgcgatgggctacaacgccgttagtactgacccgctgtacaaacacattccattcaccatcacccgccgcgatgacattagcttcggcctgttttatgacaacctcagcagctgctggctggatctgggcaacgagatcgacaactaccacaccgcctatcgccgctggcaggcggaagcgggtgatatcgactactacctgtttaccggcgaacgcgtacttgatatcaccaaagccttcgtacgcctgaccggaaaaaccctgttcggaccgaaatggagcctgggctacagcggttcaactatgcactacaccgatgcgccggacgcacaaaatcagttgatgaactttatccgcctgtgtgaagaacatgcaattccctgcgattcgttccagctctcttccggttatacctcaattaacggcaaacgctatgtgttcaactggaactacgacaaagtgccgcagccgaaagtgatgagccaggcatttcacaatgctggtttgcacctggccgccaatatcaagccgtgcctgttgcaggatcacccacgctataacgaagtggcagaaagaggactgttcatccgtgattcagaaacagatgaaccagaacgttccagcttctgggatgacgaaggttctaacctcgagtttactaatccgcagaccatccagtggtggcaggaaggcgtgaccacacagcttctggagatgggtatcgactccacctggaacgacaacaacgaattcgaagtatgggacggtgaagcacgctgtcacggctttggtcagacgatcgcgatcaaacatattcgcccagtgatgccactgctgatgatgcgagcctcgatggaagcccagcagcgtttcgctccggaaaaacgtccgtacttgatctcccgctccggctgcgcgggaatgcagcgctacgtgcagacctggagtggcgataaccgcactagctgggacactctgcgctacaacacccgcatgggtctggggatgagcctctccgggctgtataacctcggtcacgacgtcggcggtttctccggtgataagccggacccggaactgtttgtacgctgggtacaaaacggcgtgatgcatccgcgctttacgattcactcatggaacgatgaccataccgtaaacgaaccgtggatgtatccgggcgtcactccggcgatccgcagcgctattgagttgcgctatcgcctgctgccctacttttataccctgatgtggcaggcatacgccgatgatgaaccaatgctacgtccgactttccttgaccacgagcacgacgttcagacttttgaagagtgtgatgacttcctgcttggtcgcgatattttggttgccagcgtcgtagagcaaggcgagcgccagcgccgtgtatggctgccagataacgaaactggctggtacgatttctacaacggcgaatggttcagtggcggtcagtggatcaccctcgacgcaccgctggagaaactgccgctgatggttcgtgccggggctggtctaccgctcagcaaacgcatcacctatgtgagcgcagaacaagacgatacccgcgaactgaaactgttcccgctgaaaggtgtgggcacaacgtccggcctgctgtttgaagacgatggcgaaagctggggctaccaaactggtaatgcgctttgggtggaatgggaaatggtttgcgatggggcgaccatcaacctgaaagtcaacgcgcgcggggattatcgtcctgcatggagtgcactgaaagtgtcattaccattggaagaaaaacgcacgctgctggtcaatggtgttgaagggagtgaatggatgcgttaa

SEQ ID NO: 482974 - DNA, 1596 bp, Shigella sonnei
gtgttagtttccagtaacgtcaccatgcagttcggcagtaagccgttgtttgaaaacatttccgtcaaattcggcggcggcaaccgttacggcctgattggcgcgaacggtagtggtaaatccacctttatgaagatcctcggcggcgacttagagccgactttgggtaacgtttccctcgatcccaacgagcgcattggtaagctgcgtcaggatcagtttgcctttgaagagttcactgtgctggatacggtgatcatggggcataaagagttgtgggaagtgaagcaggagcgtgaccgcatctatgctttgccggaaatgagtgaggaagacggctataaagtggccgatctggaagttaaatacggcgaaatggacggttactctgcggaagctcgcgccggtgaactgttgcttggcgtgggaattccagtggaacagcactacggcccgatgagtgaagttgctcctggctggaaactgcgtgtgcttctggcgcaggcgctgtttgctgatccggatattctcctgctcgacgaaccgaccaacaacctcgacatcgacaccattcgctggctggaacaggtgctgaacgagcgtgacagcaccatgatcatcatctcgcacgaccgtcacttccttaacatggtctgtacccacatggcggatctggattacggcgagctgcgcgtttatccgggtaactacgatgagtacatgacggcggcgacccaggcgcgtgaacgtctgctggccgataacgccaagaagaaagcgcagattgctgagttgcaatctttcgttagccgctttagcgccaacgcctcgaaatctcgccaggcaacttcgcgcgcgcgccagattgataaaatcaaactggaagaggtgaaagcctccagccgtcagaacccgttcatccgttttgaacaggataagaaactgttccgtaacgcgctggaagtggaaggtctgaccaaagggtttgataacggtccactgtttaaaaatctcaacctgctgctggaggtcggtgaaaaacttgcggtactgggtaccaacggcgtcggtaaatcaacgctgctgaaaacgctggtgggcgatctgcaaccggacagcggcaccgtaaaatggtctgaaaacgcgcgcattggttactacgcccaggaccacgaatatgagtttgaaaatgatctgaccgtgttcgaatggatgagtcagtggaagcaggaaggcgatgacgagcaggcggtacgcagcattctcggtcgtttgctgttcagccaggacgacatcaaaaagccagctaaagtgctttccggtggggaaaaagggcggatgctgtttggtaagttaatgatgcagaagccgaacattctgatcatggacgaaccgaccaaccacctggatatggaatccatcgagtcactgaacatggcgctggaactgtatcagggcacgctgatctttgtttcacacgaccgtgagttcgtaagctccctggcgacccgcattctggaaatcaccccggaacgcgcgatcgactttagcggtaattacgaagattacctgcgtagtaaagggatcgacgcttaa

SEQ ID NO: 482975 - DNA, 921 bp, Shigella sonnei
atgaatatgaaattgaaaacattattcgcagcggccttcgctgttgtcggcttttgcagtaccgcctctgcggtaacttatcctctgccaaccgacgggagtcgcctggttggtcagaatcaggtgatcaccattcctgaaggtaacactcagccgctggagtattttgccgcggagtaccagatggggctttccaatatgatggaagcgaacccgggtgtggataccttcctgccgaaaggcggtactgtactgaacattccgcagcagctgatcctgccggataccgttcatgaaggcatcgtcattaacagtgcagagatgcgtctgtattactatccgaaagggaccaacaccgttatcgtgctgccgatcggcattggtcagttaggcaaagatacgcctatcaactggaccaccaaagttgagcgtaagaaagcaggcccgacctggacgccgaccgccaaaatgcacgcagagtaccgcgctgcgggcgaaccgcttccggctgtcgttccggcaggtccggataacccgatggggctgtatgcactctacatcggtcgcctgtacgctatccatggcaccaacgccaacttcggtatcggcctgcgtgtaagtcatggttgtgtgcgtctgcgtaacgaagacatcaaattcctgttcgagaaagtaccggtcggtacccgcgtacagtttattgatgagccggtaaaagcgaccaccgagccagacggcagccgttatattgaagtccataacccgctgtctaccaccgaagcccagtttgaaggtcaggaaattgtgccaattaccctgacgaagagcgtgcaaacagtgaccggtcagccagatgttgaccaggttgttcttgatgaagcgattaaaaaccgctccgggatgccggttcgtctgaattaa

SEQ ID NO: 482976 - DNA, 1119 bp, Shigella sonnei
atgagcctgccttttttacgcacgctgcaaggcgatcgtttttttcagttattaattcttgttggtatcggattaagctttttcgtgccctttgcaccgaaatcctggcctgctgctatcgactggcacaccatcatcaccttaagcggcctgatgctgctgaccaaaggtgtggagttaagcggttattttgatgtgctggggcgcaaaatggtgcgccgctttgctacggagcgtcggctggcgatgtttatggtgctggcggcggcgctgctttctacctttctgaccaacgatgtcgcgctgtttattgttgttccgctgactatcacgctaaaaagactgtgtgagatcccggttaatcggctgattatttttgaggcgctggcagtcaacgctggttcgctactgacgccaattggcaacccgcaaaatattcttatctggggacgttctggtctttcgtttgccggatttattgcccaaatggcaccgctggctggcgcaatgatgctgacgctcctgctcctgtgctggtgttgtttccctggaaaggcgctgcaataccatacgggggtgcaaacaccggagtggaaaccgcggctggtgtggagttgtctggggctgtatatcgtctttctgacggcgctggagttcaaacaagagctgtggggactggtgattgtggcggcaggctttgcgctgctggcacgtcgcgtggtgctcagtgtggactggacgctgctgctggtgtttatggcgatgtttatcgacgtccatttactgacccagcttccagcgttgcaaggcgtgttgggtaacgtgagtcatctatctgaacccgggttatggttaacggcaatcggtttatcgcaggtgatcagtaacgtgccgagtaccatattgttgctgaactatgtgccgccgtctttattactggtatgggcggtaaacgtaggtggctttgggttattacccggatcgctggcaaatttgattgcgctacgtatggcgaacgatcgccgcatctggtggcgtttccatctctattcaataccgatgctgttgtgggcggcgttggtgggatatgttttgttagttatactcccggccaactag

SEQ ID NO: 482977 - DNA, 468 bp, Shigella sonnei; identical to SEQ ID NO: 458518

SEQ ID NO: 482978 - DNA, 129 bp, Shigella sonnei
atgaatgagttcaagaagtgtatgcgcgtgtttagtcattctccctttaaagtacggttaatgctgctctctatgttgtgcgatatggtcaacaacaaaccgcagcaagataaaccttccgataaatag

SEQ ID NO: 482979 - DNA, 1584 bp, Shigella sonnei
atgaatttaaccctcaaagaatcgcttgttacccgtagccgggtatttagcccgtggactgcgttctactttttacagtcgctattaattaacctcggcttaggttaccccttcagtttgctctacaccgctgcgtttacggctattttgcttttgctatggcgaacattgcctcgcgtacaaaaagttctggtcggtgtcagttcgctggtggcggcttgttatttcccttttgctcaggcctacggcgcgcctaatttcaatacattgctggcattgcactccaccaatatggaagagtcgaccgaaatcctgacgatttttccgtggtacagctacctggtcggcttatttatttttgcgctcggcgtaatagcaatcaggcgaaaaaaagagaatgaaaaagcgcgctggaataccttcgacagcctgtgtctggtattcagtgtggcgacattttttgttgctcccgtgcaaaacctggcctggggtggcgtatttaaactgaaagatactggctatccggtatttcgttttgctaaggatgtcatcgtcaataataacgaggtgattgaagagcaagaacggatggcaaaactttccggaatgaaagatacctggacggtcactgccgttaagccgaagtatcagacctatgtggtggtgatcggcgaaagcgcgcgtcgcgatgccctcggtgcctttggcggtcactgggacaataccccgtttgccagcagcgttaacggtttgatatttgctgactacattgccgccagtggctccacgcagaaatcacttggcttaacgctcaatcgcgtagtcgatggcaaaccacagtttcaggataactttgtcaccctggcaaatcgcgcgggcttccagacctggtggttttccaaccagggccaaatcggcgaatacgatactgctatcgccagcatcgccaaacgtgcagatgaagtgtacttcctgaaagaaggtaattttgaagcagataaaaacacgaaagacgaagcgttactggatatgaccgctcaagtgctggcgcaagagcactcgcaaccgcagctgattgttctgcatctgatgggctcgcatccgcaggcctgcgacaggacacaaggcaaatacgaaacctttgtgcaatcgaaagaaacgtcgtgctatctctataccatgacgcaaacggacgatttactgcgcaagctgtacgatcagttacgcaacagcggcagcagcttctctctggtttacttttctgaccacggtctggcctttaaagagcgcggcaaagacgtgcaataccttgcccatgatgataaatatcagcaaaatttccaggtgccttttatggtcatttccagcgacgataaagcgcatcgggtgattaaagcccgccgctcagccaatgacttcttaggctttttctcgcagtggacgggaattaaagcgaaggaaataaatatcaaatacccgtttatatctgagaagaaagccgggccgatatacatcaccaacttccagttacagaaggtggattacaaccatctcggaaccgatattttcgacccgaaaccttaa

SEQ ID NO: 482980 - DNA, 516 bp, Shigella sonnei
atgaaaaaaattgcatgtctttcagcactggccgcagttctggctttcaccgcaggtacttccgtagctgcgacttctaccgtaactggcggttacgcacagagcgacgctcagggccaaatgaacaaaatgggcggtttcaacctgaaataccgctatgaagaagacaacagcccgctgggtgtgatcggttctttcacttacaccgagaaaagccgtactgcaagctctggtgactacaacaaaaaccagtactacggcatcactgctggtccggcttaccgcattaacgactgggcaagcatctacggtgtagtgggggtgggttatggtaaattccagaccactgaatacccgacctacaaacacgacaccagcgactacggtttctcctacggtgctggtctgcagttcaacccgatggaaaacgttgctctggacttctcttacgagcagagccgtattcgtagcgttgacgtaggcacctggattgccggtgttggttaccgcttctaa

SEQ ID NO: 482981 - DNA, 888 bp, Shigella sonnei
atgcctggttcattacgtaaaatgccggtctggttaccaatagtcatattgctcgttgccatggcgtctattcagggtggagcctcgttagctaagtcactttttcctctggtgggcgcaccgggtgtcactgcgctgcgtctggcattaggaacgctgatcctcatcgcgttctttaagccatggcgactgcgctttgccaaagagcaacggttaccgctgttgttttacggcgtttcgctgggtgggatgaattatcttttttatctttctattcagacagtaccgctgggtattgcggtggcgctggagttcaccggaccactggcggtggcgctgttctcttctcgtcgcccggtagatttcgtctgggttgtgctggcggttcttggtctgtggttcctgctaccgctggggcaagacgtttcccatgtcgatttaaccggctgtgcgctggcactgggggccggggcttgttgggctatttacattttaagtgggcaacgcgcaggagcggaacatggccctgcgacggtggcaattggttcgttgattgcagcgttaattttcgtgccaattggagcgcttcaggctggtgaagcactctggcactggtcggttattccattgggtctggctgtcgctattctctcgaccgctctgccttattcgctggaaatgattgccctcacccgtttgccaacacggacatttggtacgctgatgagcatggaaccggcgctggctgccgtttccgggatgattttcctcggagaaacactgacacccatacagctgctggcgctcggcgctatcatcgccgcttcaatggggtctacgctgacagtacgcaaagagagcaaaataaaagaattagacattaattaa

SEQ ID NO: 482982 - DNA, 504 bp, Shigella sonnei; identical to SEQ ID NO: 458523
